United States Patent Application Publication US 2024/0327476 A1 - sequence listing, part 116

SEQ ID NO: 221292 - DNA, 4656 bp, synthetic construct
  misc_feature 1..4656: note = Description of Artificial Sequence: Synthetic coding sequence
  source 1..4656: mol_type = other DNA
atgggattttgtttggctttggcttggaccctgctcgtgggcgcatggacgccattaggagcccagaatcccatctcctgggaagtccagcgattcgacggttggtataataatctgatggagcaccgctggggctccaaaggctctagactgcagagactcgttcctgcctcctacgccgatggcgtatatcaacccttgggcgagccccacctgccaaacccacgagacctgagtaacaccattagccgcggtccagctggattggcaagcctgaggaacagaacagtccttggggtctttttcggttaccacgtccttagcgacttggtctccgtagaaacccccggttgtcccgcagagttcctgaacataaggatccccccaggggaccctatgtttgatcctgaccagagaggagatgtcgttctcccttttcaacgctctcgctgggacccagaaacaggtcgaagcccgtccaatcctagggaccctgctaaccaagttacaggctggctcgacggcagtgctatctacgggtcatcacactcttggtccgatgcgctacgaagttttagccggggtcagctggcttctggcccagacccagcatttcccagagacagtcaaaacccacttctaatgtgggccgctcctgatccggctactggacagaacggccctagaggattgtatgctttcggagcggaacgaggaaacagggagccatttctgcaggcgctgggactgctgtggtttagataccataacttatgggcacaacggctagccagacagcatcctgactgggaggacgaagaactgttccaacatgccagaaagcgagtcattgctacttatcaaaatatcgcagtttatgaatggctgccctccttcctgcaaaaaaccctgcccgaatacaccggctatcggccattccttgaccctagcataagctccgagttcgtagcagcctccgagcagttcctgtctaccatggttcctcctggggtgtacatgaggaacgcatcttgtcactttcagggagtcatcaacaggaatagcagtgtttctagagccctgagagtttgcaacagctactggtcccgtgagcatccctccctgcagtccgcagaggacgtggacgcgctgctgctcggcatggccagtcaaattgctgaacgagaggatcacgtgctcgtagaggatgtcagggacttctggcccggacctctaaagttctcccggaccgaccacctggcgtcgtgtctgcagcgtggcagagatttaggcctgccatcttacacaaaggccagagctgcgctcggcctgagccctatcaccagatggcaggatattaaccccgcactgagtcggtccaatgatactgttttagaagcgacggctgctctatataatcaggacctcagctggcttgagctgctgcctgggggtttgttggagtcccacagagatccaggcccactgttttccactattgttctggagcagtttgtgcggcttcgagacggagatcgatattggtttgagaacacccgcaacggcctcttcagcaaaaaggagatcgaggagattcgtaacacaacacttcaggatgtgttagtcgccgtgatcaacattgacccttcagctctgcagcctaacgtattcgtctggcacaagggggacccctgcccacagcctagacagctgagtactgaaggcctccctgcctgcgcgccatccgtggtgagagactatttcgagggctctggattcggcttcggcgtaactatcggcactctgtgttgcttccccctggtatccctcctgtccgcatggatcgtcgcgcgactgaggatgagaaatttcaaacggctccaaggacaggacagacagtccatcgtgtccgagaaactagttgggggaatggaggccctcgaatggcagggacacaaggagccttgtagaccagtcctagtttacttgcagcccggtcagatccgcgtggtagacggacgtctgacagtgctgcggaccattcagctccagcccccacagaaagtgaatttcgtgctgagtagcaataggggaaggaggaccttgctgctgaagatacctaaagaatatgatcttgtcctcttatttaatttggaggaagaacgacaggcccttgttgaaaatctgcggggagccttaaaggagagcgggctctcaatccaagaatgggaactgcgggaacaagagttgatgcgggcagctgtcacgagagaacagaggcggcatctcctggaaacgttctttcgtcacctgttcagtcaggttctggacatcaaccaggcagacgccggtacactccctctggacagcagccaaaaagtgagggaggctttaacctgtgagctatcaagggcagagttcgccgaatctcttggactcaaaccacaagatatgttcgttgaaagcatgttctccctcgccgataaggatggcaatggttacctgtcattcagagaatttctcgatatcctcgtagtgttcatgaaaggaagtccagaggaaaagtcccggctgatgtttagaatgtatgacttcgacgggaacgggttgattagtaaggatgagttcatcaggatgctccgctcttttatcgagattagcaacaactgcctgtccaaagcccagcttgctgaggttgttgagtccatgtttagagaaagtggttttcaagacaaggaggagctgacgtgggaagatttccactttatgctcagagatcataactcggaactgcgttttacccagctgtgcgtgaaaggggtggaagtcccagaggtgattaaagatctctgtcgccgagcctcctacatctcacaggacatgatttgcccatccccaagggtgtctgccaggtgttctaggagtgacattgagacagaactgactccccagcggctccaatgtcccatggatactgacccgcctcaggagattagacgtaggttcggtaaaaaggtaacatcatttcagcccctgctgttcaccgaagcccaccgagagaagttccaaagaagttgtctgcatcaaaccgtccagcaattcaaaagatttatcgaaaactaccgcaggcacataggttgtgttgcagttttttatgcaatcgcaggtgggcttttcctagagcgagcctattactacgccttcgccgctcatcatacaggtatcactgacacaactcgcgtcggtatcattttgagcagaggcacagccgcatctataagctttatgttctcgtatattctcctgaccatgtgtaggaatctgatcacctttctgcgcgaaacctttctgaatagatatgttccattcgacgctgcagttgactttcaccggctcattgcatcgacagccattgtactgaccgtgttgcacagcgtcggtcacgttgttaatgtctatctgtttagcatttcaccattgagcgtgctgtcatgcctgttccctggtctgttccacgatgacggaagcgaattgccccagaagtattattggtggtttttccaaacagtcccagggctcactggagttgtgcttctgctcatcttagcgattatgtacgtgttcgcttcccatcattttcggagacggagtttccggggtttttggctcactcatcatctttatattctgctgtacgtactgttaataatccacggctcatttgccctaatccagctcccacgatttcacattttcttcctcgtgccggctattatctacggaggggacaaacttgttagcttatccagaaagaaggtcgagatctccgtcgtgaaagcagaactgctgccgtccggcgtcactcatctgaggtttcaaaggccacagggtttcgagtataagtcgggacagtgggtgaggatagcttgcctggccctcggcacaacggagtaccatccatttactcttacctctgccccacatgaagacacgttgtctctgcacattcgggcagcaggaccctggactacaagattgagagagatttacagcgctccaaccggagacaggtgcgcgaggtacccgaagctttacctggatggtcccttcggagaggggcaccaagagtggcacaagtttgaggtgagcgtcttggtgggaggaggcatcggcgtcacccccttcgcctctatcttgaaagatctcgtttttaaaagctcagtgtcatgccaggttttctgcaagaagatctacttcatatgggtaacacggacgcagagacagtttgaatggctggcagatattatccgagaagtggaggaaaatgatcatcaagacttggtttcggtacacatatacattacccagctggctgaaaaatttgaccttcggactacaatgctgtacatctgcgaacgtcactttcaaaaagtactcaataggtcactttttaccggcttgagatcaatcacacacttcggacgccctccattcgagcccttctttaatagtttacaggaggttcatccgcaggttaggaagatcggggtgttttcctgtggacccccaggcatgactaaaaacgtggaaaaagcctgccagttgatcaacagacaggacagaacacacttctcccaccactatgagaacttctag

SEQ ID NO: 221293 - DNA, 4656 bp, synthetic construct
  misc_feature 1..4656: note = Description of Artificial Sequence: Synthetic coding sequence
  source 1..4656: mol_type = other DNA
atggggttttgcctggctctggcttggaccctgctagtcggtgcttggacacccctgggagcccagaatcccatcagctgggaggtgcagaggttcgatggttggtacaacaacctcatggaacaccggtgggggtccaaaggcagccgcttgcagcgcctggtgcctgcgtcctacgccgatggcgtgtatcaaccgctgggtgagcctcatctccccaatccaagagatctgagcaatacaatcagcagagggccagccggactagcttctctgcggaaccgaaccgttctgggggttttcttcggctaccacgtgttgtctgatttggtctccgtcgagacacctggctgtccagccgagtttctcaatatcagaattccgcctggggacccgatgttcgacccagaccaacgtggggatgtcgtattgccatttcagcgctctaggtgggatcccgaaaccggacgctcccccagtaaccccagagacccggcaaaccaggtaactggttggctggacggcagcgccatatatggcagtagccattcatggagcgacgcactgcggtccttttctcgagggcagctggccagcggtcccgacccggctttcccaagagatagtcaaaatcccctccttatgtgggctgcccctgatcctgccacgggccaaaatggccctaggggactatacgcatttggcgcagagaggggaaaccgggagcctttccttcaagccctcgggctgctgtggtttcggtaccacaatctctgggcacagcgcctcgcgagacaacatcccgattgggaagacgaagagctatttcagcatgcaaggaagagagtgatcgcaacataccagaacatagcagtgtatgaatggcttcccagctttctccaaaagactctgcctgaatataccggctaccggcctttcctggacccatctatttctagtgagttcgtcgcggctagtgaacaatttctgtcgacgatggtacccccaggtgtctacatgcgcaatgcaagctgtcacttccagggcgtcatcaatcggaattcctctgtcagcagagcgctccgggtttgtaatagctattggagcagagaacatccgtctctgcaatctgcagaagacgtggacgccctgctgttgggaatggcttctcagatagccgagcgggaagaccatgtgctcgtggaagacgttagagacttttggcctggcccactgaaattctccagaacagatcacctggcgtcttgcctgcagcggggacgggatctgggactcccaagctatactaaagccagagctgccctcggcctgtctcccatcacccggtggcaagatattaaccccgctctgtctaggtcgaatgatacagttttagaagccaccgcggcactttacaatcaggatctcagctggttggaactactgccgggaggactcttggaaagtcacagagaccctggccctttgttttccaccattgtcctcgagcagttcgtgcgactacgcgatggtgaccgttactggttcgagaacacccgaaatggacttttttcgaagaaggagatcgaggaaattagaaacactactctccaggatgtgctggtagctgtcatcaacatcgacccgagcgctctgcagccaaatgtttttgtgtggcacaaaggcgacccttgcccccagccgagacagctgagtacagaaggactccctgcatgcgcccctagcgtcgtgagggactactttgagggctctggttttgggttcggagttacaatcggaaccctgtgctgttttcccttggtgagtctgctttcggcctggatcgtggccagacttagaatgcgcaacttcaagaggctgcagggacaggatagacagagtattgtatccgagaagttagtgggcggaatggaagcccttgaatggcaaggccataaagagccatgccgccctgtcctggtgtatttacagccaggacaaattcgagtggtggacggcaggctcaccgtcctgcgaactatccagctgcagcccccacagaaagtcaattttgtgctcagttcaaatcgcggaagacgtaccctgctcctgaaaatcccaaaggaatacgatctggtgctcttgttcaacttggaggaggagcgccaagcacttgtggagaatctccgaggagcccttaaggagagtggtttgagcatccaggaatgggagttaagggaacaagagctgatgagagctgccgtgacacgcgagcaacgcagacacctgcttgaaacatttttccgccacctgttcagccaagtgcttgacatcaaccaggctgacgcagggactctgccactggattcctcacagaaggtgagggaagctcttacatgcgagctcagccgcgctgagttcgccgagagcctcgggcttaaacctcaggacatgtttgtggagagcatgttctccttggcagataaagacgggaacggatacctgtcattcagagaattcttggatattcttgttgtatttatgaaaggtagtcctgaagagaaatctcgcctgatgttccggatgtatgatttcgatggaaatggtttgatctctaaagatgaattcattcggatgttgagaagcttcatcgagatatctaacaactgtctttctaaagcacagctggctgaagtggtggaatctatgtttagggagagtggattccaggacaaagaagagctaacatgggaagatttccatttcatgctgagagatcacaatagcgagctgagattcacacagttgtgcgttaaaggggtcgaagtcccagaagtgatcaaggatctctgtaggcgtgcgtcatatatcagccaggatatgatttgtccctccccgcgtgtgagcgcccgatgcagccgcagcgatatcgagactgagttgaccccccaaagactccagtgccctatggataccgaccctcctcaagaaatacgcaggagattcggcaagaaagtcaccagctttcaaccactgctgttcacagaagcccaccgggaaaaattccagagatcttgcttgcaccaaaccgtgcagcagttcaagcggtttattgagaattacaggaggcacattggctgtgtagcagtgttctacgctatcgccggtggattattcctggaacgggcatactattacgctttcgcagctcaccataccgggataacagacactacacgcgtaggaatcattctcagccgagggacagcagcctccatctccttcatgttcagttatatcctccttacaatgtgtaggaatctcattacatttcttcgcgaaaccttcctcaacaggtatgtgccatttgacgccgcagtggactttcataggctgatagcctccacagcaatcgtgctcactgtcttgcactcagtcggccacgtggtgaacgtttatctgttttcaatcagccccttgtccgtgctgagttgcctttttccgggactctttcatgatgacggttcggaactcccacagaagtattactggtggtttttccagactgtaccgggactaacaggagtggtgttactcctcatactggctatcatgtatgtgttcgcgagtcaccactttaggcgcaggtcctttagaggcttttggcttacccaccacctttacatcttgttatatgtcttgttaattatccatggttcttttgcccttatacaactgcctaggttccacatcttctttctcgtgcccgctatcatttacggaggagacaaactggtatcactttccagaaagaaggtggaaattagcgtggttaaggctgagctgcttcccagcggtgttacgcacctgaggttccaaaggccacagggattcgaatacaagagtggccagtgggtgaggatagcctgtctggcgctaggcacaactgagtatcatccttttacccttacctccgctccccacgaggataccctgtccttacacatcagggctgccggaccctggaccacccgcctgcgagagatttactcagcgccaacgggggaccgctgcgctcgttaccctaagctgtacctcgacggacccttcggagaagggcatcaggaatggcataaattcgaggtgtcagtattagtggggggtgggattggtgtgaccccttttgcatctatcctcaaggatttggtctttaaatccagcgtgtcctgccaggtgttttgtaaaaagatttactttatttgggtgactcggacacagcggcagttcgagtggctggccgacattattcgggaggtagaagagaacgaccatcaggatctggtgagcgtgcacatatatattacccagttagccgagaaatttgatttaaggactaccatgctgtatatctgcgaaagacacttccagaaggtgctgaatcggtctctcttcacgggactgagatccatcacccactttggccgtcctccgttcgaaccgtttttcaactctctgcaggaggttcacccccaagtaagaaagattggggttttctcatgcggtccgcctggaatgacaaagaacgtagagaaagcctgtcagcttatcaacagacaggatcgtacccactttagtcatcattacgagaatttctag

SEQ ID NO: 221294 - DNA, 132 bp, synthetic construct
  misc_feature 1..132: note = Description of Artificial Sequence: Synthetic coding sequence
  source 1..132: mol_type = other DNA
atggggttctgcttagctctggcctggactctgctggtgggagcttggacgccactgggcgctcagaaccccattagctgggaagtccagcgctttgacggttggtacaacaatctaatggaacaccgatag

SEQ ID NO: 221295 - DNA, 3594 bp, synthetic construct
  misc_feature 1..3594: note = Description of Artificial Sequence: Synthetic coding sequence
  source 1..3594: mol_type = other DNA
atgtggatgcactgctgctgggcctggcctccgaggagccagagtgaaaggaccatgtgctggctcaagatgtgcggagtctccctccggttatcacttcaggtggttaattcatggcccctgggcagagggtctgctggcttgcccgaacccgatttctggccaggcccactcaagttcagccggacagatcatttggcctcatgtctccaacgcggtcgtgacctaggtctgccaagttacacgaaagccagagcagctttagggctaagccctattactcgatggcaggacattaaccctgccctcagccggagcaacgacacagttttagaagctaccgcagccctgtacaatcaggaccttagctggctggaactactgcccggaggattgttggaaagccacagagacccaggcccactgttcagtaccatcgtgttagagcaattcgtgcgactccgagacggggatcgttattggtttgagaatacacggaatggactgttctctaaaaaagaaattgaggagatccgcaatactactctgcaggatgtgttagtagctgttattaacatagacccctctgcactgcagcctaacgtgtttgtatggcacaagggtgatccttgcccccagcctcgacagctctctactgaaggcctccctgcatgcgctccttccgttgtacgtgattattttgaggggtccggatttggtttcggagtgacgattggcacactgtgttgtttcccattggtcagtctgctctccgcctggatcgtcgccagactccggatgagaaacttcaaacgcttgcagggccaagaccgccagagcatcgtgagcgaaaaactggttggagggatggaggcactggaatggcaaggtcataaagaaccgtgtcggccagtcctggtatacctgcagcccggacaaattcgcgttgttgacggacgcttaaccgtgctgcggacaattcagttacaacccccacagaaagtgaattttgtgctcagtagtaataggggtaggcgaactctcttgcttaaaatccctaaggaatacgatttagtgctgctcttcaatctagaagaggagaggcaggccctagtggagaatctccgcggtgccctgaaggaatcgggcctctcgatccaagagtgggaattgcgcgagcaggagctgatgcgagctgccgtgaccagagagcagcggagacatctgcttgaaacattttttaggcacctgttcagccaggtgttagacatcaaccaagctgacgccggaaccctccctctggatagttcacagaaggtgagggaagctctaacatgcgagcttagccgcgcagaatttgctgagtccctcggtctgaaaccccaggatatgtttgttgagagcatgtttagtttggccgacaaagatggcaatggctacttgtcatttcgagaattcctcgatatcttggttgtgtttatgaaggggagccctgaagagaaaagcaggctcatgttcaggatgtacgatttcgatggcaacggcctgatcagtaaagatgaattcatcaggatgcttcgctctttcatagaaatctcaaacaattgtctctccaaggcccaattggccgaggtggtggagtctatgtttcgtgaaagtggctttcaggataaggaagagctgacttgggaagatttccatttcatgctccgcgatcacaacagtgaactaaggttcacacagttgtgcgtaaagggcgtagaggtgccagaagtcatcaaggatctgtgtcgccgagctagttacatcagccaggatatgatctgtccaagcccacgggtctccgcacgttgctcccggtccgacatcgagacggagttaactccccaacgactgcagtgccccatggataccgatcctccacaggagatcagaaggcggtttggtaagaaagtgactagcttccagcccctgctgtttacagaggctcatagggaaaagttccagcggtcttgtctgcatcagacggtgcagcagttcaagagatttatagaaaactacaggcggcatatcgggtgcgtggccgttttctatgcaatcgcgggagggctgttcctggagagagcctactactacgcattcgccgctcaccatacgggcattactgatacaactagagtcggaatcatcctgtctagggggacagcagcctcaatcagcttcatgttcagttacatcctcctaaccatgtgccgcaacctgattactttcctcagagagactttcctcaataggtatgtgccattcgacgccgcagtggatttccaccggctcattgcctctacagccatcgtgctaaccgtgctgcactccgtcgggcacgtcgtcaacgtgtacctattttctatcagtcccctcagcgtgctctcttgccttttccccggtctcttccacgatgatggctcggaactcccacaaaagtattattggtggttcttccagaccgttcctggactcactggcgttgtgctgctcctgattctcgctatcatgtatgtctttgcctctcaccatttcaggcggcgaagctttcgcggattttggctcactcatcacctctacatcttgttgtacgtccttctgattatccacggctcgttcgcactcatacaactgccaagattccacatattttttctggttcctgcaattatttacggcggtgataagctcgtgagtctctcccgcaaaaaggtggagatctctgtggtcaaggccgagttactgcccagcggagtgactcatttgcgcttccagaggccccagggtttcgaatataaatctggccagtgggtacgaatcgcatgcctggcactgggcacgacggagtatcacccatttaccctgacatccgcccctcatgaagacactctttctctgcatatccgagcagccggaccatggacaacgagactacgggagatttattccgcccctactggtgacagatgcgccaggtaccccaaactgtatttagatggaccttttggcgaggggcaccaggagtggcataaattcgaagtatccgtattagtcggcggtggcatcggagtcaccccttttgcgagtatcctaaaagacctggtatttaaatccagcgtgagctgtcaggtcttctgtaaaaagatctactttatttgggtgactagaactcaaaggcaattcgagtggcttgctgatatcatccgagaggtcgaagagaatgaccaccaggatctagtgtctgtccacatctatatcacgcagctggcagaaaagtttgatctcagaacaaccatgctgtacatctgcgaaagacacttccagaaagttttgaaccgaagtctgttcactgggctccggtcaatcacacactttggaaggccacctttcgagccatttttcaacagcctgcaggaggtgcacccacaagtccgcaagattggcgtgtttagctgtggccctccaggtatgacaaaaaatgtggaaaaggcatgtcagttgatcaatcgacaggacaggacacatttctcccaccactatgagaacttctag

SEQ ID NO: 221296 - DNA, 4647 bp, synthetic construct
  misc_feature 1..4647: note = Description of Artificial Sequence: Synthetic coding sequence
  source 1..4647: mol_type = other DNA
atgttacgggcacgtcccgaggctcttatgctcctgggggctctcttaactgggagcctcggcccttctggaaatcaagacgctctctccttaccctgggaggtccaaaggtatgatggttggttcaacaatctccgccaccacgagcgcggagccgtgggctgtaggctgcagcggagggtgccagcaaattatgccgacggagtatatcaagcccttgaggagccacaactgccaaatcccaggaggcttagtaatgctgccactcggggtatcgccggtctgccctctttgcacaaccgcaccgttctgggcgtgtttttcgggtaccacgtgctttccgacgtggtcagtgtcgagactcctgggtgccccgcagaattcctaaatattcggattcccccaggcgaccctgtgtttgatcctgatcagagaggggacgttgtccttccttttcagcgttctcgctgggatcccgaaaccggacggagcccatccaatccacgggatctcgcgaaccaggtgactgggtggctggacggctccgccatatacggcagcagtcacagctggtccgacgccctgcggtcgttcagtggcggacagctcgctagcggtcccgacccggctttcccccgtgatagccagaacccattgctcatgtgggccgctcccgatcctgccaccgggcagaacgggcctagagggctttatgcctttggcgcagagcgcggaaaccgggagccgttcttgcaggcactgggcctactctggtttcgctatcataacctgtgggcacagcgcttagcaagacagcatcctgattgggaagatgaagagctctttcagcatgctaggaaacgggtcatcgccacgtaccaaaatatcgccgtgtacgagtggctgccaagcttcctgcaaaaaacccttcccgagtatacaggctaccgtccattcttggacccctctatctctcccgagtttgtcgtagcttctgagcagtttttctccactatggttccccctggcgtgtatatgcggaatgccagttgccattttaggaaagttctcaacaaagggtttcaatcttctcaagcgctgcgcgtgtgtaacaactattggattagggaaaaccctaatctgaactctacccaggaggtcaatgaactgctcctgggcatggctagtcagatctcagagctcgaagacaatattgtcgtggaggacctgcgcgattattggcccggacctggaaagttttcacggactgactacgtggcctctagcatacagcgcggtcgcgacatgggacttccgtcctattctcaggcactgctagcgttcgggttggacattcccagaaattggtctgatcttaatcccaacgttgacccacaagtgctggaagcaacagctgcgttgtacaaccaggacctgagccagttggagctcctccttggtggactgctggagagccacggggatcccggacccttattctctgccatagtattagaccagttcgtacgcctgcgggacggcgaccgctattggtttgagaatactaggaacggcctattcagcaaaaaggagattgaagacattcggaatactacactgcgagatgttctggtcgctgtgattaacatagatccgagtgcccttcagcctaatgttttcgtgtggcacaaaggcgcaccctgtcctcagccaaaacagctgacgacagatgggcttccacagtgcgcgcctctcaccgtcctcgacttcttcgagggcagcagcccaggcttcgccatcaccattattgcactgtgctgcctgccactagtgtctttgctcctgagtggggtggtggcatacttccgaggtcgggagcataaaaaattgcaaaagaaacttaaggaatcagtgaagaaggaagcggctaaagacggggtgcccgctatggagtggcctggccctaaggagcgaagcagtccgattattatccaactcctgtccgacagatgcctgcaggtgttgaataggcacctcacagtcctgcgggtggtccaactgcaaccccttcagcaggttaacttgatcctttcgaataatagaggttgccggacactcttgctgaagattcctaaggaatacgatctggtgctgctgtttagcagcgaagaagaacgcggtgcctttgtgcagcagctgtgggacttttgcgtcaggtgggccctgggcctgcatgtcgcagagatgtctgagaaggagctcttccgcaaagcagtgaccaagcagcagagagagcggatcctggagatcttttttcggcacctgtttgctcaggttttagacatcaaccaggcagacgccggtaccttacctttggattcaagccagaaggtgcgagaagccctcacatgcgaacttagccgcgcagagtttgccgaaagccttgggctgaagccacaagatatgtttgtggagtccatgttctcacttgccgacaaagatggtaacgggtatctgtcatttcgcgagtttctagatattcttgtcgtgttcatgaaagggtcacccgaggacaaaagccgattgatgttcactatgtacgaccttgatgaaaacggttttttgtcaaaagatgagtttttcactatgatgcgtagcttcatcgagatttctaacaattgtctgagcaaagctcagctcgcggaggtggtcgaatccatgttccgggagtccggcttccaggataaggaggagctcacatgggaggattttcatttcatgttgcgtgatcacgactccgaactccgttttactcagttatgcgtcaaagggggtggaggcggtgggaacgggattcgggatatctttaaacagaatattagttgccgagtaagcttcataactcgtacgccaggcgaacgtagtcatccgcagggtctgggccctccagccccagaagcacccgagttgggcggacccggactaaagaagagatttggtaagaaagctgctgtaccaactccaaggctctataccgaggccctgcaggaaaagatgcagcggggatttctggcccagaagctgcagcagtataaaaggtttgtggagaactaccgacggcacattgtttgcgtggctatcttttctgccatttgcgttggtgtttttgccgaccgcgcatactattacggcttcgccagcccaccctccgatattgctcagactacactcgtcggaatcatcctctctagaggcaccgctgcatccgtaagtttcatgttcagctacattctgctgaccatgtgtaggaacttaataaccttcctgcgcgaaactttccttaacagatatgtgccattcgatgctgccgtagactttcaccgctggatcgctatggcagccgtagtactggctatcttacactccgccggacatgccgtcaatgtgtacatcttttcagtatctccactgtctctgctggcgtgcattttccctaatgtttttgtcaatgacggctccaaacttcctcaaaaattctactggtggtttttccagactgttccaggcatgaccggagtgctgttactgctcgtgcttgccattatgtatgtttttgcaagccaccactttcgcagacggtcatttcgcggattctggcttacgcaccacttgtatattctgctgtacgcccttctgatcatccacggcagctatgctctgattcagttacccacctttcatatttatttcttggtgccagcaattatctacggtggcgacaagctggtttctttgtctcgaaagaaggtcgagatttccgtcgttaaggccgagctcctcccgagcggcgttacctatctacagtttcagcgcccacagggttttgaatacaagagtggacagtgggttagaatcgcctgtctggctctaggcactacagaatatcatcccttcaccctcaccagtgcgccacacgaggataccctcagtctgcatatcagggctgtagggccatggactactaggctgcgcgaaatctacagcagccccaaaggaaatggttgcgccggataccccaaactgtacctcgacggcccttttggagaagggcaccaggaatggcacaagttcgaggtgtccgtcctggtcggcggaggaatcggcgtaacccccttcgctagtatcctaaaggacttggtctttaagtcatcactgggaagccagatgctgtgtaaaaagatttacttcatctgggtgacaaggacgcagcgccagtttgaatggttggcagacatcatccaggaagtggaagaaaacgaccatcaggaccttgtctccgtccacatctatgtgacacaattggcagaaaaatttgacctccgcacaacaatgctgtacatctgcgaaaggcatttccagaaggtgctcaatcgatctctgtttactggacttcggagcattacacactttggcaggccaccgttcgaaccgttcttcaactctctgcaggaggtacaccctcaggtccggaaaatcggggtctttagctgcgggcctcccggaatgactaaaaatgtggaaaaggcatgtcaactggtgaataggcaggatcgcgctcacttcatgcaccactacgaaaatttctag

SEQ ID NO: 221297 - DNA, 1452 bp, synthetic construct
  misc_feature 1..1452: note = Description of Artificial Sequence: Synthetic coding sequence
  source 1..1452: mol_type = other DNA
atggctacactgggacacacatttcctttttatgccggacccaagcctacgttcccgatggacactacacttgcttcgatcataatgatttttctgaccgccctcgcaacgttcattgtcatcctgcctggcatcagaggcaaaactcgactgttctggctactgagagtagttacttcactgttcatcggagccgcaattctcgccgttaacttctcctcagagtggtcagtggggcaggtgtctaccaatacatcttacaaggcattctctagcgaatggatttcagcagacatcggacttcaagtagggctaggcggtgtgaatattactctcaccggaacaccggtacagcagttaaatgagacaatcaactacaatgaggaattcacctggcgcctgggcgaaaactatgccgaagagtatgctaaggccttggaaaaggggctgccagatcccgtgctgtacctggctgagaaatttacacctcgctccccctgcggactctaccgccagtaccgccttgcaggccactatacctctgcaatgctttgggtggcatttctgtgctggttgctcgcaaatgtgatgttatcgatgccagttttagtgtacggtggctatatgctgctcgcaacaggcatcttccaactactcgcactgctgttcttttccatggcaacttcattgacctcaccttgccccttgcatctcggcgcttccgtgctgcatacccatcatgggcctgcgttttggatcacccttactactggattgctgtgtgtactgctggggcttgctatggccgtggctcaccggatgcagccccaccgtctgaaagcctttttcaaccagtcagttgacgaggaccctatgctagaatggagtccagaagagggcggtctgctatcgccacgctataggtctatggcggatagccccaaatcccaggacatacctctgtccgaagcatcttcaacaaaggcttattatcgccctcgcaggctgtcgctggtacccgcagacgtcaggggcttggcaccagccgctctgtccgctttgcccggagccctgctggcccaggcatggcgcgctctgttacctggcctgcgttgtcctaaagccggaaaggagtctagactgggccctccccattcaccatggcgattcggcccagagggttgtgaagagagatgggctgagcacactggggactctccgaggccccttaggggcaggggtaccggcaggctctggcgatggggatccaaggaaagaagggcatgtggcgtgcgggcaatgctccccagactagtgtcgaacagcggtctcaagcgaccttcctgtcttgatctgccaaagtgttgggattaccgtcgcgacgccagggcattcttccatttactagaaccaacgccttgcgtcacatcacgtcacacaccactcatttag

SEQ ID NO: 221298 - DNA, 1317 bp, synthetic construct
  misc_feature 1..1317: note = Description of Artificial Sequence: Synthetic coding sequence
  source 1..1317: mol_type = other DNA
atggccaccctggggcacacattccctttctacgccggacccaaaccgacctttccaatggataccacccttgcttccattataatgatcttccttaccgccctcgcaaccttcatagtgatcctgccagggatccgaggaaaaacgagactgttctggctgctgagagtggtgacatccctgttcatcggagccgctattctgggcacacccgtgcagcagctgaacgagaccattaattataatgaggagttcacttggaggctgggagaaaactacgccgaagagtacgccaaggcccttgagaaaggcctccctgaccctgtcctctacttggccgaaaaattcactccacggagcccctgcggcctgtaccggcaataccggctcgccggacactatacaagtgcaatgctctgggttgctttcctgtgctggttgctggcaaacgtcatgctaagcatgcccgtgctggtctatggcggatatatgcttctggcgaccgggatatttcagctgctggctctgctttttttcagcatggcaacgagcctcaccagtccatgccctttgcacctaggggcatctgtgcttcatactcaccacggacctgctttttggatcactttgaccacagggcttctgtgcgtcctgttgggcctggcaatggcggttgcccacagaatgcagccacacaggctgaaagccttcttcaaccagtcagtcgacgaggatcccatgcttgagtggtctcctgaagaagggggactcctctcccctagatatcgaagtatggccgacagccctaagagccaggacattccattgagcgaggcctcatctaccaaggcgtattaccgacctagaagattatccctggtgcctgctgatgtgcggggtctggcccctgctgcgttgtcagccttacctggcgctctgctggcacaagcctggagggccctgctccctggacttagatgtcctaaggcgggtaaggagtcaagacttggcccaccccactctccttggcggtttggtcccgagggatgtgaggaacgatgggctgaacacaccggtgactctcctcggcctctgagaggaaggggaaccgggagactatggaggtggggctccaaggagcggcgagcctgcggagtgcgagccatgttgcccagactggtttcgaactctgggcttaaaaggccgtcgtgtctggatctgcctaaatgctgggactatcgacgggacgccagagccttctttcatctccttgagccgactccgtgcgtgacaagcagacatacgccattaatctag

SEQ ID NO: 221299 - DNA, 234 bp, synthetic construct
  misc_feature 1..234: note = Description of Artificial Sequence: Synthetic coding sequence
  source 1..234: mol_type = other DNA
atggctactctgggacatacctttcccttctatgctggacctaaacctacgtttccgatggatacgaccctggctagtattattatgatcttcttgacggcgttagcaacattcatcgtcatcctgccgggaattaggggcaagacccggctcttctggctgctccgggttgttaccagcctatttataggggcagctattcttggaactccggttcagcagttgaacgagtag

SEQ ID NO: 221300 - DNA, 219 bp, synthetic construct
  misc_feature 1..219: note = Description of Artificial Sequence: Synthetic coding sequence
  source 1..219: mol_type = other DNA
atggccaccctcggtcacacgtttccgttctatgcaggcccaaagcctacatttcctatggataccacactcgcatctatcataatgattttcctcacagccctcgccactttcattgtgatcttaccgggaatccgagggaagacaagactattctggctgctgcgcgtggtaaccagcctgttcatcggggctgctatcctggccgttaacttctag

SEQ ID NO: 221301 - DNA, 897 bp, synthetic construct
  misc_feature 1..897: note = Description of Artificial Sequence: Synthetic coding sequence
  source 1..897: mol_type = other DNA
atggccactctggggcacacctttccattctacgcagggccaaagcctaccttccccatggacactaccttggcctccatcataatgattttcttaacagctctggcaacatttatcgtgatccttccgggaatcagaggtaaaacacggctgttttggctgctccgggtggtcacttccctcttcattggggcagccatcttgggcacccctgtccaacagctgaatgagaccattaactacaacgaggagtttacttggcgccttggagagaattacgcagaggagtacgccaaagccctggagaagggtctgcccgaccctgtcctgtacttagctgaaaagtttaccccaagaagcccctgtggtttatataggcagtatagactcgccggacactacacttcagccatgctctgggtggcgtttctgtgctggctcttggccaatgtgatgctgtcaatgccggtcctggtgtatggtggctatatgctgcttgccactggaatttttcaactcctggctctactgttcttttctatggcgacttctctgaccagtccatgtcctttgcacttgggagcgtccgtgctccacacacaccacggacctgcattctggatcacactgaccaccggcctgttatgcgtgctcctgggtttagctatggcagtggcccatagaatgcaaccgcatcggctgaaggccttcttcaatcagagtgtcgacgaggacccaatgcttgagtggtctccagaggaggggggtctcctgtctcccagatataggtctatggcggattctccaaagagccaggacattcccctgtctgaggcatcttccaccaaagcatattgcaaggaagctcaccccaaggatcctgattgcgcactgtag

SEQ ID NO: 221302 - DNA, 42 bp, synthetic construct
  misc_feature 1..42: note = Description of Artificial Sequence: Synthetic coding sequence
  source 1..42: mol_type = other DNA
atggccactttgggtcacacatttcctttctatgccggatag

SEQ ID NO: 221303 - DNA, 897 bp, synthetic construct
  misc_feature 1..897: note = Description of Artificial Sequence: Synthetic coding sequence
  source 1..897: mol_type = other DNA
atggctaccctgggccatactttcccattttacgcgggtcccaagcctacatttcctatggataccaccctggcctctataatcatgatcttcctcaccgctctagctaccttcatcgtgattcttcccggtattcggggaaaaacaagacttttctggttgctgagagtggttaccagcctctttatcggcgctgcgatcttggggactcccgtgcagcagttgaacgaaacaatcaactataacgaggagtttacttggcgactcggcgaaaactatgccgaggagtatgctaaagcactcgagaaaggcctgcccgaccctgttttgtatcttgctgagaaatttaccccgaggtctccctgtgggctgtatcggcagtatcgactcgcgggtcattatacgtctgctatgctttgggtggcatttctctgctggttgctggctaacgtcatgctgagcatgcctgtgttggtatacggtgggtacatgctgctggccacaggcatatttcagctgctcgcactgctttttttcagtatggctacttccctgacctccccgtgtccgttgcacctcggggcatcagtactccatacacaccacggtccagccttttggatcactctgacaaccggcctgttgtgcgtgctccttgggctcgctatggccgtcgcgcacaggatgcaacctcatcggcttaaggcattcttcaatcaatctgtcgatgaggatccgatgctggaatggtcacccgaagaagggggactgctcagtcctagatatagatctatggccgacagtcctaaatctcaagatataccgctgagcgaggccagcagcactaaagcttactgtaaggaagcgcacccaaaagatccagattgcgctctgtag

SEQ ID NO: 221304 - DNA, 1452 bp, synthetic construct
  misc_feature 1..1452: note = Description of Artificial Sequence: Synthetic coding sequence
  source 1..1452: mol_type = other DNA
atggctacccttggacatacctttccgttctacgcgggaccaaagcctactttccccatggacactactctggcgtcaatcatcatgatcttcctgaccgccttagctaccttcatagtaatcctcccgggaatcagagggaaaaccaggcttttttggctgctgagggtggtgacctcactgttcatcggagccgctattctcgcggtgaacttcagttccgagtggtccgtcggtcaggtcagcacgaatacatcatataaggctttttcatctgagtggatcagcgccgacataggtcttcaagtaggcctggggggtgtcaatatcaccttgaccggcacgcctgtccaacagctgaacgaaactataaattataatgaggagtttacatggcgcttgggggaaaactatgcagaagagtatgcgaaggccctcgaaaagggattgccggaccccgtactgtacttagccgagaagtttacacccagatcaccttgcggactgtacagacagtacaggctcgctggtcattacacttctgctatgctgtgggtcgccttcctgtgttggctcctggccaatgtcatgctgtccatgcctgtgttagtgtatgggggttacatgttgctggccacagggatctttcaacttctggccttgttgttctttagcatggctacctcactgacatccccctgccccctccacctgggcgcatcagtgttgcatactcatcacggcccagcattttggataacacttaccacaggtctcctctgcgtactcctggggctggccatggccgtggcccaccgcatgcagccccatcggctgaaggctttctttaatcagtccgtggatgaggatccgatgctggaatggtctcccgaggaaggcggtcttttgtcaccacggtatcgatctatggctgacagcccaaaatcccaggacattcctctatccgaggcgtccagcaccaaagcttactatcgacctagacgattatcactggtccctgcagacgtcagggggttggctcccgcagccttgtcagccctaccaggggcactcctggctcaggcgtggagagccctgctgcctggcctgcgatgcccaaaggccggtaaggagtcccggttgggacctccccatagcccatggaggttcggcccagaagggtgtgaggagcgctgggccgagcacactggggattccccccgacccctgaggggcagaggcacaggcaggttatggaggtggggatccaaggaaagaagagcttgtggcgtgagagcaatgctgcctaggctggtgagtaattcaggccttaagcggccatcgtgtttggatcttccaaagtgctgggactaccggcgagatgctcgggctttttttcacctgctggagccaactccttgtgtgacaagcagacacacccccctgatctag

SEQ ID NO: 221305 - DNA, 219 bp, synthetic construct
  misc_feature 1..219: note = Description of Artificial Sequence: Synthetic coding sequence
  source 1..219: mol_type = other DNA
atggcgaccctgggccatacttttccattttacgcaggtcctaaacctacttttccaatggacaccaccctggcttcaattatcatgatttttctcacagcacttgcaacgtttatagtaattttgcctgggattagagggaagacccggctgttttggctgctgcgagtggtcaccagcctcttcattggggctgcaatattggggactcccgtctag

SEQ ID NO: 221306 - DNA, 51 bp, synthetic construct
  misc_feature 1..51: note = Description of Artificial Sequence: Synthetic coding sequence
  source 1..51: mol_type = other DNA
atggcaaccctgggacacacttttcccttctacgccggtcctaagccttag

SEQ ID NO: 221307 - DNA, 366 bp, synthetic construct
  misc_feature 1..366: note = Description of Artificial Sequence: Synthetic coding sequence
  source 1..366: mol_type = other DNA
atggctacactgggtcacaccttcccattttacgcagggccaaagccaacattccccatggacacaacactcgcttcaatcatcatgatcttcctgacagcactggccaccttcatcgttatactgcctgggatcagagggaagacccgattattttggctactccgggttgtgacctctcttttcatcggcgcagccatcctagctgtcaatttcagcagcgaatggagcgtcggacaggtgagtactaacaccagttataaagccttcagctccgaatggatttctgctgatataggtctgcaggttgggcttgggggtgtaaatatcaccctgactggaacaccagtacagcagttaaactag

SEQ ID NO: 221308 - DNA, 1032 bp, synthetic construct
  misc_feature 1..1032: note = Description of Artificial Sequence: Synthetic coding sequence
  source 1..1032: mol_type = other DNA
atggccactctaggccacacattccccttctacgccggtcccaagcccaccttccccatggacacaaccttagcctcgattatcatgatcttcctcacagctctggccactttcatagtaatccttcccggaatccgcggaaagaccaggctgttttggcttttgcgggtggtcactagcctctttattggtgccgctattctcgccgtgaacttcagctctgaatggtctgtgggtcaggtgagcactaatacttcttataaggctttctcatccgagtggatttccgcggatattggcctacaggttggtttgggaggagtcaacatcacccttacgggaacaccagtgcagcaacttaatgaaacaatcaattataacgaggaattcacatggcgattgggcgagaattacgcagaggagtacgccaaagccttggagaaaggcctccccgatccagtgctctacctcgcagagaagttcacccctcgctccccctgtggcttgtaccggcagtaccgcctcgccggacactataccagtgccatgctatgggtggccttcctgtgttggctcctggcaaacgtgatgctgtccatgcctgtcctcgtatacggaggctacatgctcctggccaccggtatttttcagctcttagcattgttgttttttagcatggcaacatcactgacctcgccatgtcccctgcatctcggagccagcgtactgcacacccaccacggtcccgctttttggatcaccctcacgactgggctgctctgtgtgcttctgggtctggccatggctgtcgctcaccggatgcaaccgcatagacttaaagcctttttcaatcagtccgtggatgaagatccaatgttggaatggtcacccgaagaagggggtttactttctcctcggtaccgatctatggcggattcacccaagagccaggatattcctctatctgaggcctccagcacaaaggcatattgtaaggaggcccacccgaaggaccccgactgcgcgctatag

SEQ ID NO: 221309 - DNA, 963 bp, synthetic construct
  misc_feature 1..963: note = Description of Artificial Sequence: Synthetic coding sequence
  source 1..963: mol_type = other DNA
atgaccctgtggaatggcgtgctgccattctacccccaacccagacatgctgcaggtttttctgtgccattgctgatcgtgatactggtgttcttggccctggccgctagttttctgctgatcctacctggcattagaggtcatagtagatggttttggctggtcagggtgctcttgtctttattcattggcgctgaaatcgtagccgttcatttcagcgctgagtggtttgtggggacagtcaacaccaacacctcctacaaggccttctctgctgccagggtgacggcgcgtgtgcgactcttagtggggttagaaggcatcaatattactcttacaggcacacctgtgcaccagctgaatgaaacaatagactacaacgagcagtttacatggagactcaaggagaactatgccgcagagtatgcaaatgctcttgaaaaagggctgcccgatcctgtgctctatcttgccgagaaatttacacccagctcaccatgtggactgtaccaccaataccatctggccggacattatgcttctgctacgctttgggtagcattttgcttttggctcttatccaacgtgttactgagcacacccgctccgctctacgggggattagcattgcttacaacaggtgctttcgcattatttggtgtcttcgcattggcctcaattagttcagtgccgttgtgcccactacgcttgggatcctcagccctgaccactcagtacggagccgcattttgggtgacgctcgccaccggggtgctatgtctgttcctcggaggagcagtggtgagtcttcagtatgtcagaccaagcgcattgcggacactcctggaccaatccgccaaggactgttcacaggaaagggggggttctccactgatcctcggtgatccactacacaagcaagccgctttgcccgatctgaagtgtattactactaatctgtag

SEQ ID NO: 221310 - DNA, 1767 bp, synthetic construct
  misc_feature 1..1767: note = Description of Artificial Sequence: Synthetic coding sequence
  source 1..1767: mol_type = other DNA
atggagggtgatggcgtcccttggggcagtgagccagttagtgggccaggaccaggaggcggtgggatgatcagggagctgtgccgtggctttggaaggtaccgtcgctacttgggcagactcaggcaaaacctccgtgaaacacagaaattcttccgcgatatcaagtgttcacacaatcacacctgcttgagttctttaacgggaggcggaggtgctgagcgcggaccagccggagacgtcgcagaaacggggttacaagcagggcaactaagttgcatatcattccctccaaaggaggagaaatacctgcagcagatcgtagattgtctgccatgcatccttatccttgggcaagattgcaatgttaagtgtcagctccttaacttgctactgggcgtgcaggtgctccctaccactaaactaggctctgaggagtcctgcaagctgagacgccttcgcttcacgtatggaactcagactcgcgttagcttagctctgcccggacaatatgaactcgtgcacactctggttgcccaccaaggaaattgggaaacaatccctgaggaggatctagaagtccaagagaataatgaggatgcagcccacgtgctggcagagttggaagtaactatgcaccacgcactgttgcaagaggtggacgtggtggtcgcaccttgtcagggactgagacctacggtggatgtgctcggcgacctggttaacgatttcctgcccgtcatcacgtatgccctccacaaggacgagctcagtgagcgcgatgaacaagagctgcaagagattcgcaagtattttagctttcctgtgtttttctttaaggtgcctaaactaggctccgagatcatagattccagcacccgcagaatggagtctgagcgctccccactatatcggcagctgatcgacctgggctatctgagtagttcccactggaactgtggagccccaggacaagatacaaaagcccaaagtatgctagtggaacagagtgagaagctgcggcatctgagtacttttagccaccaggtactccagacacgcctcgtcgatgcagccaaagccctgaacctcgtccattgtcactgtcttgacatcttcatcaaccaggcttttgatatgcaacgcgacctgcagataactccaaagcggctcgaatacacgaggaagaaagaaaacgagctgtatgagtcactgatgaatattgccaatagaaagcaagaagagatgaaagacatgatcgtcgagacactgaatacaatgaaggaggaactgctggacgatgccaccaatatggagttcaaggatgtcatcgtgccagagaacggcgaacctatcaccgatttggggttctgtaaacctgaagccatgatgagcggttcaatcgtgggaacacctatccatatggccccagagttattcaccggtaagtatgacaattccgtagatgtttacgcattcgggattttgttttggtacatctgctctggctccgtgaaacttcctgaagctttcgaaagatgtgctagcaaggaccatctgtggaacaatgttcggaggggggctcgacctgaacgtttaccagtttttgatgaagagtgttggcagctgatggaggcctgctgggatggtgacccactaaaacgtccactcctcgggatcgttcaacccatgctgcagggcatcatgaaccggctctgcaaaagtaatagcgagcagcctaatcgaggcctcgacgactctacctag

SEQ ID NO: 221311 - DNA, 2655 bp, synthetic construct
  misc_feature 1..2655: note = Description of Artificial Sequence: Synthetic coding sequence
  source 1..2655: mol_type = other DNA
atggaaggcgacggcgtaccctgggggagcgagccggtcagcggacccggtcccggtggcggaggtatgatccgtgagctgtgtcgaggtttcggtcggtatagaaggtatcttggtaggttgagacagaacctgagggaaacacagaagtttttccgagatatcaagtgctcccacaatcacacctgccttagtagcttaaccgggggtggcggtgccgagagaggaccagctggggatgtagctgagaccgggctgcaggcaggacaactgagctgcatcagcttccctcctaaggaggaaaaatacttacagcagattgtggactgcttaccctgtatactgatcctgggacaggactgcaatgtgaaatgccagctcctaaatctcctgctgggagtccaggtattaccaacaactaagctcggctctgaggagtcatgtaaactgcgcaggctgcggttcacatacggcacacagacacgcgttagccttgcgctgccgggtcagtacgagctggtgcatacacttgtggcccaccaagggaactgggagaccatccccgaggaagatctcgaagtccaggagaataacgaggacgctgcacatgtcttggctgaacttgaggttactatgcaccacgctctgcttcaggaggtcgacgttgtggtggccccatgtcaaggtttaagacccactgtagacgtcctgggcgatcttgtgaatgactttctacccgttatcacgtacgcccttcacaaggatgaactgagcgagagagatgaacaggaactacaggagatacgcaaatacttctcatttccagttttcttctttaaagtgcccaagttgggctccgagatcattgattctagtaccaggaggatggagtccgagcgctcaccactgtatcgacagctgattgatctcggatatctgtcgtcctcacactggaactgcggagctcccggtcaggacaccaaagcacagtcaatgctcgtcgaacaatcagagaaactcagacacctgagtaccttttcccaccaagtgttgcagacccgcctagtggacgcagcgaaagctctcaatcttgtgcactgtcactgccttgatattttcatcaatcaagccttcgatatgcagcgggatctccagattacaccaaaaagactggagtatactaggaaaaaggagaatgagctctatgaatcgttaatgaatatcgccaacaggaaacaggaagagatgaaggatatgatcgtggagactctgaacacaatgaaggaggagctactggacgacgcgaccaacatggaatttaaagatgtcattgtcccagaaaatggcgaaccggtggggactcgagagattaagtgttgcattcggcagatacaggaacttatcataagtagactgaatcaagccgtggccaataagctgatctcgagtgtggattatttacgggagagctttgttgggacactggagcgatgtctccagtctctcgagaagtcgcaggacgtttccgtacatattaccagcaattacttgaagcaaattctgaatgccgcttaccatgttgaggtgaccttccatagcggttcttcagttacacgcatgctgtgggaacagattaaacaaattattcaacgcattacatgggtctcaccgccagctatcacactcgagtggaagagaaaggttgcgcaggaggcaattgagtcgctctccgcaagtaagctagcaaagtccatctgttctcaatttcgcaccagattaaattctagccatgaagcctttgctgccagcctgcgccaactggaggccggacactctgggagactggagaaaacggaagatctgtggctgcgagtgcgtaaagaccacgcacctagactggcacgcctcagccttgagtcctgctcacttcaggacgtattactgcatcgtaagcccaagcttggccaggagctgggccgaggccagtacggagtggtgtatctctgtgataactggggcggtcactttccatgcgccctgaagagtgtggtgccgccagacgagaagcattggaacgacctcgcgttagaatttcattacatgcggtccctgccaaaacatgaacggctggtggatttgcacggttctgttatagattacaattacgggggaggatccagcatcgcggtccttctgataatggagcgtttacacagggatctttataccggactgaaagccggattaacactcgaaacccgcctgcagatcgccctcgatgtcgtggaagggatccgctttctgcatagccaggggctcgtgcaccgagatattaaacttaagaatgtgcttctggacaaacaaaaccgggctaagatcacagacttaggcttttgcaaacctgaagcaatgatgagtgggagcatcgtgggcactcctatacatatggcacccgagctgttcacgggagcccgacctgagagactgcccgtatttgatgaagaatgctggcaactgatggaggcgtgttgggacggtgatccactgaagcgcccactgctgggcatcgtccagccgatgctccaaggtattatgaacaggctttgcaagtccaacagtgagcagccaaacagaggcctggacgacagcacctag

SEQ ID NO: 221312 - DNA, 2790 bp, synthetic construct
  misc_feature 1..2790: note = Description of Artificial Sequence: Synthetic coding sequence
  source 1..2790: mol_type = other DNA
atggagggggacggcgtcccttggggatcggaacctgtgtctggacccggaccagggggtgggggaatgatccgagaattgtgcaggggtttcgggagatatcgtagataccttggacgactccgccagaacctccgtgaaactcaaaagtttttccgcgatataaaatgttcccataatcacacctgtctaagtagtctaacaggtggagggggagctgaacgaggtccggcaggagacgtagcagagacaggcctgcaggcaggacagctgagctgtatcagctttccacccaaggaggagaaatacctgcagcagatcgtggattgtttgccgtgtatactgatcctggggcaagattgcaacgttaagtgtcagcttctgaaccttctcctgggcgtgcaagttctcccaacaacaaagctcggctccgaggaatcctgtaagctaagacgcctgagatttacgtacggcacacagacccgggtgtcactagctctccccggtcagtacgagctggtgcacacattggtagcccaccagggaaattgggagaccattcctgaggaggatctcgaggttcaggagaataatgaagacgctgcccacgtactggctgagctggaagtgaccatgcatcatgccctcctgcaggaggtggacgtggtggtggccccatgtcaagggctgagacctacggtggatgtattgggagacctggtcaatgactttctacccgtgatcacctacgctctgcacaaggatgaattatccgagcgtgacgagcaggagttacaggaaatacgaaaatatttttcctttcccgtgttcttcttcaaggtgcccaaactgggaagcgaaattattgactctagtacccggaggatggagagtgagaggagtcccctctatcgccagttgatcgacctgggttaccttagcagtagccactggaactgcggagccccaggacaggatactaaggctcaatctatgcttgtggagcagagtgaaaaactccgacacctgagtacatttagccatcaggtcttgcagacaaggttagtagacgcggcaaaagcgctgaatctcgtccattgccattgcctcgatattttcatcaatcaggccttcgacatgcagagggatctgcaaataacacccaaacggctcgagtatactcgcaagaaggagaacgagctgtatgagagcctcatgaatattgcaaacaggaagcaggaggagatgaaggatatgattgttgagactctaaacacaatgaaagaagaacttctcgatgacgctacaaacatggagtttaaggacgtgatcgtgcccgaaaacggcgaaccggttgggacccgggagattaaatgctgcatcaggcagatccaggagctcatcatttccaggctcaatcaggcagtagcaaataagctcatctctagtgtggattacctccgcgagtcattcgtgggcacactggaaagatgccttcaatctctggagaaatctcaagacgtatccgtgcacatcacctctaattatttgaagcagatcttaaacgcagcctaccatgtagaggtgaccttccacagtggctcttcagtgaccagaatgttgtgggagcagatcaagcagatcattcagcggattacttgggtgagcccgcctgcaattaccttggagtggaagagaaaggtggcccaggaagcaattgagagtctatcagctagtaaactggccaagtctatctgctcccagtttaggactaggttaaatagcagccatgaggcatttgctgcatccctcaggcagctggaggccggacattcgggcaggctggagaaaaccgaggacttgtggctgcgcgttagaaaggatcatgctccacgacttgcacgcctcagcctggagtcatgttccctccaggatgtcctgttacacaggaagcccaaacttggccaagagttaggacgcggacagtacggagttgtgtacttgtgtgataattggggtgggcacttcccgtgtgctctgaagagcgtggtgccacctgatgagaagcactggaacgatctggcactggagttccactacatgagatccttgcctaagcacgagcggctggtggacttgcacgggtctgtaatcgactataattacgggggaggcagctccattgctgtcctgctgatcatggagagacttcatcgggatctgtatacaggactgaaggctggactgactttggagacccgcttacaaattgccctggacgtcgtagaaggtatcagatttttgcattcacaggggcttgtgcacagggatataaaactgaagaatgtcctattggacaagcagaatcgggcaaagattaccgacctgggcttctgcaagcccgaggctatgatgtcaggcagtatagtgggcactccaatccacatggcacccgagctgttcacaggcaagtacgacaattctgtagacgtctatgccttcggtattctcttttggtacatttgctctggcagtgtcaaactgccagaagctttcgagcggtgcgcctctaaagatcatctgtggaacaatgtgcggcgaggggctcggcctgagcgtctgcctgtgttcgacgaagagtgttggcagcttatggaggcatgttgggacggggaccccttgaagcgccctctactgggaatcgtccagcccatgctgcagggcatcatgaatagattgtgcaaaagcaactcagaacagccgaaccggggactggatgactcaacgtag

SEQ ID NO: 221313 - DNA, 1104 bp, synthetic construct
  misc_feature 1..1104: note = Description of Artificial Sequence: Synthetic coding sequence
  source 1..1104: mol_type = other DNA
atggtgatggaagtagggacattggatgccggaggtctacgcgctcttctgggtgagcgcgcagctcagtgtctgcttcttgattgtaggtcatttttcgcttttaatgctggtcatatagccggatcagtgaacgtccgtttctctacaattgtgcgccgaagagcaaagggggctatgggcctggaacatatcgttccaaatgcagaactcagaggacggcttcttgctggcgcttatcatgcagtcgtgctgctcgacgagaggagcgctgccctcgatggcgctaagcgggacgggactttagcactggcagccggagctttgtgccgtgaagctagggccgcacaggtgtttttcctcaagggaggctatgaagctttttctgcttcatgccctgaattatgctccaaacagtctactcccatggggcttagcctccccttaagcacctctgtgccagatagcgcagaatcaggttgttcgtcttgctcaacccccctgtatgaccagggcggacccgtagagatcctgccctttctttatctaggctccgcataccatgcttctcgtaaggatatgctcgacgccctgggtatcactgctctgataaacgtcagcgcaaattgtcctaaccactttgagggacactatcagtataagagcattccagtagaagataatcacaaagctgacatcagttcttggtttaatgaggccatcgactttatcgacagcattaagaatgccggagggcgagtttttgtgcactgccaggccggaatttcaagatccgccacaatttgcttagcgtacctgatgagaaccaatcgggtgaaactagacgaagctttcgagtttgtgaagcagaggaggtctataatatcccctaatttcagttttatgggacagttacttcaatttgaatcccaggttctcgcccctcactgcagtgcagaggctggttctccagccatggccgtgctggaccgcggaaccagcactacaactgtttttaattttcctgtgagtattcccgtccacagcacgaattcggcattatcatacctgcagtctccaattacaaccagcccttcttgctag

SEQ ID NO: 221314 - DNA, 909 bp, synthetic construct
  misc_feature 1..909: note = Description of Artificial Sequence: Synthetic coding sequence
  source 1..909: mol_type = other DNA
atggtcatggaggtgggcacactagacgccggaggactcagggcgctactgggcgagagagcagcacagtgcttgcttctcgattgccgaagcttcttcgcttttaacgccggacacattgccggatccgtaaatgtaaggttctcagccgcacaggtgttcttcctcaagggcggatacgaagccttctccgcatcatgcccagagctgtgtagcaagcagtccaccccgatgggactttccctgcccctttcaacttccgtccctgactctgcagagagcggttgttccagctgttccactccactctatgatcaaggaggtcctgtggagattcttcctttcttatacctgggaagcgcctaccacgccagcaggaaagatatgttggatgcattgggaattaccgctcttataaatgtctctgccaactgcccgaaccacttcgagggacattatcagtataaatccatccccgtcgaagataatcacaaggcagatatttcctcttggtttaatgaggctattgattttatcgatagtataaaaaacgcagggggacgtgtttttgtacattgccaagccggtatcagccggtccgccacgatctgcctcgcataccttatgcgcactaaccgggtcaagcttgacgaggcttttgagtttgttaagcagcgcagatctattatctcccctaatttctcctttatgggacagttactccaattcgagtcccaggtactcgcaccgcactgttcagcagaagccggaagtcctgccatggccgttctcgaccgaggcacatcaacaaccacagtctttaacttccccgtatctatccccgtgcacagcactaactccgccttgtcatatttacagagcccgattacaacttccccctcctgctag

SEQ ID NO: 221315 - DNA, 1023 bp, synthetic construct
  misc_feature 1..1023: note = Description of Artificial Sequence: Synthetic coding sequence
  source 1..1023: mol_type = other DNA
atggtgatggaagttggaacgctggacgccggtgggctgcgggctcttttaggagaacgcgctgcgcagtgcctgctcctggattgtagatcatttttcgcctttaacgccggacacatcgctggctccgtcaacgtcaggttcagcactatagtgcggcgtcgagctaagggcgcaatggggcttgaacatatagtgcccaatgctaaacgtgatggcactctagcattggccgcaggtgctctttgccgggaggctagggcagcacaggtcttctttctaaagggcggatacgaagctttcagtgccagttgcccagagttgtgtagcaagcaatccacccccatgggcctgtcgttgccactgagtacctccgtgcccgatagcgccgagtctgggtgctcatcatgttccacgcctttatacgatcaagggggacccgtcgagatcctgcctttcttatacctgggcagcgcatatcatgcctctcgaaaagatatgctggatgccctggggatcacagccttgatcaacgtttccgccaactgtccaaaccatttcgaggggcactaccaatacaagagcatccctgtggaggacaaccacaaagccgatatcagctcatggttcaacgaagcgatcgacttcatcgattccatcaaaaatgcaggaggacgtgtcttcgtgcactgtcaggcgggtatctctaggtccgccacaatttgcctggcttacctgatgcggactaatagggtgaagctggatgaagccttcgagtttgtgaaacagaggcgttctatcatctccccaaatttctctttcatggggcagctactgcagttcgaatcccaggtcctggcccctcactgttcggcagaggctggcagtcccgcaatggctgttctggatcgagggacaagcaccaccacagtgttcaacttcccagtgtccatacctgtccattccacgaactctgcactttcctatcttcagtctccaatcaccacttcaccttcgtgttag

SEQ ID NO: 221316 - DNA, 1134 bp, synthetic construct
  misc_feature 1..1134: note = Description of Artificial Sequence: Synthetic coding sequence
  source 1..1134: mol_type = other DNA
atgaggaattccgagactctcgaaaggggagtcggaggctgcagagtgttctcctgcttgggctcataccccggtattgaaggcgctggtctggcgctcctagcagacttagctcttggcggaagactccttggcacgcacatgagccagtggcatcacccacgctccggttggggccgacgacgggacttttctggtaggagcagtgctaaaaaaaaaggcggaaatcacattcccgaacgctggaaggattacctgccagtgggccaaagaatgccaggaacacgcttcatagcatttaaggttcctctccagaagtcctttgagaagaaacttgcccctgaggaatgtttttcgcccctggatctatttaataaaattcgggagcagaatgaagaactcgggctgatcatagaccttacatatactcagaggtattacaagcctgaagatctgcccgaaactgtgccatacctcaaaattttcaccgtgggtcaccaggtgcctgacgatgaaaccatcttcaaattcaaacatgctgttaatgggttcctgaaggagaacaaggacaacgacaaactcataggcgttcattgcacccacggacttaatcggactggctatctgatctgtcggtacctgatagatgtcgagggagtgcgtccggatgacgctatcgagctttttaaccgttgtagaggtcactgccttgagcgccagaattatattgaggacctgcagaatggcccaattagaaaaaattggaacagtagcgtgcctagatcctctgactttgaagattcagctcatttgatgcaaccagttcacaacaaaccagtaaaacagggccctcggtacaacctgcaccagattcaaggacatagtgccccaaggcacttccacacacagactcagagcctccagcagagtgtgagaaagtttagcgagaatccgcatgtgtatcagcgccaccacctcccaccccctgggcctccaggcgaagactattctcaccgccgttactcttggaatgtgaagcccaacgcgtctagagcagcacaggatcgtagaagatggtacccttataattatagcagactttcctaccccgcttgctgggagtggacacagtag

SEQ ID NO: 221317 - DNA, 681 bp, synthetic construct
  misc_feature 1..681: note = Description of Artificial Sequence: Synthetic coding sequence
  source 1..681: mol_type = other DNA
atgtcccagtggcatcaccctagatccgggtggggccgacggcgtgatttctcaggacggtcttctgccaagaaaaaagggggaaatcacatccctgaaaggtggaaagactaccttcccgtgggtcaacggatgcctgggacgcgttttattgcgttcaaagtcccgctgcaaaagtctttcgaaaaaaaacttgcgccagaagagtgtttcagcccactggacctcttcaacaagattagagaacagaatgaagagttgggtctaatcattgatctcacctacacccagaggtattataaacctgaggatcttcccgaaactgtgccttatttgaagattttcaccgtcggtcaccaggtccctgatgatgaaaccatttttaaatttaagcatgctgtgaacgggttcctcaaggaaaacaaggacaatgataagctaattggcgtccattgcacacacgggcttaatcgaaccggatatcttatttgcagacgcagtcttgcactgagcccacggctggaatgttctggtacaatttccacacactcaaaattctgtttccccggaagcaggcgatccccagctagtgcctcacaggtcgctgggactacaggcgcacgccaccacgctagactcatcttctgcattttctctcgtgacgttgtgagcccctgctag

SEQ ID NO: 221318 - DNA, 822 bp, synthetic construct
  misc_feature 1..822: note = Description of Artificial Sequence: Synthetic coding sequence
  source 1..822: mol_type = other DNA
atgcgcaacagtgagacccttgaaagaggggttggtggttgccgcgtcttctcctgccttggatcatacccagggattgaaggcgctgggttagccttgttagcagatttggctctaggcggacggcttttgggaacccacatgtctcaatggcaccatcctaggtcgggctggggacggagacgggatttttcaggtaggtcatcggctaagaaaaaagggggaaaccatatccctgagagatggaaggactacttaccagtggggcagagaatgcccggtaccaggttcatagctttcaaggtgccactacaaaaatctttcgaaaagaaactggccccagaagaatgtttttcacctctagatttgttcaataaaatccgagagcagaacgaggagctgggccttatcatcgatctgacgtatactcaacgctactacaaacccgaagacctgccagagaccgtaccatatctaaaaatctttacagtagggcaccaggtaccggacgacgaaaccatattcaaattcaagcatgcagtgaatggttttctcaaggagaacaaggataatgataaattgataggtgtgcattgtactcacggcctcaaccgtacaggctatctcatctgtcggcgaagcctcgccctgtctcctagactggagtgcagcggcaccatctccacccacagcaaattctgctttcctggttcccggagaagccccgcttccgcttcacaagttgcgggtactacgggggctaggcaccacgcccgattaatcttctgtatcttttcacgtgatgtggtgtcaccgtgttag

SEQ ID NO: 221319 - DNA, 597 bp, synthetic construct
  misc_feature 1..597: note = Description of Artificial Sequence: Synthetic coding sequence
  source 1..597: mol_type = other DNA
atggatagtctgcagaaacaagacttgaggcgtcctaaaattcacggagctgtgcaggccagtccgtaccagcctcccacattggcatcactacagcgactcctgtgggttcgccaggcagccacccttaaccacatcgatgaggtctggccatcacttttcctcggcgacgcctacgctgctcgggataaatcaaagctgatccagctcggaattacacacgtagtcaacgccgctgccggtaaattccaagtagacaccggcgctaaattttatagggggatgtctttagagtattatggtatcgaagcagatgacaacccattcttcgatcttagtgtttatttcctgcccgtggccaggtacatccgggcagccctgtctgttcctcaaggaagggtgctggtacactgtgctatgggcgtgtcccgtagcgcaacccttgtattggctttccttatgatttgtgagaacatgactcttgtggaggcgatacagactgttcaggcacatagaaatatttgcccgaattccggcttcctccgacagcttcaggtgctcgataatcgcttaggtcgtgaaaccggcagattctag

SEQ ID NO: 221320 - DNA, 747 bp, synthetic construct
  misc_feature 1..747: note = Description of Artificial Sequence: Synthetic coding sequence
  source 1..747: mol_type = other DNA
atggctgaaacatcactgccagagctgggcggtgaggataaagccaccccatgcccctccatactggaacttgaggagctgcttcgcgctgggaagagcagctgctcaagggtggatgaagtttggccaaatctcttcatcggcgatgccatggattctctgcagaagcaagacttgcggcgtcctaagatccacggtgctgtccaagcctcgccctaccagcctcctactctcgcatctttgcagcgactgctgtgggttcggcaggcagcaactcttaaccatatcgacgaagtgtggcctagtttgttcctcggagacgcttacgcagctcgggataagtcgaaattaattcagctcggaataacccatgttgtcaacgctgccgcaggtaaatttcaggtcgatactggagccaagttctaccgaggaatgtcactggagtattacggcattgaagcagatgacaatcccttcttcgacctttcggtgtatttcctccctgtggcgagatatatcagggccgcacttagtgtaccccaaggacgggttttggtccactgcgctatgggcgtcagcagaagtgccactctggtcctcgcgtttctcatgatttgcgagaacatgacactggttgaggccatccagactgtgcaggctcaccgtaacatttgccccaactccggctttcttcggcaattgcaggtcctcgacaataggctagggagagagactggaaggttttag

SEQ ID NO: 221321 - DNA, 567 bp, synthetic construct
  misc_feature 1..567: note = Description of Artificial Sequence: Synthetic coding sequence
  source 1..567: mol_type = other DNA
atggccgagacctcacttccggagctcggcggtgaggacaaagccaccccctgtcccagcattcttgaactggaggaactgctccgcgctggaaagagctcgtgctctagagtggatgaggtgtggccgaatctgtttatcggagacgcggcaacagctaataatcgctttgaactgtggaaacttggaattactcacgtactcaacgccgcacataaaggactgtattgtcagggagggcctgacttctacggatcaagcgtgtcgtacctgggagtacccgctcatgacctgcctgatttcgatataagcgcctacttttccagcgcagcggatttcatccacagggccctgaatacccccggagccaaagtcttagtacattgtgttgtgggagtgtctcgatcagctacactggtgctcgcctatctcatgctccaccagaggctgtccttacgacaggctgtgatcaccgtccggcaacacaggtgggtctttccaaatcggggattcttacaccagctgtgcaggctcgaccagcaactcagaggcgctgggcagtcctag

SEQ ID NO: 221322 - DNA, 876 bp, synthetic construct
  misc_feature 1..876: note = Description of Artificial Sequence: Synthetic coding sequence
  source 1..876: mol_type = other DNA
atgggcttgtgccatttcgccacattggctctcatactgttggtactcttggaggccttagcccaggcagacacccagaagatggttgaagcacagaggggggtgggcccaagggcctgctacagcatctggctcctgctcgctccaacgccccctctatcccattgtctgcagagtcctcagaagcagcatcaggtttgtggcgatcgccgtcttaaagcctctagcacaaattgcccgtctgaaaagtgcactgcttgggccagatacagtcaccgtatggactcactgcagaagcaggaccttcgccgacccaagattcacggcgcagtccaggctagcccatatcaaccacccactctagcgtccctccagaggctgctatgggtgcgccaagccgcaactctgaaccacattgatgaggtctggccatctctcttcctgggagacgcttatgccgcacgagataaatcaaagctcatccagttagggataactcacgttgtaaacgcagccgcaggcaagttccaggtggacacgggcgctaaattctatagagggatgtcattggaatattatggcatcgaggcagatgacaaccccttctttgacctgtcagtgtattttctgcccgtagctcgctatattagagccgcactctctgtccctcagggccgtgtgttggtgcactgcgcgatgggagtctcaagatctgctacacttgtactcgccttcctcatgatctgtgagaacatgacacttgttgaggctattcaaaccgttcaggcacatagaaatatttgtcccaatagtggttttcttcgtcaactgcaggtgctggataataggctgggaagggagaccggcaggttttag

SEQ ID NO: 221323 - DNA, 597 bp, synthetic construct
  misc_feature 1..597: note = Description of Artificial Sequence: Synthetic coding sequence
  source 1..597: mol_type = other DNA
atggattctctgcagaaacaggatctgcggagacctaagatccacggtgcagtgcaggcctccccttatcagcccccaaccctcgcatctcttcagcgcttgctgtgggtcagacaagccgcaacactcaatcacatcgacgaagtctggcctagtcttttcctgggcgatgcttatgccgctcgggataaatcaaagctgatccaactcggaatcacgcacgtggtcaacgccgcagcgggaaagttccaggtggacacaggggctaagttttatcggggaatgagcctggagtactacggcatcgaggctgatgacaacccattttttgacttatcagtctattttctgcccgtcgccaggtatattagggccgcactatcagtcccccaggggagagtattagtgcattgcgccatgggcgtctcgcggtcggcaaccctggtacttgcctttttaatgatttgtgagaatatgactttggtagaagccattcaaactgtgcaggcgcatagaaatatttgccccaactccggattccttcggcaactacaggtcctggacaacaggctgggacgcgagactggccgtttttag

SEQ ID NO: 221324 - DNA, 984 bp, synthetic construct
  misc_feature 1..984: note = Description of Artificial Sequence: Synthetic coding sequence
  source 1..984: mol_type = other DNA
atgggtctgcctcagcctaggttacccgctcccgcattacaggccggtcctgcaaccgcagggtgcaggccggagctgagaggacagagctggtcacttctgcccgcaatgggtttatgccattttgcaactttggccctcatccttttggtcctcttagaagcacttgcccaagcagacacccagaagatggtggaggctcagcgcggagtaggtccaagggcgtgctattcaatctggctgctcctcgccccaacaccccctctgtcacattgcctccagtccccacagaagcagcatcaggtgtgcggcgacaggagactgaaggcgtccagtaccaattgtccatccgagaagtgcaccgcatgggcgagatatagtcatcggatggatagccttcagaagcaggacctgaggcgcccaaaaattcatggagccgttcaggcctcgccgtaccagcctcccacactagcatctctgcagagactgttgtgggtacgtcaagctgcgacactcaatcacatcgatgaggtgtggccctctctttttctgggagatgcttacgccgcacgtgataagagcaaactgatccaactgggcatcacccacgtagtgaatgccgcagccggtaaattccaggtcgatactggagcaaagttttaccgaggcatgagcttagaatattatggcatcgaggccgatgacaaccccttcttcgatctgagcgtttatttcctccctgtggccaggtacattagggccgcactttccgtaccccaaggccgagtccttgtccactgtgctatgggagtgtcacgctccgctacgcttgtcctggcgttcctgatgatctgtgaaaatatgacactcgtggaagctatccagacagtccaagcgcaccgcaacatatgcccaaacagcggattcctgagacagctgcaggttttagacaaccggttgggacgggagactggtcgattctag

SEQ ID NO: 221325 - DNA, 597 bp, synthetic construct
  misc_feature 1..597: note = Description of Artificial Sequence: Synthetic coding sequence
  source 1..597: mol_type = other DNA
atgtcatctcggggtcacagcacattgcccagaacactgatggcccctcgaatgatctcagagggagacatcggagggatcgctcagatcacctcctccctgtttctgggacggggtagcgtagcatctaatcgccatctgctgcaggccaggggaatcacttgcattgtcaatgccactatcgagattcctaatttcaattggcctcagtttgaatacgtgaaagtcccactggcggacatgccacacgcgcctatcggcttgtattttgatacggtggcagataaaattcactctgtgtctaggaagcacggcgctactcttgttcactgtgccgcaggagtgtccagatccgccacactttgcattgcttacctgatgaaatttcataacgtgtgtttactcgaagcatacaactgggtcaaggccagacgtcccgtcatccgtcctaacgtgggtttctggagacagctgatcgactacgagcgccagctcttcggcaaatctacagtcaagatggtgcagacaccgtacggaatagtgcccgatgtctatgaaaaagagtcacggcacctgatgccatattggggcatctag

SEQ ID NO: 221326 - DNA, 597 bp, synthetic construct
  misc_feature 1..597: note = Description of Artificial Sequence: Synthetic coding sequence
  source 1..597: mol_type = other DNA
atgtcttctcggggtcactccactctccctcgcacactcatggccccacggatgatctctgagggcgatataggcggaattgctcaaattacgagcagtctgtttcttggacgcggatctgtggcctcaaatagacatctcctgcaggcccgtgggatcacctgtattgtgaatgcaactatagaaatccctaatttcaactggccgcagtttgaatacgtgaaggtgccactggccgatatgccccacgcccctattgggctatacttcgatactgtggctgacaaaatccacagcgtgagcagaaagcatggcgcaaccctagtgcactgcgctgctggagtgtcgcggagcgccactctgtgtattgcgtatctcatgaaatttcacaacgtctgcctgctggaagcttacaactgggtgaaagccagacggccagttattaggccaaatgtggggttttggcggcagctaattgactacgagcggcaattatttggtaaatcaactgtaaaaatggtgcagactccgtacgggattgtgccagacgtctacgagaaggaaagcaggcacttaatgccctattggggtatctag

SEQ ID NO: 221327 - DNA, 945 bp, synthetic construct
  misc_feature 1..945: note = Description of Artificial Sequence: Synthetic coding sequence
  source 1..945: mol_type = other DNA
atggggctcgaggccgcacgggagctcgagtgcgccgctctgggcaccttgctgcgcgatcccagggaggctgagcggactttgctgctggattgcagaccttttctagccttttgccgacggcacgtccgggcagcacgtccagtcccctggaacgcactcctgcggcgacgggctaggggacccccagcagccgtgcttgcatgcctgctgccagacagagcgctccggacacggttagtgaggggagagctggctcgtgccgtagtgttggatgagggctctgccagcgttgccgagctaaggcccgacagtcctgctcacgtgttacttgcggctctgctgcatgaaacgcgtgccggtcctacggcagtgtactttttgagagggggattcgacgggtttcagggctgttgccccgatctttgctccgaagcacccgcacccgcactgccgccaactggcgataaaacgtcgcgctccgactccagagcaccagtctacgaccagggcggtccagtcgagatcttgccctacctgttcctcggctcatgcagtcacagcagcgatttgcagggattacaggcctgcggaatcaccgccgtgctgaacgtgtctgctagttgtcccaaccactttgaaggcttattcagatacaaatctatccccgtcgaagataatcagatggtcgagatcagcgcttggttccaggaagctatcggctttattgattgggtgaagaactccggcggtcgcgttttggttcactgtcaggctggaatatcccggtccgccacaatctgtctggcatatctcatgcagtcgcgccgagtgcgactcgacgaagcttttgactttgtgaaacagcgccgtggagtgatctcacccaatttctcatttatgggtcagttacttcagttcgagacacaggttctctgccattag

SEQ ID NO: 221328 - DNA, 288 bp, synthetic construct
  misc_feature 1..288: note = Description of Artificial Sequence: Synthetic coding sequence
  source 1..288: mol_type = other DNA
atggcggctgctagactgtgcctgtctctgctgctgctctccacatgcgtcgccctcttgctgcagccactccttggagcgcagggcgctcctctcgaacccgtgtatccaggggataatgcaactccggagcagatggcccagtacgccgctgacctgaggcggtacattaacatgctgacgaggcctcgctatggcaagaggcacaaagaggatactttggcctttagcgaatgggggtcaccccacgcagccgttcctcgcgaattatcacccctagacctgtag

SEQ ID NO: 221329 - DNA, 435 bp, synthetic construct
  misc_feature 1..435: note = Description of Artificial Sequence: Synthetic coding sequence
  source 1..435: mol_type = other DNA
atgtccgttgcccaggacatcccaaagctgcagaagctcggcatcacccatgtcttaaatgcagcagaagggcgatcgttcatgcacgttaacactaacgcaaacttctataaggatagtggtattacctacctgggaataaaggccaacgacacccaggaatttaatttatcagcatacttcgagagggccgcagactttatcgatcaggcactcgctcaaaagaatggaagggtgctggttcattgtcgagagggctatagtcgctcacctaccctggtgatcgcatatctgatgatgcgacagaaaatggacgtgaagtctgccctgtccatcgtgcgccaaaatcgggagatcggcccaaatgacgggttcctggctcaactttgccaactgaacgaccggcttgcaaaggagggcaagctgaaaccatag

SEQ ID NO: 221330 - DNA, 1185 bp, synthetic construct
  misc_feature 1..1185: note = Description of Artificial Sequence: Synthetic coding sequence
  source 1..1185: mol_type = other DNA
atggttaccatggaagagcttcgggagatggattgttctgtattgaaacgcctgatgaatcgggatgaaaacggagggggtgccggaggctcagggagtcacgggacgctgggcctcccctcgggcggtaagtgtttgctgctggactgtcggcctttcctcgcacattccgcaggctatatccttggctcagtcaacgttagatgtaacacgatcgtccggagaagagcaaaagggtccgtgtctttggaacagatcttgcccgctgaagaagaagtgagggccagactgaggagcggtctgtattcagctgtcatcgtttacgatgaacggtcacctagagcagagtcactgcgagaagacagcaccgtgtccctagttgtccaagcccttcggcgtaacgcagaacgcacagacatctgcttgctgaaggggggttacgaacgattcagcagtgagtaccccgagttctgttctaagacgaaggctctggctgccattccaccacccgtgcccccttccgctacagaaccattagatctgggttgctctagctgcgggacacctctgcatgatcaggggggaccagtggagattctgccattcctgtaccttggttccgcttaccatgctgcaagaagggatatgctggacgcacttggtattaccgcgcttctgaacgtgtctagcgattgtcccaatcacttcgaggggcattaccagtacaagtgcatacctgttgaggataatcataaggccgacatcagttcctggttcatggaggctatcgagtatatcgatgccgttaaggattgtcggggtagggtgctggtgcattgccaagctggcatctctcgcagcgcaaccatttgtctagcttatctaatgatgaaaaagagggttaggctggaggaggcttttgagtttgtgaagcagcgcaggtctatcatcagccctaatttctcttttatgggacagctccttcagtttgaaagccaggtgctcgccacgtcatgcgccgcagaggctgccagcccctctgggccacttagagagaggggcaagaccccagccaccccaacgtctcagtttgtgttttcgttcccagtctcagtgggggttcactcagcgcctagctccctaccgtaccttcattctcctattacaacaagtccaagctgttag

SEQ ID NO: 221331 - DNA, 912 bp, synthetic construct
  misc_feature 1..912: note = Description of Artificial Sequence: Synthetic coding sequence
  source 1..912: mol_type = other DNA
atggggagaaaggtacatagcaatggttctcagtttgcggaacattcacgcagtcctcggcgaacagggagggattgcaagcccgtaagagctccttccatggcattaggtgtttctcaactagccggtaggtctcggtgcctctgcagcgagagccagggcggttacgagagattctcatccgaataccccgagttctgctcgaagactaaggccctcgcagcgattcctcccccagtcccgcctagtgcgacggaaccactagatttaggctgcagcagctgcggaacgccgctgcatgatcaaggtggcccagttgagatccttccgttcctgtatttaggctctgcctatcatgctgccaggcgcgacatgctggacgcattaggtatcacggcattgctgaacgtaagtagcgactgccccaatcactttgaaggccactaccagtataagtgcatccctgtggaagataaccataaagctgatatctcctcatggttcatggaggcaatcgaatatatcgatgcagtcaaagattgtagggggcgagtcctagtacactgtcaggccggtatttcgaggtccgccactatctgccttgcctatcttatgatgaaaaaacgggtgcgcttagaggaagcttttgagttcgtgaagcagcggagaagcatcatttccccaaacttctcctttatgggccagctgcttcagttcgaatcccaagtgttggccacttcttgtgccgctgaggcggcttcgcctagtgggcctctccgagagagagggaagaccccggctaccccaacttctcagttcgtttttagcttcccagtatcagtaggagtccattcagctcccagctctttgccgtaccttcatagccccatcaccacttctcctagctgctag

SEQ ID NO: 221332 - DNA, 1155 bp, synthetic construct
  misc_feature 1..1155: note = Description of Artificial Sequence: Synthetic coding sequence
  source 1..1155: mol_type = other DNA
atgaaggtcacttccctcgatgggaggcagttacggaaaatgttgcggaaagaggctgccgctagatgcgtggtccttgactgtcggccttaccttgcatttgcagctagtaacgtacgcggttccctgaacgtcaatcttaacagcgtcgtgctgcgtcgggctcgcggtggcgcagtcagcgcccgatatgtcttgcccgatgaggccgctcgggctagactactgcaggaggggggaggaggtgtggcagccgtggttgttctcgatcaggggagccggcactggcagaagctgagggaggagagcgcagcaagagtagtcttaacatccctgctggcgtgtctcccagcgggaccgcgtgtgtatttccttaagggaggctacgagactttttattcagagtatcccgagtgttgcgtggatgtgaagcccatctcacaagagaaaatagagtctgagcgggctctgattagtcagtgcggcaagccagtggtcaatgtcagctatcggccagcctacgaccagggaggccctgtggagatccttccttttttgtacctagggagcgcctaccacgcgtctaaatgtgagtttttagcaaacttgcacatcactgccctgctgaacgtgagtagaagaactagcgaggcttgtgccacccatcttcactacaagtggatccccgtcgaagatagccatactgccgacatcagctcccatttccaggaagctatcgactttattgattgcgtgagggaaaagggcggtaaggtactggtacattgcgaagccggaatcagcagatcccccaccatctgtatggcatacttgatgaaaacaaagcagttccgtttaaaagaggcattcgactatatcaaacagcgccgaagcatggtctcccctaactttggtttcatgggccagctgctgcagtatgagtccgagatcctgccatctacgcccaacccccagccccctagttgccagggggaggcagctggctcttctctgattggtcatcttcaaacactctcgccagatatgcagggggcatattgcacctttcccgcatctgtcctggccccagtacccactcatagcactgtttccgagctgtctcggtcacccgttgcaactgctactagttgctag

SEQ ID NO: 221333 - DNA, 1107 bp, synthetic construct
  misc_feature 1..1107: note = Description of Artificial Sequence: Synthetic coding sequence
  source 1..1107: mol_type = other DNA
atgccatgcaagagcgctgagtggctgcaggaggagcttgaggctaggggtggcgcttctttactgctgcttgattgccgaccacacgagctgttcgagtcaagtcacatcgagacagccatcaacctggcaattcccggtctgatgcttcggcgtttgcggaagggcaacctgcctattagaagtataattcccaatcatgcagataaagagaggttcgcgaccagatgtaaggctgctactgtgcttctctacgacgaggctactgctgagtggcagcctgagcctggtgcccctgcttcagtgttgggcctcctgctccaaaagttgcgtgatgatggatgtcaggcctactatctgcaaggtggctttaataaattccagactgagtattcagaacattgtgaaacgaatgtggactcgagtagtagtccctcaagcagccctccgacttctgtactgggactgggaggacttaggattagttccgattgttcagatggagagtccgacagagaacttccaagcagcgcaacagagtccgacggctcccccgtcccgtcttcccagcccgcttttcctgtccagatcctgccctacctgtacttagggtgtgcaaaagattctaccaatctcgacgtcttagggaaatacggcatcaaatatatcctgaacgtgacacccaatctgccaaacgcattcgagcatggaggggaattcacctacaagcagatccctatctcagaccactggtcacagaacttgagccagtttttccccgaagcaatatcattcattgacgaggctcggagtaaaaaatgcggcgtactggtacattgtctggctgggatcagccggagcgtgacggttactgtcgcgtatctgatgcaaaaaatgaacctttccctcaacgacgcttacgactttgtgaaacgtaaaaaatctaacatctcacctaatttcaacttcatgggacagttactcgatttcgaaagaacactcggcctgagctctccatgcgataaccacgcatcatctgaacagctctacttttccacaccaaccaatcacaatctgtttcccttgaatacactcgaatccacatag

SEQ ID NO: 221334 - DNA, 1260 bp, synthetic construct
  misc_feature 1..1260: note = Description of Artificial Sequence: Synthetic coding sequence
  source 1..1260: mol_type = other DNA
atgaaaaatcaactccgaggtcccccagctcgggctcatatgtctacaagtggtgcggcagcagccggaggaacccgggcaggctcagaacccggagctggctccggcagcggcgcagggactggcgcaggggcagcgactggtgcgggagcgatgccctgcaagagcgctgagtggttgcaggaggagcttgaagcgaggggaggtgcaagcctgctattgctagattgcaggccccacgagcttttcgaaagctcccacatagaaaccgctatcaacctggcgatccccggtcttatgcttagaaggctgagaaagggaaatctgcccattagatccattatacctaaccatgccgacaaggaaaggttcgccaccagatgcaaggctgcaaccgtgctgctgtacgatgaggcaacagccgaatggcagcctgagccaggcgcacctgcctctgtgcttgggctactcctgcagaaactgcgcgacgacggatgtcaggcatactatctgcaagggggatttaacaaattccaaaccgagtactccgagcactgtgaaacaaatgtcgactcatccagtagcccctcgagcagcccgccaacaagtgttctggggctgggaggcctgcgcatctcctcagattgtagtgatggggagagtgatagagagcttccaagcagtgctaccgaaagtgatggctccccagtgccctctagccagcctgcgtttccggtgcagatcttgccttatctctacttgggttgcgccaaggactctaccaaccttgacgtcttgggcaagtatggaatcaagtacattcttaatgttacacccaatttacccaacgccttcgagcacggcggagaatttacatataagcagatccccattagcgatcactggtcacagaatctgtctcagttttttcccgaggctatttcctttatcgatgaagccagaagcaagaaatgtggcgttctggtgcattgtcttgctggcatctcaaggagcgtcactgtgacggtggcctacctgatgcagaaaatgaacctcagccttaatgatgcctatgatttcgtcaagcggaagaagagcaacatctctcctaattttaactttatggggcagctgctcgactttgaaaggacactgggcctgagctcgccatgtgataaccatgccagttcagaacaactgtatttttcaacccccacgaatcataatctattccccttgaatacactcgaaagcacatag

SEQ ID NO: 221335 - DNA, 1878 bp, synthetic construct
  misc_feature 1..1878: note = Description of Artificial Sequence: Synthetic coding sequence
  source 1..1878: mol_type = other DNA
atggcaggtgaccgcctccccaggaaggtcatggatgccaagaagttggcgagcctcctgcggggaggacctggaggccctctggtgatcgactcacgttccttcgtagaatataactcttggcacgtcctgtcctctgtgaacatctgctgtagcaaactggtgaaaaggagactgcagcagggtaaggtaaccattgccgagctgattcagccagccgcaagatcccaggtcgaagctaccgaacctcaggacgtggttgtttatgaccaaagtaccagggacgccagcgtactggccgctgattccttcctgagtatactgctgagcaagctcgacgggtgctttgactctgtggccattctcactggcggattcgcgacattttcctcttgtttccccggtctctgcgaaggtaaaccagccgctcttctgccgatgtctctcagtcagccatgtctgcctgtcccctcggtggggctgaccaggattctcccgcacttatatctggggtcgcaaaaagacgtgttgaacaaggatctgatgactcaaaatggtattagttacgtgctgaacgcctcaaactcgtgccctaagcctgacttcatatgtgaaagccgctttatgcgcgttccaatcaacgataattactgtgaaaaactcttgccctggcttgacaagagcatagaatttattgacaaagccaaactatcttcttgtcaagtgatcgtgcattgccttgccggaattagccgtagcgccacaatcgccattgcctatattatgaagacaatgggcatgtcttctgatgatgcataccggtttgtgaaagaccgacggccttccattagtcctaatttcaatttccttggtcagcttctggagtacgagcggtctctcaagctgctggcagcgctgcagggggaccccggaactccaagtggcacgccagaaccgcctccaagtccagctgccggagcaccactgcctaggctacctccacccaccagcgaatctgctgctacaggaaatgccgctgcaagggaaggcggacttagtgctgggggagaaccacctgccccacctaccccccctgcgacttcagctcttcaacaaggtctgcgcggtctgcatctcagtagcgacagacttcaggacaccaataggctcaagcgatccttttcccttgacataaagagcgcttacgcaccctcccgtcggcctgacggaccgggtccccctgatccaggcgaagccccaaaactctgcaaactggactctccgagtggtgcggcattgggcctgagtagtcctagccctgatagtcccgacgcggctcccgaagctcgtccgcgacccaggagacgaccacgtccccctgccggaagcccagcgcgatcccctgcgcactcactgggcctaaacttcggcgacgccgctcgtcagacaccgaggcacggtctctctgcactgtctgctcccggactgccaggtccaggccagccggctggaccgggtgcttgggcaccccctttggacagccctggcacccccagtccggatggcccatggtgtttttcaccagagggcgcacagggagcaggtggtgtcctgttcgcacccttcggtagagccggtgccccaggaccgggaggcggatcagacctacgtaggcgggaagccgctcgagccgaaccgagagatgctcgaaccggctggcctgaagagcctgcccctgaaacccagttcaagcggcgttcgtgccagatggagttcgaggaagggatggtagaagggagagcccgaggtgaagaactggctgccctgggaaaacaggccagtttttcgggctcggttgaagttatcgaagtgtcttag

SEQ ID NO: 221336 - DNA, 1878 bp, synthetic construct
  misc_feature 1..1878: note = Description of Artificial Sequence: Synthetic coding sequence
  source 1..1878: mol_type = other DNA
atggcaggtgatcgcctgccgagaaaggttatggatgctaaaaaattagcctccctactgagggggggaccaggcggtccgctcgttattgatagtaggagttttgtggaatacaattcctggcacgtgctttccagtgtcaatatctgttgctccaagctcgtcaaacgccgtctccagcagggcaaggttaccatagcggaacttatacaacccgctgccagaagccaggtcgaggccacggagccgcaagacgtggttgtgtacgatcagagcaccagggatgccagcgtcctggccgctgactcctttctgagtattttactctctaagttggatggctgcttcgactctgtggccattctaactggcggttttgctacattttcatcctgcttccctggactgtgcgagggcaagccagcagctctgctgcctatgtcattgtcccagccatgtctgccggtcccctccgtcgggctcacccggatcctgccacacttatacctgggatcacaaaaagacgtactgaacaaggatctcatgacccaaaatggcatttcttatgtgctcaatgccagcaactcctgtccaaaacctgattttatctgcgagtccagattcatgcgcgtgcctatcaatgataactattgcgagaagctgctgccctggcttgacaagagcatcgagttcatcgacaaagcaaagctgagcagctgccaagtaattgtgcactgcttagcaggaatctccagatctgccacaatagcaatcgcttacatcatgaaaactatgggaatgagctctgacgacgcctataggttcgttaaggatcggaggccttcaataagcccaaactttaattttctcggccaactgctggagtacgagcggagcctgaagctgctggctgctttgcagggagaccccggaaccccttctggcacccctgagccaccaccaagccctgccgcaggcgctccgctgcccagactgcctccacctactagtgaatccgcagcaaccggcaacgcagccgcacgagaggggggactgtctgcaggcggtgagccaccagccccacccaccccgcctgcaacgtcggcattgcagcagggactccggggactacatttgtcgagcgatcggctacaggatactaaccgactgaaacggtccttttctctggatattaagtccgcttacgcgcctagccgaagacccgacggaccaggtcccccagatccaggagaagccccaaagctgtgcaaactcgattctccttctggggctgcacttgggctttctagcccttccccagacagcccggacgccgctcctgaagcaagaccaagaccaaggcgcagacccagacccccagccggatcacctgctcgcagcccggcacactccttgggtctcaattttggagacgccgctagacagacccctcggcatggtctgagcgctctctcagcgccaggcttaccaggtcctggacagccggctgggccaggggcatgggcacccccactcgatagcccaggtaccccatccccggatggaccatggtgcttcagccccgagggcgcacaaggcgcaggaggggtgctattcgccccattcggaagagctggggcacccggaccaggtggaggcagtgacctcagacgccgagaagctgccagggctgagcccagagatgcccgtaccggctggccggaagaacccgctcctgaaacccagtttaagcgcagatcctgccagatggagttcgaggagggaatggtcgaaggaagggctaggggcgaggagctcgctgctctcgggaaacaagccagcttttccggcagtgtggaagtaatcgaggtgtcctag

SEQ ID NO: 221337 - DNA, 1626 bp, synthetic construct
  misc_feature 1..1626: note = Description of Artificial Sequence: Synthetic coding sequence
  source 1..1626: mol_type = other DNA
atgcacactgggggtgagacctccgcctgcaaaccaagttctgtcagactggccccttcattctccttccacgctgccggactgcagatggccggtcagatgcctcactcccatcagtactccgaccggaggcagcctaacatcagtgaccaacaggtgagcgctctcagttattcagaccagatccagcagccattaactaaccaagtgatgcctgacatcgtgatgctgcagcggcgaatgccacagaccttccgagatccagctaccgcccctttgcggaagctgtcggttgacctcattaaaacgtataagcacatcaacgaagtctattacgcaaaaaagaagcgccgacaccagcaggggcagggcgatgatagcagtcataagaaggaacggaaggtctataacgatggatacgacgatgataactatgattatatcgtgaagaacggcgaaaagtggatggatcgctatgaaatagactctctgatcggaaaggggtcctttggtcaggtcgtgaaggcttacgaccgcgttgagcaggagtgggtggccatcaagatcattaagaacaagaaagctttcctgaatcaggctcaaattgaggtgcgactcctggagcttatgaataagcacgataccgagatgaagtattacatcgtccacctcaagcgccactttatgtttcgaaatcacctatgtctggtcttcgagatgctctcctacaacctgtatgaccttcttcgtaatactaacttccggggtgtgtccttaaacttaaccaggaagtttgcgcagcagatgtgtactgctctcctttttctggccactcctgaactctccatcatccactgtgacctgaagcccgagaatattctgctgtgtaaccctaagagatccgccatcaagattgtcgactttggatcttcttgtcagctgggccagaggatttatcagtacatccagtcacgcttctatcgctcacccgaggtactcctgggcatgccctatgaccttgctatagacatgtggagcctgggatgcattttagtggagatgcacaccggcgaacctctgttttcaggggctaatgaggtcgatcagatgaataagatcgtggaggtcctaggaatccctccagcacacatcttagaccaggccccaaaagctcggaagtttttcgaaaagttacccgacgggacctggaacctaaagaagacaaaagacgggaaacgcgaatataagcctcctgggacacgcaaattacacaatatactgggagtggaaactggcggtcctggtggtaggcgcgcaggcgagtcaggtcacacagtagccgactatcttaagttcaaggatctgattctccgtatgctggactatgacccaaaaacccgaattcaaccttattatgctttgcagcactccttttttaaaaagacagcagacgagggcacaaacacgagcaattctgttagcacaagcccggcaatggagcagagtcagtcgtccggcacgacctcctcgactagcagctcaagtgttgtggaacagcattggatgcctggcgcttttcgaatgacggtcagtttcacactagaggtgcacgacgtgccagtgtag

SEQ ID NO: 221338 - DNA, 1755 bp, synthetic construct
  misc_feature 1..1755: note = Description of Artificial Sequence: Synthetic coding sequence
  source 1..1755: mol_type = other DNA
atgcacactgggggtgagacgagtgcttgtaagccttcaagcgtacggcttgccccttctttcagttttcatgctgcagggcttcagatggccggacagatgccccattcccaccagtacagcgacagaaggcaacctaacatctctgatcagcaggtgtctgccctgtcttactctgaccaaatccagcaaccattgacgaatcaagtgatgccagacattgtcatgttgcaacgccgaatgccacagacgttccgggacccagctaccgcccctttgaggaagctatccgtggatctaatcaagacctacaagcacattaatgaggtttactacgcgaaaaagaaacgacgccatcaacaggggcagggtgatgactcttcacacaaaaaagaacgaaaggtttataatgatggttatgatgacgacaattatgactatattgtcaaaaacggcgaaaagtggatggaccgctacgagatcgactcgctgattgggaaagggtcatttggtcaggtggtcaaggcatatgatcgggtcgaacaggagtgggtggctattaagataataaaaaacaagaaggcttttctgaaccaggcgcagatcgaggtgcggttgttggagttgatgaataagcacgatactgagatgaagtattacattgtgcaccttaagcgacatttcatgttcagaaaccacctctgcctcgtgtttgaaatgctttcctacaatctttacgacctcttgaggaacactaacttcaggggagttagtttgaatttaacgaggaaatttgcccagcagatgtgtacagcattgctcttcctggcaactcctgagcttagcatcatccactgcgacttgaagcctgaaaatattctcctgtgtaatcccaagcgatctgccattaagatcgtggacttcggatcttcctgccagttaggccaacggatttatcagtatatccagtcccggttttatcgtagtcctgaagttctgctgggaatgccttacgacctggcaatcgacatgtggtccttgggctgcatcctggtggagatgcacactggggagcccttgtttagcggggcaaatgaagtggaccagatgaataaaatagtcgaggttttgggaatcccgccagctcatatattggaccaagccccaaaggcgcgaaagtttttcgaaaagctaccagatggtacatggaaccttaaaaaaacgaaagatggcaagagagagtacaagcccccaggtacacgtaaactccacaacattctgggggtcgaaaccggtggtccagggggaagaagagccggagaaagcggccacacggtagccgactacctcaaattcaaagatcttatcctgcggatgttagactatgaccctaaaacccggatccagccttattacgctcttcaacatagcttttttaagaagactgcagatgagggcaccaacactagtaactctgtatccacgtcacctgcgatggagcagagccagtcatctggcaccaccagcagcacatcttcctcttcaggagggtcttccgggacctctaatagtggcagagcccgtagcgatcccacccaccagcacagacactctggcggacactttactgccgctgtacaggccatggactgtgagacccactccccgcaggtgtcttctcatgtcgtccacctgctcgtgtctccggcaattctccgatggtctagcacgggctgtcaggttcccctcgaatag

SEQ ID NO: 221339 - DNA, 2265 bp, synthetic construct
  misc_feature 1..2265: note = Description of Artificial Sequence: Synthetic coding sequence
  source 1..2265: mol_type = other DNA
atgcacaccggaggagaaacatccgcttgcaaaccctcctctgtgcggctggcaccgtcattttcattccatgctgccggactacaaatggcaggccagatgccccacagccaccagtatagtgaccgtagacagccgaatatctcagatcagcaggtcagcgccttgagttattccgatcagatccagcaacccctcactaaccagcgacggatgccacagacttttcgagaccctgcaacagcaccactgagaaaattgagtgtggacctcatcaagacctataaacatattaacgaggtgtactatgccaagaaaaagcggaggcatcagcaagggcagggcgatgactcctcacacaagaaagaacggaaggtttacaatgatggatacgacgatgacaattacgactacattgtgaagaatggcgagaagtggatggacagatatgagattgatagcctgatcgggaaaggcagtttcgggcaggttgtgaaggcttatgaccgcgtcgagcaggagtgggtggctattaagataatcaagaacaagaaggcttttttaaatcaagctcagatcgaagttagacttttggagctgatgaataaacacgacactgaaatgaagtactatatcgtacacttgaaacgacacttcatgtttaggaaccacctttgcctggtcttcgagatgctctcatataacctatatgacctgcttcggaataccaatttccggggagtgagcctcaatctcacgcgcaagttcgcgcaacaaatgtgtacagcactgctgttcctcgccacccctgagttgagtatcatacactgtgatttgaagcctgagaacattttgctgtgcaaccctaaaagaagtgccatcaagatcgtggatttcgggtcctcctgccagctggggcagcggatttaccagtatatccagtccagattctatcggagccccgaagtgctcctgggaatgccctacgatcttgcgatagatatgtggtccctgggctgcatcctggttgagatgcacacgggtgagccactgttttcaggtgccaatgaggtcgaccagatgaataaaatcgttgaagtgctcggcataccaccggctcatattctggaccaggctccgaaagcaagaaagtttttcgaaaagctgcctgacggaacatggaatctgaaaaagactaaggatggaaaaagagagtacaaaccccctggaacgaggaaattgcataatatcctgggagtcgagacaggtggtccaggcggacgtagagcgggagaaagcggacataccgtcgccgattacctgaaattcaaggatttgattctgagaatgcttgactatgatccaaagacacgcattcaaccatactacgccctgcagcactcttttttcaaaaagactgccgacgaaggaactaacacttcaaactccgtgagcacatctccagccatggaacagtcccaatcctcgggcaccacttccagcaccagctcctcttcggggggatctagcggaacttcgaacagcgggagggccagaagcgatccaacacatcagcaccgacactcgggcggacattttacagccgcagttcaggctatggattgtgaaacacattccccccaagtgcggcagcaattccccgctccgctcggctggagcgggacagaggcccctacccaggttaccgtggaaacccatccagtgcaggagacaacctttcacgtggctccccagcaaaacgctctgcaccaccatcacggtaactcgtcacaccatcaccaccaccaccatcaccatcatcatcatcatgggcagcaagctctcggtaatcgaactcgcccaagggtctataacagtccgaccaattcaagctccacacaggatagcatggaggtcggacattcgcaccatagtatgacatctttatctagtagtacaacatcctcttcaacttctagcagctccaccggtaaccaggggaaccaggcgtatcagaatcgccctgttgccgctaacacacttgacttcggacagaatggcgctatggatgtgaacctgaccgtgtattccaatcctcggcaagagactgggattgctggccacccaacttaccagttttcagccaatacagggcctgcgcactacatgacagaaggtcacctgacaatgaggcagggcgctgatcgcgaagaatccccaatgacgggagtctgcgtgcagcagagcccagtcgcatcgtcatag

SEQ ID NO: 221340 - DNA, 1590 bp, synthetic construct
  misc_feature 1..1590: note = Description of Artificial Sequence: Synthetic coding sequence
  source 1..1590: mol_type = other DNA
atgcatacaggcggagagacaagcgcatgtaagcctagctccgtccggctcgcgcctagtttctcatttcacgccgctggtctgcagatggctgggcaaatgccacattcgcaccaatacagtgatcggagacagccgaatatcagcgatcagcaggtttctgcgctcagttattctgatcaaattcagcagccattgacgaaccaggttatgccagatatcgttatgctacagcgcagaatgccccagacgttccgggatccggctacggcgcctctccggaagctgagcgtcgatttgattaagacgtataagcacatcaacgaagtttattatgcgaagaagaagagaaggcatcagcaaggccagggcgatgattccagccacaaaaaagagcgcaaggtatataatgatggctatgacgacgacaactatgattacattgttaagaatggagaaaaatggatggacagatacgaaatagactcacttataggcaaaggctcgttcggccaagtggtaaaggcctacgaccgcgtagagcaggagtgggtcgcaatcaagattattaagaacaagaaagcgttcctcaaccaggcccagatagaagtgcgtctgttggagctcatgaacaaacacgatactgaaatgaaatattacatagtgcacctgaaacgtcacttcatgttcagaaaccacttgtgcctggtgtttgagatgctgtcttacaatctgtacgatttgctgcggaacacaaacttccgcggtgtcagcctgaacctgactaggaaatttgctcaacaaatgtgtactgctctcttgttcctcgctactcctgaacttagtatcatacactgcgatcttaagccagagaacatactgctgtgcaaccctaagcggtctgccatcaaaattgtggattttggaagtagttgtcagctaggccagaggatctatcagtacatccagtccagattttaccggtctcccgaagtgctattgggtatgccatacgacttagctatagatatgtggagtctgggttgtatccttgtcgagatgcacacgggcgaacctttattttctggagctaatgaagtcgatcagatgaacaagattgtggaagtgctggggatacctcctgctcacatccttgatcaggcacccaaggctaggaagttctttgagaagctgcctgacggtacatggaatctgaaaaaaaccaaagacggaaagcgggagtataaaccccctggtacccgtaaactgcataatatcctgggtgtagaaaccggaggaccaggaggcagacgggcaggggagtccggccacacagtggctgattacctgaagttcaaggacctgattctcagaatgctggactatgaccctaagaccaggatacagccgtattatgcgctgcagcatagtttctttaagaagacagcggatgaaggcaccaataccagcaatagcgtgagcactagcccggctatggagcaaagtcaaagcagtggaaccacgagcagcacctcgtctagttctggcgcatccgctatctcttgttcctcatggctggttcggcactag

SEQ ID NO: 221341 - DNA, 2292 bp, synthetic construct
  misc_feature 1..2292: note = Description of Artificial Sequence: Synthetic coding sequence
  source 1..2292: mol_type = other DNA
atgcataccggtggtgaaacaagcgcttgtaaaccaagctccgtgaggcttgctccttcctttagcttccacgccgctggcctgcagatggctggacaaatgccgcacagtcatcagtactctgacaggcgccaaccaaatatctccgaccaacaggtcagtgcactctcctattccgaccagattcagcagcccctgacgaatcaggtaatgcccgacatcgttatgttacaaagacgaatgccacagaccttccgggatcctgccaccgcccctttacggaagttgtccgtggatctgataaagacgtacaaacatattaacgaagtctactacgcgaagaaaaaaaggagacaccagcaaggacagggggacgacagttcacacaaaaaggagcgaaaggtgtataatgacgggtatgacgacgacaactacgactatatcgtcaaaaatggagagaaatggatggaccgatacgagatcgattcgcttataggaaagggctcctttggccaggtggtcaaggcgtatgaccgggtggaacaggagtgggttgcaataaaaatcattaagaacaaaaaagcgttcctaaatcaggcacagattgaagttagattgttggaactgatgaacaaacatgatactgaaatgaagtattacattgttcaccttaaacgccatttcatgtttcgtaaccatctttgccttgtcttcgagatgctatcgtacaacttgtacgacctgctccggaacacaaactttcggggtgtttcccttaacctgactagaaagttcgcccaacagatgtgtacagcactgctcttcctggccactcccgaactgagtataatccactgcgacctgaaacctgaaaacatcttactgtgcaaccctaagcgctcagccatcaaaatagtggacttcggcagcagttgccagctaggccaaagaatttaccagtatattcagtcccggttctacagaagtcctgaggtgctgcttgggatgccctatgatctagcaatcgatatgtggtctctgggatgtattctggtagagatgcacactggcgagccactgttctctggggcaaatgaggtcgatcagatgaataagatagtcgaggtgctgggaatcccacccgctcacatcttggatcaggccccaaaagctcggaagttttttgagaagctacccgatggaacatggaacctcaaaaaaaccaaagacggcaaacgcgagtataagccacccggtacgcgcaagctgcacaacatcttgggcgtggagactggcggtccagggggacgtcgagcaggggagtctggacacacagtggcagactacctaaaatttaaagacttgattctgagaatgttggactacgaccctaagacaaggattcaaccttactacgccctgcaacattcatttttcaaaaagactgctgatgaggggaccaatacatctaactccgtgtcaacaagccctgcaatggaacagtctcagtcatccggaacaaccagctctacctcttcttcatccggaggtagcagcggcacaagtaattccggcagggcgaggagcgaccccactcaccaacatcgccactctggcggtcattttaccgctgcagttcaggccatggattgcgagactcactcaccacaggtccgccagcagttccccgctcctctgggatggtccgggaccgaggcccctacgcaggttactgttgaaacccaccctgtacaagaaactactttccacgtggcaccccagcagaatgcgcttcaccaccatcacgggaactcttcccaccatcaccatcaccatcaccatcaccatcaccatcacggccagcaagcattagggaatcgaactaggcccagagtttacaactccccaaccaacagttcgtcgacgcaggattccatggaagtcggacattcacatcacagcatgaccagtctatcctcaagcaccaccagttcatcaacaagctcatctagcacaggcaaccagggaaatcaggcttaccagaaccggcctgttgccgctaacactttggactttggccagaacggcgctatggatgtgaatctcacagtgtactctaatcctaggcaggaaacggggattgccggacaccctacgtatcaattcagcgcgaacacaggacctgcacactacatgacagaaggacaccttaccatgcgccagggggctgaccgggaagaaagccctatgacaggagtctgcgtccaacagagccctgtcgcctcatcctag

SEQ ID NO: 221342 - DNA, 396 bp, synthetic construct
  misc_feature 1..396: note = Description of Artificial Sequence: Synthetic coding sequence
  source 1..396: mol_type = other DNA
atgcatacagggggtgaaacatcagcctgcaaaccctcaagcgtgagactggcacctagcttttctttccatgctgctggactacagatggctggacagatgcctcacagccaccaatattctgacagacggcaaccaaacatctccgaccagcaggtctccgcgttatcttactcggaccagattcagcagcctctcaccaatcaggtgatgccagacattgtaatgctgcagcgcaggatgccccagactttccgggaccccgctaccgccccattacggaagctctcagtggatctgatcaagacctataaacatatcaatgaagtctattacgcaaagaagaagcgcagacatcaacagggacagggtgacgacagcagccataaaaagtag

SEQ ID NO: 221343 - DNA, 1755 bp, synthetic construct
  misc_feature 1..1755: note = Description of Artificial Sequence: Synthetic coding sequence
  source 1..1755: mol_type = other DNA
atgcatacaggaggcgagacgtccgcctgcaagccgtcttccgtgagactggcacccagtttctcgttccatgccgctggcctccaaatggctgggcagatgccacactcacaccagtactctgataggcgccagcccaatatcagcgatcagcaagtctctgcccttagctacagcgaccagatacaacaaccactgacaaatcaggtgatgccagatatagttatgctgcagcggagaatgcctcaaactttccgagatcctgctactgctccactacggaagctatcagtggacctgattaaaacttataaacacattaatgaggtctattacgccaagaaaaagcgacgtcaccaacagggtcagggggacgatagctcacacaaaaaggagaggaaggtatacaacgacggctacgatgacgataactacgactacattgttaagaatggggagaaatggatggatcgctatgagattgattctctgatcggcaagggatctttcggtcaggtcgtcaaagcgtatgatcgggtggagcaagaatgggtagccataaaaataatcaaaaacaagaaggccttcctcaatcaggcccagatagaagtccgcctgttggaactaatgaacaagcacgacactgagatgaagtactatattgtgcacctaaaacgtcatttcatgtttcggaatcacctctgccttgtattcgaaatgctgagctacaatctgtacgatctgcttcgcaacactaactttagaggagtgtctctaaatctcacccgcaaattcgcgcaacagatgtgcactgctctgctgttcctcgcaacccccgagttgagcataattcattgcgacctgaaaccagagaatatcttgctgtgcaatcccaagaggtccgctataaaaatagtggactttggctccagttgccagcttggtcagaggatctatcagtatatacagagcagattttatcggtcacctgaagtattgctggggatgccttacgaccttgccatcgatatgtggtctctgggctgcattttagtggagatgcatacgggagaacctcttttttccggggctaatgaggttgaccaaatgaacaagatcgtagaggtcttgggaatcccacccgctcacatcctggaccaagccccaaaggcccgaaagttctttgagaaactgcctgacggcacgtggaatctgaagaagaccaaggacggcaagagggagtacaagccaccaggaacacgtaagcttcacaacatcctcggggtggaaacgggcggacctggaggccgtcgagccggtgagtctggacacaccgtcgccgactacctcaagttcaaggacctcattctgcggatgttggactacgatcccaagaccaggatacagccctactacgcactccagcattccttttttaaaaaaactgctgatgaggggactaatacctcgaactccgtctccacgtcacctgcgatggagcagtctcagagtagcggcacgacctcctccacatccagcagctccggcggatcctctgggactagcaacagcgggagggcaaggagcgaccccactcaccagcacagacacagcggtggacactttacggcggcagtgcaggcgatggactgcgagacgcactcaccccaggtctctagccatgtggtgcacttattggtgtcccctgcgatcctgcgttggtcttctaccggttgccaggtgcccctggaatag

SEQ ID NO: 221344 - DNA, 141 bp, synthetic construct
  misc_feature 1..141: note = Description of Artificial Sequence: Synthetic coding sequence
  source 1..141: mol_type = other DNA
atgcatacgggtggggaaacctctgcgtgcaagccaagctctgtgcgactagccccaagcttcagttttcacgccgcaggtctccagatggccggacagatgccacactctcaccagtactccgatagaagacaaccatag

SEQ ID NO: 221345 - DNA, 1608 bp, synthetic construct
  misc_feature 1..1608: note = Description of Artificial Sequence: Synthetic coding sequence
  source 1..1608: mol_type = other DNA
atgttccggaaccatctctgtcttgtgtttgaaatgctgtcttacaatttgtacgatcttttacggaacacgaacttcagaggtgtgtctctcaacctgacaaggaagtttgcccagcagatgtgtacagcccttctgtttcttgctactcccgaactttcaattattcactgcgatctgaagcctgagaacattctcctctgcaaccctaagcggtccgcaattaaaatcgtggactttggctcttcatgccagctgggccagcggatttatcagtacattcagtccagattctatcgctccccagaagttctgttgggaatgccgtatgacttggcaatagacatgtggtcgctgggctgtatcctggttgaaatgcataccggggagcctctgtttagcggcgctaatgaggtggatcaaatgaacaagattgtggaggtgttaggaattccacccgcacacatcctcgaccaggctcctaaagccaggaagttcttcgagaagcttcctgatgggacctggaacttaaagaagaccaaggacgggaagagagagtataaaccccctggaacaaggaaattgcacaatatactcggtgtcgagactggcggaccgggagggagacgtgctggcgaatccggccatacagtcgcagactatctgaagtttaaggacctgatcttacgcatgctggactacgacccgaagacaaggattcagccatattacgcactccagcactctttcttcaagaagactgccgatgagggtacgaatacttccaactccgtgtcgaccagcccagcgatggagcaatcccagagcagtgggactactagctcaacaagcagttccagcgggggatctagtggtacgtcaaactccggcagggcgagaagcgaccctacccaccaacaccgccactcagggggacattttaccgcagctgtgcaggcaatggactgcgaaactcacagcccacaggtgcgccagcagttcccggcacccttggggtggagcggcactgaggcacctacccaggtcacagtcgaaacacaccctgtgcaagaaacaacattccatgtcgcaccccagcaaaatgctctgcaccaccaccatgggaatagcagtcatcaccaccaccatcaccaccatcaccatcaccaccatggacaacaggctttgggtaataggaccagacccagagtctacaattcacctaccaacagcagcagcacgcaggacagcatggaagtaggccattctcatcattccatgacttcattaagctcaagcacaacttcttcttctactagttcttcctctactggtaatcaagggaaccaggcctatcagaacagacccgtcgctgctaacacactggatttcggacagaacggtgcaatggatgtcaacctgaccgtatacagtaaccccagacaggaaaccggtatcgcaggccatccaacttatcagttcagcgcgaatacaggtcctgctcactatatgaccgagggtcatcttaccatgcggcagggagccgacagggaagagagtcctatgacgggtgtttgtgttcaacagagtccagtggcttcatcttag

SEQ ID NO: 221346 - DNA, 1890 bp, synthetic construct
  misc_feature 1..1890: note = Description of Artificial Sequence: Synthetic coding sequence
  source 1..1890: mol_type = other DNA
atggcagtgccacccggtcatggaccattctccggcttcccaggtccacaggagcatacccaggttctgccagatgtccgacttttgcctcgccgattgcctttagcttttagggatgctacgagtgctccacttagaaagctttctgtggatttaattaaaacctacaagcatataaatgaggtctactatgccaagaagaagcgaagggcccagcaggctcctcctcaggattcatcaaataaaaaagagaaaaaagtcctcaaccatggatatgatgatgacaatcacgactatattgtacggagcggggaacggtggctggaaaggtatgagatcgactcccttattggcaaaggcagttttggccaagttgtgaaagcctatgatcaccagacgcaggaattagttgccattaaaattatcaaaaacaagaaggcctttctaaaccaggcccagatcgagctgagactgctggagctgatgaaccagcatgacacagagatgaaatactatattgtgcacctgaagagacattttatgtttcgcaaccacctttgtctggtttttgagctgttaagctataatttgtacgatttactgcggaatacccacttccgcggagtgtcactgaacctaacacgcaaactggctcagcagctctgtaccgcactactgttcctcgctacgccagaactatcaattatccactgtgatctgaagccagaaaatattctgctctgcaaccccaagcgctccgcaatcaagatcgttgatttcgggagttcctgccagctcggccagaggatatatcagtatattcagtcaagattttacagaagcccggaagtgctgctcggaaccccctacgacctcgctattgacatgtggtcattgggatgcattctggtggagatgcacaccggagagccattgttcagtggctccaacgaagtggatcaaatgaacagaattgtcgaggtattggggataccacccgctgccatgctggaccaggccccaaaagctcgtaaatattttgaacgtcttccagggggaggctggacactacggagaaccaaggagctaaggaaggactatcaaggtcccggaaccaggcgcctacaagaggtactgggcgtgcaaactggaggacctggaggcagaagagcaggggagcctgggcactcccccgcagattaccttcgcttccaggatctggtcctgaggatgctagagtacgagccggcagcacgaatctcacctctgggggctctgcagcatgggtttttccggaggaccgcggatgaagctaccaacactgggccagccggttcgagcgcctctacttcgccagcccctttggacacatgtccttcctcttctaccgcctcaagcatcagcagttccggcggttcaagcggcagctcctctgacaaccgcacgtaccgatactctaataggtactgcggaggtcctggtccccctatcaccgattgtgaaatgaactctcctcaggtgcccccaagccaaccactccggccttgggccggaggcgatgtgcctcacaagacccaccaagcccctgccagtgcatcctcactgcctggaaccggtgcacagcttccccctcagcctcggtacttagggagacccccaagcccaacgagccctccccctcccgaactgatggatgtatctctggttggcggacccgcagattgcagccctccccatcccgcaccggcaccccaacaccccgctgcctcagcgctgagaacacgcatgaccggcggtcgaccccctctcccgccaccagatgaccccgctactctcgggccacatctcggcctgaggggcgtgccacagtctaccgccgctagttcttag

SEQ ID NO: 221347 - DNA, 1806 bp, synthetic construct
  misc_feature 1..1806: note = Description of Artificial Sequence: Synthetic coding sequence
  source 1..1806: mol_type = other DNA
atggccgtacctcccggacatggtccattctccggatttcctggaccccaggagcatactcaagttcttcctgacgtgcgcttactgcctcgccgattgcccctggccttccgagacgccacatctgctcccctcagaaaacttagcgtggatctgattaaaacatataagcacattaacgaggtgtattacgctaaaaagaagaggagggcccaacaggctccgccacaggacagcagcaataaaaaggagaaaaaagtgcttaaccatggttatgatgacgacaatcacgactacatcgtgcggagtggcgagagatggctggaacggtatgagattgactcactcatcggcaagggatcattcggacaagtcgtgaaagcttatgatcaccagacacaagaactggtggcaatcaagattatcaaaaacaagaaggccttcctcaaccaggcacagatcgagctccggctgctggaacttatgaaccagcacgacaccgaaatgaaatattatatcgtccaccttaagagacactttatgttcaggaatcacctctgcctggtttttgaacttctgtcatacaacctctacgacttgttgcgtaacacgcatttcagaggggttagcttgaatctgactaggaaactggcccagcagctttgcactgcgcttctttttttagcaacacctgaactttctatcatccactgtgatctaaagccagaaaatattctgctctgtaacccaaaacgatcggccataaagatagtagacttcggttccagttgtcagctgggccaaaggatctatcagtacatacagagcaggttctaccggagccccgaggtgctgctggggactccctatgatctggcaatagacatgtggtctttgggctgcattctggtggagatgcataccggagagcccctgttctcgggctcaaacgaagtcgaccagatgaaccgtatcgtggaagtattgggcatcccccctgccgctatgctggaccaggccccaaaggcaagaaagtacttcgagaggctaccaggtggcggatggaccctgcgcaggacaaaagagctgcgtaaagactatcaaggtcctggaacccgtagactgcaggaggatctcgtgctgcgtatgctcgagtatgagccagccgcacgcatctcacctctcggggcactgcagcatgggttttttcgcaggaccgcagatgaagccacaaacaccgggccagcagggagctctgcatccactagcccggcacctcttgatacctgcccttctagctccacagcgtcatccattagcagctcgggaggaagtagtggatccagttctgacaatagaacatacagatactccaatcggtattgcggaggacccggaccacctatcaccgactgcgagatgaattctcctcaagttccacccagccaacccctgcggccatgggcagggggtgatgtaccccataagactcaccaggcaccggctagtgcatcgagcttgcccggaaccggagcccagctaccaccacaacccaggtatctcgggagacctcctagtcccacgagccccccacccccagagctgatggacgttagtctggtgggtggccctgccgattgtagcccacctcaccctgccccagctccacagcaccccgctgcctccgcactcagaactcggatgaccggcggtcgcccacccctccccccaccagatgaccctgcaaccctaggcccacatctgggactccgaggggtacctcagagcacagcagcctcatcttag

SEQ ID NO: 221348 - DNA, 1770 bp, synthetic construct
  misc_feature 1..1770: note = Description of Artificial Sequence: Synthetic coding sequence
  source 1..1770: mol_type = other DNA
atggccgtgccaccagggcatggtccattctccggctttccaggaccccaggaacacactcaggtcctcccggacgtgcggctcctgccacggaggctccccttagcatttcgggatgcaaccagcgccccactgagaaaactctccgtggatctgatcaaaacctacaagcatatcaatgaggtctattacgctaaaaaaaagagacgcgctcaacaggccccaccccaggactcatctaacaagaaagagaagaaggtgctgaatcacggttacgacgatgataaccatgactacatcgtcaggtcgggggagcgctggctcgagcgctatgaaatcgatagcttgatagggaagggatccttcggacaggtcgtgaaagcctacgaccatcaaacccaagaactggtagcaatcaagataataaagaataaaaaggcattcctgaaccaggcccaaatagagttgcggctcctggagcttatgaaccagcacgataccgaaatgaaatattatattgtccacctgaagcgtcactttatgttccggaaccacctctgcctagtgttcgaattgctgagctataacctctatgacctgctaaggaatacacacttccgcggtgtgtctctgaaccttacccgcaaacttgcccagcagctttgcaccgccctcttgtttttggccacgcctgagctgtccatcatccactgtgatttgaaaccagagaacattctgctctgcaaccccaagaggagcgccataaagatcgtggacttcggctcttcctgtcaactaggacagcgtatttatcagtacattcagagccggttctaccgaagccctgaggtgctgctagggacgccatacgatctcgccatcgatatgtggagtctgggatgcatcctagtggagatgcatacaggagagcccctattcagcggctccaacgaggtggatcagatgaaccggattgtggaggtactgggcatcccaccagccgcaatgctggatcaagccccaaaagctcggaagtattttgaacgcctgcccggaggagggtggacactgaggcggaccaaggagctgcggaaggatttggttctgagaatgctcgagtatgagccagcagctcgcattagcccgctgggtgcactgcagcacgggttcttcagacgaacggccgacgaagccacaaataccggtcctgcaggctcttccgcctccacttcacccgctcccctggacacttgtcccagttcctccacagcatcgagcatttcttctagtgggggttcatcagggagcagcagcgacaaccgcacatatagatactccaataggtactgtggtggcccaggaccacccattaccgactgcgagatgaattcaccgcaagtgccgccaagtcagcccctccgcccatgggctgggggagacgtcccccacaagacacatcaagcacccgcatctgcatcctcattacccggaacaggggctcagttacctcctcaacccaggtacctcggcaggcccccaagtccgacctcaccccctccccctgaactgatggacgtcagtctggtgggtggcccagccgattgcagtccaccacatcccgcacctgcccctcagcaccccgcagcatctgccctacgcacgaggatgaccggaggtcgtccacctttaccaccaccagacgatcccgctactcttggccctcatttaggcctgagaggggtccctcagtctacggcagcatcttcttag

SEQ ID NO: 221349 - DNA, 285 bp, synthetic construct
  misc_feature 1..285: note = Description of Artificial Sequence: Synthetic coding sequence
  source 1..285: mol_type = other DNA
atgaatgaccacctgcacgtcggctctcacgcacacggccagattcaggtgcagcagcttttcgaggataatagcaacaaacgtacagtgctgaccacgcaaccaaacgggttaactaccgtgggcaagacagggctgcctgtggttccagagagacagcttgatagcatccatcggaggcaggggtccagcacgtctctgaagagtatggaaggaatgggaaaggtaaaggccaccccaatgacaccagaacaagccatgaagcaatatatgcaaaagctctag

SEQ ID NO: 221350 - DNA, 1806 bp, synthetic construct
  misc_feature 1..1806: note = Description of Artificial Sequence: Synthetic coding sequence
  source 1..1806: mol_type = other DNA
atgcttacccggaaaccctcagcagccgcacctgctgcctatcctaccggccgtggcggagattcggccgtgcgacagcttcaggctagcccaggtcttggagctggagcaacacggtcaggcgtgggcacaggaccaccgtctccaatcgctcttcccccactaagggcaagcaacgctgcagccgcagcccatactatcgggggttccaaacacaccatgaacgaccatctccacgtgggttcccacgcccacggtcagattcaggtgcagcagttgttcgaggataactctaataaacgcactgtgcttacaacacaacccaacggcctgacaactgtcgggaagacgggtttaccggtcgtgccagagcggcagcttgactccattcacaggcgccaagggagcagcacttctctcaaaagcatggaaggcatgggaaaagtgaaggctacccccatgaccccagagcaggcaatgaagcagtatatgcagaagctgacagcctttgaacatcatgaaatctttagctaccccgaaatctactttcttgggctgaacgctaagaagaggcagggaatgactggagggcctaacaatgggggatatgatgacgatcaggggtcatatgtacaagtccctcatgatcacgttgcttaccgttatgaggtgctcaaggttattggcaagggcagcttcgggcaagtggtgaaagcttacgatcataaggtccaccagcatgtcgcgcttaagatggtgagaaatgaaaagcgatttcatagacaggcagctgaagagatccgtatattagagcatctgcgaaagcaggataaggacaatactatgaatgtcattcatatgttggagaattttaccttccgtaatcatatctgcatgaccttcgagttgctgtccatgaacctctatgagctaataaagaagaataaattccaaggcttttcactgcctctggtgcgtaagtttgcgcactctatcctccagtgtttggacgcattacacaaaaatagaatcattcactgcgacttgaagccggaaaatattctgctgaaacaacagggccgttcaggcatcaaggtcatcgatttcggtagcagttgctacgagcaccagcgtgtctatacttatatacagagcagattttatcgtgccccagaagtcattctgggcgctaggtacggtatgccaatcgacatgtggtcactcggttgtatattggccgaattgcttactggctacccgctgctacccggagaagatgaaggagatcagctcgcttgcatgatcgaattgctgggtatgccctctcagaagctcctggatgccagcaagcgcgctaagaattttgtatccagcaaaggatacccacgttactgtacagtgaccacattaagcgacggctccgtggtgctaaacggtggacgaagcaggcgcggaaagttgcgcggaccgcctgaatctcgggagtggggcaatgctcttaagggttgtgatgaccctctatttcttgacttccttaaacagtgtctggagtgggatccagcagtgagaatgactccaggacaggcattgaggcacccatggctgagacgcaggcttccaaaacctcccacgggcgagaaaacaagcgttaaacggatcaccgaaagcaccggtgccataacctcgatctccaagcttccacccccttcgtcctctgcctccaaactaagaacgaacctcgcccagatgaccgacgcaaatggcaacattcagcaaagaacagtgctgccgaaactcgtttcttag

SEQ ID NO: 221351 - DNA, 1587 bp, synthetic construct
  misc_feature 1..1587: note = Description of Artificial Sequence: Synthetic coding sequence
  source 1..1587: mol_type = other DNA
atgaatgaccacttacatgtgggcagccatgcccatgggcagattcaggtgcagcagctgtttgaagacaactcaaacaaacggacagttctgacgacccaacctaacggcctcacgactgtgggcaagactggcctgccagttgttcccgagagacagctcgatagcattcatagacggcagggcagctcaacctccctaaagtccatggagggaatgggaaaggtgaaagcaacaccgatgactccggaacaggctatgaagcagtatatgcagaaactcaccgcattcgagcaccacgaaattttctcgtatccagagatctacttcctgggcctcaatgctaagaaacgacagggaatgacaggcggtccaaacaatgggggttacgatgacgatcagggctcgtacgtacaggtgccgcatgatcatgtcgcgtacagatacgaagtgctgaaggttattggaaagggatcctttggacaggtggttaaagcctatgatcataaagtgcaccagcatgtggctctcaaaatggtacgcaacgaaaaaaggttccaccggcaggcagctgaggaaattaggattcttgaacatctccgaaagcaggacaaggacaatacgatgaatgtgatccatatgttagaaaatttcacctttagaaatcacatttgtatgacctttgaactcctgtctatgaatctgtatgaactgattaaaaagaataagttccaagggttttccctgcctctcgtgagaaaattcgcccattcaatccttcaatgtttagacgccctgcacaagaatcgcatcatccactgcgacctgaagcctgagaacatcctattaaagcagcaagggcgatccggcattaaggtaatcgactttgggtcctcgtgctacgagcaccagcgagtgtacacctacattcagtccagattttaccgcgcacctgaggttatcttgggggcaagatatggcatgcccattgatatgtggagcctgggatgcattcttgcggagctgctgaccggttacccactattgcccggtgaagatgagggggatcagctagcatgtatgatcgagttattagggatgcccagccagaaactgctggacgcctctaaaagggccaaaaatttcgtgtcttcaaagggctatccccgatattgcactgtgactaccctgtccgatggctctgtagttctgaacggcggacggtcccgacggggaaagctgcgcggacccccagaatcccgcgaatggggcaacgcactgaagggctgcgatgatcctctcttcctggatttcttgaaacagtgcctggaatgggacccagccgtgcgtatgactcctggtcaggcattacgtcatccgtggcttagacggcgactcccaaagccccctactggtgaaaagacctctgtgaagcggattaccgaaagcaccggagccatcacctcaatcagcaagttacctccaccaagttcatctgcaagcaaactgcggacaaacttagctcaaatgaccgatgccaacgggaacattcagcaacggacagtgctgcccaagctcgtctcatag

SEQ ID NO: 221352 - DNA, 471 bp, synthetic construct
  misc_feature 1..471: note = Description of Artificial Sequence: Synthetic coding sequence
  source 1..471: mol_type = other DNA
atgaacgaccacctccatgtgggttcacacgctcatgggcagatccaggtccaacagctgtttgaggacaacagcaataagcgcacagtgttgactactcagccaaacggcctgacaaccgtcgggaagactggtctgcctgttgtgccagagagacagctcgacagcatacaccggaggcaggggtctagcacatcattaaaaagcatggaaggcatgggaaaggtaaaggccacgccaatgacccctgaacaggctatgaagcagtatatgcaaaagctcacggccttcgagcaccacgagatcttttcctaccccgagatctattttctcggcctcaacgccaagaagaggcagggcatgacagggggacccaacaatgggggatatgacgatgatcaggggagttacgtgcaggtgccccacgaccacgtggcataccggtatgaggtacttaaggtgataggctag

SEQ ID NO: 221353 - DNA, 1707 bp, synthetic construct
  misc_feature 1..1707: note = Description of Artificial Sequence: Synthetic coding sequence
  source 1..1707: mol_type = other DNA
atgaaatggaaagagaaactgggagatggggtgtacgatacatttatgatgatcgatgagacaaagtgtcctccatgcagcaacgttctgtgtaatccatccgagcccccaccgccacgcaggttgaacatgaccaccgagcaattcacaggagaccacactcaacactttctcgatgggggtgagatgaaggtggagcaactcttccaggaatttggcaatcggaagagtaacacaatccagtccgatggcatcagtgatagtgagaaatgcagtccaacagtcagccagggcaaaagcagcgattgtctgaacaccgtaaagagcaattctagtagtaaagcccctaaggtcgtgccactgacaccagagcaggccttgaaacagtacaaacatcacctgaccgcgtatgagaagcttgaaatcattaactatcctgagatctactttgtcggaccaaatgcaaagaaacgccacggggtgatcggcggaccaaacaacggtggttatgacgacgccgacggtgcttacattcacgtacctagggaccaccttgcgtataggtacgaggtgcttaagataataggcaagggctcttttggccaagtggctagggtgtatgatcataagctgcgtcaatacgtcgccttgaagatggtgcggaacgaaaaacgatttcatcgccaggccgcagaagagattcgcattcttgagcacctgaagaagcaggacaagactgggtccatgaacgtgatccatatgttggaatcattcacattccggaatcatgtgtgtatggcttttgaactgctcagcatcgatttgtacgagctcattaaaaagaataagtttcagggcttcagcgtccagcttgtgcgtaagttcgcacaaagtatccttcagtcactggatgcgctccacaaaaacaaaatcattcattgcgatcttaagcccgagaacattctcctgaagcaccatggtagatcgagcactaaggtcatcgattttggttcctcgtgttttgagtatcagaagctttacacatatatccagtccaggttctatcgagcccctgagattattctcgggagtcgctattcaacccccatcgacatctggtccttcggctgtatactagctgagctgctgactggtcaacccctatttccgggagaggatgaaggcgatcagctcgcctgcatgatggagctgctgggcatgccccctcctaagttactcgagcagagcaaaagagccaagtactttatcaattccaaagggatccccagatactgtagcgtaacaacacaggcagatggccgagtcgtcctagttggaggcagaagtagaaggggtaagaagcggggaccacctggcagcaaggactggggtaccgccctgaagggctgtgacgactacctgttcatcgagttcctcaagcgctgtttgcactgggacccgtccgctcgcctcacacccgctcaagcactgcggcatccgtggatctcaaaaagcgtccctcgtccgctcactactattgacaaggtatctgggaaaagagtggtcaaccccgcaagcgcatttcaggggcttggctccaagctgcctccagtcgtcggtatagccaacaaactgaaagccaacctgatgtccgaaacaaatgggtctatccctttgtgctccgtgctacctaaattgatttcatag

SEQ ID NO: 221354 - DNA, 1707 bp, synthetic construct
  misc_feature 1..1707: note = Description of Artificial Sequence: Synthetic coding sequence
  source 1..1707: mol_type = other DNA
atgaagtggaaggagaagctgggcgatggtgtgtatgacaccttcatgatgattgacgagacaaaatgcccaccatgttcaaatgtcctctgcaacccctcggaaccccctcccccacgacgcttgaacatgaccacagaacagtttactggcgaccatacacagcacttcctagacggcggagaaatgaaagtggaacagctctttcaggagttcggtaaccggaaatccaacactatccaaagcgatggaatctcagattcagaaaagtgcagccctactgtaagccaggggaaaagctctgattgcttgaatactgtgaaatctaacagcagtagcaaagctcccaaggtggtaccccttacacctgaacaggcacttaaacaatacaagcatcatctcaccgcttatgaaaagctagaaatcataaactaccccgagatctattttgtgggccctaacgcgaagaagaggcacggcgtgattggcggacccaataacgggggttacgacgatgctgacggggcatacattcacgtgcccagggaccaccttgcttatcggtacgaggttctgaaaataatagggaaggggagtttcggccaggttgcgagagtctacgatcataagttgcggcagtacgttgcactaaagatggtcaggaacgagaaacggtttcatcgacaggccgcagaggaaataagaattttagaacacctgaagaagcaggataaaacgggttcgatgaatgtaatccatatgcttgaaagttttacttttagaaatcacgtatgcatggcatttgagttactgtctattgatttatatgagttaattaagaaaaacaaattccaaggttttagcgtacagcttgtccgaaaatttgcccagtcaatcttgcagtctctcgatgcgttgcataaaaataagatcatacactgcgacttgaagccagagaacattctgctgaagcatcatgggaggagctccactaaagtgatcgatttcgggtctagttgcttcgaataccaaaaattgtacacatacattcagagccgcttttatagagcccctgaaatcatcctgggcagtcggtacagcacccccatagacatttggtcctttggctgcattcttgcagaactcctgacgggccagcctctttttcccggagaggacgagggcgaccaactcgcatgcatgatggagctcctgggcatgccccctccaaagctactcgagcagtccaaaagagctaagtacttcatcaacagtaaaggcatccccagatactgctcggtgaccactcaagccgatggtagagtcgtattggtgggtgggagatctcgacgaggcaaaaagagaggcccacctgggtccaaggattggggcactgcactgaagggatgtgacgactacctgtttatcgagtttttaaagcgctgcctacactgggatccaagcgccaggttgacgcccgctcaggcccttcgccacccctggatctcaaagtcagttcccagacctctgacgactattgacaaagtgtcaggaaaaagggtggttaatcccgcaagcgccttccagggcctcgggtctaaattgccaccagtggtgggtatcgccaataaactgaaggccaatctgatgtccgagacgaacggatccattcctttgtgctcggtgctccctaagctcatctcttag

SEQ ID NO: 221355 - DNA, 1767 bp, synthetic construct
  misc_feature 1..1767: note = Description of Artificial Sequence: Synthetic coding sequence
  source 1..1767: mol_type = other DNA
atgggcggaaccgccagggggcctggccgtaaagatgcagggcctcctggcgctgggctcccgccacagcagcgtcgcttgggcgacggggtctacgataccttcatgatgatagatgaaactaaatgtcccccatgctcaaatgtgctatgtaatccaagcgaaccaccccctcctcgtcggttaaacatgaccacggaacaatttaccggcgaccatacacagcatttccttgacgggggtgaaatgaaagtagaacagctgttccaggagttcgggaaccgcaagagcaatactatccagtcagatggtatttccgactctgaaaaatgttcccccaccgtgagtcaaggtaagtcttcagactgcctcaataccgtcaaatcaaacagctctagcaaagcgccaaaggtggtccccctgactccagagcaagccctgaaacaatacaagcatcacctgactgcctacgaaaagttagaaattatcaactaccctgaaatttatttcgtcggacctaacgctaaaaagagacatggcgtgatcggtggcccaaataatggcggttacgacgatgccgatggagcatacatccacgtccctagagatcatttggcttacaggtacgaagtactgaaaattatcggtaaggggtccttcggacaagtggctagagtgtatgaccacaagctgaggcagtatgttgccctgaaaatggtccggaacgaaaagcgtttccatcgtcaagcggcagaagagatccgcattctggaacatttaaaaaaacaagacaagactggctccatgaacgtgattcatatgttagagagcttcacattcaggaatcacgtctgcatggctttcgaactactctctatagatctttacgaattaatcaagaagaacaaatttcagggcttctcagtgcaactcgtccggaaatttgctcagtccatactacagagcctggacgctttgcacaagaacaagattattcactgcgatctgaagccagagaatatcctattgaagcatcatggtaggagctcgacaaaggtcatcgacttcgggtcaagctgcttcgagtatcaaaagttatatacttatatccagtcccgcttctatcgggcacccgaaatcatcctcggatcacgctacagcactccaattgatatctggtcatttggttgcatcctggccgagctgctgacaggtcagccgctgtttcccggagaagacgaaggagaccagcttgcttgtatgatggagttgctgggcatgccaccgcctaaacttctggagcaaagcaaaagagccaaatactttatcaacagtaagggaatcccaaggtactgcagcgtgactacccaagcagatgggagggtcgtgctggtcggaggtaggtcacggagagggaagaaacggggtccacccggatcgaaagattggggtacagcactcaaaggctgcgacgactacctctttatagagtttcttaaacgctgcctccactgggacccgtccgcaaggctgacacccgcacaagcccttcgtcacccgtggatctcgaagagcgttccacggcctctgactaccatcgacaaagtctctgggaagcgggtggtgaaccctgccagcgcgttccagggcctggggtcaaaactgcctcccgtggtcggaattgcgaacaagcttaaggccaacttgatgagcgaaaccaatgggtcaatcccattgtgtagcgtgctgcccaagcttatctcctag

SEQ ID NO: 221356 - DNA, 732 bp, synthetic construct
  misc_feature 1..732: note = Description of Artificial Sequence: Synthetic coding sequence
  source 1..732: mol_type = other DNA
atgaaatggaaggaaaagctgggagacggggtatatgatacctttatgatgatagacgagacgaagtgtccgccttgcagtaacgtcctgtgcaacccatctgagccaccaccaccccgaagactgaacatgaccacagaacaatttactggggatcacacacaacattttttagacggcggagaaatgaaggtcgaacagttgttccaggaattcggcaatcgcaaatcaaacaccattcagtcagacggaatttccgacagcgagaaatgtagcccaaccgtgtcccaggggaagtcaagcgactgccttaacacagtgaagtctaatagctcatcaaaggcccctaaggtggtgcctcttaccccagagcaggccttaaagcaatacaagcaccatttaacggcttatgaaaaactcgagatcataaactacccggaaatttacttcgtgggcccaaacgccaaaaagcgtcacggggtaataggcggacccaataatggaggatacgacgacgctgacggggcttacatccacgtgccgagagaccacctcgcatataggtacgaggtgctgaagattatcggcaagggctcctttggccaagttgcccgagtgtatgatcataaactgcggcagtatgtggccctcaagatggtccgcaatgaaaagagattccaccggcaggcagccgaggagataagaatactggagcatctgaagaagcagtag

SEQ ID NO: 221357 - DNA, 1563 bp, synthetic construct
  misc_feature 1..1563: note = Description of Artificial Sequence: Synthetic coding sequence
  source 1..1563: mol_type = other DNA
atgcccgcatctgagcttaaggcttccgaaatcccctttcatccttcaattaagacgcaggaccctaaggccgaggagaagagtcccaaaaaacagaaggttacattgactgcagccgaagcacttaagttatttaaaaatcagttgtccccttacgagcagtccgagatcttgggatatgctgagctttggtttctcggtcttgaggcaaagaaactggacactgcacccgagaagttcagcaaaacttcattcgacgatgagcatgggttttacctcaaggtgctgcacgaccatatcgcctatagatatgaagtgcttgagaccatcggcaagggcagctttggacaggtggccaagtgtctggaccacaagaataacgaattggtcgccctgaaaattatacgcaacaaaaaaaggttccatcagcaagcccttatggagctgaaaatacttgaagcgctgcggaagaaagataaagacaacacttacaatgttgtccatatgaaagactttttctactttcgtaatcatttctgcataacgttcgagcttctgggaataaatctgtacgaactgatgaagaacaacaacttccagggattcagcctgagtattgtgagaagattcactctgagtgtcttgaagtgtctgcagatgctctccgtagagaaaattatccactgcgacctgaaacctgagaatatcgtcctctatcaaaaaggacaagcttcagtgaaagtcatcgactttggctcaagctgctatgagcaccagaaagtatacacatatatccagtcacgattttatagatcacctgaggttatcctgggtcatccctacgacgttgccatcgatatgtggtctttgggctgtattaccgccgagctctacaccggttaccctctgtttcctggcgaaaatgaggtagaacagctcgcctgtataatggaagtgcttggcctgccaccagctggatttattcagacagctagtcgcaggcaaacctttttcgattcaaagggcttccctaaaaatataaccaacaatagaggcaagaagagatatcctgacagcaaggatctgacaatggtgttaaagacatacgacacctcttttctagactttctccgacgttgtctggtatgggagccctctcttaggatgacacccgatcaggctctcaagcatgcctggattcaccagtctcgcaacctgaagccacagcctcgccctcagacgcttcggaaatccaattcattctttcctagtgagacaagaaaagataaagttcagggatgtcaccacagcagcaggaaggccgacgaaatcactaaagagacaactgagaaaactaaagactcacctaccaaacacgtgcagcactctggcgatcagcaagactgcctccagcatggcgctgataccgtccaacttccccagcttgttgatgctcccaagaagtctgaagcagcagtgggtgccgaagtgagcatgacatctccgggacagtctaaaaatttcagccttaaaaataccaacgtcttaccacccatagtttag

SEQ ID NO: 221358 - DNA, 1563 bp, synthetic construct
  misc_feature 1..1563: note = Description of Artificial Sequence: Synthetic coding sequence
  source 1..1563: mol_type = other DNA
atgccagctagtgaactgaaagcgtcagagattccattccatcctagtatcaagacacaagaccctaaagccgaggaaaaatcacccaaaaagcagaaagtgactttaaccgcagcggaagcactgaagctcttcaaaaaccagcttagcccctatgaacagtccgagatcctcgggtatgcagaactctggttcctgggtctggaggcaaagaaattggatacagctcctgagaagttcagcaaaacttcttttgatgacgagcacggcttctatttgaaggtgcttcacgaccatattgcctaccgatatgaagtcctggagacgattgggaaagggagctttgggcaggtcgcgaaatgtctagatcacaagaacaatgaattagttgcgctcaaaatcatacgcaataagaagagattccatcagcaggctctgatggaattaaaaatactagaggcactgcgcaaaaaagataaggacaatacttataatgtggtgcacatgaaagatttcttctatttccgcaatcacttctgcatcacctttgagctcctcggtatcaacctttacgagttgatgaaaaacaataattttcagggtttctctctctcgatcgtgaggagattcaccctgtccgtgttgaaatgtctgcagatgttatccgtggaaaagattatccattgcgatctcaagcccgagaacatagttctgtatcagaaaggacaagctagtgtaaaagttatcgatttcggttcaagctgctatgagcatcagaaggtctatacgtacatccagtcacggttctatcggtctcctgaagtgatactgggacacccgtatgacgtggcaatcgatatgtggtccctgggatgtatcaccgccgagctctatacaggatacccgctattcccaggggagaatgaggtggagcagttagcctgtattatggaggtgctgggtctgcccccagccggtttcatacagaccgcatcaagaagacagacttttttcgattccaagggattccccaaaaatatcactaataacaggggcaagaagagatatcccgattctaaggacctcaccatggtgcttaagacctacgacacatcctttctggatttcctgcgcaggtgcctcgtatgggagcccagtctaagaatgaccccagaccaggccctcaagcacgcgtggatccaccagagtcgtaacctgaaacctcagcctcgtcctcagactctgagaaagtcgaattccttctttccatctgagacccggaaagacaaggtgcagggttgtcaccacagttctcgtaaggcagatgaaataacaaaggagacaaccgagaaaacgaaggactcccccaccaaacatgtgcaacactccggcgaccagcaggactgtctgcagcacggcgcagataccgtacagctgcctcagctggtcgacgctccaaaaaaatcagaagctgctgtaggagcagaagtttcgatgacttcgcccggacagagcaagaactttagtctgaagaacaccaatgtgctcccaccaatcgtgtag

SEQ ID NO: 221359 - DNA, 1560 bp, synthetic construct
  misc_feature 1..1560: note = Description of Artificial Sequence: Synthetic coding sequence
  source 1..1560: mol_type = other DNA
atgccagccagcgaactgaaggcatccgaaattccctttcatccttctatcaagactcaggatcctaaagctgaagaaaagagtcccaagaagcagaaggtgacactcaccgcagcagaggctttgaagttgttcaagaatcagctctccccatacgagcaatccgagatcctaggttacgccgaactttggtttcttgggcttgaggcgaagaagttggacacagcacctgagaagttttctaagacgtcctttgacgacgagcacggcttttatttaaaggtcctgcacgaccatatcgcctatagatatgaagtcctggagacaatcggaaaggggtcctttgggcaagtagctaaatgcctggaccacaagaataacgagcttgttgctctaaagatcattcgcaataagaaacgttttcaccaacaggcattgatggaactgaagatattggaagcactgcggaagaaggacaaggataacacttacaacgtggtgcacatgaaagattttttctattttaggaaccatttttgtatcacttttgagcttctcggcatcaatctgtatgagttaatgaagaacaataactttcagggcttcagcctgtccatcgtgcgcaggttcaccttaagcgtgttaaaatgcctccagatgttaagcgtcgaaaagataatccattgtgatttgaaaccagaaaacattgtcctataccaaaagggacaagcttccgtcaaagttatagactttggatcaagctgctacgagcaccaaaaagtgtacacatacatccagtctagattttaccgttcaccagaggtgattctaggccacccttacgacgtagcgatcgacatgtggtcgttggggtgcattacggccgaactgtatacaggataccccctgtttcccggagaaaacgaagtcgaacagctcgcttgcatcatggaggtgctcggcctgccaccagctggatttattcagacagccagcaggcgtcagacattcttcgatagtaagggattccctaaaaatatcaccaataatagggggaagaaacggtacccagactctaaggacctcactatggtgcttaaaacatacgacacaagctttcttgatttcttgcgcaggtgtttggtttgggagccctctctcagaatgacgcctgatcaggccctgaagcatgcatggatacaccagtcccgcaaccttaagccccaacccagacctcagaccctccgcaaatcaaatagctttttcccgtctgaaacacggaaggacaaggtgcaagggtgccatcactcatctcggaaggatgaaatcacaaaggagaccactgaaaagaccaaggactcaccaaccaagcatgtgcagcattcaggggaccagcaggattgtctgcaacatggcgctgatactgtgcaactcccccagctggtcgatgccccaaagaaaagcgaagccgctgtcggcgcagaagttagcatgacaagccccggacagtcaaagaattttagcctgaagaacacaaacgtcctcccccctattgtttag

SEQ ID NO: 221360 - DNA, 474 bp, synthetic construct
  misc_feature 1..474: note = Description of Artificial Sequence: Synthetic coding sequence
  source 1..474: mol_type = other DNA
atggttctcaagacatacgacacaagttttctggactttctgcgtcggtgccttgtttgggagccgagcctgagaatgacccccgaccaggctctgaaacatgcctggatacaccagtcccgcaacctcaaaccacagccacgccctcagaccctgcgcaagagtaactcgttttttccatcggagacacgcaaagacaaagtgcaaggctgccaccatagctctcggaaggctgacgagattaccaaggaaaccactgagaaaacaaaagactctccaaccaagcacgtacaacactccggggatcagcaagactgcctgcagcacggcgctgacaccgtgcagctgccccagctggtggacgcccctaaaaagagcgaggcggcagttggggcagaagtgtctatgacttctcccggtcagagcaaaaatttctcccttaagaatacaaatgtccttccacctattgtttag

SEQ ID NO: 221361 - DNA, 1011 bp, synthetic construct
  misc_feature 1..1011: note = Description of Artificial Sequence: Synthetic coding sequence
  source 1..1011: mol_type = other DNA
atggggaactgtttacaccgggctgaactctcaccttccacagaaaatagttcccagcttgatttcgaagatgtgtggaattccagctatggagtgaacgactcattccccgatggcgactacggggcaaacctggaagccgcagccccttgccattcttgtaatttactggacgattctgctctaccatttttcatcttgaccagtgttctgggcattctggcttcctctacagttctcttcatgctgttcagacctctattccgctggcaactttgtcccggttggcccgtgctcgctcagctcgccgtgggctccgctttatttagcattgtggtacccgtcttagccccaggcctcggctcaacgagatcttccgctctctgctcactagggtactgtgtatggtacgggagtgcatttgcccaggctcttctcctcggatgtcatgcctctctggggcacaggttgggggctggacaggtcccagggctgacactcggactgaccgtcggaatatggggagtggcagccctactgacactcccggtaacgcttgctagcggggctagcgggggtttgtgtaccctgatctattccactgaactgaaagctctgcaagccacccacactgtggcgtgcctcgccattttcgtactgctgcccctgggactgttcggcgcaaaggggttgaaaaaggccctggggatggggccaggtccatggatgaatattctttgggcgtggttcatcttttggtggccgcacggagttgtgctcggattggattttcttgttcgaagcaaactgttgctcctatccacctgcctggcgcagcaagcactggatcttctgctgaacctggcagaagctctggccatattacattgcgtggctacccctctgcttctggccttgttctgtcaccaggctactagaaccttgctgccatccttgcctctgccagaaggttggtcaagtcacctggatacccttggatccaaatcatag

SEQ ID NO: 221362 - DNA, 1017 bp, synthetic construct
  misc_feature 1..1017: note = Description of Artificial Sequence: Synthetic coding sequence
  source 1..1017: mol_type = other DNA
atggcctcctcaggctacgttctgcaggctgagctcagccctagcacagagaactcatctcagttggatttcgaggatgtgtggaattcttcgtacggtgtgaacgacagcttccccgatggtgactatggagctaatctggaggcagctgccccttgtcatagctgtaatctcttggatgactctgccttaccatttttcatcttgacatcagtgttgggcatactggctagcagcacagttcttttcatgctgtttagaccgttgtttcggtggcaactctgcccaggatggcccgtacttgcccagcttgccgtaggctcagccctgttcagcattgttgtgccagtcttagcacctgggctgggctcaacacgttcttccgcgctttgttccctgggctattgcgtttggtacggcagcgcctttgcacaggccttgttactgggctgtcacgcctccctgggacaccgtctgggcgcaggacaagttcctggcttaacactcgggctgacagtaggcatttggggagttgcagctcttctgacactgcctgtaacattggcctctggagcctcaggcggactgtgtacccttatttattcgacggagctgaaggcccttcaggccactcacaccgttgcttgccttgccatatttgtactgcttcccttgggccttttcggcgctaagggactgaaaaaggctcttgggatgggacccggaccgtggatgaatatactctgggcttggtttattttttggtggcctcacggcgtggtcttgggcctggattttctcgtgagatcaaaattgctactgctatctacatgcctggcccagcaagctctggacctgttgctcaacctcgccgaagcattagccattttgcactgtgtggccacccctttgctcctggctctgttttgccaccaggctacccgaacgctgcttccatctcttccgctgccagagggatggagctctcatctcgatacactcggttccaaatcatag

SEQ ID NO: 221363 - DNA, 1011 bp, synthetic construct
  misc_feature 1..1011: note = Description of Artificial Sequence: Synthetic coding sequence
  source 1..1011: mol_type = other DNA
atggggaattgcctgcatcgcgcagagctgtctccctccaccgagaatagcagccaactggacttcgaggacgtttggaattctagttacggagttaatgacagcttccccgatggtgactacggggcaaatctcgaggctgccgcaccctgccactcttgcaatctgttagatgacagcgctctcccattttttatactgaccagcgtccttggcatactggccagctctactgtcttgtttatgcttttcaggccactatttagatggcagctgtgccccggatggccagtcctcgcgcagctggcggttggctccgccctctttagcatcgtggtgcctgtactagcacccggactggggtccactcgatcctccgcactttgtagccttggctactgcgtctggtacgggagcgcctttgcgcaggctcttctgttgggctgccatgccagcctcggtcataggctgggagccggacaggtgcctgggctcacactgggtcttacagttggcatttggggggtggctgctcttctaactttaccagtaacattggcatcaggcgcaagtgggggtttgtgtacccttatctatagtacagaacttaaagcgcttcaggcaacacacactgttgcgtgcctggctattttcgtcctcctgccgcttggcctctttggcgctaaaggcctaaagaaagcactgggaatgggtcccggaccttggatgaacatcttatgggcctggtttatcttctggtggccgcacggagtcgttcttggcctagacttcctcgttaggtcaaagctgctattgctctctacttgccttgcccaacaggccctggacttgcttctgaatttagccgaagccctggcgatactgcattgtgtggctacaccactgttgctggcgcttttctgtcaccaagctactcgaaccctgcttccttcgcttccactccctgaaggatggagctcacacctggacaccctcgggagcaaatcctag

SEQ ID NO: 221364 - DNA, 468 bp, synthetic construct
  misc_feature 1..468: note = Description of Artificial Sequence: Synthetic coding sequence
  source 1..468: mol_type = other DNA
atggcctcctcaggctatgtcttgcaggccgaactgtctccatcaaccgagaatagctctcagctggattttgaggacgtgtggaacagttcatatggtgtcaatgatagcttcccagacggggactacggcgcaaacctggaagccgcagcgccttgtcactcctgtaatcttcttgacgattcagcactgccattctttatcctgacgtctgtgcttggtatactggcttccagcaccgttttgttcatgctctttcgccctctgtttcggtggcagctgtgtccgggttggccagtcctcgcacagctggcagtgggatcagccctgttttcaatcgtggtgcctgtgctagctcctgggctgggttcaacacggtcttcagcactttgctccctcggctactgtgtttggtacggttcagctttcgctcaagcgctgctgcttggctgtcacgctagcctatag

SEQ ID NO: 221365 - DNA, 1011 bp, synthetic construct
  misc_feature 1..1011: note = Description of Artificial Sequence: Synthetic coding sequence
  source 1..1011: mol_type = other DNA
atgggtaactgcctccacagggcagaactcagcccatccaccgagaactcaagccagctggactttgaagacgtgtggaatagctcttatggtgtaaatgacagctttccagatggggactatggggctaatctggaagccgcagcaccatgccattcctgcaatctactggatgattctgccttacccttttttatccttacctcagtgcttggaatcctggcgtcaagcacggtgctgttcatgttattcaggcccctttttaggtggcaactatgtcctggatggccagtgcttgcacagctggccgtaggtagcgctctgttcagcatcgtggtgcctgttctcgcccctgggttaggctctactcgatcctccgctctatgctccttaggatactgtgtttggtacgggtcagcttttgcccaggcactgctgctgggttgccacgcttcattaggccacaggctcggggcagggcaggtgcctggactgactttgggcttaactgttggcatatggggtgtagccgctttgctgaccctgcccgtgacccttgcttctggcgcaagcggtggcttgtgcacactgatctacagcactgagttgaaagccctgcaagccacgcacaccgtggcctgtctggccatcttcgtcttgttaccactcggcttgttcggcgcaaaaggtttaaaaaaagctttgggaatgggcccagggccatggatgaatatcttgtgggcctggttcattttttggtggccccacggcgtggtgctggggcttgatttcctcgttcggtctaaactgctccttctcagtacctgcctggcccagcaagccctggacctccttctcaatttggctgaggcactagctatactgcattgcgtagcaactcccttattacttgccttgttctgccaccaagccaccaggaccttgctcccatctctcccactcccagaaggctggtcctcgcacttagacaccctagggagcaaatcgtag

SEQ ID NO: 221366 - DNA, 2010 bp, synthetic construct
  misc_feature 1..2010: note = Description of Artificial Sequence: Synthetic coding sequence
  source 1..2010: mol_type = other DNA
atgggcagcaattccagccggattggcgacttacctaagaacgaatacctcaaaaaactgtccggtaccgagagtatttctgagaatgatcctttttggaatcagttgctgtcatttagctttcctgcccctacgagcagcagcgagctgaagttgttggaggaagcaaccatctcggtgtgccgctccctggtggagaacaatcccagaaccggcaatctgggagccctgatcaaagtgttccttagccggactaaggagctgaaactctccgcagaatgtcagaaccacatctttatctggcaaacacacaacgccctctttatcatctgctgtctgctaaaggtgttcatatgccagatgagcgaagaggagctgcaactgcacttcacctatgaagagaagtcccccggtaactactcgtcagactccgaggacctgttggaggaactcctgtgttgtctcatgcagctgatcaccgacattcctcttctggacatcacctacgaaattagcgtggaagcaatctccacaatggttgtgttcttgtcttgccagctttttcacaaggaggttctccggcagtctatttctcataagtacctcatgagaggaccatgcctaccatatacctccaagcttgttaagacactgctatataatttcatcagacaggagaagcccccaccacctggcgcacacgtttttccccagcagtccgatgggggaggactgctgtacggtctggcatctggcgtggctaccggactatggactgtattcacactcggaggtgtaggaagcaaggccgcagccagtcccgagctttctagtcctcttgcaaatcagtcacttctgctgttgctggtgctggccaacttgacagacgcttccgatgccccaaatccctatagacaagccattatgtcattcaagaacacacaagactcttcaccattccctagcagcattccacatgccttccagatcaacttcaactctctgtataccgctctgtgcgaacagcagacgtctgaccaggccacactgttattgtatactctgttgcaccagaactcaaacattaggacatacatgttagctcggacagatatggaaaacttagtactgcccatcctggagatcctgtaccacgtggaagagaggaattctcatcatgtctatatggctctgataatattactgattctgactgaggatgacggatttaatcgctccattcatgaagtgattctgaagaatatcacttggtacagtgaaagagtccttacagagataagtcttgggtcccttttaatcttggtggtgataagaacgattcagtacaacatgacaagaacccgagacaaataccttcacactaattgcctcgctgccttagctaatatgagcgcccagtttcgaagcctgcatcaatatgcagcgcaacgtatcatcagtttgttctcactgttatctaaaaagcataataaggtgcttgagcaagccacgcaaagtctcagaggctcgctgtccagtaacgacgttccattgcccgattacgcccaggacctcaatgtaatagaagaggtgatcaggatgatgctggaaatcataaactcatgtctcactaatagtctgcaccacaatcctaatctggtgtacgctctgctatacaaacgagatttgttcgaacagttcagaactcaccccagtttccaggacatcatgcagaacatagatttggtgataagcttcttctctagccgattactccaggcgggagccgagctatccgtggaaagagtgctggagataattaaacagggcgtcgtggccttacctaaagacagactgaaaaagttccctgagctgaagtttaaatacgtcgaggaggagcagccagaagagttttttatcccttacgtctggtcactggtgtacaactccgctgttgggctttattggaacccacaagacatccagctattcaccatggattctgactag

SEQ ID NO: 221367 - DNA, 519 bp, synthetic construct
  misc_feature 1..519: note = Description of Artificial Sequence: Synthetic coding sequence
  source 1..519: mol_type = other DNA
atggccctcataatcttattgatcctgactgaggatgacggttttaacaggtccatccatgaggtgatcctgaaaaatatcacttggtacagtgagagagtgctgaccgagataagcctgggctctctgctaatcctagtggtgataaggacgatccagtacaacatgactcgtactagggacaagtacttgcacaccaactgcctggcagcactggctaacatgtcagcccaatttagaagcctgcatcaatatgcagctcaaaggataatatcttacacttgcagacatcttcgcaggtatgtttacgtcctggacaagctgtactttccacacagccactgctcaactctccagcattgtttttcaaccctaagtgacaatggcgaggagctgctgagcttgacctgctcccacatactgaggtcatacgcgagctccctgttctcactactaagcaagaaacataacaaagtgttagaacaagcgacacagagtcttcgagggtccttgtcctag

SEQ ID NO: 221368 - DNA, 1440 bp, synthetic construct
  misc_feature 1..1440: note = Description of Artificial Sequence: Synthetic coding sequence
  source 1..1440: mol_type = other DNA
atgggctccaactcgagtcgcatcggggatttgccaaagaacgaatatctcaagaagctgagcggaacagaatccatcagcgagaacgatcccttttggaaccagttgctcagcttctcttttccggctcctacctcatcctccgaactgaaactcttagaagaggcgacgatctctgtgtgccgctctctggcgggtctttggaccgtcttcacattaggtggtgttggaagtaaggctgcagccagtcctgagctcagctcacctctagcaaaccagagcctgcttctgctgctggtcttagccaatttaaccgatgctagcgatgccccaaacccatatagacaggccattatgtcatttaagaacactcaagactcctctccgtttccgagctccattcctcacgcattccagattaatttcaattcactgtacactgctctgtgcgaacagcagacatcagaccaagccacactgttactgtacactctgttacaccagaacagcaatataaggacatatatgcttgcaagaacggatatggaaaacctggttctcccaattcttgagattctttaccacgtggaggagagaaattcgcatcacgtgtacatggcacttattattctcctcatcctgaccgaagatgatggtttcaatcgttctatccacgaggtgatactgaagaatattacttggtattctgagcgcgtattaaccgaaataagtctaggaagtctcttaattcttgtcgtgatccgcactattcaatacaacatgacaaggactcgggacaagtatctgcatacaaattgtctggccgctctggctaatatgtcagcccagtttcgcagccttcatcagtacgctgcccagaggattatcagcttgtttagcctgctgagcaaaaagcacaataaagttctggagcaggccacccagagtctcaggggcagcctatcatccaatgatgttcctttaccagactatgctcaggacctgaacgtgattgaggaggtgattcggatgatgctcgaaatcatcaacagctgtttaaccaacagcctgcaccataatccaaatctggtgtacgcgctcctatataaaagggatctgttcgaacagttccgcactcacccatccttccaggatatcatgcagaatattgatctcgtaatttcattcttcagttctaggctgctgcaggctggggcagaactgtcggtggagagagtcctggaaattatcaagcagggggtagtcgcccttccaaaggaccgcttgaagaaatttccagagctaaaatttaaatatgtggaagaggagcagcccgaagagttctttatcccctacgtttggagcctggtgtataacagcgctgtggggctttattggaatcctcaggatatccagctgtttactatggactcagactag

SEQ ID NO: 221369 - DNA, 3837 bp, synthetic construct
  misc_feature 1..3837: note = Description of Artificial Sequence: Synthetic coding sequence
  source 1..3837: mol_type = other DNA
atggcccaatccaaacgccacgtgtattcacggacaccaagcggctcacgcatgtctgccgaggccagtgccaggcccttgcgagtgggtagcagagtggaggttatcggaaagggacataggggtactgtcgcgtacgtcggcgctaccttgtttgcgactggtaagtgggtgggggtcatcttggacgaggcaaagggaaaaaatgatgggactgttcaagggcgtaagtacttcacttgcgatgagggtcatgggatcttcgttcggcagtcccagatccaggtttttgaggatggcgcagatacaactagccccgagactccagattcaagtgcttccaaagtactgaagagggagggtacagacactacagccaagacgagcaagctccggggtttaaaacccaaaaaggccccaacagctagaaagactaccacccggaggccgaaacctactcggccagcgtccacgggagtggctggagccagttcatcacttgggccatcaggctcggccagtgctggcgagctcagtagttccgagccgtctacacccgctcagactccgctagctgcccctattattcccacacccgtgctaacctcaccgggagcagttccacccctgccttctccatctaaggaggaggaaggcctgcgcgcacaggtccgagaccttgaggagaagttagagaccctccggttgaagcgagctgaagacaaggcaaaactgaaggagttggaaaagcataaaatccagctggaacaggtgcaggaatggaaatcaaagatgcaagaacagcaggctgatttacagaggaggctcaaggaggccagaaaagaggccaaagaggctctcgaagccaaagagaggtatatggaagagatggcggatacagcagacgccattgagatggctacgctggataaggagatggctgaggaacgtgccgagagtctccagcaggaggtggaggcattaaaggagagggtggacgagctcacaacagatttagagatcctgaaggccgagatcgaagagaaaggcagcgacggggctgcgtcgtcataccagcttaagcaacttgaggagcagaatgcccgactcaaggatgctttagttagaatgagggatctgagctcctcggagaaacaggagcacgtgaagctccagaaactcatggagaagaagaatcaggagctagaagtcgttcggcagcagagagagcggttgcaagaggagttgtcccaggccgagagcacaattgatgagctaaaagaacaggtcgatgcggcactgggcgcagaagaaatggttgagatgttgactgatagaaacctcaatctggaagaaaaggttagagaattgagagagaccgttggcgaccttgaggccatgaatgagatgaatgacgaacttcaagagaacgcaagggagactgagctggaactgcgggaacagctcgacatggccggtgccagggtgcgcgaggcgcagaagagagtggaagccgctcaggagaccgtcgcagattaccagcagaccataaagaagtatcgtcagctgaccgcccacctgcaggatgtcaaccgcgaactcacaaatcagcaagaggcttccgtcgaaaggcaacagcagcctccccctgaaacctttgattttaagatcaaatttgcagaaactaaggcccatgcaaaagctattgagatggaactccgccaaatggaagttgcccaggccaatcgccatatgagcttgctgacagcttttatgcccgactctttcctccggcctggaggggaccacgactgtgtacttgtgttgctcttgatgccccgactgatctgtaaggccgagttaatacgcaaacaggcacaggagaaatttgagctgagcgagaattgtagcgaacgacctggcctacgcggagccgctggagaacagctgagttttgccgctggcctcgtctactctttgagcctcctgcaagccaccctgcataggtacgaacacgcactgtcacagtgctctgtggatgtatacaaaaaagtgggttcattatatccagagatgtctgcccacgagcgcagccttgacttcttaattgaattacttcataaggatcagctggacgagacagtgaacgtcgaacccctcacgaaagccatcaagtattaccagcacctctactcaatccacctcgcagagcagccggaggactgcacaatgcagcttgctgatcacataaaattcacacagagcgctctcgattgtatgagtgtcgaggtcggccgattgcgcgcatttctccagggaggtcaggaagcaacagacatcgccctcctactacgggatctcgagacaagctgttccgacatacgacagttctgcaagaaaatcagacggagaatgcctggcaccgacgcacccggtatacctgccgctttggctttcgggccacaagtgagcgacactctgctggactgtagaaagcacctgacatgggtggtggcagtccttcaggaggtggctgccgcagccgcacagctgattgctcctttagctgagaatgagggcctactcgttgctgccctcgaggaacttgcgttcaaagcctctgaacaaatttatgggacaccgtctagctcaccttacgaatgcctgcggcagtcctgtaatattttaatatcaactatgaataagctggcaaccgctatgcaggaaggtgagtacgatgcagaacgccctcctagcaagccacccccagtggagctgcgggctgcagcactcagagccgagattaccgacgctgaaggactgggattgaagctcgaggatagagagactgtgattaaggagctgaagaagtctttgaagatcaagggcgaagagttgtcggaagccaatgtgcgcttgagtctgttggaaaaaaagctcgacagtgccgctaaggacgcggatgagaggattgaaaaggttcaaacccgattggaagaaactcaggcacttttgcgcaagaaggaaaaagaatttgaggagactatggatgccctgcaagccgatattgaccagttggaagccgagaaggctgagttaaagcagcgcttgaattcacaaagcaagagaacaattgagggccttaggggtccccctccatcaggaattgcaactctggtgagcggcatcgccggtgaagagcagcagcgaggggcaatccccggacaggcccctggctctgtccccggtcctggactggtgaaggattctcctcttctgttgcagcaaattagcgccatgagactgcacattagtcaactgcagcacgagaattcaattctaaaaggagctcagatgaaagctagccttgcttcacttcccccactgcacgtagcaaaactgtcacacgagggacccggtagtgagcttcctgccggtgcactttatcgtaaaacctcccagctgttagagactctgaaccagctgagcacccacacgcatgtggtggacatcacccgtacttccccagctgccaagagcccatctgcccaactgatggaacaggtcgcacagctcaaaagcctctcagacacagtggagaaactcaaggacgaggttctgaaggaaacagtgtcacagcggcctggggcaacagtgccaaccgattttgccacatttccatcttcggcctttctgcgcgctaaagaggagcagcaggatgatacggtttatatggggaaagtgaccttctcttgcgccgctggcttcgggcagcgtcatcgcctggttttgacgcaagaacagttgcaccagctgcattcacgtctgattagttag

SEQ ID NO: 221370 - DNA, 3786 bp, synthetic construct
  misc_feature 1..3786: note = Description of Artificial Sequence: Synthetic coding sequence
  source 1..3786: mol_type = other DNA
atgagcgcggaggcctctgcaagaccactccgcgtcggctctcgggtggaggtcatcggtaaaggacatagaggaacagtggcatatgttggggcaacactctttgcaaccggcaagtgggtgggcgtgatcctagacgaggcaaaaggcaagaacgacgggaccgtgcaaggacgcaaatacttcacttgtgacgagggacatggtatatttgttagacaaagccaaatccaagtctttgaggacggggctgacacgacctcccctgagactcccgatagttccgccagcaaagttctcaagagggaggggactgacactactgccaagactagtaaattgagaggactgaaacctaagaaggcccctaccgccagaaagggcagacgcgttagaacgaagcctacccgacctgccagcacaggcgtagccggagcctcgtcttctctgggaccctcgggttccgcctccgctggcgagctctcttcctcggagccgtctactcctgctcagacgccactggcagctcccatcatcccaaccccagttcttacgtcgcctggcgcagtacctcctctgcccagtccttccaaggaggaggaaggactacgggctcaggttcgggatctcgaggaaaagctggagacgctgcgtttgaagcgggctgaggataaggcgaaactgaaagaactggaaaaacataaaatccaattggagcaggtccaagaatggaagtcaaagatgcaggagcagcaggccgatttacagaggcggctcaaggaggccaggaaagaagccaaggaggcacttgaagcaaaagagcgatacatggaggagatggctgatacagctgacgctatcgaaatggccactctggacaaagagatggctgaagagagggccgagtcactgcaacaggaggtggaagccctgaaggagagggttgatgagctgacaaccgacttggagatcctgaaggccgaaatcgaagagaagggaagcgacggcgctgcttcatcttatcagctgaagcagctggaggagcagaacgcaagattaaaagacgccctggtcaggatgcgggacctgtcctcatccgagaaacaagagcatgtgaagctgcagaaactcatggagaaaaagaatcaagaactggaggtggtgagacagcagcgcgagcggctccaggaggagctgtcccaggcagagagcacaatcgatgagctcaaagagcaggtagatgccgctttaggggcagaagagatggtggagatgttgacagaccgtaatctaaacttagaagagaaagtgcgagagttgagagaaacagtaggggacctcgaagccatgaacgagatgaacgacgaactacaggaaaatgctcgagagacagagctagaactcagagaacagctggatatggcaggcgcacgagtgcgggaagcgcagaagcgcgtggaggccgcacaggaaacagtggcggattaccaacagacaatcaagaagtacaggcagttaaccgctcacctacaggatgtgaacagggaactcactaaccagcaggaggcctccgtggagaggcaacagcagccccctccagagacttttgactttaaaatcaagtttgccgagactaaggctcatgctaaagcaatcgagatggagctgcgtcagatggaggtagcccaggcaaatcgccacatgtctctccttaccgcctttatgcccgatagctttctacggccaggaggagaccatgactgcgttctggtcctcttgctcatgcctcgccttatctgtaaggctgaactgatccgtaaacaggcccaggagaaattcgaactctcggaaaactgctctgaaaggcccggactacgtggcgctgctggtgaacaactgagcttcgccgctggcctagtgtacagcttaagcctgctgcaggctaccctgcacaggtacgagcacgccctttcgcagtgcagcgtggatgtttataaaaaagtcggaagtctgtacccggaaatgtctgctcacgaacgaagtctggacttcttaattgagctgcttcacaaagaccagttagatgagaccgtgaacgtcgaaccgttgacaaaagcaatcaaatactatcagcacctttatagtattcacttagcagaacaacccgaagattgtacaatgcaattagctgatcacattaagtttactcagagcgcattggactgcatgagcgtagaggtggggaggcttcgtgctttcctgcaggggggtcaggaggcaaccgatattgccctgttgctcagagacctggagacatcgtgtagcgatatcaggcagttttgcaaaaaaatacgcaggagaatgcctggcaccgatgcacccggaataccagccgctctcgccttcgggcctcaggtctccgatactctactcgattgtcggaaacatctcacgtgggtggtggcagtgctgcaagaggtagcagcggctgcagcgcagctaatagccccacttgccgaaaacgaggggctactggttgcagccctggaggaattggcgttcaaagcttccgagcagatttatggaaccccatcaagttccccttatgaatgcttgcgtcagtcctgcaatattctgatatctacgatgaacaagctggcgacagcaatgcaggaaggcgagtacgacgcagaacggcctccctctaagccccctcccgttgagttgcgcgctgccgctctccgggctgagattaccgacgcggaaggcctaggactgaaacttgaagatagggaaaccgtgatcaaggaacttaagaagtccctgaagatcaagggcgaggagctttctgaagcgaatgttcggctgtccctcctggaaaagaaactggatagcgcagctaaagacgcagacgaaaggatcgagaaggtccaaacgcgtttggaggagacacaagcactgctcagaaagaaagaaaaggaatttgaggagacaatggatgctctgcaggccgacatcgaccagctcgaagccgagaaagcagaactaaagcagcggctgaactctcagagcaagagaaccatcgaggggctccgcggacctccccctagcggcatcgctacactcgtgagtggtattgctggtgaggagcaacagagaggtgccattccaggccaagctcccggatctgtccccggtcctggcctcgtcaaagactctcctctgttattgcagcagatatcggccatgagattgcatatctcgcaactgcagcacgagaatagtatattaaagggcgcacagatgaaggctagtctggccagcctgcctcccctacatgttgccaagctgtcacacgagggaccgggaagcgaattaccagcaggtgcactgtaccggaaaacctcacaactgttagaaactctgaatcagctatccactcacactcatgtcgtcgatattacaaggacgagtccagccgcaaaatcaccaagcgcacaactgatggagcaggtggcccaactcaaatccctttctgacaccgtggagaagcttaaagacgaagtgcttaaggagacagtgagtcagagacccggtgccacagttccgaccgactttgccacttttcccagttccgcattcctccgagccaaggaggaacagcaggatgatacagtgtatatgggaaaagtgaccttttcgtgcgcggcaggttttgggcagaggcacaggctggtgctcacccaggagcagttgcaccagctgcacagtaggctgataagttag

SEQ ID NO: 221371 - DNA, 3816 bp, synthetic construct
  misc_feature 1..3816: note = Description of Artificial Sequence: Synthetic coding sequence
  source 1..3816: mol_type = other DNA
atggcccagtccaagaggcatgtctattctcgaaccccatctggatcaaggatgtcagctgaggccagtgcaagaccgctacgggtgggctcccgcgtggaggttatcggcaagggacatcgaggaacagtggcttacgttggtgccactctgtttgccaccggcaagtgggtgggcgtgattttagacgaagccaaaggaaaaaacgatggcacagtacaaggccgaaagtacttcacctgtgacgagggacacggcatttttgtgcggcaaagccagattcaggtatttgaggacggcgctgacacaactagtcccgagacccctgattcaagtgcctctaaagtgctaaaaagagaagggactgatacaaccgccaagaccagtaagctggcacctaccgcaagaaaaacaacaacaagaagacctaagcccacaaggcctgcgtctaccggagtggccggagccagttctagcctggggccaagcggctccgccagcgctggggagctctccagctccgagcccagcacccccgcacaaacacccctagctgctcccattatccctacccctgtgctcacctcacctggcgcagttcccccactcccctctccttctaaggaagaagaagggcttagggctcaggtccgggatcttgaagaaaagctggagactctcagactcaagcgggctgaggataaagccaaactcaaagaacttgagaagcacaaaattcagctcgagcaggtgcaggagtggaaaagcaaaatgcaggagcagcaagctgatctgcagcgccgactcaaggaggctcggaaagaggccaaggaggcactggaggccaaagaacgctacatggaagaaatggccgatacagccgacgcaatcgagatggccacactcgataaagaaatggcagaagaacgcgcagagtccctgcaacaagaggtcgaggctcttaaagagcgcgtggacgaactgaccacagatcttgagatcctgaaagcagaaatcgaagagaagggctccgatggcgcagcctcaagttatcaactcaagcagctggaagagcagaacgctcgattgaaagatgcactcgtccggatgcgggacctgtcttcctccgagaaacaggagcatgttaagctacagaaactcatggaaaaaaagaatcaggaactggaagtggtgcgtcagcagagagagagactgcaagaagagctttctcaggcagaatccactattgacgaacttaaagagcaggtagacgccgctctgggcgctgaggagatggtggaaatgttaaccgacaggaacctcaatctcgaggagaaggtcagggaactgcgcgaaaccgtgggagaccttgaggcgatgaacgagatgaacgacgaactccaagagaatgcacgggagactgaactggaactccgcgagcagctcgacatggccggagcgagagtacgtgaggcccagaaaagggtggaagccgcacaggagaccgtggccgattaccagcagactattaagaagtatagacaactgacggcccacctgcaagatgtgaaccgggagctcactaaccagcaggaggctagcgttgaaaggcaacaacagccacccccagagaccttcgatttcaagattaagtttgccgaaaccaaggcacacgccaaagccatcgaaatggagttgcgccaaatggaggttgctcaggcgaatcgtcatatgtccttactgaccgcattcatgcccgactccttcctccgccctggcggagaccacgattgtgtcctagttctgctgctgatgcccaggctcatctgcaaggccgagctgatcagaaaacaagctcaggagaaattcgagttgtccgagaattgtagcgaacggccaggccttcgcggtgctgcaggagagcagctgtcattcgcagcaggcttggtgtacagcctgtctctgttgcaggcgactctgcataggtacgagcacgctctgtctcagtgctcagtagacgtgtacaagaaggtaggatccctatatcccgaaatgtcagctcatgaacgctctctcgatttcctgattgagcttcttcacaaggaccaattggatgagacggtgaacgtggaaccattgactaaagcaatcaaatattaccagcacctgtactcgattcatcttgcggaacagcctgaggattgcacaatgcaattggctgatcatattaagttcactcaatccgccttggactgtatgtctgtagaggtcggacgcctgcgagcattcctgcaggggggacaggaagcaacggacattgcactactgctgcgggatttggagacgagctgtagcgatatccgacagttttgtaaaaagatcagacgccgaatgccaggcacagatgcaccaggaatcccggcagccctggcctttggaccacaggtatctgacaccttactggattgtcggaagcacctgacctgggttgtcgcagtcctgcaggaggtcgccgcagcagcagcacagttgatcgctcccctcgcagaaaatgagggcctgctggttgcagctctggaagagctcgcttttaaggcctcagaacagatctacggcacgccatcatcatctccctatgaatgtctgagacagtcctgcaacatcttgattagtaccatgaataagttagccaccgccatgcaggaaggagagtatgacgccgagcgcccaccctcaaagccccctcccgtggaactgcgcgctgccgctctcagggcagaaattactgatgccgagggcctgggattaaagctagaggatcgcgaaacagtgattaaagaactaaaaaagtcactgaagatcaagggtgaggaactgtccgaagcaaatgtgagactctcactgctcgagaaaaaacttgatagtgccgcaaaggatgcggacgaaagaattgagaaagtgcaaacccgattggaagagacccaagccctgctacggaaaaaggagaaggaatttgaggagacaatggatgccctgcaggccgatattgatcagctggaggcggaaaaggctgaactgaagcaacgtctgaacagccagagcaaaaggacgattgagggtttaagagggccacctccctccgggatcgctaccctggtcagcggcatcgcaggagaggagcagcaaagaggggcaatccctggacaggcaccaggtagcgtcccaggaccaggactggttaaggacagccccctgctgctgcagcaaatttctgcaatgcgactgcatatttctcagctgcagcacgaaaactcaatcttgaaaggcgcacagatgaaggcctccctggcaagcctgccgccattgcacgtggcaaagttgtcacacgaaggaccaggttcagagttgccggcaggcgcactgtacagaaaaaccagccaacttctggaaactctgaaccagctgtccacacatacgcacgtggtggacatcacccggacgagtccagccgcaaagagcccctctgcacagctcatggaacaggtggcccagctgaagtcactgagcgatacagtagagaaattaaaggatgaagtgctgaaggaaaccgtcagccagagacctggggcaaccgtacccactgatttcgccacctttccaagctccgcgttcctgcgagcgaaggaggagcagcaggacgatacggtgtatatgggtaaggtgaccttcagttgcgcagccggttttggccagagacatagattagtcctgactcaggaacaactgcaccagttacacagcaggctcatatcatag

SEQ ID NO: 221372 - DNA, 3435 bp, synthetic construct
  misc_feature 1..3435: note = Description of Artificial Sequence: Synthetic coding sequence
  source 1..3435: mol_type = other DNA
atgatgcggcaagctccgacagcacgcaaaacaacaacacgccgtcccaaacccacccggccagcctccaccggcgtggcaggagctagttcttccctggggccttctgggagtgcctcagccggtgagttgagcagttctgagccctcgactcccgctcagacccctctcgccgctcctatcatccccacccccgttctcaccagccccggagcagtgcctcccctgccttccccttctaaagaggaggagggcttgcgcgctcaggtccgtgacttggaagagaaactggagacactgcgcctgaaaagggctgaagataaagcaaagctgaaagaactagaaaaacacaaaattcaactcgagcaggtccaggagtggaaaagtaagatgcaagaacagcaggccgacctccagaggagattgaaggaggctcgcaaggaagctaaagaggctctggaggccaaggaacgctacatggaagagatggctgacaccgccgatgctatcgagatggcaacactcgataaggagatggcagaagaacgcgctgaaagcctccagcaggaggtcgaggcacttaaggagcgggtggatgagctgactacggacctcgagatacttaaagcagagattgaggaaaagggatccgatggtgccgcttcctcataccagttgaagcaattggaagagcagaatgcccgtctgaaggacgctctggtgcgaatgcgcgacttatctagttccgagaagcaggagcatgttaagctgcagaagttaatggagaaaaagaatcaagaattggaagtggtgcggcagcagcgcgagcgccttcaggaggaactatcccaggctgaatcaacaattgatgaactgaaggagcaggtagacgcagcgctgggagctgaagaaatggtggaaatgctgactgaccgtaatctgaacctcgaagaaaaggtacgcgaactgcgagagaccgtgggggacctggaggccatgaacgaaatgaatgacgagttgcaggaaaacgctagagagactgaactcgaactccgggaacagctggatatggctggtgcccgagtgagggaggctcagaagcgtgtcgaggcggctcaggaaacagtcgctgattaccagcaaaccattaagaaatacagacagcttaccgcacacctgcaggacgtcaacagggagctgacgaatcagcaggaagcaagtgtggagagacagcagcagcctccgcctgagacctttgactttaagataaaatttgccgagaccaaggcccatgccaaagccattgaaatggaactccgtcagatggaggtggctcaggctaatagacacatgtctctgctgacagcttttatgccggactctttcctgagaccgggtggagaccacgactgcgtgctggtgctgctcctgatgccaaggttaatctgcaaggcagagctgatccgcaagcaagcacaagagaaattcgaactgtctgaaaactgtagtgagagacctggccttcgtggcgcagcaggcgaacagctgtcttttgcggctgggctcgtgtactcactgagcctccttcaggctaccctccaccgatacgaacacgccctgtcccagtgctccgtggatgtctacaagaaagtgggttccttatatccggaaatgtctgctcacgagaggtcccttgattttctgattgagctgctgcacaaggaccagctcgatgaaacagttaacgtggagcctttaaccaaggccattaagtactaccagcacctctatagtatccatcttgcggagcagccagaagattgcactatgcagcttgcagaccacatcaaattcactcagtctgctctggattgcatgagcgtggaggtcggcagactccgagctttcctgcagggcggacaagaggccacagacatagccctgctgctccgggatctggagactagttgttcagatatccgtcagttctgcaagaaaattcgcagaagaatgccaggcaccgacgccccagggataccagcggcactagccttcggtccacaagtatccgataccctactggactgtaggaagcacctgacgtgggtcgttgcagttctccaggaagtagccgctgccgctgcccagctgatcgcaccccttgccgagaacgaagggttactggtcgcagccctcgaggagttggccttcaaggcttctgagcaaatctacggaaccccctcttcttcaccctatgagtgcctgcggcagagctgcaacattttgatttctactatgaataaactggccacagcaatgcaggaaggggagtacgacgctgaacgaccaccctctaaaccacctcccgtggagctgcgagctgcagccctcagagccgaaatcaccgatgccgaagggctcggactgaagctggaagatagggagacagtgattaaggaactgaaaaaaagcttgaagattaagggtgaggagctcagtgaggccaatgtccggttgagcctgcttgagaagaaactggacagcgctgccaaggacgctgacgagcgaattgagaaggtccagacaaggctggaggagactcaagccctgcttcggaagaaagagaaagagtttgaggagacaatggacgctctacaagccgacatcgatcagctcgaagccgaaaaagctgagttgaaacagagactgaatagccaaagcaagaggaccatcgaagggttacgtggccctccccctagcggaattgcaacattggtgtccggtatcgccggagaagagcagcaacgcggagcaattccaggtcaagctccaggctcagtacctggcccaggactggtgaaagacagccctctgctgctgcagcaaatttcagctatgcgcctgcatatttctcagctccagcatgagaacagtattctgaagggtgcccaaatgaaagcctctcttgcaagtttgccgccactgcatgttgcgaaactctctcatgaggggccagggagcgagttgcctgccggagcactctatcgtaagacaagccagctgctggagaccctgaaccagctgtcaacgcacacccatgtggtggatatcacccggacaagcccagccgcaaaatccccctccgcacagctgatggagcaagttgcacagctgaaatccctgtccgacaccgtggagaagctcaaagacgaagtgttaaaggaaaccgtctctcaaagacccggagcgacagtgccaactgactttgcaacattcccctccagcgcattcctgagagcaaaggaagagcaacaagatgacaccgtgtatatgggaaaagttacattttcctgcgccgctggattcggccagcgccacaggttagttctgacacaagaacaacttcaccaattgcactctcgtcttattagctag

SEQ ID NO: 221373 - DNA, 3771 bp, synthetic construct
  misc_feature 1..3771: note = Description of Artificial Sequence: Synthetic coding sequence
  source 1..3771: mol_type = other DNA
atgtccgctgaggccagtgccaggcctctgagggtcgggtcaagagtcgaagtcattggaaaaggccatcggggtactgtagcttacgtgggagcaacattatttgcaactggcaagtgggtgggtgtgatcctcgacgaggcgaaagggaagaacgacgggaccgtgcagggcagaaaatacttcacctgtgatgaggggcacggcatcttcgtaaggcagtcccagatacaggtcttcgaggacggagcagatacaacaagccctgagactccagacagttccgcgagcaaagttctgaaacgggaggggactgacacaactgccaaaactagtaaactccgtgggctgaagcctaagaaagctccaacagctcgaaaaactactacaaggagacccaagcccacacgacccgctagcactggggtggctggtgcttcctctagcctgggtccatctggctccgcttctgcgggagagctttcctcgagtgaacctagcactcccgcacagacccctctggccgctccaattatccccactccagttctgacctctccgggagcggttccacctcttcctagcccctctaaggaagaggaaggcctcagggcccaggtccgcgatttggaggaaaaactggaaacgcttcgactgaagagggcggaggataaggcgaagctcaaggaattagagaagcataagattcaacttgagcaagttcaagaatggaaatccaaaatgcaggagcagcaagccgacctccagcggaggttgaaggaagcaaggaaggaagcaaaggaggctcttgaggctaaagagaggtacatggaggaaatggctgatacagctgacgctattgaaatggcgacattagacaaagaaatggccgaggagcgcgctgaatcccttcaacaggaggtggaggccctgaaggagcgagtcgatgagcttacgaccgacctcgagatattgaaagccgaaatcgaagaaaaggggagcgacggcgctgcctcgagttaccagctgaaacaattagaggagcaaaacgcaaggctcaaggatgccctggtgcgaatgcgcgatctgtccagctctgaaaagcaagagcacgtgaagctacaaaagttaatggaaaagaagaatcaggaacttgaggttgttcgacagcagagggagcgtctacaggaggagctgagccaggccgagagtacgattgacgagttgaaggaacaggttgatgccgcactgggggcagaggagatggtggagatgcttacagatcggaaccttaatctggaggagaaagtccgcgaactgagggagaccgtgggtgacctcgaagctatgaacgagatgaatgatgagctgcaagaaaatgcacgcgaaacagagttggagttacgtgagcagctcgacatggcaggcgctcgcgtgagagaagctcagaagcgggttgaagccgcacaggaaaccgtggccgactaccagcaaactatcaaaaagtatcgccagttgactgcccatctccaggatgttaaccgggaactaaccaaccagcaagaagcttccgttgaaaggcagcaacagcccccacccgagaccttcgacttcaagatcaagtttgctgagacgaaagcgcatgccaaagcaattgagatggagctgcgacaaatggaggtggcccaggccaatcggcatatgtccctcctcaccgcattcatgcctgatagctttctgcgacccggtggggatcatgattgcgtacttgttctactcctgatgcctcgcctgatctgtaaagcagagttgattagaaaacaggctcaggaaaagtttgaactgtctgaaaattgtagcgaacggccagggctccggggagccgcaggggagcagctgtcttttgctgcaggccttgtgtattcactgtccttgctccaggccactctccaccggtacgagcacgcactgtcccaatgctcagttgacgtgtataagaaggtgggttccctttaccccgagatgtctgctcatgagaggtctctggacttccttatcgagttgctccataaggaccagctggacgagactgtaaatgtagagcctctgaccaaggctataaaatattaccagcatctgtatagtattcacctggccgagcagcccgaagattgcacaatgcagctggccgaccatatcaagtttacacaatctgcactggactgtatgtccgtcgaggtggggaggctcagggctttccttcagggagggcaggaagcaactgatatcgctctcctccttcgcgatctggaaacatcttgctcagatatccgccaattttgtaaaaaaataaggcgtaggatgcctggaaccgatgctccgggtatacccgctgctctcgctttcggccctcaggtcagcgatactttgttggattgtagaaaacatctgacctgggtcgtggctgtgttgcaagaagtggcggcagcagcggctcagctcatcgccccacttgctgagaacgagggactgctggtcgcagccctggaagaattggcattcaaggcctcagagcagatttatggcacccctagttcctccccttatgagtgcttgcgccagtcctgcaacattttaatttccacgatgaacaaactagcgacggctatgcaagagggggagtacgacgctgaacgtcctccctccaagccgccacctgtggagctgagggccgcagcacttcgtgcggagattaccgatgctgaagggctgggtctgaaactggaagaccgtgagacggtgattaaagagctgaagaagtcactgaagataaagggcgaggaactttccgaggcaaacgtgagactcagtctcctggagaaaaagttagattccgcagccaaggacgctgatgaacgcatagaaaaggtgcagactcgtctggaagaaactcaggcccttctccggaagaaggaaaaggaattcgaagagacgatggacgctctccaggccgatatagatcagctggaggctgagaaggccgagctgaagcagcgcctgaattcccagtcgaagcgaacaatcgaagggcttcgaggtcccccaccctccggcattgccacacttgtcagtggaatcgctggaggcgcaattccaggacaggccccaggatcagtgccaggcccagggctagtgaaggactcccctttgctgcttcaacagattagcgccatgcgcttgcatatcagccagcttcagcacgagaactctattctcaaaggtgcgcaaatgaaggctagcctggcttcattgccaccattgcacgtggcaaaactctcccatgaaggaccaggcagcgagctgccagccggagccttatatagaaagacttctcagctgctggagacattaaatcagctgagcacccatacacacgtggtggacattacccgcactagcccagcagccaaatcccccagcgcccagctcatggagcaggtggcacagctgaagtcattgtccgatacggtggagaaattgaaggacgaggtgctaaaagaaacggtgtcgcaacgaccaggtgccacagtgcccaccgactttgcaacgtttcctagttctgcttttctgagggccaaagaggagcaacaggacgacactgtatatatgggaaaggtgactttttcatgcgcggctggtttcgggcagagacaccggttagtactaacccaagagcagctccatcagctgcacagcaggcttattagctag

SEQ ID NO: 221374 - DNA, 2673 bp, synthetic construct
  misc_feature 1..2673: note = Description of Artificial Sequence: Synthetic coding sequence
  source 1..2673: mol_type = other DNA
atgtccgctgaagcttccgctcgtccacttcgggttggaagcagagtagaggtcatagggaagggccatcgaggaaccgtggcatatgtgggtgctacattatttgcgactggcaagtgggttggtgtcatcctggatgaagccaagggaaagaatgacggaacggtgcagggtcggaagtactttacctgcgatgaaggacacggcatctttgtgcgacagtcacagattcaagtattcgaggacggagccgatactacttcccccgagacccctgacagtagcgctagcaaagtcctgaaaagagagggtacagatactaccgcgaagacttccaagctcccaacccgccctgcgtccaccggtgtggcgggagccagttcttccttggggcctagcgggagtgcttccgccggagaactgagcagctccgagcctagcacccccgcacagacacccctcgctgcaccaatcatcccaaccccagttctgactagccctggcgctgtccctcctctgccatctccctcgaaagaggaggaaggactcagagcgcaggtaagagacttggaggagaagctagaaacgctgcggctgaaacgggcagaggataaagcgaagctaaaagagctggaaaagcacaagattcagcttgagcaggtgcaagagtggaaaagtaaaatgcaggaacagcaggctgatctccagcgcagactgaaggaggctcgcaaggaagctaaagaagccctcgaagctaaagagagatacatggaagaaatggcagataccgccgacgctatcgaaatggctacactcgataaggaaatggccgaggagcgagctgaatctttgcagcaggaggtggaagcattgaaagaaagggtagacgagctgaccactgacctcgagatactgaaggcagagattgaagagaagggctcagacggggcagcctccagctaccagctcaagcagctagaggaacagaatgcccgacttaaagacgcacttgtgcggatgagagatctttcttcctccgagaagcaggagcacgtgaaactgcagaaacttatggagaaaaagaaccaagagctcgaagtggtacggcagcagcgcgagcgactgcaagaggagttgtctcaggcggagtccacaattgatgaactcaaggaacaagtagacgcggctctcggagcggaggagatggttgagatgctgactgataggaaccttaatttggaagaaaaggtccgggagctcagagagacagttggcgatctggaggctatgaatgagatgaatgacgaactccaagaaaacgctcgcgaaacagagctggaactgcgagaacagctggatatggccggtgcgagggtccgtgaagcccagaagagagtggaggccgctcaggagaccgtggcagattaccaacagacgatcaaaaagtaccgccagttaacagcccatctgcaagacgtgaaccgggaactaacaaatcaacaggaggcctctgtggaacgccaacagcagccgcctcctgaaacattcgatttcaagattaaattcgctgaaaccaaagcccacgcgaaagccatcgagatggagttgaggcagatggaagtggctcaggcgaaccgtcatatgtctctcttaacagctttcatgccagatagctttttgaggcccggaggtgatcacgactgcgttctagtgttgctactgatgccacggctcatctgtaaggctgagctgattcgcaagcaggcccaggaaaaatttgagctgagcgaaaactgctctgaaaggccgggtctgcgaggagcagcaggcgagcagttgtcattcgctgccggtctggtctactcgttgagccttctccaggccacacttcaccgatacgaacatgcgctgagccagtgcagtgtagacgtgtataaaaaggtgggcagcctgtatcctgaaatgagcgcacacgagagatccttggattttttaattgaacttctccataaggaccagttggacgaaactgtgaacgtggagcccctcactaaagccattaaatactaccaacacctttactcaatccacttggcggaacagcccgaagattgtaccatgcagctggccgatcatatcaaatttacacagtcagctttagactgtatgagtgtggaggtaggcaggctgcgggcttttctgcaaggcggacaagaggcaactgacatagccctgctactgagagacttagagacaagctgttctgacattcgacaattctgtaaaaagatacgccgaagaatgccagggacagatgcaccagggattcccgcagcactcgcctttgggcctcaggtatccgacacccttcttgactgtcggaaacacctgacctgggttgtggccgtgctccaggaagtcgccgctgcagctgcccagttaatagcccctctcgcagagaatgagggtcttctggtagcggctctggaagaactggccttcaaggcgagcgaacaagtgggtctggatgggtgggttgaaggcgttggaagagtttctgatcagtgtggggcattcacttcagcactgggctcttgtcgtagcatgggccctcctccagcagccccaatgtccgtgtgcgcttcacatgcgacaagcagctctgttccatag

SEQ ID NO: 221375 - DNA, 561 bp, synthetic construct
  misc_feature 1..561: note = Description of Artificial Sequence: Synthetic coding sequence
  source 1..561: mol_type = other DNA
atgctgatgggcttactccggccatacattcttggcgaacgcggtaccgtgatgactccctctggctccaggatgagcgccgaggcatctgcaagaccactcagagttggatcacgcgtggaagttattggaaaaggacacagaggaactgtcgcctatgtgggcgcaacactgtttgccaccggcaaatgggttggtgttattctggacgaggcaaaaggtaagaacgacggaacagtgcaggggagaaagtatttcacttgcgatgagggtcacggaatatttgttaggcaaagtcagatccaggtgttcgaggacggagcggacactacctctcccgagacacctgactcaagcgctagcaaggtgctgaagagagaaggcacagacactaccgcaaagacttcaaagcttcgagggctgaaaccgaaaaaggctcctactgctagaaagacaactacgagacggccaaagccgacaaggcccgcatccaccggcgtggcgggagcaagtagctcgttgggaccctccggcagtgcgtccgcaggggagctgtcctag

SEQ ID NO: 221376 - DNA, 3711 bp, synthetic construct
  misc_feature 1..3711: note = Description of Artificial Sequence: Synthetic coding sequence
  source 1..3711: mol_type = other DNA
atgtctgcagaagcttctgctcgcccactgcgtgtcggaagccgtgtggaagtcattggtaagggacatcgcggaaccgtcgcctacgttggggctaccctgttcgccacaggaaagtgggtcggagtgatccttgatgaagctaaaggaaagaatgatggaaccgttcaggggagaaagtatttcacatgcgacgagggtcatggaatattcgtcaggcaaagtcaaattcaagtttttgaagatggtgccgacactactagcccagagacaccggattcgagcgcctctaaagtgttgaagcgagaaggcacagacaccactgccaaaacaagcaaactgccaacaaggcctgcgtctaccggtgttgctggagccagctctagtctggggccatcaggctcagcctccgcaggtgagttatcctcctctgagcctagtacccccgcacagactccattagccgcacccattatccccacgcctgtgctcacctcacctggcgctgttccaccgctcccttccccaagtaaagaggaagagggtcttcgcgcacaggtgcgggacctcgaagaaaagcttgaaactcttcggctcaagcgagcggaggataaggcaaaactaaaagagctggagaaacataagatccagttggagcaagttcaggaatggaagagcaagatgcaagaacagcaggccgatttgcagcgcagactgaaagaggctcgtaaggaggctaaagaagcccttgaggcaaaagaacggtacatggaggaaatggctgacaccgcagacgcaattgagatggcaactttggataaagagatggctgaggagagagcagagagcctgcagcaggaagttgaggctttaaaggagcgggtggatgaactcactactgacctggagatcctgaaagcggagattgaggaaaagggatcggatggcgcagcttccagctatcaactgaagcagcttgaggagcagaacgcccgtctcaaagacgctttggttcgcatgagggacctcagttcatcagagaagcaggagcacgtcaagttacagaagctgatggagaagaaaaaccaggagctagaggtggtccgccaacagagagaaagactccaggaggaattgtcccaggccgaatctactattgacgagctgaaagagcaagttgatgccgcactgggcgcagaagagatggtggaaatgctcactgatcgaaacttaaacctggaagaaaaggtccgagaactgcgggaaactgtcggcgacctggaggcaatgaatgagatgaatgacgagttgcaagagaatgcacgcgaaacagaactggagctgagagagcaattggacatggcaggggctagagtgcgagaggcacaaaagcgggtggaggcggcacaggaaaccgtggctgactaccaacaaacaatcaagaaatatcggcagctgactgcccacctgcaggatgtgaatcgggagctgaccaatcagcaagaagcctctgttgagcgacagcaacagccaccgcctgaaactttcgacttcaagattaagtttgccgaaactaaggcgcacgcgaaggccatcgaaatggagctgcgccaaatggaggtcgcccaagcaaatcgacacatgtctcttctgactgcgttcatgccggattcattcctgaggcctggaggagatcatgattgtgtgctagtcctccttctgatgccaagactcatttgcaaagctgagttgattaggaagcaggctcaggagaagtttgagttaagtgaaaactgctcggaacgtcccggactcaggggtgctgctggagagcagcttagttttgcggctggcctggtttactcgctctcccttctgcaagccaccctgcaccgctacgagcatgcactctctcagtgctcagtggatgtgtacaagaaagtagggtccctttatccagagatgtctgcacacgagcgctccctggacttcctgattgagcttttacacaaagatcaattggacgagacagtgaatgtcgaacctttgactaaagccataaagtattatcagcacttgtactcgattcaccttgccgaacagcccgaagactgtacaatgcagctggccgaccacattaagttcacacagagcgcgctcgattgcatgtctgtagaggtggggagactgcgcgcatttctccagggtggtcaggaggcaacagacattgccctgctgctcagagatttagagacaagttgctctgacatcagacagttttgcaaaaaaatcagacgcaggatgcctggtaccgacgctcctggtatcccagctgcattagcctttggtccccaggtttctgatactctgctggattgcagaaagcacttgacctgggtggtcgccgttctgcaggaggtagccgctgccgctgcacagctgattgcccctctggccgaaaatgagggcctgctcgtcgctgccctggaagagttagcattcaaggcctccgaacagatatacggtacaccatcatcgtcaccctatgagtgtttaagacagtcttgtaatatcctgatcagcacaatgaataaactcgccaccgccatgcaggaaggggaatacgacgcagagagaccaccatcaaaaccccctcccgttgagctcagggccgctgccctgcgcgcagagatcaccgacgccgagggcttaggactaaagctcgaagacagagagactgttataaaggagctaaaaaaatcactcaaaattaagggggaagagttgagtgaggcaaacgttcgcttaagtctcttggagaaaaagctcgatagcgccgctaaagatgctgacgaaaggattgaaaaggtgcaaactaggctcgaggaaacacaggctctacttagaaaaaaagagaaagagtttgaagaaactatggacgcattgcaagcagatattgaccaactcgaggccgagaaggccgaactgaagcagcggctgaacagtcagagcaaaaggactatcgagggccttagggggcctccacctagtggaattgctactctagtgagtggcatcgccggtggagcaattcctggtcaggcacccggatccgtgcctggtcccggtttggtcaaggatagtcccctgctcctccagcagatcagcgctatgaggcttcacatctcccagctgcagcatgagaacagcatccttaaaggggcacaaatgaaggcatctctggcatctttaccccctttgcatgtcgccaagctgtcccatgaggggccaggctcagagcttcccgcaggggctctgtaccgtaaaacctcccagctgctcgaaacgctgaatcaattgagcacccacacacacgtagttgatattactcgcacctcaccggctgccaagtcaccatccgctcagcttatggaacaggtcgcccagttgaagtcattgagtgacaccgttgaaaaactgaaagatgaggtcctcaaggagaccgtctcacagcggcctggggcaaccgtgccaaccgattttgccaccttcccatccagcgcattcctgcgcgcaaaggaggagcagcaggatgacacagtttacatgggcaaggtgacattctcatgcgccgctggcttcgggcagcgccatcggctggtgctgacacaggaacagttgcaccagctgcactcccgtctgatcagctag

SEQ ID NO: 221377 - DNA, 3420 bp, synthetic construct
  misc_feature 1..3420: note = Description of Artificial Sequence: Synthetic coding sequence
  source 1..3420: mol_type = other DNA
atgatgcggcaggcacccaccgcacgcaaaacaaccactaggaggcccaagccaacgagacccgcaagtacaggagtggcaggtgcaagctcttcactggggcctagcgggagtgcatcggcaggagagctgtcctctagtgaaccgtcaaccccggctcagacgcccctcgcagcccctataatccctacccccgtgctgactagcccaggtgcagtgcctccgctcccatctccttcgaaggaagaagagggcctacgagcacaggtaagagatctagaggagaagctggagacactgaggctgaaaagggccgaagacaaagctaagttgaaagaacttgagaagcataaaatccaattagagcaagtccaagaatggaagtcgaagatgcaggaacaacaggccgacctgcaacggaggctcaaggaagctcgtaaggaagccaaagaggcgctggaagcaaaggaaagatacatggaggagatggcagacaccgccgatgcgatcgagatggcaacccttgacaaagaaatggccgaagagcgcgctgagagtctgcagcaggaagtcgaggctctgaaagagcgagtggacgagctcacaaccgatctagagattctgaaggccgaaattgaggagaaagggagcgatggggctgcctcgagctaccaattgaaacaacttgaggaacagaacgcccgtctgaaggacgctctggtgcgcatgcgggacctctcttcctcagagaagcaggaacatgtgaaactgcagaaactaatggagaagaagaaccaggaattggaggtggtgcggcaacaaagagaacggctgcaggaggagttgtctcaggctgaatctacaattgacgagcttaaagagcaagtggatgccgctttaggcgctgaggagatggtggagatgttgacagataggaatctgaacttagaggaaaaggttcgcgagctaagagaaacggtaggagatctggaggcaatgaacgagatgaatgacgagcttcaagaaaatgccagggagactgagctcgagctacgggaacaactggacatggccggagcaagggtaagagaggcgcagaaacgggtagaagcagcacaggagacagtggccgattatcagcaaactattaaaaagtaccggcaactgacggcccaccttcaagacgtcaaccgcgaactcactaatcaacaggaggccagcgtagagcggcagcagcagccacccccagagacgttcgatttcaaaattaagttcgccgagacaaaggcccacgcaaaggccatcgagatggaacttcgccagatggaggtcgcacaagccaacagacacatgagtctgctaaccgctttcatgcccgattctttcctgcgccctgggggagatcacgactgcgtgcttgtgctcctactaatgccacgattaatctgtaaggctgagctgatccgtaagcaggcccaggagaaattcgagttgagcgaaaactgttccgaaagacctggcctgaggggggcagccggagaacagttgtctttcgcggcagggctagtgtattccctgtctctgttacaggccacattgcaccgatacgagcacgctctcagccaatgctcggtagacgtgtacaaaaaagttggctctctatatcctgagatgtccgcccacgagcgctcattggatttcctgattgaattgttgcacaaagaccaacttgacgaaactgttaatgttgagcccctgacaaaagcaattaagtactaccagcatctgtacagtattcatctggctgaacagcctgaggactgtactatgcaactggccgaccacatcaagtttactcaatccgccctcgattgcatgtcagtggaagtggggcgactgcgcgcatttctccagggagggcaggaagccaccgatattgcgctgctgcttcgtgatctagaaacttcttgcagcgacattaggcaattctgcaagaaaatacgcagacggatgccaggcacagacgctcccggaattcctgctgcacttgccttcggcccacaggtgagtgacacccttctggactgtcggaaacacctcacttgggttgtggctgtcttacaggaggtagctgccgctgcagcacaattgatcgctccccttgctgaaaacgaaggactgctggttgccgctttggaagaactggcatttaaggcgagtgaacaaatatatggcacaccaagctcgtcaccgtatgaatgtttgcgtcagtcttgcaacattctcatttctaccatgaacaaactagccaccgccatgcaggaaggtgaatatgatgcagagcggcctcccagtaaacccccacctgtggagctgagggcagctgccttaagggccgagataactgacgccgagggcctgggtttaaagttggaagacagagagactgtaatcaaagagctcaagaaaagtttaaagatcaagggcgaagaactgtctgaggccaacgtgcgcctgagcctgctggagaaaaagttagattctgcggcaaaggatgctgacgagcgaatcgaaaaggttcagacaagacttgaagagacgcaggctcttctcagaaagaaggagaaggaattcgaggagactatggacgcccttcaagccgacatcgaccagttggaagccgaaaaggccgaattgaagcagcggttaaattctcagagtaaaagaacgattgaagggctgagggggcctcctccctccggaatcgccactcttgttagcggtatcgccggtggcgcaatccccggacaggccccaggatccgtgccagggcctggcctggtcaaagattcacccctgctcttgcagcagatcagtgctatgcgtctgcatattagccagctacaacacgagaactcaatcctgaagggggctcagatgaaagcgtctctggcgtcacttcctcctctccacgtggccaagctgtcccatgagggtccaggaagcgagctgccagctggcgcactttatcgaaagacgtcacagttactggagaccctcaaccagctgtcaacccatacccacgtggtggacatcacacggacctctcctgccgcaaaatccccatcagctcagttgatggaacaggtggctcagctaaaatccctgtccgatactgtggagaagctaaaggatgaagtgctgaaagagactgtttcccagagaccaggcgcaaccgtccctaccgacttcgcaacattccccagctctgccttcctaagagccaaagaagaacagcaggatgatacagtgtacatgggaaaggtcacctttagttgcgcggctggattcgggcagaggcacagacttgtactcactcaggagcagctgcaccagctgcatagcaggctgatctcctag

SEQ ID NO: 221378 - DNA, 3762 bp, synthetic construct
  misc_feature 1..3762: note = Description of Artificial Sequence: Synthetic coding sequence
  source 1..3762: mol_type = other DNA
atggcgcagtccaagcgccacgtttattcgcggacaccaagtggctcaaggatgtccgcagaggcgtccgctaggcccttgcgtgtaggaagtcgtgtggaagtgataggcaagggccatagggggaccgttgcctacgtgggggcaactctgttcgctacgggcaaatgggtcggcgtgattctggacgaagcaaaaggaaaaaacgacggcacagtacaaggtaggaaatacttcacatgcgatgaaggacatggcatcttcgtgcggcagtcccaaatccaggtcttcgaagatggagcggatactacatcccccgaaacgccagactccagcgcaagcaaagttctgaagcgcgaagggaccgatacaacagctaagacaagcaaactgcccactcgccctgcctcgactggcgtagctggtgcgtcttctagcttagggcctagcggtagtgcttcggccggagaactgtccagcagtgagccatcaacaccagcacagactcccctggcggctccaataatccccactcccgtgctgacgtcaccaggagccgtgccaccactgccgtccccaagcaaggaggaggaaggcttgcgggcacaagtgcgtgatttagaggaaaaactcgaaacgttacggctgaaacgggctgaggacaaagctaaactgaaagaattggagaagcacaagatccaattggagcaggttcaggaatggaagtcaaagatgcaagagcaacaggcagaccttcagcgaagattgaaggaagcccgtaaagaggcaaaagaagcccttgaagcaaaggaaaggtacatggaggaaatggctgacactgccgacgcaatagaaatggccactctcgataaagagatggctgaggagagagccgagtctttgcaacaggaagtggaagccctgaaagagcgagtggacgaactcacaacagaccttgagattctaaaagccgaaatagaagagaagggtagcgacggagctgcctcaagctaccagctgaagcagctggaggagcaaaacgcaagattaaaggacgctttagtacgaatgcgcgacctgtccagcagcgagaagcaggagcatgtaaaattgcagaagctaatggagaagaagaaccaggagcttgaagtggtccgccagcaaagggagagactgcaagaggaattatcgcaggcggaaagcacaattgatgaactgaaggagcaggttgacgcggctctgggtgcagaagaaatggttgagatgctaacggatagaaacctcaatctggaagaaaaagtgagggagctgcgcgaaacagtgggtgatctagaagcaatgaatgagatgaatgacgaactgcaggagaatgctagggaaaccgagctcgaactccgggagcagctggacatggcgggagccagggtccgtgaggctcagaagcgtgtggaggcagcccaggaaaccgtcgctgactatcagcaaaccatcaagaagtatcgccagctgacggcccatctgcaggatgtgaacagagagctgaccaatcaacaagaagcctccgtagaaaggcagcagcagccccctccggagacctttgacttcaagatcaagtttgctgagaccaaggcccacgcaaaggctatcgagatggaactgagacagatggaggtcgcccaagcgaaccgtcacatgtctctgctgactgccttcatgcccgatagctttctgcgcccaggaggagatcacgactgcgtattggtcctgctactgatgcctagactaatttgtaaggctgaattaatcagaaagcaggctcaagaaaagttcgagctgagcgaaaactgctccgaacgtcccggacttcgcggagctgctggcgagcagttgtccttcgctgcgggtctagtgtacagtcttagcctcttgcaggcaactctacacagatatgaacacgcccttagccagtgtagtgtagatgtgtataagaaggtcggcagcctgtacccagaaatgagtgctcacgaaagaagcctagacttcttgatagaactactgcataaggaccaactcgatgaaactgtaaatgttgagcccctgacaaaggctattaagtattaccagcacctgtattccattcatctagctgagcagccggaggattgcacaatgcagttggcggaccacattaaattcacccagtctgctctggactgcatgagcgtcgaggtgggcaggctcagagcattcctccaaggcggacaggaggctacggatattgcgcttcttctgagagatctggagacttcctgttctgacattcggcagttctgcaaaaagatcaggagaagaatgcccggaacagacgcccctggcatcccagccgcactcgccttcgggcctcaggtgtccgatacgctgttagactgccggaaacacctgacatgggtagtcgcagttcttcaagaggtcgccgcagctgctgcacagcttatagcaccacttgcagagaatgaagggctcctagtagctgctttggaagagctggccttcaaggcctcggaacaaatatacgggacaccatcttcgagtccctacgagtgcctgcgacaaagctgtaacattctgatttcgactatgaacaagctcgctaccgccatgcaagaaggcgagtacgatgctgaaagaccgccttcaaaaccccctcctgttgaattacgagctgccgctttaagagcggagattactgacgccgagggcttgggccttaagctggaggatcgagagacggtgataaaggaactaaaaaaatcactgaaaattaagggggaggaactgtcagaggcgaatgtgcggctgtcccttttggagaagaaacttgacagcgcagctaaggacgccgatgagcgtattgaaaaagtgcagactcggctggaggagactcaagcccttctgagaaaaaaggagaaagagttcgaggaaaccatggatgccctgcaagccgatattgatcagcttgaggctgagaaagctgagctcaagcagcggctgaacagccagtccaagagaacaattgagggtctgcggggtcctccgccttcagggatcgcaacgctcgtatctggaatagccggaggcgctatccccggacaggctcccggatccgtgccgggtcctggcctggtgaaagacagtccactcctcctgcagcaaattagtgccatgagactgcatatatcccagctccagcacgagaactccatcctgaagggcgctcagatgaaggcttccctagcaagcctgccgcctttacacgtggcaaaattgtctcacgagggccctggatctgagctgccagccggtgctctgtatcgaaagaccagccaactgctggaaaccctaaatcagttgagcactcacacccacgtggtcgacattacgaggacttccccagccgctaagagtccctctgcccagcttatggagcaagtggctcaattgaaaagtctctctgacacagtggagaaattaaaagatgaagttttaaaagagaccgtctcccagaggcccggtgccacggttcccactgattttgccacctttcccagctccgcatttctcagggcgaaagaagagcaacaggatgacaccgtatacatgggcaaagttactttctcgtgtgccgcaggcttcggtcagaggcaccggctggtgctcacacaggagcaattgcatcagctgcactcgcgtcttatcagctag

SEQ ID NO: 221379 - DNA, 1221 bp, synthetic construct
  misc_feature 1..1221: note = Description of Artificial Sequence: Synthetic coding sequence
  source 1..1221: mol_type = other DNA
atggctgatcccaaatatgcagatttgccagggattgctcggaacgagcccgatgtgtatgaaactagtgatctgccggaagacgaccaggcggaattcgacgcctttgcccaagagctcgaggaactgacgagcacttcagtagagcacattattgtgaatcctaacgcagcatacgacaagtttaaggacaaacgtgttggcacaaaaggcctcgacttcagcgatagaatcgggaaaacgaagagaaccggatatgagtccggtgaatacgaaatgttgggtgagggcctgggagtcaaggagaccccccagcagaaataccagcgcctcctgcacgaggtgcaggagctcacaaccgaggttgagaaaattaagacgactgtgaaggagagcgcaacggaagagaagctcacacctgtgctccttgcgaagcagttggcagcgctgaaacagcagttagtggcatcgcaccttgagaaattgctggggcctgacgctgcaatcaacctgaccgatcctgacggagcattggcaaagcgactcctcctacaattagaagccacaaagaactccaaaggaggaagcggcggaaagaccacaggcaccccccctgattcctctctcgtcacctacgagttgcacagccggccagagcaagacaaattctctcaggccgcaaaagtggccgaactagagaaaaggttaacagaactggagacggcggtgcgctgtgatcaagatgcccaaaatcctctatcagcgggtctgcaaggtgcatgtctcatggagaccgtagaactgctacaggcgaaggtgtcagccttagatctggctgtcctggaccaggtggaggctagactccagagcgtccttggaaaggtgaatgaaatcgccaagcacaaggcatcagtagaagacgcagatacccagtcaaaggttcatcagctgtacgaaaccattcagaggtggtcccccatcgcctctacgctgcctgagctggtgcaacgtctagttaccatcaagcagttgcacgagcaggcaatgcaatttggccagctgctcactcacctggataccacccagcagatgattgcgaattcgcttaaagacaataccactctcctcacccaggttcagacgactatgcgtgagaatctggccactgtggagggaaacttcgcttctattgacgaacgcatgaagaaacttggaaaatag

SEQ ID NO: 221380 - DNA, 1137 bp, synthetic construct
  misc_feature 1..1137: note = Description of Artificial Sequence: Synthetic coding sequence
  source 1..1137: mol_type = other DNA
atgtacgcccagggaacagaggattccagaacgctagaagagctcacctcaacttctgtggaacatatcattgtgaaccctaatgccgcttatgataagtttaaggataaacgcgttggcaccaaaggtttggacttctcagatcggattgggaagacgaaacgtaccgggtacgaaagtggcgagtatgagatgttgggggaagggcttggagttaaggagacaccacagcagaaatatcagcgcttgctgcacgaggtccaggagctcactaccgaggtggagaagatcaaaaccacagttaaagagagcgcaaccgaagaaaaactgactcccgttctcttggccaagcagcttgcggctctgaaacagcaactcgtggcctcacacctggaaaaacttcttggtccagatgccgctataaacctcaccgacccggatggggctcttgccaaacgtctgttacttcagctcgaagccaccaagaactcaaagggcggatccggagggaagacaaccggcactccgccagacagctccttggtcacatacgaactgcattcacggccagaacaggacaagttctctcaggccgcaaaagtggccgaactggaaaagaggctgactgagctggagacggcagtgcgctgtgaccaggacgcccagaatccgctgtcagctgggctgcagggcgcatgcctgatggagaccgtggagctgctgcaggcaaaagtctcagccctcgacctggctgttctggaccaggtcgaggccaggctccagtccgttttaggcaaagtcaatgaaattgcgaaacacaaggcatcagtagaggatgctgatactcagagcaaggttcaccagttgtacgaaactatccaaagatggagcccgatcgcctcaacgctgccggaactggtgcagcgtctcgtgacaattaaacaactccacgaacaggccatgcagttcggacaactgttaacacaccttgacacgactcagcaaatgatagccaactctctgaaggacaacacgactctgctgactcaggtgcagaccaccatgagggaaaacctcgccacagtggaaggtaactttgccagtatcgacgagaggatgaagaaactgggcaagtag

SEQ ID NO: 221381 - DNA, 945 bp, synthetic construct
  misc_feature 1..945: note = Description of Artificial Sequence: Synthetic coding sequence
  source 1..945: mol_type = other DNA
atgctgggcgaaggacttggcgtgaaagaaacccctcagcaaaagtatcagcgcctcttgcacgaagtgcaggagcttactactgaggttgagaagatcaagaccacagttaaagaatccgctacagaggagaaacttaccccggtgttgctcgcgaaacagttggctgccttaaagcagcaactggtggcaagccacttagagaaactgctcgggcctgatgccgctatcaatctgacagatcccgacggcgctctcgccaaaagactcctgttgcagctggaagctactaaaaactctaaaggcggttctggaggtaaaacaacaggtacgccaccagattcttctttggtgacatatgaactccactctagacccgaacaagataaattttcccaggccgctaaagtggctgagctggagaagcgcttgacagaattagaaacggctgttaggtgcgatcaggacgcccagaacccgttaagcgcgggtctgcaaggggcatgtcttatggagaccgttgagctcctacaggccaaggtaagcgctctggatctggcagttctcgatcaggtggaagctcgccttcagtccgttctgggaaaggtaaatgaaatcgcaaagcacaaagcttctgtggaggacgctgatacacagtcaaaagtccaccagctatatgaaaccatacagaggtggtcacctatcgcttcaacgctgcccgaattggtgcagcgcctggttacgattaagcaattgcacgagcaggccatgcagttcggtcagctcctcacacatttggacactactcagcagatgatcgctaattcgctcaaagataataccacactcctgacccaggtgcagacgactatgcgcgagaacctcgcaactgtggagggcaactttgcatctatcgacgaaaggatgaagaaattgggcaagtag

SEQ ID NO: 221382 - DNA, 1221 bp, synthetic construct
  misc_feature 1..1221: note = Description of Artificial Sequence: Synthetic coding sequence
  source 1..1221: mol_type = other DNA
atggccgaccccaagtacgccgatttgcccggaattgcgaggaatgagccagacgtctatgaaacaagcgacctcccagaagatgatcaggcggagtttgatgccaccgtccagcacttggaggaattgacctcaacgtctgtggaacatattatagtaaaccccaacgctgcttatgataaattcaaggacaaaagagttgggacgaaagggctagactttagcgaccggataggtaagactaagcggacggggtatgagtcgggggaatacgagatgctaggggaaggcctaggggtaaaggagacaccgcaacagaagtatcaacgtctcctgcacgaggtgcaggagttgacgactgaagtggagaagatcaaaaccacagtcaaggagtccgcgaccgaggagaagctgacacctgtactgttggcaaagcagctcgccgcacttaagcagcagctggttgcgtcacacctggagaagttgctcggaccagatgccgctatcaatctaacggatcccgacggcgcacttgcaaagcgccttctactccaactcgaggcaacaaaaaactctaagggcggatcaggcggtaagactaccggcacaccaccggactcttccttggtcacttacgagctgcactccaggccggagcaggacaagttttcccaggctgcgaaggtggccgagctcgagaagcggttgactgaactagagaccgcagttaggtgtgaccaagacgcccagaatcctttgagcgccggtctccagggcgcttgcctgatggaaactgtcgaactcctgcaggcaaaggtaagtgccctggacctcgccgtgctggaccaggtagaagctcggctgcagagcgtgctcggcaaagtgaacgagattgcaaagcataaagcatcggtcgaggatgccgacacacagagcaaggtacaccagctgtatgagaccatccagcggtggagccccattgcttcaacgctgccagagctggttcaacggttggtgactatcaaacagctgcatgaacaagccatgcagttcggacagctgctgactcacttagacactactcagcagatgattgcgaactctttaaaggataacactacacttctgacgcaagtccaaacaacaatgcgcgaaaatctggccacagtggaaggcaacttcgccagtatcgacgaacgcatgaagaagcttggcaagtag

SEQ ID NO: 221383 - DNA, 1206 bp, synthetic construct
  misc_feature 1..1206: note = Description of Artificial Sequence: Synthetic coding sequence
  source 1..1206: mol_type = other DNA
atggctgaccccaagtacgccgacctgcctgggatagcaaggaatgaacccgatgtctacgaaacttcagacttacctgaggatgaccaagctgaatttgacgcagaggagcttacctctacttcagttgagcacattatcgtcaaccctaatgccgcttacgacaaatttaaagataagcgcgttgggaccaagggtctggatttttcagacagaattgggaagactaaaaggactggttatgaaagcggtgagtacgagatgctgggggaaggactcggtgtgaaagagacaccacagcagaagtaccagcggctcctgcacgaggtccaggaacttaccacagaggtagaaaagatcaagaccaccgttaaagaaagcgcgacagaagagaagctgacacccgtgctcctggccaagcagttagctgccctgaaacagcaacttgtggctagccacttggagaaactgcttgggcctgatgccgctatcaatctcacggaccctgatggtgctctggccaagcgcttgcttctccagttggaggccacaaagaactctaaaggtggcagcggcggaaagacaacaggcaccccccctgactccagtctcgtgacatatgagctccactcacgtccagagcaggacaagttctctcaggccgctaaggtcgccgaactggagaagcgacttactgagttagagacagcagtgcggtgcgaccaggatgcacagaaccctttgtcagccggtttgcagggcgcttgtcttatggagaccgtggaactcctccaggcaaaagtgagcgcgctggacttggccgtcctcgatcaggttgaagcacgcttgcagtcagtcctgggtaaagtcaacgaaattgccaaacataaggcgtccgtggaagacgctgacacccagagcaaagtgcaccagctgtacgaaaccattcagcggtggagccccatcgcaagcacgcttcccgagcttgtgcagcgacttgtgaccattaaacaactgcatgaacaggccatgcagtttgggcagctcctcactcatttggataccactcagcagatgatcgcgaattctctcaaagacaacactacattgttgacacaagttcagaccactatgcgggaaaatctggcaacagtggaaggcaacttcgcctccatcgacgagcgcatgaaaaaactgggtaaatag

SEQ ID NO: 221384 - DNA, 561 bp, synthetic construct
  misc_feature 1..561: note = Description of Artificial Sequence: Synthetic coding sequence
  source 1..561: mol_type = other DNA
atggcaggtcttaccgatttacagcgcttacaggcgcgagtcgaggaactcgagcgctgggtgtacggacctggaggtgctcgaggaagtcgaaaggtggccgacggcttggttaaggtgcaagttgcgttggggaatatttcttctaagcgggaaagagtgaagattctgtataagaagatcgaggacctgatcaagtacctagatcccgaatacatcgaccgtattgctattcccgatgcctctaagctgcagtttatcctagccgaagagcagtttatactgagccaggtggccctgctggaacaggtgaacgcacttgtacccatgctggactccgcccacattaaagctgtgcccgaacacgcagctaggctgcagcgactggcgcagatacatattcaacagcaggaccagtgcgtggaaataaccgaagagtccaaggcgctcttagaggaatacaacaagactaccatgctgctgagtaaacagttcgtccaatgggatgagctgttatgtcagctagaagccgcaacacaggttaagcccgctgaagaatag

SEQ ID NO: 221385 - DNA, 531 bp, synthetic construct
  misc_feature 1..531: note = Description of Artificial Sequence: Synthetic coding sequence
  source 1..531: mol_type = other DNA
atggccggactgactgatctgcagcggctccaggcacgggtggaggagctcgagcggtgggtttacggacctggaggcgctcgagggtcgagaaaagtggctgacggcctggtgaaagtgcaggtggctttgggtaacatttcatccaagcgggagagagtgaaaatactgtataaaaagattgaagatttaattaaatatctcgatcctgagtacattgacaggatagccatccccgatgcctcaaagcttcaattcattctggcggaggaacagtttattctctctcaggtggccctcctagagcaagtcaacgccctggtgccaatgctggatagcgctcatattaaggccgtgccagaacacgcagctagactccagcgactcgcccaaattcatattcaacagcaggcaccgtggggcgtcggagtgcgagacgaagctggaagcctggtggaagatgtcggcttcgcacagtttctgagtgtcctgcattttggccctaccggtcctgtgtgcggcaaccattag

SEQ ID NO: 221386 - DNA, 486 bp, synthetic construct
  misc_feature 1..486: note = Description of Artificial Sequence: Synthetic coding sequence
  source 1..486: mol_type = other DNA
atggcagggctgaccgatctccagcggttacaggccagagtggaggagcttgagagatgggtctacggcccaggaggagctcgcggatccaggaaggtcgcagatgggctggtgaaggttcaagtggctctcgggaatatcagtagtaagcgtgagcgggtcaaaattctatataaaaaaattgaggacttaattaagtacctggaccctgaatacatagacagaatagctatccccgacgccagtaagttacagttcatcctagctggaaatgccggtctccacgtttatatgcacctccgaatgtgggtagtgggcgaggtaaagcaccgcgacgggctgagtattcagtcctccggtggttacaagccctggatgctgctgagcggaattgtcgcctggttctgggttgaagatccgatggatccattggtggacatcgaatatagcatccccctgcaccaacttcaggccatggttccatag

SEQ ID NO: 221387 - DNA, 315 bp, synthetic construct
  misc_feature 1..315: note = Description of Artificial Sequence: Synthetic coding sequence
  source 1..315: mol_type = other DNA
atggccggactgacagacctacagaggctgcaagcgagggtcgaggagctggaaaggtgggtctatgggccaggtggagctcgcggatcccgcaaagtggccgacggactggtgaaagttcaggtagccctgggcaacatttcttctaaacgggaacgggtgaagatcctctataagaaaatagaggatctcattaagtacctggaccctgaatacatagatcggattgccatcccagacgcatcaaagttacagtttatcctggccgagcggtcctcactgtcattccctaggcttcactcatggtctcgatag

SEQ ID NO: 221388 - DNA, 477 bp, synthetic construct
  misc_feature 1..477: note = Description of Artificial Sequence: Synthetic coding sequence
  source 1..477: mol_type = other DNA
atggcgggacttaccgacctgcagcgcctccaggccagggtcgaggagctcgagcgctgggtctatgggcctggcggagcacggggatctcgcaaggtcgctgatggattagtgaaagtgcaagtggcattaggcaacatctcttctaaacgagaacgcgtgaagattctctacaaaaagattgaagaccttatcaagtatctggacccagaatatatcgatagaatcgcaatccccgatgcgtccaagctacaatttatcctggcagccgtgcccgagcatgccgctcgactgcagcggctggcacagattcacatccagcaacaagaccagtgtgtcgagataacagaagaaagtaaggctcttttggaagagtataataagaccaccatgctgctgtctaaacagtttgtgcagtgggatgagctgttgtgccagttggaagcagcaacccaagttaaaccggctgaagaatag

SEQ ID NO: 221389 - DNA, 456 bp, synthetic construct
  misc_feature 1..456: note = Description of Artificial Sequence: Synthetic coding sequence
  source 1..456: mol_type = other DNA
cagaggctacaggccagggtggaggagcttgaacgatgggtttatggacccggaggcgcacgaggctctcgaaaggtggccgatgggttggtgaaggtgcaagttgcccttgggaatatctcctcgaaacgggagcgggtaaagattttgtacaagaaaatcgaggacctgatcaagtacttggacccagagtatattgatcggatagccataccagacgcctcaaaactccaattcatcctggccgctgtccccgagcacgcagctcgcctccagaggctggctcagatccatattcagcagcaggatcaatgtgtcgaaatcaccgaggagtctaaagcgctgctagaggagtacaacaaaaccaccatgctactgtcgaaacagttcgtgcagtgggatgagttgctctgccaacttgaggccgctacccaagtgaaacccgcagaggaatag

SEQ ID NO: 221390 - DNA, 519 bp, synthetic construct
  misc_feature 1..519: note = Description of Artificial Sequence: Synthetic coding sequence
  source 1..519: mol_type = other DNA
atggccggtctgacagatttgcagcggctccaggctcgggttgaggagctcgaaagatgggtttacggacccggaggagccagaggttcacggaaagtggctgatggattggtgaaagtgcaagtcgcactaggtaatatcagttcaaaacgtgagagagttaaaatcttgtacaaaaagattgaagatctgatcaagtatctcgatcccgagtacatagacagaattgcaatccctgatgcctccaaacttcagttcatcctggccggaaatgccggtctgcatgtgtatatgcacctaaggatgtgggtggtcggtgaggtcaaacaccgagatggcctgagcattcaatctagcgggggttataagccctggatgctcctatctggcatcgtagcctggttttgggtcgaagatcctatggatcctctagtcgacatagagtattctattcctctgcaccagctccaggcaatggttcctgcaaccgtaggcgcttcacctgtgttctatcagtag

SEQ ID NO: 221391 - DNA, 549 bp, synthetic construct
  misc_feature 1..549: note = Description of Artificial Sequence: Synthetic coding sequence
  source 1..549: mol_type = other DNA
atggagctgggcgagctcttatataacaagagtgaatacatcgagaccgccagcggaaataaggtttcccgacaatctgttctctgcggatctcaaaatatcgtactcaatgggaaaactatcgttatgaacgactgtatcatcaggggggacttggcaaacgtcagagtcggcagacactgcgtggtgaaaagcagaagtgtaatcagaccacccttcaaaaaattctccaaaggcgttgccttttttcctctgcacataggggaccacgtgtttattgaagaggattgcgtggttaacgccgctcaaataggctcctatgttcatgtgggaaagaactgcgttattggcaggcgctgtgtgttaaaggactgctgtaagattctggacaatacagtgctcccccctgagacagtggtgcccccattcactgtgtttagcggctgccctggactgttcagcggggagctgcctgaatgcactcaggaactgatgatagatgtcacaaaaagctattaccagaaatttctcccgctcactcaggtatag

SEQ ID NO: 221392 - DNA, 255 bp, synthetic construct
  misc_feature 1..255: note = Description of Artificial Sequence: Synthetic coding sequence
  source 1..255: mol_type = other DNA
atggagctgggcgaacttctctacaataagtccgagtacatagaaacggctagtggtaacaaagtttctcgacagagcgtgttgtgtggtagccagaatattgttttgaatggaaaaaacttcgttatttctgtgttcctgtcaccctacattcggtgtcactctgcctgtagggacagaaagcgctctgacgagagcgtgcgcctgagcgtcaataaccgggagtggtgggggctcgttaattggcgtatgtag

SEQ ID NO: 221393 - DNA, 1650 bp, synthetic construct
  misc_feature 1..1650: note = Description of Artificial Sequence: Synthetic coding sequence
  source 1..1650: mol_type = other DNA
atggaattcgctgagttgatcaagaccccaagagtggacaacgttgttctgcatcgacccttctatcctgcggtcgaggggacactgtgtttgaccggacaccacctgattctctcttctaggcaggataatacggaagaactctggctcctgcacagcaacattgacgctatcgataagcgatttgtcggctcgctgggtacaatcatcattaagtgcaaagactttaggatcatacagctcgatatccctggcatggaagagtgtctgaacattgcaagctcaatcgaagcattaagcacactggactcgatcaccctgatgtacccattcttttatcgcccaatgttcgaggtaatcgaggacggctggcattcattcctcccggaacaggagtttgaactctacagctctgccacgtcagagtggcggctgtcctacgtcaataaggagttcgctgtgtgtccatcttatccccctattgttaccgttcctaagtccattgacgatgaggcccttcggaaggtggcaacgttcagacacggcggtcggtttcctgtgttatcctactatcacaagaagaacggaatggtgattatgcgaagtggccagccactgacaggaaccaacggaagacggtgtaaggaggacgagaaactcatcaacgcgactcttagagcaggcaagcgaggatatataattgatactagatcgctcaacgtcgctcagcagaccagagcgaagggtgggggatttgaacaggaggcgcattatccgcagtggagacgaatccataagtccattgagcgctaccatatcctccaggagtccctcattaagctcgttgaggcctgtaacgatcagacccacaacatggacagatggctaagtaagttagaggctagcaactggctgacccacatcaaagagatactgactacagcgtgcctggcggctcagtgtatcgatagagaaggggcttcaatccttattcacggtaccgagggcaccgactcaaccctgcaagtcactagcttagcccaaattatactggagccccgatctaggaccattagaggattcgaagctttgatagaacgcgaatggctgcaggctggacaccccttccagcagcggtgtgctcagtcagcctattgtaataccaagcaaaaatgggaggcccctgtctttcttcttttcctcgactgtgtgtggcagattctccgccagtttccatgctcttttgaattcaacgagaattttttgattatgctgttcgaacacgcgtacgcctctcagttcggaaccttcctagggaataatgagtctgaacggtgcaagctgaagctgcaacagaaaaccatgtcattatggtcttgggtgaatcaaccctccgaattgtctaagttcacgaacccactctttgaggccaacaacctcgtcatatggccgtccgttgccccacagtccctgcccctgtgggagggaatctttttgcggtggaatcgcagcagcaaatatctggacgaggcgtacgaggagatggtaaacatcatagagtataataaggagctgcaggctaaggtcaatattctgcgccgtcaactggcagagctggaaactgaagacgggatgcaagagtcaccgtag

SEQ ID NO: 221394 - DNA, 2556 bp, synthetic construct
  misc_feature 1..2556: note = Description of Artificial Sequence: Synthetic coding sequence
  source 1..2556: mol_type = other DNA
atgggcaacaggggcatggaggatctgatccccttagttaatcgactgcaggacgcatttagtgctattggacagaacgccgatctggacctgccacagattgccgtggtgggaggacagtcggccggaaagagttcagtactggagaacttcgtggggagggattttctgccgaggggaagcggaattgtcacccgtagaccactcgtacttcagcttgttaacgccacgacagagtatgcagaatttttgcactgcaaggggaagaagttcactgactttgaggaagtccggcttgaaatagaggcagagaccgacagggtcacaggtacaaacaaagggatttctcctgttccaattaacctcagggtgtactcccctcacgtgctcaatctgactctagtagatctccctggaatgaccaaagtccccgttggagaccaacctccagatatagaattccaaatccgggacatgctgatgcagtttgtgacaaaggagaactgtttgattctagcagttagccccgctaacagcgatcttgctaactcggacgcgctgaaagtagccaaggaggtagatccacagggccagaggaccatcggcgtcataactaaactggacctgatggacgagggcaccgatgcacgagatgtcctcgaaaacaagttgctgccacttagaagaggatacatcggggtggttaacagaagtcagaaggatattgacggcaagaaggacatcaccgccgctctggcagctgaaaggaaattcttcctatctcatccgagctaccgccatctagctgatcgtatggggactccatacttgcagaaggtgctcaatcagcagctgacaaatcacatcagagatactctgcctggactgagaaataagctccaatctcaattactgtctatcgaaaaggaagtggaagagtacaaaaattttcgacccgacgatcctgcacggaagacaaaagctctactccagatggtccagcagttcgctgttgactttgagaaacgtatagaaggctccggcgaccaaattgacacttacgagctcagcggcggagccaggatcaataggatcttccatgaaagattccctttcgagctggtgaagatggagtttgacgagaaagaactgcgtcgggagatcagctatgcaatcaaaaatatccacggaatccgaactggtttgttcacccctgacatggctttcgagacaatagtgaagaagcaagtcaaaaaaattagggagccctgtcttaagtgtgttgacatggtgattagtgagttgatctctacggtccgacagtgtacaaagaagctacagcaatacccacgactaagagaggagatggaaagaattgtcaccacccacatccgagaaagggagggccgaacaaaggagcaggtgatgttgctcatagatatcgagctcgcatacatgaatacaaaccatgaggattttatcgggtttgccaatgctcagcagcgctccaaccagatgaataagaaaaagacctctggaaaccaggacgagatcctggtcattaggaagggttggctgacgatcaataatattggcatcatgaagggcggaagtaaggaatattggttcgttctgaccgctgagaatttatcatggtataaagacgacgaggaaaaggaaaaaaagtacatgctgtctgtggataacctgaagctgagggacgtggagaagggcttcatgagttctaagcatatcttcgcactgttcaatacggaacagcggaatgtatataaagactataggcagctcgaactggcctgtgagacccaagaggaggtcgacagctggaaggcctcttttctccgggctggagtataccctgagcgcgtgggcgacaaagaaaaggctagtgaaacggaggagaacgggtcagattcctttatgcactctatggacccacagcttgagagacaggtagaaaccattcgcaacttggtggatagttacatggccattgtcaacaagacagtgagggacctgatgccgaaaactatcatgcacttgatgatcaacaacacaaaagaattcattttcagtgaattacttgcaaacctgtattcctgtggtgatcagaacactttaatggaggagtctgctgagcaggctcagcgtagagatgaaatgttacggatgtatcacgccttaaaggaagccctatctattatcggcgatatcaacacaacaacagtgtcaacacctatgccacccccagtcgacgactcctggcttcaagtccagagcgtccctgccggtcggagaagccccacctcaagcccaacacctcaacgccgtgctccggcagtgccacccgcacggccaggttcccgcggacctgctccgggacctcctcctgccggaagtgccctggggggagcacctccggtgccatcgcggcctggggcttccccagacccttttggaccacctccacaggtgccatcccgtcctaatcgagcacctcctggtgtccccagaatcaccatctctgatccttag

SEQ ID NO: 221395 - DNA, 2595 bp, synthetic construct
  misc_feature 1..2595: note = Description of Artificial Sequence: Synthetic coding sequence
  source 1..2595: mol_type = other DNA
atgggtaatagaggcatggaagacctgatcccgctggtgaaccggctgcaggacgcgttttcagccatcggccagaatgccgaccttgatctgccgcaaatcgctgtggtcggaggtcagagtgctgggaagagctccgtcctggagaatttcgtcgggagggacttcctccccagagggtccggcatcgtcacgaggagacccctcgtccttcagctggttaacgccaccactgaatacgcagaattcctccattgcaagggcaaaaaatttactgatttcgaagaggtccgtctcgagatagaagctgagaccgatcgcgtgacgggtactaataaagggataagccccgtgcccataaacttgagagtttacagtcctcatgtcctgaacttgaccttagtggacctccctgggatgaccaaagtgcccgtaggggatcagccccctgacattgagtttcagatacgggatatgttaatgcagttcgtcaccaaagagaactgcctgatactcgctgtttcgcccgctaactccgacctcgcaaactcagatgctctgaaagtcgcaaaggaggtggatccacaaggccagcggacaatcggagtgatcactaagctggacctaatggacgaaggaacagacgctagagatgtattagaaaacaaactcctgcccctccgccgtggttatatcggagtggtcaacagatcccagaaggatatcgacggcaaaaaggacataaccgccgctttggcggctgaacgtaagttctttctgagccaccccagctaccgtcatctggcagataggatgggaaccccatatctacagaaggtgctcaaccaacagctcaccaaccatatacgcgacacactgccagggttaagaaacaaactgcaatcccaattgctgtctatcgagaaagaagttgaggagtacaagaattttcggccagacgatcctgctcggaaaactaaagcattattgcagatggtacaacagtttgccgttgattttgagaaaaggattgaaggatccggagatcaaattgatacatatgaactcagcggaggggcacgcattaaccggatctttcatgagcgctttccattcgaattagtgaagatggaattcgatgagaaagagcttcgccgagaaatttcctatgccatcaaaaatatacacggaatccgcaccggcctcttcacacctgacatggcatttgagaccatcgtgaaaaagcaggtcaagaagattagagagccatgccttaaatgcgttgatatggtgatctctgaactgattagtaccgtacgacagtgcacgaagaaactgcagcaatatccgcgacttcgcgaggaaatggagagaatcgtcaccacccacatacgtgaaagggagggacgcacaaaggaacaagtgatgctgcttattgatatagagctggcatacatgaacaccaaccatgaggatttcataggctttgctaatgcccagcagagatcgaaccagatgaataagaaaaagactagtggcaaccaggacgagattctggtgatcagaaaggggtggcttaccatcaacaacatcggaatcatgaaaggaggaagtaaggaatactggtttgtcttaacggctgagaatctaagctggtacaaagatgacgaggagaaggaaaagaaatacatgctgtccgtggacaacctgaagctgagagacgttgaaaaaggatttatgagtagtaaacacatcttcgccttgtttaacaccgagcagcgaaatgtttataaggattatagacagttggaacttgcctgcgagactcaggaagaggtggattcatggaaagcctcattcctgcgcgctggggtataccctgagcgcgtgggcgacaaggaaaaagcatcagagactgaggagaatggttccgattctttcatgcactcaatggacccacagttggaaaggcaggttgaaacaattcgcaacctggtcgatagttatatggccatcgtgaataaaactgtgagagacctgatgccaaaaactataatgcacctaatgattaacaacacaaaggaattcattttctccgagcttctggcgaatctgtacagctgtggcgatcagaatacccttatggaggagagtgcagaacaagcgcaacgccgagacgagatgcttcgcatgtatcacgcactgaaggaagccctgtccataatcggcgacatcaatactaccactgtctcaacacccatgcctccccctgtcgacgactcatggctccaggttcagagcgtcccggcaggcaggagatcccctacttcatccccaacgccccagcgacgcgctcccgctgtgccgccagctcgtcctggtagcagggggcctgctccaggcccaccccctgccggaagcgctctcggaggcgcaccccctgtgccttccagacccggtgcctcccctgacccattcggtcctccccctcaggtgccatctagacccaatagagcgcctcctggggtgccatccaggagtgggcaggcctctccttctcgacctgagtctccaagacccccattcgacctgtag

SEQ ID NO: 221396 - DNA, 1989 bp, synthetic construct
  misc_feature 1..1989: note = Description of Artificial Sequence: Synthetic coding sequence
  source 1..1989: mol_type = other DNA
atggaggaccttataccccttgttaataggcttcaggatgctttctcagcgattgggcaaaacgcagatctggatctgcctcagatcgctgtcgtggggggtcagtctgctgggaaaagctccgtcttagaaaattttgttggcagagatttcttacccaggggttccgggattgtgacaagacggccactagtccttcagctggttaatgccactactgaatacgcagagttcctgcattgtaagggaaaaaagttcaccgattttgaggaggtcagacttgagatcgaggccgaaacggatagagtcactggaaccaacaaagggatctctccagtacccattaatctgcgcgtttattcgcctcacgtgcttaatcttaccttggttgacttaccaggaatgacgaaggtccctgtgggcgaccagcctccggacatcgaattccagatcagagacatgctgatgcagttcgttaccaaggaaaattgcctgatactggctgtgagtccggcaaacagcgacttggcaaactctgacgccctgaaggtcgctaaagaagttgacccacagggccagcgaaccatcggtgtgattactaagctcgatctaatggacgaggggacagatgcccgagacgtgctggaaaataagctcctccctctcaggcgagggtacattggcgtcgtgaatcggagccagaaagatatcgatggaaagaaagatataacggccgctctcgctgcagagaggaagttctttctaagccatccttcatacagacacctcgccgaccgaatggggacaccatacctgcagaaggtgctgaatcagcagttgactaatcacattagggatacactgcccggactgagaaacaagttgcagtcacagcttctgagtattgagaaagaggtcgaagagtataagaacttccggcctgatgatcccgctcgtaaaacgaaggctttactgcagatggtgcagcagtttgctgtagacttcgaaaaacgaatagaaggtagtggtgatcagatcgacacctacgaattaagtggtggtgcaagaattaaccgcatttttcacgagcgctttccatttgaattagtcaaaatggagtttgacgagaaagaattgcggcgtgagatatcctacgcgatcaaaaatatccatggcattaggaccggcttgttcactcccgatatggccttcgagacaatagtgaagaaacaagtgaaaaaaatccgcgagccgtgcctcaagtgcgtggacatggtcattagcgaattaatttcaaccgtccgacagtgcacgaaaaagctgcagcagtatccgaggctgcgcgaagagatggagagaattgtgactacccacattcgggaacgcgaaggacgaactaaagagcaggtgatgctgctgattgacattgagctggcttatatgaacacaaaccatgaagacttcatcgggttcgctaacgcacaacaacgatcaaatcagatgaacaagaagaagacttctgggaaccaaatcacactgcaggtaatccgcaaaggatggctgaccatcaacaacatcggtataatgaagggcggaagtaaagaatactggttcgttctcaccgccgagaatctgtcatggtacaaggatgatgaggaaaaggagaagaaatatatgctgtctgttgacaaccttaagttgagggatgtcgaaaaggggttcatgtcttcaaagcatatttttgcccttttcaacactgagcagcgaaacgtgtataaggactaccggcaactggagctggcatgtgagacccaggaggaggtggattcctggaaggcctcatttctgcgtgccggagtctatcccgaacgcgttggggataaggagaaggtttctgtgcctttctcttgtctgttgccagggatctgttcccttgccccagcgccagcacgtttttctagcaaagggccaggggacgtccttttctag

SEQ ID NO: 221397 - DNA, 2556 bp, synthetic construct
  misc_feature 1..2556: note = Description of Artificial Sequence: Synthetic coding sequence
  source 1..2556: mol_type = other DNA
atgggcaaccggggaatggaggatcttatcccactagtcaaccgactccaagacgccttttctgctatcggccagaacgctgatttggaccttccgcagatagccgtggtgggtggtcaatctgcgggaaagtccagcgttctagaaaactttgtgggacgagattttctgccacgtggcagtggcatcgtgacaagacgcccacttgtactgcaactggtgaatgccaccactgaatatgctgagtttctacactgtaaaggcaaaaaatttaccgatttcgaagaagtgagactggagatcgaggctgagaccgatcgggtgactggaacgaataaaggcatttcgccagttcctatcaacctcagagtgtactctccccacgtcctgaatctgaccctggtggacctacctggcatgaccaaagtgcccgtgggggatcagcccccagatatcgagttccagatccgagacatgttgatgcagtttgtcacaaaagagaactgcctgattttagcagtttctcctgccaacagtgacctggcaaatagcgacgctctgaaagtggccaaagaagttgatcctcaggggcaacgaactatcggtgtcattaccaagctagatctgatggatgaagggaccgatgctagagatgttctggagaacaagctcttgcccttaagacgcggttacatcggagtggtaaaccggagccagaaagacatagacgggaagaaggatatcaccgcagcgcttgccgctgaaaggaagtttttcctttctcatccgtcatacagacacttagcagatcgtatgggcactccatatttacagaaggtgcttaaccagcagctcaccaaccatattcgagatacactgccagggctgcgaaataaactgcaatcacagcttctttctattgaaaaagaggttgaggagtataaaaattttcgcccagatgaccccgcaaggaaaaccaaagctctgctgcagatggtgcagcagtttgcagtcgacttcgaaaaacgcatcgagggcagtggcgatcagatagacacctatgaactgtctggaggcgcacggattaataggatttttcatgaaagattcccctttgaacttgtgaagatggagtttgacgaaaaagaactgagacgggagatttcctacgccattaagaatatccatggcatccggactggcctcttcacgcctgatctagcgttcgaggccacggtcaaaaagcaggtccagaagctgaaagagccatccataaagtgtgtggacatggttgtcagtgaactcacggctaccataaggaaatgttccgaaaaactgcagcagtacccccgtctcagggaagagatggagcgaattgttaccacccatatccgagaaagagagggaaggacaaaagaacaggtgatgttgctaattgacattgagcttgcatacatgaacacaaaccatgaggactttatcgggtttgcgaatgctcagcagcgctccaatcaaatgaacaaaaaaaaaacttccggaaaccaggacgagattctcgttatccgtaagggctggctgaccattaataacattggcattatgaaggggggaagtaaggaatactggttcgtactgactgcagaaaacctgagctggtataaggatgatgaggaaaaggagaaaaaatacatgctttcagtggacaacctgaagctgcgggacgtcgaaaaaggctttatgtcaagcaagcatatttttgccctgtttaataccgaacagcgaaacgtatacaaagactatcgccagttagaattggcctgtgagacacaagaagaggtggatagttggaaggccagttttcttcgggcaggggtgtacccggagagggtgggggacaaagaaaaagcatccgaaaccgaggagaacggtagcgatagcttcatgcacagcatggatcctcagctcgagcgacaggtggagacaattcggaacctggtcgactcctacatggcaatcgtcaataagacagtacgtgaccttatgcctaagacgattatgcacttgatgatcaacaacacaaaagagttcatctttagcgaattgttggctaatctgtactcatgcggggaccaaaacacactgatggaggagagcgctgagcaggcccagcgcagggatgaaatgttaagaatgtaccacgccctcaaggaggccctgtccatcatcggagacattaatactactactgtatcaacccccatgcccccacctgtggacgattcatggctgcaagtacagtcggtccctgctggtcggagatctccaacctcctccccgaccccgcaaagaagagcccctgctgttccacccgcacggcctggctcgagaggtcccgctccaggacctcctccagcaggaagcgcgctcggtggcgcacctccagtgccctctcggccaggagccagccctgatcctttcggaccaccaccacaggtgccatctcgacccaaccgggctccgccaggggtgcctcggataacaatttccgatccttag

SEQ ID NO: 221398 - DNA, 2556 bp, synthetic construct
  misc_feature 1..2556: note = Description of Artificial Sequence: Synthetic coding sequence
  source 1..2556: mol_type = other DNA
atgggcaatagaggcatggaagacctgatcccgcttgtcaaccgccttcaagacgcttttagtgcgattggccagaatgctgacttagacttacctcagatagctgtggtgggaggccaatccgccggaaagtctagcgttctagaaaactttgtgggcagggattttcttcccagagggtctgggatcgttaccaggcggccactagtcctgcagctcgtcaatgcaaccacggagtacgccgagttcctgcattgcaaagggaaaaagttcacggacttcgaggaagtcagactggaaatcgaagccgagaccgatagggtaactgggaccaataaggggatttcaccagtgccgatcaatctgagggtatactcaccacacgtcctgaacctgacattggtagacctcccgggaatgactaaggtacctgttggagaccagcccccagatatagagtttcagattagagacatgctcatgcagtttgtgactaaggaaaactgcctgatcctagccgtgtcccctgccaactcagacctggcaaacagtgatgctctgaaagttgctaaggaagtcgacccccaggggcagcggaccatcggagtcatcaccaagctggaccttatggacgaggggaccgacgcacgtgatgtgctggaaaacaaacttttgcctctgcgcagaggctatattggagtggtgaaccgcagccagaaagacattgacggaaaaaaggatataactgctgctctggccgctgagcggaagttcttcctgagtcaccctagctacaggcacctggcggaccgaatgggaactccttatttgcagaaggtactgaatcagcagctgacaaaccatatccgagacaccctccccggactaagaaacaagttacaaagtcagctgctttccattgagaaagaagtggaggaatacaaaaatttcaggccagacgatcctgccaggaaaactaaggcccttctccagatggtgcaacagtttgcagtggatttcgagaaaagaatcgaagggtcaggagatcaaatagacacctacgagttaagcggcggagcgaggatcaaccgcatattccatgagaggtttccattcgagctggtcaagatggaatttgatgaaaaggaattgcgacgcgagattagctatgctataaagaatattcacggaattcgcaccgggctgttcactccagacctggcttttgaagctacagtgaagaaacaggtgcaaaagctgaaggaacctagtattaaatgtgtagacatggttgtctcagagctgacagctacaatccgaaaatgttctgaaaagctgcaacagtacccccgtctccgcgaagagatggaacggatcgtcaccactcacatccgggaacgcgagggtaggaccaaagagcaggtgatgcttttaattgatattgagttagcttacatgaacactaaccatgaggacttcattgggttcgccaacgcccaacagcgatctaatcagatgaacaagaagaaaacctctggaaaccaggacgaaattttggttattagaaagggctggctgaccatcaataatatagggatcatgaagggcggtagtaaagagtattggtttgtcctgacagccgagaatctgtcatggtataaagatgatgaagaaaaagaaaagaagtacatgttatccgtcgacaatcttaagctgagagatgtcgagaaaggctttatgagtagtaagcacatttttgccttgtttaacacagaacagagaaacgtgtataaagattaccgccagctcgagttagcgtgcgagacccaggaggaggttgatagttggaaggcatcatttttacgcgctggagtctatccagagcgggtcggggacaaggaaaaagcctccgaaactgaagagaatgggagcgactcattcatgcactcaatggatccccagctcgagcggcaagttgaaacaatccgaaacctggttgacagttacatggccatcgtgaataagacggtaagagacctgatgccaaagaccattatgcatcttatgatcaataacacaaaggagtttatcttttctgagcttctggctaatttgtattcctgcggggatcagaatactctgatggaagaaagtgccgaacaggcacagcgaagagacgaaatgctgcggatgtaccacgcactgaaggaagcactttccatcatcggtgatatcaacaccactactgtatcaaccccgatgccacctccggtggacgattcatggctgcaggttcagagtgtccctgccggacggagatccccaacgtcgagccccaccccccagcgcagagctccggcagttccacccgctcgccctgggagtaggggaccagccccagggcctccccctgcaggaagcgctctgggtggagcccctcctgtcccaagtcgcccaggtgccagtccggatccattcggacctccaccgcaggtaccctccaggcccaaccgcgctccgcctggcgtgccacggattactatttcagacccttag

SEQ ID NO: 221399 - DNA, 2595 bp, synthetic construct
  misc_feature 1..2595: note = Description of Artificial Sequence: Synthetic coding sequence
  source 1..2595: mol_type = other DNA
atggggaatcgcggaatggaggacctcatcccgttagtcaatcgcttacaggacgccttttctgctataggccagaacgccgacctcgacctgcctcagatcgcagttgtgggaggtcagagtgctgggaagtcaagcgtccttgaaaacttcgtgggcagagactttctacctcggggtagcggcatcgtgactcgcagacctttagttctgcaactggtaaacgccactacagagtacgcagagttcttgcactgcaaaggcaagaaatttacagattttgaagaggtccggcttgagatcgaggcggagactgaccgtgtcacagggacaaacaaggggattagccctgtacctatcaacctccgcgtgtatagcccccacgtgcttaatctgactctagtcgatttacccggtatgaccaaggtaccagtgggagaccagccacccgacattgagttccaaatccgggacatgctgatgcagtttgtgaccaaggaaaactgcttgattttagctgtgtcacccgctaactctgatctggcgaactctgatgccctgaaggtcgcaaaagaggtggatcctcaaggccagagaaccattggcgttatcacaaaactcgacttgatggacgaaggcacagacgccagggatgtcctagagaacaagctcttgccactcaggcggggatacatcggggtcgtaaacagaagccagaaagacattgacggcaagaaggacataacagctgccttagctgccgagcgtaaattctttctgtcgcatccgtcatacagacacctcgcggatagaatgggcaccccttacctccaaaaggtgctcaaccagcagctgacgaaccatataagagatacattacccggtttgcggaataaactacagtcacagcttttatccatagaaaaagaggtcgaggagtacaaaaactttcgtcccgacgatcccgcacgtaaaacgaaggcactgttgcagatggtgcaacagttcgccgtcgactttgaaaaacgcatagagggaagcggggaccaaatcgatacttatgaacttagtggcggagcccgaattaatagaatctttcatgaaagattcccattcgaattagttaagatggaatttgatgaaaaagagttgcggagagagatctcgtacgccatcaaaaatattcatgggatccggaccggcttatttacgcctgatcttgccttcgaggccaccgtaaagaagcaggtgcagaaactcaaagaacccagcattaaatgtgtcgacatggtagtaagcgagctgaccgctaccattcggaaatgtagtgagaaactgcagcagtacccacgactgagggaggaaatggaaaggattgttacaacccatatacgggaacgggaagggagaacgaaggagcaggtgatgttgttaattgatattgaactcgcgtacatgaacaccaaccatgaagactttattggatttgctaacgctcagcagaggagcaaccagatgaataagaagaagacaagcgggaatcaagatgaaatcctggtgatccgtaaggggtggctcaccatcaataacatcgggatcatgaagggcggatccaaggagtattggtttgtccttaccgccgagaacttaagctggtataaggatgatgaggagaaagaaaaaaaatatatgttgtccgtggacaatctaaagctgagggacgtggagaaaggcttcatgtcaagtaaacatatctttgcgcttttcaatacagaacagagaaacgtgtataaggattatcggcagttagagctggcatgtgagactcaggaggaggtagattcttggaaagctagctttcttcgggcaggtgtgtacccagagcgggtcggagataaggaaaaagcatccgagactgaggagaatgggtctgactcctttatgcacagcatggatcctcagctggaacggcaggtcgaaaccatcagaaatctggtggacagctacatggccatcgtgaacaaaaccgtgcgcgaccttatgcctaaaactatcatgcacctgatgatcaataatacaaaggagttcatcttttctgaacttctggctaatttgtacagctgcggggatcaaaataccttgatggaggagagtgcagagcaggcccagcgaagggatgagatgctgaggatgtaccatgccctgaaagaggcactctctatcatcggggatatcaataccacgaccgtgtccacccctatgccacccccagtcgacgacagttggctgcaggtacaatcagtccccgcaggaaggaggagcccaacctcttctccaaccccacagagacgggctccagcagttcccccagcgaggcctggaagcagggggccagcaccaggtccaccgcctgcaggatccgccctgggtggtgcccctcccgtgccatctaggcctggtgcgtcccctgacccttttgggcctccaccccaggtcccctcgaggccgaatagggcccctcccggagtgcccagtcgaagcggccaggcctctccaagccgccctgaatcacctcggcctccttttgatttatag

SEQ ID NO: 221400 - DNA, 1191 bp, synthetic construct
  misc_feature 1..1191: note = Description of Artificial Sequence: Synthetic coding sequence
  source 1..1191: mol_type = other DNA
atggagagaattgtgacgactcatatccgggaaagggaaggtcgaacaaaggagcaggtgatgctgctgatcgacattgaactagcctatatgaatacaaaccacgaggattttattggttttgcgaacgcacaacagcgcagcaatcagatgaataaaaagaaaacatctggcaatcaagatgaaatcctggtcatccggaagggatggctgaccataaacaatatcggaatcatgaaggggggaagtaaggagtactggtttgttctgactgctgagaatctctcatggtacaaggatgatgaggagaaagaaaaaaagtacatgctgtcagtcgacaaccttaagttgagagacgtggagaaagggttcatgtccagcaaacatatattcgctctgttcaacacagagcagcgtaatgtatacaaagattaccgccagttggagcttgcttgcgagacgcaggaagaggtggactcttggaaagccagtttcctgcgagccggtgtctatcctgagagagtgggcgacaaagaaaaagcctctgaaacggaggagaatggatccgattcattcatgcatagtatggatccccagttagagcgccaggtcgaaacaattaggaatcttgtggatagctacatggctatcgtcaacaaaacagttcgcgacctgatgcccaagacaattatgcatcttatgatcaacaacaccaaagagtttatcttctccgagttgctggcaaatttatactcgtgcggagaccaaaatacattgatggaagagtcagccgaacaggcacagcgcagagatgaaatgctcagaatgtaccatgcgctaaaggaggccctgagcatcatcggcgacattaatacaacaactgtttcaaccccaatgcccccacccgtcgacgactcttggctacaggttcagtccgtgcctgcgggaaggagaagcccaacaagttctcctacacctcagcggcgagcacctgccgttccaccagccagaccgggtagtcgcggtcccgctccaggaccgccaccagcaggatcagcactgggaggcgcaccacccgtgccctccaggcctggcgcttctcctgatccctttggcccacctccacaagtgccatcaaggccgaaccgcgcaccgcctggggtccctcgaatcactattagtgacccctag

SEQ ID NO: 221401 - DNA, 1728 bp, synthetic construct
  misc_feature 1..1728: note = Description of Artificial Sequence: Synthetic coding sequence
  source 1..1728: mol_type = other DNA
atggaggccctgatccctgtgattaacaaactgcaggatgtcttcaacacagtgggagcagacatcatacagctgccacagatcgtggtggtcggaacccagagctcgggaaaaagctccgtgctggagtcactagtcggacgcgacttgctgcccagagggacaggaatagtaaccagaaggcctctaatccttcagcttgtccacgtgtctcaggaggataagcggaagaccactggagaggagaacggagtagaggctgaggaatgggggaaattcctgcacacaaaaaacaagctttacaccgactttgatgaaataagacaagagattgagaacgagaccgagcggataagtgggaacaataagggagttagccccgaacctatccacctgaaaattttttcacccaacgtggtgaaccttactctcgttgacttgcccggtatgactaaagtgcccgtgggcgatcagccaaaggacatcgagctccagattcgtgaactcattttgcgctttatatccaatccgaacagcattatcctagccgttacagctgcaaataccgacatggccacttctgaggccttaaaaatctcaagagaggtcgacccggacggacggaggaccctcgctgtgatcacgaaacttgacttgatggatgcaggtacagacgcaatggatgtcttgatgggaagagttatccctgtgaagctgggcattattggcgtggtgaaccggagccagttagacatcaataataagaagtccgtgacagactccattagggacgaatacgccttcttgcagaaaaaatatccttcactagctaaccggaatggaaccaagtacctggcgagaaccctgaatcgactcctgatgcatcacattcgcgattgcctgccagaactgaaaactcgcataaatgtactggccgctcagtatcaatcgttactgaatagttatggcgagcctgtggacgacaaaagcgccaccctcctgcagcttatcaccaagtttgccaccgagtactgtaataccatcgaaggtacagccaaatatattgagactagcgagctttgtggtggggcaaggatttgctacatatttcatgaaaccttcggtcgcacactcgagtctgtggatcccttagggggactgaatacaatagatatcctaacagcgatcagaaatgccactggccctcggccagctctgttcgtacccgaggtgtcattcgagctgttggtgaagagacagatcaagcgactagaagagccgtcgttaaggtgcgtagagttagtacacgaggaaatgcagcgaataattcaacattgttccaattacagcacccaggaacttctaaggttccctaagctgcacgacgctatagtggaagtggtgacctgtctgctgagaaagcgccttcccgtcacaaacgaaatggtgcacaacctggtggccatcgaattagcttatatcaatactaaacaccctgacttcgcagacgcttgcgggctaatgaacaataacatcgaggagcagcggcgtaataggcttgccagagaattgccctccgcagtgagccgggacaaggtggcctctgggggaggcggagtgggcgacggcgttcaagaacctacaaccgggaattggcgaggcatgcttaagacaagcaaggccgaggagctactagccgagaagaagaaaaaaaagaaaaaaaaatag

SEQ ID NO: 221402 - DNA, 2100 bp, synthetic construct
  misc_feature 1..2100: note = Description of Artificial Sequence: Synthetic coding sequence
  source 1..2100: mol_type = other DNA
atggaggctttaatccccgtgattaataagctgcaagatgtgttcaacaccgtgggagcagatatcattcagctgccacagattgttgtggtaggtacacaaagctcaggtaagtcttcggtgctggagtctctggtcggcagagacctgctgccgagaggaacaggcatcgtcacgcggcgtcctctaatactgcagctggtccacgtttctcaggaggacaagcgcaagacaacgggagaggagaacggcgtcgaggcggaggagtggggaaaatttttgcacaccaaaaataagctgtacacagattttgacgagatacgccaggagattgaaaacgaaaccgaacgtatttctggcaataacaagggagtgtcccccgagcccatacacttgaagatctttagccctaatgtcgtcaacttgacactggtggatttgccagggatgaccaaggtccccgtgggcgaccaaccaaaagatattgaactgcagatccgggagttgatcctgcgctttatctccaatccaaacagtatcatcctggcagtgactgcagctaatactgacatggctacctccgaagctctgaagatctctagggaagtcgaccctgacggccgacgaaccctggccgtgataaccaagcttgatctcatggacgcaggcactgacgctatggacgttctcatgggcagagtgatccccgtcaagctcggtattattggcgtcgttaacaggtcccagctggatataaacaacaaaaaatccgttaccgatagtataagagatgagtatgcatttttgcaaaagaaatatcccagtctcgcgaataggaatggaacaaagtatctggcacgtaccctgaaccgcctgctcatgcatcacattagagactgtctaccagagctcaaaacccgtataaacgtcctggcagctcagtaccagagtctgttgaactcctacggcgagcccgtggatgacaagtcggccacattactgcaattaataaccaagtttgcaaccgagtattgcaatacgatcgagggcacagccaagtacattgagacgagcgaactctgcgggggagctcggatatgttatatcttccacgagaccttcggcagaacgctggagagtgtggatccacttggtggcttgaacacaattgatattcttaccgctatacggaatgcaactggcccaaggcctgcgctgttcgttcctgaagtttccttcgaactccttgtgaagcgccagattaagcggctggaggaaccctccctccgctgcgttgagctcgtgcatgaggagatgcaacggataatccagcactgctctaattacagcactcaagagctgctacggttccctaaactgcacgacgctattgttgaagtggtcacctgtctcctccgcaagagactgcccgtcacgaacgagatggttcacaacctggtcgctattgagcttgcctatattaacactaagcacccagatttcgcggatgcttgcgggctgatgaacaataatatcgaagagcaaagacgcaaccggctggccagggaactgcccagcgcagttagtagggacaaggtggcttccggagggggaggggtaggcgatggggttcaagaaccaacaaccggcaactggcggggaatgttaaagaccagtaaggccgaggaactgctcgcagaggaaaagtcaaaaccaatccccataatgccagcatcccctcagaaggggcatgcagtcaatctactcgacgttccagtgccggtcgccaggaaattatccgcgcgtgagcagcgggattgtgaagtgatcgaacgtctgatcaagtcctatttcctcatcgttagaaaaaatatccaagatagtgtccccaaggccgtaatgcacttccttgtcaaccacgtcaaagataccctgcagtctgagttggtggggcagctttacaaatccagcctgctggacgacctccttactgaatcagaggatatggcccagcgtcgcaaggaagcagccgatatgctgaaagcccttcagggcgctagccagatcatcgccgaaataagggaaacacatttatggtag

SEQ ID NO: 221403 - DNA, 2376 bp, synthetic construct
  misc_feature 1..2376: note = Description of Artificial Sequence: Synthetic coding sequence
  source 1..2376: mol_type = other DNA
atggcttgtcgagaaggagctggatcccgacgcgctcgatcaaatggctgccggttgcccagacgcggtcggagacgcggagggaggaggcgcacagtcggccctggtcctattcactgcagaggacgccgagctctcggtcccagggtttttagggttatggaggccctgattcctgtaataaacaaactacaggacgtgtttaacacagttggtgccgacattatacaactccctcaaatcgtcgtagtgggaacgcagtcctccggtaaatcgtccgtgttagagtcactcgtgggtcgcgatctgctcccacgaggtaccggcatcgtgacccgaagaccactcatcctgcagctggtccacgtgtctcaagaagacaaaagaaaaacaacgggagaggaaaacgacccagccacatggaagaactcccgacacctgagcaaaggagtagaggccgaagaatggggcaagttcttgcacacgaagaataagctgtacacggacttcgatgaaattcggcaagagattgagaacgagacagaacgcatttcgggtaataataagggagtgagccctgaacccattcatttgaagattttctccccaaatgtagttaacttgactctcgtggacctgccagggatgacaaaagtgccggtgggtgaccagcccaaagatatcgaattacaaatacgggagctcatcctgcggttcatctctaatccaaactccataatcctggctgtgacagccgctaataccgacatggccactagcgaggctctgaaaatctcacgcgaggtggaccccgacggtcggagaactttggccgttattactaagcttgaccttatggatgcaggtacagacgcaatggacgtgctcatggggagagtaataccagtgaaactcggaatcatcggcgtggtgaataggtcccagttggatattaacaataaaaagagtgtgaccgactcaatcagagacgagtatgcatttttacagaagaaatatcctagcttggctaaccgtaatggaacaaaatacctggctcggaccttaaatcggctgctgatgcatcacattagagattgtctccctgagctcaagacacggattaatgtgctcgccgctcagtatcaatccttgttgaacagctacggggagcccgttgatgataagtctgccacactactgcagctgatcaccaaatttgccacggagtactgtaatacaatcgagggcaccgcaaaatatatcgaaacgtctgagctgtgtggaggcgctagaatctgctatatcttccacgagactttcgggcgaacactggaaagcgtggacccgctgggcggactgaataccatcgatatcttaaccgccattcgcaatgccacgggaccccgtcccgcactattcgtgcctgaggtcagttttgaactacttgtgaaaaggcaaataaagcgtcttgaagagcctagtttgcgctgcgtcgaactggtgcacgaggagatgcagaggattattcaacactgtagtaactatagcacgcaagagctcttgcgattccctaagttacatgatgctatcgtggaggtggtcacgtgcctcctgagaaagcgcctgccggtgactaatgaaatggtgcacaacttagtagcaatcgagctggcctacatcaacactaagcatcctgactttgctgacgcttgcggccttatgaataataacatcgaagaacaacgcagaaatcgcctggccagggagctcccctctgcagtatctcgggacaagagctccaaagtcccttcagcactggcacctgcttcacaggaacccagtccagctgccagcgccgaggctgacggcaaggttgcctcgggagggggtggagtgggggacggtgtccaggagccgacgacaggaaattggaggggaatgctgaagacaagcaaagcagaggagttgctagctgaagaaaagagcaaacctatacccatcatgccagccagtccacagaaaggacatgctgtgaacctgctggacgtgcccgtcccggtagcacggaagctgtcagcaagggagcagagggattgtgaagtaattgaacggctcatcaagtcgtacttcctcatagtccgaaagaatatccaggacagcgtgcccaaagccgttatgcactttctggtcaaccacgtgaaggataccttacagtctgaactggtaggccaactttataaatcatctcttctggatgatctgctgactgagtccgaagatatggcacagcgccgtaaagaagctgcagacatgctgaaggcactacagggcgctagccagatcatcgccgaaatccgcgaaactcatctatggtag

SEQ ID NO: 221404 - DNA, 1602 bp, synthetic construct
  misc_feature 1..1602: note = Description of Artificial Sequence: Synthetic coding sequence
  source 1..1602: mol_type = other DNA
atgttccacaaaaagatcaacgggaaacagcaggaaaagaagatgacactgctccacggcaaaactcaggacacgtttctaaaaggctggaagcagaaaaacggcgtaaacttctttactcccaagataagaagtcagctcgacatcaataataagaagtcggtgaccgactctatcagggatgagtacgcattcctgcaaaaaaaatatccgagccttgctaatagaaacggtactaagtacctcgccagaaccctaaataggctgctgatgcaccacatccgagactgtcttccagaactgaagacaaggatcaacgttcttgcagcacagtatcagtccctcctgaactcttacggagaacccgtcgacgataaaagtgccaccctcctccaacttattactaaatttgctactgagtattgtaatacaatcgaagggaccgccaaatacatcgagacctccgaactttgtgggggagcaagaatatgttacatctttcacgagactttcgggcgtaccctcgaatccgtcgatcctctaggcggactgaatactatagacattctgaccgcgattcgtaacgcaacagggccacgtccggcactttttgtgccagaggtgagcttcgagctgctcgtgaaaaggcagatcaagcgcctagaagaaccttctcttcggtgcgtggaactggtccacgaggaaatgcagcggattatccagcactgttcaaactattctacacaggagcttctacggttccccaaactgcacgatgccattgtcgaggtcgtcacctgcctcttacgcaagagacttcctgtgacaaatgaaatggtgcacaatctggtggccatcgagctggcctacattaacaccaaacaccctgatttcgccgacgcctgcggacttatgaataataacattgaagagcagcgacgtaacaggctggctcgagagttaccatccgcggtgagtagagataaaagcagtaaggtcccgagcgcccttgctcctgcaagccaggagccaagcccagctgcaagtgccgaggccgacggcaagctcatccaagacagccggcgagagacaaagaacgttgccagtggcggaggcggagtgggggacggcgtgcaggagcctacgacaggcaattggcgaggaatgctcaagacctccaaggccgaagagctcctcgccgaggagaagtccaagcccattcccataatgccagcgtcccctcagaaggggcatgccgtgaacctgcttgacgttcctgtgcccgtggccagaaaactatccgcccgtgaacagagagactgcgaggttatagagcgcctgattaagagctacttcctaattgtcagaaaaaacatccaagattcagtgcctaaagcagtcatgcattttctagttaaccatgtgaaggatacactgcagagcgaacttgtgggccagttgtacaagagctccctgctggatgacctcctgaccgagagcgaggatatggcccagcgcaggaaagaggctgcggatatgctgaaggcactgcagggggcatctcagataattgccgagattagggaaacacacctgtggtag

SEQ ID NO: 221405 - DNA, 2133 bp, synthetic construct
  misc_feature 1..2133: note = Description of Artificial Sequence: Synthetic coding sequence
  source 1..2133: mol_type = other DNA
atggaggcgctgattcctgtgattaataaacttcaggatgttttcaataccgtgggagccgacattatacagctcccgcagattgttgtggtagggacgcagagcagcggtaagagctcagtgcttgaaagccttgtcggaagggatttattgccgagggggaccgggatagtcacacgcagacctttgatactacagctggtgcacgtctcgcaagaagacaaaagaaagaccaccggcgaagaaaatggagtggaagcagaggaatggggaaagttcttgcacacaaaaaataagctgtacacggacttcgacgagatcaggcaggagatcgagaacgagacagaacggatcagcgggaacaataagggcgtgagccctgagcctatacaccttaagattttcagcccaaatgtggtcaacctgacactagtggacctccctggtatgaccaaggtccccgtgggtgatcagcccaaggacattgaactgcagataagagagcttatcctgcggttcataagtaaccccaattccattatcctggcggtgaccgcagccaacacagacatggcaacctccgaagcgctgaagattagtagagaggtagacccggacggtcgcagaactctagccgtgatcaccaagttggatctcatggacgcagggacggacgccatggatgtgctgatgggccgagttatcccggtcaaacttggcattatcggggtggtgaacaggtcccagctcgacataaataacaagaaatccgtgactgactccatccgggacgagtacgcgttcctgcagaagaagtatccaagccttgctaacaggaatggcacgaaatacctagccagaactctgaatagacttcttatgcaccacattagagattgcctgccagagcttaagactagaatcaatgtcctggctgcccagtaccagtctctgttgaacagttatggcgagccggtggacgataagtcagctactctgctgcaattaattaccaagttcgcaaccgagtactgtaatacaatcgaaggcaccgcgaagtatattgaaacatctgagctgtgcggtggggcacggatctgctacatctttcacgagacatttggccgtaccctcgagtcagtcgatccactgggaggacttaacactatcgatatcctcaccgctatccgaaatgccaccggaccaagacccgctctttttgtgcctgaggtgtcgttcgagctgctggtgaaacgtcagatcaagaggctggaggaaccttccttgaggtgtgtggaactggtacacgaggagatgcagcggattatccagcactgtagcaactactccacccaagagctcctccggtttcccaagctgcatgatgctatcgtggaggtggtcacatgtctgctgcgaaagcggctgcctgtgacaaatgaaatggtgcataacttggtagccattgagttggcgtacataaacactaagcacccggacttcgctgatgcctgcggactcatgaacaacaacatcgaggagcaacgcaggaacagactcgcccgagagttgccctcagccgtgtcacgcgacaaactgatccaagatagcagacgggaaactaaaaacgtggcatccgggggaggcggtgttggcgatggagtgcaggagcccacaaccggtaactggaggggaatgctcaaaacttccaaggccgaggaacttctggctgaggagaaaagcaagccgattccgatcatgccagcctctcctcagaagggtcatgcggtgaatctccttgacgtgcccgtgcccgtggccaggaagcttagtgccagggagcagagggattgtgaggtgattgagcggttgatcaagtcctacttccttattgtgcggaaaaatattcaggacagcgtcccgaaggccgtcatgcactttttggtcaaccatgtgaaggacactttgcagtctgagcttgtcgggcaactgtacaaaagtagcctgctggatgatctcttaacagaatccgaagatatggcacagcgcaggaaggaagctgctgatatgcttaaggccttgcaaggcgctagtcagataatcgcagagatcagggaaacccatctgtggtag

SEQ ID NO: 221406 - DNA, 2178 bp, synthetic construct
  misc_feature 1..2178: note = Description of Artificial Sequence: Synthetic coding sequence
  source 1..2178: mol_type = other DNA
atggaagccctgatccctgtcatcaataagctccaggacgtgttcaacacagtcggagccgatattatccaacttccgcagatcgtagttgtcggaacgcagtccagtggcaaaagcagcgttctggagtccctggttggaagagatctcctcccaagaggaaccggcatcgtgacacggagaccattaattctacagttggtgcacgtctctcaggaggacaagcggaagacaactggggaggagaatggcgttgaagcagaggagtgggggaagttcctccataccaagaacaagctctacactgattttgacgagataaggcaggagattgagaacgaaaccgaacgtatcagcggcaacaacaagggagtctccccagagcctatacacctgaagatcttctcaccaaacgtggtcaatctgactctggtggatttacccggaatgacaaaagtgccagtaggagaccaacctaaagacattgaactgcagatcagagagttaattctgcggttcataagcaatccaaattccataattttggccgttacggctgctaacactgatatggccacaagtgaggcattgaaaatctccagggaagttgacccagatggtcggagaacattggctgttattacaaagctcgatttgatggacgcagggactgacgccatggacgttctcatgggtcgtgtgatccctgttaaactggggataatcggggtggtgaacagaagccagctcgacatcaataataagaagtccgtaactgactccatcagggatgagtacgcttttctgcagaagaagtacccaagcttggctaaccgaaacggcacgaaatatctagcacgcacactgaacaggctgctcatgcaccatatcagggactgcctgcccgagctcaagactcgaattaatgttctagctgctcagtaccaatcattactaaactcctacggggaacctgttgacgacaaaagcgcaactctcctgcagctgatcaccaagtttgcgactgagtattgtaatacgatagaggggaccgccaagtacatcgaaactagcgaactctgtggtggggctaggatctgttatattttccatgaaacctttggtcggacacttgagtctgtcgaccctctggggggtctcaatacaattgacatcctgacagccatcaggaatgccacagggcctagaccagctctctttgtgcctgaggtgagctttgagcttcttgtgaaaaggcagatcaaacgccttgaggaacccagccttcggtgcgtggagctcgtccatgaggagatgcagaggattatccagcactgctcaaactactctacccaagaacttctccgttttcctaagctccacgatgctatcgtggaggtggtcacatgtctgctccggaagcgtctgcccgtgaccaatgaaatggttcataatctggtggccatagagttggcttacattaataccaagcatcctgattttgctgacgcttgcggtttgatgaataataacattgaggagcaacgcagaaatcggttggctagggaacttccatctgctgtatctcgagataaaagctcaaaagtgcccagcgccttagctcccgctagccaagagccatcccctgcagcaagcgcagaggctgatggaaaggtggcatcgggtggcggtggagttggggacggcgtgcaggaacctactactggaaactggcgtggcatgctcaagacctctaaggctgaggaactcctggcagaggagaaatcgaagcccatccctatcatgccagcgagtccccaaaaggggcacgccgtgaacctgctggatgttcctgtgcctgttgcgcgaaagttaagcgctcgggaacagcgcgattgtgaagtgattgagcgactgattaaaagctacttcctgattgtgcggaaaaacattcaggacagcgttcccaaagctgtgatgcacttcctggtgaaccatgtcaaagacaccctgcagtctgaacttgtggggcagctgtataagtcatccctcctggatgacctgctgactgagtcagaggacatggcacaacggaggaaggaagcagctgatatgctgaaggctctgcagggagccagccagattatagccgaaattcgagagactcacctatggtag

SEQ ID NO: 221407 - DNA, 2211 bp, synthetic construct
  misc_feature 1..2211: note = Description of Artificial Sequence: Synthetic coding sequence
  source 1..2211: mol_type = other DNA
atggaggcgctaattcctgtgatcaacaagctccaagacgtcttcaacactgtgggcgctgacattattcagctcccgcagatcgttgtcgtcggcacacagagttctggtaaaagcagtgtgctggagtctttggtggggcgtgatcttctgcctcgagggacgggaatcgtaacgagacgaccattgattcttcagttggtgcacgtgtctcaggaggataagcggaagactacgggggaggaaaacggcgtggaggcagaggaatgggggaagttcctgcataccaaaaacaagctatacaccgattttgacgagattagacaggaaattgaaaatgaaactgaaaggatctccggtaacaacaaaggtgtatcccctgaaccaatacatctgaagatctttagccccaatgtggtgaatcttaccctagtagacctaccaggaatgacaaaggtccctgttggcgaccaacccaaggatatagaactgcagataagggaactgattctacggttcatctcaaatccaaatagcattattttagccgtgacggctgccaataccgatatggctactagcgaggctctgaagatatcccgagaagtggacccagacggaagacggactctggccgtgattacaaaactggaccttatggacgcagggaccgacgccatggacgttctgatgggacgggtaattcctgttaagttgggtatcatcggagtagtaaaccgaagtcaactggacattaacaataaaaagtcagttacagatagtatcagggatgaatatgcttttcttcagaagaaatacccatccttggccaataggaatggaactaaatacctcgctcggaccctcaacagacttttgatgcaccacataagggattgtctgcccgagctgaaaacccggatcaatgtgttggcagctcagtaccagtccctcctgaattcctacggggaacctgtggacgataagagtgccacgttgctccagttgatcactaaattcgcaaccgagtattgtaacacgattgaagggactgctaaatatattgaaacgtctgaactgtgcggcggagcgagaatttgttatattttccatgaaacctttggaaggacgcttgagtcagtcgacccactaggtggcctgaacaccattgacatcttaacagcgatccgtaacgctactggaccgagaccagctctgtttgtgcctgaagtcagttttgagctcttagtgaagcggcagataaaaaggctggaggagcctagtctacggtgcgttgaactggtgcacgaggaaatgcagcggattatacaacactgttcgaattactccacccaggagcttctaagatttccgaagctgcacgatgccatcgttgaagtggttacctgtttactgagaaagcggttgcctgttactaacgaaatggtccataacctcgtggcgattgagctagcttatatcaacacgaaacatcccgacttcgccgacgcctgcggactaatgaataacaacattgaagaacagaggcgcaaccgcctggccagggaactcccatctgccgtgtctcgagataagtcctctaaggtacctagtgcactcgccccagcttcccaagagccttcccccgcagcctccgcggaagcggatgggaaacttatacaggactcccgtagggagacaaaaaacgtcgcgtccggcggtggtggagtcggcgatggcgttcaggaacccactaccggcaattggcggggaatgcttaagacatccaaggccgaagagttgctggcagaggagaagtcaaagccgatcccgatcatgcccgctagcccccagaaaggccatgccgtcaatctgctggatgtgcccgtccccgtggccagaaagttgagtgccagggagcagagagactgcgaggtgattgaacgactaatcaagtcgtactttctgatcgtgcgcaagaatatccaggattctgtccctaaggccgttatgcattttttagtgaaccacgtaaaagacaccctgcagtctgaactcgttggacaattatacaaatcctccctgttggacgatcttctcactgaatccgaagatatggcacagcgacggaaagaagcggcagacatgttgaaggctctgcagggagcatcccaaattatagccgaaatacgcgagacgcacctgtggtag

SEQ ID NO: 221408 - DNA, 2250 bp, synthetic construct
  misc_feature 1..2250: note = Description of Artificial Sequence: Synthetic coding sequence
  source 1..2250: mol_type = other DNA
atggaggccctcataccagtgattaacaaactgcaagacgtgtttaacaccgtcggcgctgatataatccaactccctcagatcgtggttgttgggacccagagtagcggaaagtcatcagtgttggagtcactggtggggagggatctgttgcctaggggcacaggcatcgttacccggagaccattaatcttgcaattggtacatgtgtctcaggaagacaagagaaagaccacaggagaggaaaacgatcccgctacatggaagaacagccggcatctcagtaagggggtcgaggccgaagagtgggggaagttcctccacacaaagaacaagttgtacactgattttgatgaaatccgccaagagattgagaacgaaaccgagcggatctcaggcaataataaaggcgtcagtcccgaacccatacacctgaagatcttcagtcccaatgtggtaaatcttaccttggtcgatctgcctggtatgaccaaagtgcctgttggggaccaacctaaggatatcgagctgcagattagggaactcattcttagatttatttccaacccgaatagcatcatactggccgtcactgctgcgaataccgatatggcaacaagcgaagcgcttaaaatatccagagaggtcgacccagatggacggagaactctggctgtgatcacaaagctcgatctcatggacgccggtactgacgcgatggacgtcctaatggggcgtgttatcccagtcaagttaggtatcattggggtcgtgaatcggtcccagctcgacattaacaacaaaaagagcgtgactgactcaatcagagatgaatatgcattcttacagaaaaaatacccctcactggccaatagaaatggaaccaagtatctggcgagaactctgaataggctattgatgcaccatattagagactgcctgccagaactgaagactcgcatcaatgtgctggcagcacagtaccagtcgctactcaactcttacggcgaaccggtagatgacaagtctgcaaccctgttgcagctgattacgaaatttgctacggaatactgcaacactattgagggcaccgcaaaatacatcgagacatcagagctgtgcggcggagccaggatctgttacatattccacgagacattcgggagaactttagagtcggtggacccactgggtggactgaatactatcgatatcttaaccgcgattcggaatgccacaggacctcgacccgcactgttcgtccctgaggtcagcttcgaacttctggtgaaacgtcagatcaagagattggaagagcctagtctgcggtgtgtggagctcgtgcacgaggagatgcagcggattattcagcattgctcgaactactcaacacaggagctactgcgttttcctaagctacacgacgcgattgtagaggttgtgacttgtttactgcggaaaaggttgccagtgaccaatgagatggtccacaacctcgtggccattgaactggcctatatcaataccaaacatcctgatttcgctgatgcctgcggcctgatgaataacaacattgaagagcagcgtcgcaaccgactggccagagagctgccgtccgcagtcagccgcgacaagagcagcaaagtgccttcagccctggctcctgcaagccaagagccgagccctgccgcatccgctgaggcagacggaaaactcattcaagactctcggagagaaacaaaaaacgttgcttctggaggcggaggagtgggcgatggcgtgcaggaaccgaccacgggtaactggaggggcatgttaaagacttcaaaggcagaggaactcctagcagaggagaagagtaagccaattcctatcatgcccgcatctcctcagaaaggtcacgcagtgaaccttctggatgttccagtacccgtggcaaggaaactgtcagctagagagcagcgtgattgtgaggttatagaacgactaattaaatcctatttcctgattgtgcggaagaacattcaagattctgttccaaaggcggtcatgcattttctggtcaatcatgtgaaggatacccttcaatccgaactggtcggacagctgtataaatcaagcctgctggatgacctactcaccgagagcgaagatatggctcagagacgtaaagaggctgccgatatgctcaaggccctgcagggggcatcccagatcatagcagagatacgtgagacacatttgtggtag

SEQ ID NO: 221409 - DNA, 2613 bp, synthetic construct
  misc_feature 1..2613: note = Description of Artificial Sequence: Synthetic coding sequence
  source 1..2613: mol_type = other DNA
atggggaacagagggatggaggagctgattccgttagtgaacaaactgcaggacgcgttctcctcaattggtcagtcttgtcatcttgatcttcctcagattgctgtagtaggaggccaatccgcgggaaagagttccgtcctggagaacttcgttggccgtgatttcctacctcgtgggtccggcatcgtgaccaggaggcccctcatactgcagctgattttctcaaagacagaacatgccgaattcctgcactgcaaatctaaaaaatttacagacttcgatgaggtgcgacaagagattgaagccgagactgaccgcgtgaccggaaccaataagggaatatcacccgtccccatcaatcttagggtctactctccgcatgtgctaaatctcactcttattgacctccctggaatcaccaaggtccccgtgggggatcagccacccgacattgaataccaaatcaaagacatgattttgcagttcatctcaagggagtcaagcctgatcctcgccgtgacccccgcaaatatggatttagccaactccgatgcactcaaactagccaaggaagtcgatccacaaggtctgaggacaatcggtgtcattactaaattggacctaatggatgaggggaccgatgcaagagacgtgctggaaaacaagttactccctctgaggcgcggttacatcggagtggtgaaccgaagccagaaagatatagaaggcaagaaagacatccgcgctgcgcttgccgcagaacggaagttctttctgagccatccagcatatcgtcatatggccgatagaatggggaccccccatcttcagaagacgttgaaccagcagttgaccaaccatattcgggagagtcttccggctcttcggagtaagcttcagtcacagctcctgtcccttgagaaagaagtggaggaatataagaatttccggcctgacgatcctacaagaaagacaaaggctctgctacagatggttcagcaatttggcgtcgattttgagaaacggatcgaggggtccggcgatcaggttgatacattagagttgtctggcggagctaggattaataggattttccacgaaaggttcccgtttgagcttgtaaaaatggagttcgatgagaaggatttgaggcgcgaaatctcatacgcgatcaaaaatatccatggcgtgcggaccggcttattcactcctgatatggcttttgaggcaattgtgaagaagcagatcgttaaacttaaggaacctagcctcaaatgtgtggacttggtggttagtgagttggcaacagtaataaagaaatgcgctgaaaagcttagctcataccctagactccgtgaggaaacggagaggatcgtgaccacctacatccgggaacgggagggcagaacaaaagaccagatcctgctcttgatcgatatagaacagtcctacatcaatacaaaccacgaagatttcattggtttcgccaacgcccagcagcggagcacccagctcaataagaagagagcaattcctaatcagcctgaaacgctcgtaattaggcgcggatggctgaccatcaataacataagcctaatgaagggaggctctaaggaatattggttcgttctcacagctgaatccttgtcctggtacaaggacgaggaggagaaggagaagaagtacatgctgccacttgataacctcaaaatacgtgacgtagagaagggattcatgtcaaataagcacgtctttgcaatcttcaatactgagcagcggaatgtttacaaggaccttcgacaaatagagttggcttgcgattctcaggaggatgtcgatagctggaaggcttcatttcttagggctggggtgtaccccgaaaaagatcaggctgaaaatgaagacggcgcacaggaaaatacgttctctatggacccacagttggaacgccaagttgagaccattcggaacctggttgatagttacgtggccatcattaacaagtcaatcagagatctgatgccaaaaactattatgcatttgatgatcaataataccaaggcctttatccaccacgagctcctagcctatctctactcttccgctgatcagagcagcctgatggaggagtcagccgaccaggctcagaggcgggatgatatgctgagaatgtatcatgccctcaaggaagcactcaacataatcggtgatattagcacatcaacagtgtccacccctgtgccacctcctgtggatgacacctggctacaatcagccagtagtcattccccaacgccccaaagaagacccgtatccagcatccaccctcccggaagaccccctgctgtaagggggccaacgccgggaccacccctgatccctgtccccgtcggggcagccgctagcttctcggcacccccaataccctccaggcccggtccccagagcgtgtttgctaattccgatctgttccctgctccaccccagatcccttcacgcccagtccgaattcccccaggtattccgcctggagttccatcaaggcgccctcctgctgcacccagcagacctacgattatccgtccggctgaacctagcctcctcgattag

SEQ ID NO: 221410 - DNA, 2601 bp, synthetic construct
  misc_feature 1..2601: note = Description of Artificial Sequence: Synthetic coding sequence
  source 1..2601: mol_type = other DNA
atggggaatcggggaatggaggagctaataccacttgtgaacaagctccaggatgcctttagtagtatcggacagagctgtcacctagatttgccgcagatcgccgttgtcggaggccaatccgccggaaaaagctccgttctagaaaatttcgttggccgagattttcttccacgcggttcgggaattgttacgaggcggccacttatcctgcaactcatttttagtaagactgagcatgccgagttcctgcactgtaagtcgaaaaagttcactgacttcgatgaagtgagacaggagatagaggctgaaacagatcgagtgacgggtaccaacaagggcatttctcccgtccccattaaccttcgggtatactccccacatgttttaaatctaacccttatcgatctccctggtatcaccaaggtccctgtgggtgatcaaccccctgatatagagtatcagattaaagacatgatccttcagttcattagcagagagagctcactgatcctggccgtgacacccgcaaatatggacctggcgaattccgacgctctgaagttagctaaggaggtggatccccaaggccttcggacgattggtgtcatcacgaagttagaccttatggacgagggcacagatgccagggacgttctcgagaacaagctcctgccgctgaggagaggctatattggagtggtgaatcgttcccaaaaggatatcgagggcaaaaaggatatccgcgctgcactggccgcagaaaggaaatttttcctgtctcatcctgcctatagacacatggctgaccgcatggggacccctcacctccagaaaacacttaaccagcagcttaccaatcacatccgggaatcactgccagccctcaggtccaaacttcaatcacagttgttgtccctagaaaaggaggtcgaggagtacaagaacttcagaccagatgaccctacacgcaagacaaaagcacttcttcagatggtgcagcagtttggtgtggacttcgaaaaacgcatagaaggatcaggggaccaggtggacacactggagttgtctggaggggctaggatcaaccgcatttttcatgaacggtttccgttcgaactcgtgaagatggagttcgacgaaaaagacctcagacgagagatttcctatgccatcaagaacatccatggggtgcggacaggcctctttactccagacctggcattcgaggctatagtgaaaaagcaggtcgtcaaactgaaggagccttgtttgaagtgtgtggacctcgtgatccaagaattaattaacaccgtcaggcagtgtacttccaaactgagttcgtacccacggctgagggaagagacagaacgcatcgtcacaacctatatccgggaacgggaagggcgtacaaaagaccagattctactgttgatagacatcgaacagtcttacatcaacacaaaccatgaagactttattggatttgccaacgctcaacagcgctcaacgcaacttaataagaagagggcaattccaaaccaggtgatcaggcgcggttggttgacgattaataacatctctcttatgaaagggggaagtaaagagtactggttcgtgctgaccgccgaaagcctctcctggtataaagatgaggaagagaaggagaagaagtacatgctgccattagataatctcaaaattcgcgacgtcgaaaagggatttatgtctaataagcacgtgtttgcgattttcaatactgagcagcggaacgtgtataaagacctgcgccagatagagttggcctgcgattctcaggaagatgtcgattcatggaaggcttccttccttcgagcaggagtgtaccctgagaaagatcaggctgaaaatgaggacggggctcaagagaatactttctcaatggatccccaactcgagcgccaggttgagaccattcgaaacctggtcgatagctacgtggctatcatcaacaagtccatccgagacctgatgcctaagacaattatgcacctgatgattaataataccaaagctttcattcaccatgaactgttagcttacctctactcatcagctgaccagagttccttaatggaggaaagcgctgatcaagcacagagaagggacgatatgctaaggatgtatcatgcgctgaaagaggctctgaacatcataggcgatatcagtacatcaacggtctcaacgccagtcccaccgcctgtggatgatacatggctccaatctgctagctcccattctcccactcctcagagacgtcctgtgtcctccatacaccctcctggtaggcctcccgcagtgaggggtccgacacccggacctcctctcatccctgttcctgtcggcgctgcagcatccttttccgcgcctcctatcccttcaagacctggccctcagtccgtgttcgccaacagcgatttatttccggcaccgccacagattcctagtagaccagtgaggatcccccctggcatcccgcctggcgtgccatctcgaaggcctcctgctgccccatctagaccaaccataattaggccggcagaaccttcactcctcgactag

SEQ ID NO: 221411 - DNA, 2613 bp, synthetic construct
  misc_feature 1..2613: note = Description of Artificial Sequence: Synthetic coding sequence
  source 1..2613: mol_type = other DNA
atgggtaatcggggtatggaagagctgatcccactggttaacaagcttcaggacgcattttcctcaattggccagtcatgtcatctggacttgcctcagatcgctgttgtcggaggccagtcagccggtaaatcaagtgttttggaaaacttcgttgggagggacttcttgcctagaggctctggtatagtcacaagaaggcctttaattctgcagctcattttcagtaaaaccgagcatgccgaatttcttcattgcaagtcaaagaaatttactgactttgacgaagtgcgtcaagagatcgaggccgaaaccgacagagttacgggtacaaacaagggtataagtcctgtaccaatcaaccttcgtgtatatagtccccatgtgctaaatctcacacttattgacctgcctgggatcactaaggtccccgtcggggaccaacccccagatatcgagtaccagatcaaggatatgatcctgcagttcatcagccgagagtcctccctaatcctggcggtgacaccagctaacatggacctggcgaactccgacgccttgaagttagcaaaggaagtcgatcctcagggcctgagaaccataggcgtaataactaagctcgacttaatggacgagggaaccgacgccagagacgtgttagagaacaaactgctacctctgaggaggggatatatcggcgtagtgaatcgatcccagaaggatatcgaggggaagaaagacatccgggcagcacttgcagcggagagaaagttcttcttgagtcatccggcatacaggcacatggcagacagaatggggacaccccatcttcagaaaacgctgaatcagcagctcactaatcacatccgggaaagtctgcctgcattgagatccaagctgcagtcccagttgttatctctggagaaggaagtagaggaatacaagaacttccgtccagatgaccctacgaggaagacgaaagccctgctgcaaatggtccagcagtttggcgtggactttgaaaagaggatcgagggctctggcgatcaggtagatacactggagctgagcgggggtgcccgtattaaccgaattttccacgagcgatttccctttgagttggttaagatggagttcgatgagaaagaccttcgtagagaaattagttacgctataaagaacattcatggcgtgcggaccgggctgttcaccccggatctggcgtttgaggccattgtcaaaaagcaggtggtcaaattaaaggaaccttgtctcaaatgtgttgatctggtgattcaagagcttattaataccgtgaggcagtgcactagcaagctgtccagttaccctcgcttaagggaagaaaccgagcggatagtgacaacctacatacgggaacgggaagggaggaccaaagatcaaatcctgctcttgatagatatagagcaaagctatattaacactaatcacgaggatttcattgggtttgcgaatgctcagcaacgctctactcagctgaataagaagagagcgattccaaaccagggggagatcctcgtcatacgaagaggctggctcacgatcaacaacatcagtctgatgaagggaggctcgaaggagtactggttcgtcctcaccgctgaaagcctaagctggtacaaggatgaggaggagaaagaaaaaaaatacatgctccccctggataatttaaaaattagagacgtcgaaaaggggtttatgtccaacaagcacgtgttcgccatctttaacaccgagcagcgaaatgtgtacaaggacctgaggcaaatcgagctcgcatgcgatagccaggaggacgtggattcctggaaggcatcattcctacgcgcaggcgtctaccccgagaaggatcaggcagaaaacgaggacggagctcaagagaataccttctctatggacccccagctagagcggcaggtggagactatcaggaatctggttgattcttacgtggcaatcataaacaagtccataagagacttgatgcctaagaccattatgcatctgatgatcaacaatacaaaagcatttattcatcatgagctcctggcctatctatacagcagtgccgatcagtcttccctgatggaagaatctgccgaccaagcccagaggcgagacgacatgctgcgcatgtatcacgctctgaaagaggcactgaatatcatcggagatatttctacaagcaccgtcagcaccccggtgcctcctccggtcgacgatacatggctgcagagtgcgtccagccacagccccacaccccagcgcaggcctgtctccagtattcacccacctggtagaccgccagctgtccgcggaccgactcctggcccaccactcatccccgtgccagtgggcgctgctgcctctttctctgctcccccaattccttccaggcctggaccccagtccgtgttcgccaactcagacttgttccccgctcctccacagatcccaagcagaccagtgcggatccctccagggattccccctggagtgccgtctagacgacctcccgcagcgccttctcgacccacaattatcaggcccgcagagcccagcctgctggattag

SEQ ID NO: 221412 - DNA, 1461 bp, synthetic construct
  misc_feature 1..1461: note = Description of Artificial Sequence: Synthetic coding sequence
  source 1..1461: mol_type = other DNA
cacgtcacagtagcagcagccgattcgtggaaacccccagccagcgctcaacacgtcgggcgagcgccaagagctggcgcagccacatgtttccttggaccacggccaccctcgcatctaggtggcagagacttccttccacggggatccggcatagtcactagaagacccctgattttacagctgatcttcagtaagacagagcacgctgagttcctgcactgcaagtctaagaagttcaccgactttgatgaggtaaggcaggaaatcgaagctgagacggatcgcgtgactggaaccaacaagggcatctcaccggtacccatcaatctgagggtgtattcccctcatgtgttgaatctgaccctcattgacctccctggaataaccaaggttcccgtgggcgatcagccgcctgacatcgaataccaaataaaagacatgatcctacagttcatttcccgcgagagctctctcattctagccgttacccccgctaacatggaccttgctaatagcgatgcactaaaactggcaaaggaagtggatccccaggggctcaggaccatcggagtcattaccaagctggatctgatggatgagggaacggatgcgcgtgacgtcctggagaacaaacttttaccccttcgacggggatacatcggtgtagtgaatcggtcccaaaaggacatcgaaggcaagaaggatataagagccgctcttgccgctgagcgcaagttcttcttgagtcatcccgcatatcggcacatggcagaccggatgggtactccacaccttcagaagaccctgaaccagcaactgaccaaccatattcgagagtcactccctgctctcaggtcaaagttgcagtctcagcttttgtcactggaaaaggaggtagaggaatataaaaactttcgcccagatgaccccacaagaaaaacaaaagcattactgcagatggttcagcaatttggggttgattttgagaagagaatagagggcagtggggatcaggttgatactctggagctgtcgggaggggctagaataaataggatatttcatgagagatttcctttcgagcttgtgaagatggaatttgacgaaaaagacttacgacgtgagataagctacgctataaaaaatatccatggcgtgcgaaccggcctgtttacccctgatatggcctttgaagcaattgtgaagaaacagatagttaagctgaaagagccttctttaaagtgtgtagatctggtagtttccgaattagcaacagtgattaaaaagtgcgccgagaagctctcctcttacccgaggttgagagaagaaacggaaaggatcgtgacaacatacattcgagaacgggaaggccgtaccaaggatcagatattgctcctgatcgacatagaacaaagttatatcaataccaatcatgaagactttataggctttgcttag

SEQ ID NO: 221413 - DNA, 2613 bp, synthetic construct
  misc_feature 1..2613: note = Description of Artificial Sequence: Synthetic coding sequence
  source 1..2613: mol_type = other DNA
atgggtaatcgaggcatggaggagctcatcccactggtgaacaagttgcaggacgcctttagcagcattggtcaatcctgccaccttgatctaccacaaatcgccgtggtcggaggtcaatctgctggaaaatctagcgtgctcgagaactttgtgggcagggactttttgccccgtggctctggcatagttacgcggcgacctctgatcttacagctcatattcagcaagactgaacatgccgagttcttgcactgtaagtctaagaaattcacggactttgacgaagtacggcaggaaattgaggctgagactgatagagtgacgggaacaaacaaaggaatttcccctgtccccatcaacctgcgggtatacagcccacacgtcctgaacctgaccttgatcgacctgccagggattacaaaggtccccgttggcgaccagcctcctgatatcgagtaccaaattaaggacatgatcctgcagtttatcagccgggaatcgtcgctgattctggcggttactccagccaatatggatcttgccaactccgacgctctgaagttggccaaggaggtcgatcctcagggcctcaggactattggcgtaatcactaagctggacttgatggacgagggtactgatgcacgagacgtccttgagaataagctgctccctctgcgaaggggatacatcggcgtggtgaataggagtcagaaggatatagaaggcaagaaggacattagagctgccctagccgcagaaagaaagttcttcctgagccaccccgcttaccgacatatggctgaccgcatgggaacccctcacctgcaaaaaactctgaatcagcaactgaccaatcacattcgtgagagtctccccgcattaaggagtaagctgcagagtcagctgctgagcttggaaaaggaagtggaggagtataagaattttcgcccagacgatcccacgcggaagaccaaggcgctgcttcagatggttcagcagtttggagtcgactttgaaaagcgaatcgagggttctggggatcaggtcgacacgctggagctttccggtggggctcggatcaatcggatcttccacgagaggttcccatttgagttggttaagatggagttcgacgagaaggatctcaggcgggaaattagttatgctatcaaaaacatacacggcgtccgtacaggcctttttacacccgatatggcattcgaggccattgtgaagaagcagatcgtgaagctgaaagagccctccctaaagtgtgttgatctcgttgtgtcagagctcgccacggttatcaaaaagtgcgccgaaaaattgagtagctaccctcgactgagggaggagactgaaagaatcgtgacaacatatatcagagaacgggaggggagaactaaggaccagatcttactccttatcgacattgaacagtcgtacatcaatactaaccacgaggattttatcggtttcgccaatgctcagcagaggagtacacagttaaataagaaacgcgctataccaaatcagggggaaattctagtgattaggcgtggctggttaactatcaataatatttcactaatgaaaggtggcagtaaagagtactggttcgttctgacagctgagtccttgtcatggtacaaggacgaggaggaaaaagaaaagaagtatatgctgcctctggacaatcttaagatacgcgacgtggagaagggctttatgtcgaataaacacgtatttgccatcttcaataccgaacaacgcaacgtgtacaaagatctgcgccagatcgagcttgcctgtgactcacaggaggatgtagatagttggaaggctagctttctgcgtgccggtgtctatcctgaaaaggatcaagctgaaaatgaagacggcgctcaagaaaatacattctccatggacccccagctcgagcgacaggtggaaactattaggaatctagtggattcttacgtggctataattaataagtcaattcgggatctaatgccgaaaaccatcatgcaccttatgatcaacaatacaaaggcctttatccaccacgagctgctcgcttacctttacagttctgcggaccagtcctctctgatggaggagagcgccgatcaagcccagcggagggacgacatgctgcgaatgtatcatgccctgaaggaagcgctgaacatcatcggggacatatccacatctaccgtgtcgactcctgttccaccccctgtagatgacacttggctccagagtgcctcatcccattctcctactccacagcgccgtcccgtcagttctatacatcctccaggccgacccccagccgtcaggggcccaaccccgggtccacccctgattccagtgcctgttggcgcagcagccagttttagcgcccctcccattccctccaggccaggccctcagagtgttttcgcgaacagtgatctgttccccgcacctccccagatacctagccgacctgtccggattccaccaggcattccaccaggtgtgccaagtcgtcgcccacccgcagccccaagcagacccaccatcatcagaccagcggaaccttcgttactcgactag

SEQ ID NO: 221414 - DNA, 2601 bp, synthetic construct
  misc_feature 1..2601: note = Description of Artificial Sequence: Synthetic coding sequence
  source 1..2601: mol_type = other DNA
atgggaaatcgtggtatggaggagttaattcccctcgtcaataaattacaagatgcctttagttctatcggacaatcctgccaccttgacctaccacaaatcgccgtagtggggggacagtccgccggaaaaagtagtgtgctcgagaactttgtgggacgcgatttcttgcccagggggtccggaattgtgactagacgccctctgatcttgcaactgattttttccaagaccgaacacgcggaattccttcattgcaagagtaaaaagtttactgactttgacgaagtaaggcaagaaatcgaagcagagacggatcgggtgaccgggacaaacaaaggcatcagccccgtgccgattaatcttcgtgtgtacagtccacacgtgctgaatctgacgctaattgatctgcccggtattacgaaggtccccgtgggcgaccaacccccagacatcgaataccagatcaaggatatgatactccagtttatttcaagggagtctagcctgattttagccgtcacgccagccaatatggatttggctaattccgatgccctcaaattagccaaggaagtggacccgcagggccttaggacaatcggcgtgattaccaagctggacttgatggacgaggggaccgatgccagggatgtgctggaaaataagctgctccccctgcgtagagggtatatcggcgtggtgaaccggtctcagaaagatattgagggaaagaaggatatacgggcagctttggctgcagaacggaaattttttctgagtcaccccgcttatcgccacatggccgatagaatgggcacaccccatctgcagaagaccctaaatcaacaacttacaaaccatatcagggagtccctgccagctctgcggtctaaactccagagtcaattgctgagcctggaaaaggaggtggaagaatataagaattttcgcccagacgaccctacgagaaagaccaaggctctgttacagatggttcaacagttcggggtcgattttgaaaagagaatcgaaggtagcggggatcaggtggacaccctcgaactgagcggtggggcacgcatcaatcggattttccatgagcgttttccttttgagctggtgaagatggaatttgatgaaaaagaccttcgccgagagatttcttacgccattaaaaacattcatggggtgcgcaccgggctgtttactcccgatatggcttttgaggcgattgtgaaaaaacagattgtaaagctcaaggagccgtccctcaagtgtgtggacctggtagtgtctgagctcgctactgtgatcaaaaaatgtgccgaaaagctatcgagctatcccagactccgcgaggagacagagcgcatcgtcactacctatatacgcgagcgagaaggcaggaccaaggatcagatcctccttctgatcgacattgaacagtcctacataaacaccaaccatgaagatttcattggtttcgcaaacgcccagcaacggtctacgcaactgaataagaaacgcgcaattccaaatcaagtaatccgaaggggttggttgactattaacaacatatcactcatgaaagggggaagcaaagaatactggtttgtgctgaccgccgaaagcctgagctggtataaagatgaggaggagaaagaaaagaagtacatgttacccctggacaatttaaaaattagagacgtggagaagggattcatgtccaataagcacgtgtttgccatcttcaacacagaacagcgcaacgtctataaggacttgcgccaaatcgagctggcatgtgacagccaggaggatgtggatagctggaaggccagctttctgcgcgcaggagtatacccggagaaagaccaggctgaaaatgaagacggcgcacaggaaaacaccttcagcatggaccctcagctggaacgccaggtcgaaaccatccgcaacctggtcgattcctacgtcgcaattattaacaagagtatccgcgatctgatgcctaagacaatcatgcatcttatgatcaacaataccaaagcctttatacaccacgagcttctggcttacttatatagctccgcggaccagtcttcccttatggaggagagcgccgatcaggcacagagaagagacgacatgctgagaatgtaccacgcactgaaggaagctctcaacattataggcgacatttcgacgtctactgttagcacacctgttcctccacctgtggatgatacctggctgcaaagcgcctcatcccactccccaacgccccaacgcaggcctgtaagctcgatccacccccctggaaggcctcctgccgtgcggggtcccaccccaggcccacccctcatacccgtgccagttggcgcagcagcctcctttagtgcaccccctatccccagccggccaggaccacaatccgtcttcgccaattcagacctgtttcctgcaccccctcagattccaagtaggcccgtgcgcatcccacccggaattccacctggggtcccttcacggcgtcctcctgctgccccatctcggccaaccataattaggcccgctgaacccagcttgctggattag

SEQ ID NO: 221415 - DNA, 1200 bp, synthetic construct
  misc_feature 1..1200: note = Description of Artificial Sequence: Synthetic coding sequence
  source 1..1200: mol_type = other DNA
atgctcccactggagccatacttgacccagactagcgccgtgccgcaaatgtcacattttatgtgccactcacccacgcacaagccacagggcctgctgccatgggccccattccaccaggcctcagtgtccctgtaccccatctctccttggccctcagagtccgtctgccctcctacctgtcccggtggagcgtcttgctggttccccgctgggaatgcatgggatagagtggagcttgggttcctagggttcggggcagggggagttagcatcgctgtgcccggttttccgctgtcatgcgggcaaggctgctgtgccggaggctggctggggcatggcgctcgattccctgctaaacttcgggcatttccacaagtaatcaggaggggctggctcaccataaacaacatctccctgatgaaaggagggtctaaggaatattggtttgttctaactgctgaatcactgtcttggtacaaggacgaagaggaaaaagagaagaaatacatgcttccgctcgacaatttaaagatccgagacgtggaaaaaggctttatgtccaataagcacgtgttcgctatttttaacaccgagcaaaggaacgtctacaaggatcttcggcagatagagctggcgtgcgacagccaggaagacgtcgacagctggaaggcctcttttttacgggctggagtatatcccgaaaaagaccaggccgaaaacgaggatggcgcacaagaaaacacattctccatggaccctcaacttgaaagacaggtggagaccatccggaatctggtggatagctacgtggcaatcatcaataagagtatccgagatctgatgccaaaaacgattatgcatctgatgattaataatacaaaggcctttatccaccatgaacttctcgcgtatctttatagctctgcagaccaaagttctttgatggaggagagcgccgatcaggcacaaaggcgggatgatatgctgcgcatgtaccacgccttgaaggaagcattaaacattatcggcgatatatcaactagtaccgtttccactcccgttccaccacctgttgatgatacttggctgcagagcgcctcctcacacagtcccacaccacagcgccgtccagttagtagcatccatcctcctggacgacccccagctgtccgaggtcctacccctggccctccgtag

SEQ ID NO: 221416 - DNA, 13284 bp, synthetic construct
  misc_feature 1..13284: note = Description of Artificial Sequence: Synthetic coding sequence
  source 1..13284: mol_type = other DNA
atgtcttcaaaagccgaaaaaaaacaacggcttagtggacgcggatcaagccaagcgtcgtggtccggtagagcgacgcgggcagctgtggccacgcaggaacaagggaacgctcctgctgtttccgaaccagagctgcaggccgagctacccaaggaagaacccgaaccaagactggaaggcccacaagctcagagcgaggagagcgtggaacctgaggccgacgttaaacccctgttcttgtcccgcgctgccctaactgggctagccgacgccgtgtggactcaagagcacgacgcaatcctcgagcacttcgctcaggaccccactgagtccatcctcacaatctttatcgacccctgctttggccttaagctcgaacttgggatgcccgtgcagacccagaaccaactggtatacttcatccggcaggccccagtgcctatcacctgggagaatttcgaggccaccgtgcagttcggcactgtgagaggcccttacatccccgctctgctcagactgctggggggtgtctttgcgccacagatcttcgccaataccgggtggcccgaaagcatacggaaccattttgcctctcatcttcataagttcctggcatgcctgaccgatacacgatataaactcgaaggccacactgtgttgtacattcccgctgaggctatgaacatgaagcccgagatggtcattaaggacaaggaactcgtgcaacggctggagactagcatgatccactggacaagacagatcaaggagatgctttctgcccaggagacggttgagacaggcgagaacctgggtccactggaagagatcgaattctggcggaaccggtgcatggacctgtccgggatctccaaacagctcgtgaagaaaggcgttaagcatgtggagtccattctgcacctagccaaaagttcttatctagccccttttatgaagttagcacagcagatccaggacggttcccggcaggctcaaagcaacctgaccttccttagcatacttaaagaaccttaccaagagctggccttcatgaagccaaaggacatctcaagcaaattacccaagctcatctccctgattagaataatctgggttaattctccccattacaacacccgggaacgtctgacaagcctgtttaggaaagtctgcgactgccagtatcattttgccaggtgggaggacggcaaacagggaccccttccgtgtttcttcggtgcccaagggccacagatcaccagaaacttgttagaaattgaggacattttccataaaaaccttcataccctgcgtgccgttcgcggaggaattctggacgttaaaaacacatgctggcacgaagactataacaaattccgggctggaattaaggatctggaggtcatgacgcaaaacctaataacctctgcgtttgaactggttagggacgtcccccatggtgtgctcctgctcgatacctttcatcggctggcatctcgggaagctattaaaagaacttacgacaaaaaggccgtggatctatatatgctgttcaatagcgaactggcgttggtgaatagagaaaggaataagaaatggcccgacctggagccgtatgtcgcccagtactctggcaaagcaagatgggttcacatccttcgcagacgtatcgaccgcgtcatgacttgcctggccggtgcgcattttcttccgagaataggtaccggcaaagagagtgtacacacttatcaacagatggtccaagcgatagacgaacttgtccgtaaaaccttccaggaatggacctcgagccttgacaaagactgtattagacgactcgatactcctttgttaagaatcagccaagagaaggccggaatgctggacgtgaattttgacaaaagcttgctgatcttatttgcagagattgactactgggagcgcctcctcttcgaaactcctcactatgtggtgaatgttgcagagcgggctgaggatctaaggattctcagggagaacttactcctggtggctcgagattataacagaattatagcgatgctcagcccagacgagcaggccctgtttaaggagagaatcagacttcttgacaagaagatccacccgggacttaaaaaactccactgggccctgaagggtgcttccgcatttttcatcaccgaatgccgcatccacgcctccaaggtgcagatgatagtcaatgaattcaaggcctccacactcaccattggatggcgcgctcaagaaatgagcgagaagcttctagtgcggatctccggaaaaagagtttatagggatctcgaattcgaagaagaccagcgtgagcatagagccgcagtccagcagaagctgatgaacctgcaccaggatgtggtgaccattatgactaactcatacgaagtcttcaagaacgatggaccggaaatccagcagcaatggatgctgtatatgatcagactcgaccgcatgatggaggacgctctcagactgaacgtgaaatggtcgttgctggagctgagcaaggccatcaatggcgacgggaagacttcacctaaccctctttttcaggtgcttgtgatcctcaaaaacgatctccagggctccgtggctcaggtcgagttctctcccaccctgcaaacgctggctggggtagtgaatgatattgggaaccatttattttcaacaatcagcgtattctgccatctgccggacatcctcacaaaacgcaagctgcaccgcgagcccatacagactgtagtagaacaggacgaggacataaagaagattcagacccagatttctagtggcatgactaacaatgcatcgttactgcagaattatctcaagacctgggacatgtatcgcgagatctgggagatcaataaagattcatttattcacaggtaccaacgcctgaatcccccagtgtcgtcattcgttgccgacatcgcacggtatacggaggtcgccaataatgtgcagaaggaggagacggtcaccaacattcagttcgtgctactcgactgttctcatcttaaatttagtctggtccagcattgcaacgagtggcagaataagttcgctaccctcctacgcgaaatggccgcagggagactgcttgagctgcacacctatttaaaagagaatgccgaaaagatctcgcgaccacctcagacattagaagaactcggtgtgtcgctgcagttagtggatgcactgaaacatgacctcgccaatgtggagactcagattcccccaatacatgaacagtttgctattcttgagaagtatgaggttcctgtcgaagatagcgtgcttgaaatgttggactcattgaacggggagtgggttgtgtttcagcaaacactccttgatagcaaacagatgctgaagaagcacaaagagaaatttaaaacaggtctgattcacagtgcagatgattttaaaaagaaggcacatacactgttggaagacttcgagttcaaagggcacttcacctccaacgtcggatatatgtccgcccttgatcagattacgcaggtgagagccatgctgatggccatgcgagaagaagagaatagcctcagagcgaatctgggcatattcaaaatcgaacagccgcctagtaaggacctgcagaacctagaaaaagaactcgatgctctccaacagatatgggagatcgcccgtgattgggaggaaaactggaatgaatggaagaccggccgattcctgatccttcagaccgagaccatggagactaccgctcatggactcttcagaagactaacaaaactggccaaagaatataaggatcgcaattgggagatcattgaaacaacccgatctaagattgagcaattcaagcgcacaatgcctctgataagtgacctgcgcaaccctgccttaagggagcggcattgggatcaagtgcgcgacgagattcagagagagttcgaccaggagtccgagagtttcacactagagcaaattgtagaacttggtatggaccagcatgttgaaaagattggggaaattagtgccagcgccacaaaggaactcgctatcgaggtcgcacttcagaacatagcaaaaacctgggatgtaacccagcttgacattgtcccctacaaggataagggccatcaccggctccgcggaacagaagaggtgtttcaggccctggaggacaaccaagttgctctgagtaccatgaaagcatccaggttcgtgaaggcctttgaaaaagacgtggatcactgggagcgctgcctttcccttatcctcgaggtcatcgagatgattctgaccgtgcaacgtcagtggatgtatcttgagaatatctttttgggtgaggacatccgcaaacaactgcccaacgagtcaactctattcgaccaagttaattctaattggaaggcaatcatggatcgtatgaacaaagacaacaacgcgctcagatctacccaccatccgggtcttctggacactctcatcgagatgaatactatcctggaagacatccagaaatccctggacatgtacctggagaccaaacggcacatctttcctcgcttttatttcctcagcaatgacgacctcttggaaatcctaggtcagtctagaaatcctgaggccgttcagccacacctcaagaaatgctttgataatatcaaactcttgcgaatccagaaagtgggagggccatcttccaagtgggaggccgttggtatgttctccggcgacggcgagtatatcgattttcttcattcggttttcctcgaaggcccagtagagtcatggctgggcgatgtcgaacagaccatgcgtgtgactctgagagatctcctcaggaactgtcacctggctctacgcaaatttctgaacaagagggataaatgggtgaaggagtgggcaggtcaggtagtgattaccgcctctcagatccaatggactgctgacgttaccaagtgtctcctcaccgctaaggaaagggcagataagaagatcctgaaggtgatgaagaagaaccaggtaagcatacttaataagtatagcgaggctatccgcggaaatctcacgaagattatgcgcctgaagatcgtcgctctagtcaccatcgaaattcacgcaagagatgttttagagaaactctacaagtcgggcctgatggatgtgaatagttttgactggctctctcaactgcgtttctactgggaaaaggatctggatgactgtgttatccgccagacaaacactcagtttcagtacaattatgagtatttgggaaattcagggagactggtaatcacaccgctcacagacaggtgttatatgactctaaccacggctttacacctgcacagaggcggaagcccaaaaggccctgctggcacaggtaaaacagaaacagtaaaggatctcggaaaggcacttgggatttacgttattgttgtgaactgctccgagggattggattataagagcatggggagaatgtactccggcctggcccagactggcgcatggggatgcttcgacgaatttaatcgcataaacatcgaagtgcttagcgtggtggcgcatcaaattttatgcatcctttcagccctggctgccggactgacacactttcacttcgatgggtttgagatcaaccttgtgtggtcctgcggaattttcatcacgatgaatcccggatacgctggcagaacggaactacctgagaacctgaaatctatgtttaggcctattgctatggttgtgcctgacagcactctgatcgccgaaatcatactcttcggcgaggggtttggtaactgcaagatactcgcaaaaaaagtctatactttgtattccttggcagtgcagcagctcagtagacaggaccactatgactttggtctgcgggctctgacaagcctgctgaggtatgccggaaagaagagaagactgcagcctgacctcaccgacgaagaagtgcttcttctttccatgcgtgatatgaatatcgccaaactgacaagtgtcgatgcaccattgttcaacgcgattgtccaggacctctttccaaatattgagctgcccgtgatagattatgggaaactcagagaaaccgtcgaacaagaaatccgggatatgggattgcaatctacacccttcacactgaccaaagtttttcagctctacgagacgaaaaattcccggcatagtaccatgatagtcggctgcactggctctggcaagacagcgtcttggcgtatactccaggcctcactatcctctctgtgtagagctggcgatccaaacttcaatatagtacgtgaatttccactgaaccccaaggccttgtcactgggcgaactctacggcgaatacgatttgagcaccaatgagtggacagacgggattctgtccagcgttatgcgcacagcgtgcgccgacgagaagccagatgagaagtggatactgttcgacggccctgtggataccctgtggattgagaacatgaattccgtgatggacgataataaggtgttgacattgatcaacggcgaaagaattgccatgcccgaacaggtctccctgctgtttgaggtggaggacttagctatggcaagccccgctacagtgtcccgatgtgggatggtgtacaccgactacgctgacctaggctggaagccatacgttcagtcttggctggagaagcgaccaaaggcggaggtggagcctctgcagcgcatgttcgaaaaactcatcaacaaaatgctcgccttcaaaaaggacaactgcaaggagttagtgccgcttcccgagtactccggcatcacctccctgtgtaaactctacagcgctctcgccacaccagagaatggagtaaatcctgccgatggcgagaactatgttactatggtggagatgacttttgtgtttagcatgatttggagcgtctgcgcgagtgttgacgaagagggtcgaaagcgcattgatagctacctccgagagatcgagggctcatttcccaataaggacaccgtgtacgaatactttgtggatcccaagatccggtcatggacttcttttgaggacaaactccctaagagctggcggtaccctcccaacgccccattttataagatcatggtcccaactgtggacaccgtcaggtacaactatctggttagcagtcttgttgctaaccagaaccctattctgctggtgggacccgtaggtaccgggaaaaccagcattgcccaaagcgtactccagtcactaccatctagccaatggtctgtcctcgttgtgaatatgtcagcccaaaccaccagcaacaacgtgcaatcaatcatagagtccagagtggaaaagaggaccaaaggagtttatgtacccttcgggggaaagtctatgattacatttatggacgatttaaatatgcccgcaaaggatatgttcggctcccagcctccgctagaactgatccgcttgtggatcgactatggcttctggtatgataggaccaagcaaactattaaatatatcagggaaatgtttctcatggccgctatgggccctccgggaggcggacgcaccgtcatctcccccagactgcggagcagattcaacatcataaatatgaccttcccgaccaagtcacaaatcatcagaatattcggcactatgatcaaccagaaactccaggactttgaggaagaggttaagcccattggcaacgtcgtaactgaagccacccttgatatgtataataccgtggtgcagcggtttttgcctactcctacgaaaatgcattacctattcaatctgagagacatcagcaaagttttccagggcatgcttagagctaacaaagatttccatgatactaaatccagcattactcgcctgtggattcacgaatgcttccgggtgttcagcgaccgactggtggatgccgcagacactgaggcctttatggggatcattagcgacaaactcggttcgttctttgacctcacattccatcacctttgtccatcgaagagaccacccatatttggagatttcttgaaagagccaaaagtttacgaagatctgacagatttgaccgtcctgaagaccgtcatggaaaccgctctgaacgaatataatctgagcccatccgtggtccctatgcaactcgtgctttttagagaggcaatagagcatatcacgaggatcgtgagggttatagggcaacctcggggaaacatgcttcttgtcggtataggcggaagcggcaggcagagtctagctaggcttgcgagttcgatttgtgattataccacttttcagatcgaagtcaccaagcactaccgcaagcaggagttccgggacgacattaagagactgtatcgccaggccggagtcgaattaaagacaaccagtttcattttcgttgacacacagatcgccgacgagagctttctcgaggacattaataacatattgagctccggcgaggttcccaacctctacaagccagacgagttcgaagaaatccagagccatatcatcgatcaggctagggtggaacaagttcctgaaagctcagatagcctcttcgcctatcttatcgaacgggtgcagaacaacctgcacatcgttctgtgtctatcacccatgggtgacccttttcggaattggatcaggcagtatccagcactggtaaattgtacgacaatcaactggtttagcgaatggcctcaagaagcactgttagaggtggcggagaagtgccttattggtgtcgatcttggcactcaggaaaacattcatagaaaagtcgcacagattttcgtcaccatgcactggagcgtagcccaatactcccaaaagatgctgcttgagttgcgcaggcataactacgtcacaccgaccaagtatctggaactactgtctggatataagaaattgctgggcgaaaagcgtcaggagttactcgcccaggctaacaaactgcggacaggcctttttaaaattgatgaaacccgggagaaggtgcaggttatgtctttagagctggaggacgccaagaaaaaagtggcagagtttcagaagcagtgcgaggaatacctggtaatcattgtgcagcagaagagagaagccgatgaacagcagaaggccgtcactgccaattccgagaaaattgctgtcgaggaaattaagtgtcaggccctggccgacaacgcacagaaagacctcgaagaggctctgcctgccctagaagaggccatgagagctctcgagtccttgaataagaaggatatcggggagatcaagtcgtacgggaggccacctgctcaagtagaaatcgtgatgcaagctgtcatgattttgcgaggcaacgaaccgacatgggccgaggccaagcggcagctcggggagcagaattttatcaagtctctgattaacttcgataaagacaatataagcgacaaagtactgaagaagattggcgcttattgtgctcaaccagacttccaacctgatataataggtagggtatctcttgccgcaaaatcgctgtgtatgtgggtgagggccatggaactctatggcagactttaccgtgttgtagaacccaaacgcatccgtatgaacgcagctcttgcccagttaagagagaagcaggccgctttagccgaagcccaagaaaagttgagggaggtagccgagaaactcgagatgctgaagaaacagtatgacgagaaattagctcagaaagaggagctgaggaagaagtccgaggagatggagctgaagctcgaacgcgctggcatgttagtttcaggccttgccggagaaaaggcacgctgggaagagaccgtgcaaggcctagaggaggacctgggatacctggtgggtgactgtcttcttgccgctgcttttttgtcctacatgggaccattcttgactaattacagagacgagatcgtgaaccagatctggatcggaaagatctgggagctgcaggtgccgtgtagcccaagcttcgcaatcgacaatttcctctgcaacccgaccaaagttagggattggaacatacagggtttgccttctgatgccttctccaccgagaatggcatcattgtcaccagaggtaatcggtgggccttaatgatcgacccacaggcccaggctcttaaatggatcaagaacatggagggcggacaagggcttaagataattgaccttcagatgtctgattatctgcggattctggagcacgcaatccatttcggctatcctgtgttgctccagaacgtgcaagagtatcttgaccccacgctcaatcctatgctgaataaatcggtagccagaattggaggacgactgctgatgcggatcggcgacaaggaagttgaatacaacaccaattttcggttttacattaccaccaagctctctaatccccactactctcccgaaacgtcagccaaaacaactattgttaacttcgccgtgaaggaacaaggcctggaagcgcaattgttgggtatcgtcgtccgaaaggagcgtccagaattggaggagcagaaagattccctagtcattaatattgcagcaggcaagaggaagctcaaggagctggaggatgaaatcctgagactacttaacgaagccactggttccctattagatgacgtgcagttagttaatacattgcacacatcgaaaatcacagctacagaggtgactgaacaactggaaacatcggaaaccacggaaattaacactgacctggctcgggaggcatatagaccatgcgcccagagagccagcatcctgttcttcgtcttgaatgatatgggatgtatcgacccaatgtatcagttctctctggatgcatatatctcgctttttatcctcagcatcgacaaaagccatagatcgaacaaactggaggaccgaattgactacctcaacgactatcacacatatgctgtgtaccgatacacctgcagaacgctgtttgagagacataaactattgttttcctttcatatgtgcgcaaagatactggagacatcaggcaaattgaacatggatgaatataacttctttctgcgaggaggtgtggttctagaccgggagggccagatggataacccatgctcttcctggttggccgacgcatattgggacaatataacagagctagataaactcaccaacttccacggtctgatgaactcttttgagcaataccccagagattggcatttgtggtataccaacgccgctcctgaaaaagccatgttgcccggtgagtgggagaacgcctgtaatgagatgcagcgcatgctcatagttcgatcgctgcggcaagaccgagtcgcattttgcgtgacttccttcatcataactaacctgggatctcgcttcattgaacccccagttctgaatatgaagtctgtgttggaggattctaccccgagatctcccctcgtgtttatactttcccccggagtggatcccacgtcagctctcctgcaacttgcagagcatatgggaatggctcagagatttcatgctctgtccctggggcaggggcaggcaccaattgcggcacggctgcttcgagagggggtgactcaggggcattgggttttcctggcaaactgccacctctccctgagctggatgccaaatctagacaagctagtggaacagcttcaggttgaagacccccacccaagcttccgcctctggctgtcgtccatccctcatccagattttcctatctccattcttcaggtgagtattaaaatgaccacagaaccacccaaaggactgaaggctaatatgacccgcctgtatcaactgatgtcggagccacagttctcgaggtgtagcaagccagcgaaatataagaagcttctgttttccctgtgtttttttcactccgtgctgctggagcgaaaaaagttcctgcagcttggatggaacatcatctacggatttaatgattcagactttgaagtgtctgaaaatctgctgagcctgtatctagatgagtacgaggagacgccttgggacgctctcaagtacttaatcgcaggcatcaactatggtggtcacgtcactgacgattgggatcgaagacttctcacgacctacataaacgactatttttgcgaccagagcctgtctactcccttccataggctgtctgcactcgagacatattttatccctaaggacggctctctcgcgagctacaaggagtacatctccctgctgccaggaatggatccacccgaagccttcggccaacatcctaacgcagacgtcgcttcccagatcactgaagcccagaccctgtttgatactctgcttagcctgcagcctcaaattaccccaacccgggctggtggccaaaccagagaagagaaggttctggaactggcagcagatgtgaaacagaagatcccagaaatgatcgattacgaggggacccagaagttgctagcgctggatccttcacccctcaatgtggtgttactgcaggagattcagaggtataataccctgatgcaaactatcctcttttcactcactgacctcgagaagggaattcaaggcctcatcgtgatgagtacaagcttagaggaaatcttcaactgcattttcgatgcccacgtgccccctctctggggtaaagcgtatccaagtcagaaaccactcgctgcatggactcgcgacctagctatgagggtagagcagtttgagctctgggcaagcagggcccgtccccctgtcatcttctggctctcaggttttacattccccaccgggtttctcaccgccgtgctgcagagctccgcaaggcagaataatgtttcggtggactcactcagctgggagttcatagtgtcaacggtcgacgacagcaatctggtttatccgcctaaagatggcgtgtgggttaggggcctctatctcgagggcgctggctgggacaggaaaaattcatgtcttgtggaggctgagcctatgcagcttgtttgtctgatgccgactatccatttcaggcctgcagagtcccgcaagaaatctgcgaagggtatgtacagctgcccatgctactattatcccaaccgggctggtagctctgatcgtgctagcttcgtgatcggcatcgaccttagaagtggcgctatgacaccagatcattggattaagcgcggtacagcactcttgatgtccctggatagctac

SEQ ID NO: 221417 - DNA, 1782 bp, synthetic construct
  misc_feature 1..1782: note = Description of Artificial Sequence: Synthetic coding sequence
  source 1..1782: mol_type = other DNA
atggaaattgtctacgtatacgtgaagaagcgctccgagttcggaaagcaatgtaacttctctgaccgccaggcagagctgaacattgacataatgcccaatcccgagctggctgaacaatttgtggaacggaatcctgtggacactggaattcagtgtagtatctcgatgtcagagcacgaagcgaatagcgagcgtttcgagatggaaactaggggagtgaatcacgtcgaaggcggatggccgaaagacgtcaatcccctggagctcgaacagactatccgctttcggaaaaaagtggaaaaagatgaaaactatgtaaacgctatcatgcagcttggctctatcatggaacattgtatcaagcagaataacgccattgacatttacgaagaatacttcaatgacgaagaggcgatggaggtgatggaagaagaccccagcgccaagaccattaatgtgttccgcgatcctcaggagatcaagcgggcagctacacacctgtcttggcacccagacgggaacaggaagcttgccgttgcctattcatgcttggactttcaaagagctccagttggcatgtcctctgattcttacatatgggacctggagaacccgaacaagcccgaactggcgttgaagcctagttctcccctggtcactctggagttcaaccccaaagactcccatgtactacttggtggatgctacaacggacagattgcgtgttgggatacacggaagggctcactggttgccgaactgtcaaccatagagtcatcacaccgcgatccggtttatgggactatttggctgcagagcaagaccggcaccgaatgcttttccgcttccactgatgggcaagttatgtggtgggatatacgcaagatgtctgagccaaccgaggtggttattctggatataacgaaaaaggagcagctcgaaaacgccttgggcgcaattagcttggaattcgaatccaccctgcctacgaagtttatggtggggacggagcagggaatcgttatcagctgcaatcgcaaggcaaagacctccgccgagaagatcgtatgtacatttccaggccaccatggtcccatctatgcgttgcagagaaaccctttctaccctaagaacttcttgaccgttggcgattggaccgccaggatttggagcgaagattctagggaaagttctataatgtggactaagtaccatatggcttacctgaccgatgccgcatggtctccggttcggccaaccgtgttcttcactaccagaatggatgggacgctggacatttgggattttatgttcgagcagtgcgaccctaccttgagcctgaaagataacggttgccttattgcttgcgggagccagctggggactacgaccctgttggaggttagcccaggccttagcacattgcagagaaacgagaaaaacgtagcttcttctatgtttgaaagagagacccgtcgagagaagatactcgaagccagacatagggagatgcggcttaaggaaaaaggaaaggcggagggaagggacgaggaacagacagacgaggaactcgcggtcgatctcgaagctctggtatctaaggcagaagaagagttctttgatatcattttcgcggagctgaaaaagaaggaggctgacgccatcaagttaaccccagtccctcagcagccttctcctgaagaagaccaggtggtggaggagggcgaggaagcggcaggggaggagggagacgaagaagtggaagaggacctggcctag

SEQ ID NO: 221418 - DNA, 2676 bp, synthetic construct
  misc_feature 1..2676: note = Description of Artificial Sequence: Synthetic coding sequence
  source 1..2676: mol_type = other DNA
gagaaggacaacgggttggatgtctttaagctcagcgatcgcgattttctgagatctatggaaaacgccatccggtttggcaaaccttgtctgcttgaaaacgtgggcgaggagctggaccccgctcttgagcccgtgcttctgaagcagacttataaacagcaaggcaacacagtgcttaagctgggtgacactgtcattccctaccacgaggattttagaatgtacatcacaactaagctaccgaatccccattatactcccgagattagcacaaagcttacattaattaattttacactaagcccttctggccttgaggaccagctgctcggccaggttgtggcagaagagagacctgatctggaagaggctaagaaccagcttatcatttcaaatgccaagatgcgccaagagctaaaggacatcgaggaccagatcttgtacaggctgtcttcatccgaggggaatcccgtggatgacatggagttgattaaagttctggaagccagcaagatgaaggctgccgaaatccaagctaaggtacgaattgctgaacagacagaaaaagatattgatcttacccgtatggaatatattccagtggccattcggactcaaattctgttcttttgcgtgtccgacctggctaatgtggatccaatgtaccagtactcactcgagtggttcctgaacatctttctgtccggaattgcaaattccgagcgagctgacaacctaaagaagcgaattagtaacatcaacagatatcttacctactctctgtattcaaatgtgtgcaggtcccttttcgaaaagcataagcttatgtttgcttttttactctgtgttcgcataatgatgaacgagggtaagattaatcagtctgagtggcgctatctactgtccggcggatctatctccattatgacggagaacccagcgccagactggctctctgatcgggcttggcgggacatccttgccctgagcaacctacctacattttcaagtttcagttctgacttcgtgaaacacctatccgaattcagggtcatattcgacagcctggagccccaccgtgagcccctgcctgggatctgggatcagtatctggatcagtttcagaagctgttggtgctcaggtgcctgaggggcgacaaggtgacaaacgccatgcaggactttgttgccaccaatctggagcccaggtttattgagcctcagactgctaatctgagtgtggtgtttaaggattccaattctactaccccactgatctttgtgctcagtcccggaacagaccccgctgccgacctgtacaagttcgcagaggagatgaaattctcaaaaaagctcagcgccatctccctgggacagggacaggggccacgcgctgaggctatgatgcgaagctccattgagcgtggtaagtgggtgttcttccagaactgtcatttggccccatcttggatgcctgcgctagagagactgatcgaacacatcaacccagacaaagtccatcgagattttcgcttatggctgacgtccttgccctcgaacaaatttcctgtctccattctccagaatggttcaaagatgaccattgaaccaccacggggagtgagggccaatctgctgaagagctatagcagtttaggagaagactttctgaacagctgtcataaagttatggaatttaaaagcctactgttgtccctctgtctgttccacgggaacgctcttgaacgtcataagtttggtccccttggatttaacatcccatatgaattcaccgatggtgacttgcggatctgcataagccagttaaagatgtttctggatgagtacgacgacatcccctacaaggttttgaagtacacggccggtgagattaactatgggggacgagtgaccgatgattgggaccggcgatgcattatgaatatcctggaagacttttacaacccagatgtgctgtctccagaacacagctacagcgcctcgggcatttatcaccaaattcctccaacctacgaccttcacgggtatctgtcatatattaaatctctccctctgaatgatatgcccgaaatctttggtctgcacgacaatgcaaacatcacatttgcccagaacgagacgttcgcgttgctcggcactatcatccaactgcagccaaagtcctcttcagcgggttcccagggccgtgaggaaattgtcgaagacgttacccagaatatcctgctgaaggtgcccgagcccattaatctccaatgggtcatggctaagtaccccgtgctttacgaggagagcatgaacacagtactggtgcaagaagtcatacgctacaatcggctgttgcaggtaattacccagaccttacaggatttactcaaggccctcaagggcctggtggtcatgtcgtcacagctggagctcatggctgcttctctgtataacaatactgtgcctgaactgtggagcgctaaagcctacccaagcctgaaacctctcagcagttgggtcatggatctgctccagcgtcttgatttcctccaagcctggatccaggacggcatccctgcagtgttctggatcagcggctttttttttccccaggctttcaatcggcacagtgcggaattctgcccccagatttgccacctccattag

SEQ ID NO: 221419 - DNA, 12798 bp, synthetic construct
  misc_feature 1..12798: note = Description of Artificial Sequence: Synthetic coding sequence
  source 1..12798: mol_type = other DNA
atggaacaacccaatagcaaggggtactcactgggcagaaccccccaggggccagagtgctcaagcgcccctgccgtgcaggtcggcacccatcggggactcgagtataaccccggaaaaattctgcctgggtcggactacggccttggtaatccgcctgctctggatcccaaattacctcatcttccccttcctcccgcacccccaaccctctccgatctggggcaaccacggaagagtccactaactggcaccgataaaaaataccccttgatgaaacagagaggcttctacagcgacatcctgagtcctggcactcttgaccagctcggtgaggtgtgccgaggccctaggatgtcccagaatttgttgcgacaggcagatctggacaagttcactcccagggtcggatctttcgaggtgccggaggacttccaagaacggatggagcaacagtgcattgggtcaacaacaaggctcttggcacagacagactttcccctgcaagcgtacgagccaaagatgcaggtaccttttcaggtgttgcccggacagcatcccaggaaaattgaaattgagcgccgaaaacagcagtatctcagcctggatattgagcaactgctcttctcacagggcatagatagtaataagttgatgccgaggcacttggatcaccagcaccctcagaccatcgagcagggccacgaccctatatttccgatttacctgccccttaaggtgttcgacaacgaagatttcgattgtcgtactcctcgggagtggataaacatgggcttagagcctggctcccttgaccgcaagcccgtgccgggaaaggccctcctgccaacagatgactttctgggccacgaagatccaaaaagccaaaagctcaaatataagtggtgtgaggttggtgtgctggattacgatgaggaaaagaagctctacttagtgcataagaccgatgagaaggggctggttcgtgacgagatgggtaggcctatcttgaatgccggagtaaccaccgagggaaggccccctctgcaagtgtgccagtattgggtcccacggatccaactgctgttttgcgcggaggatccgtgcatgttcgctcaacgggttgtccaggccaatgctctgcgcaagaataccgaagctctgctactgtacaatttatatgtcgattgcatgccatccgatggccagcacgtgatctcagagcagtcactgtcgaagatcaaacagtgggctctcagtaccccgaggatgagaaagggaccatctgttctggaacatctgtcatccttggcgcgagaagtctctttggattacgaaaggtcaatgaataagatcaacttcgaccatgtggtcagtagcaagcccgagactttcagctacgtgactctgcccaagaaagaggaggaacaagtcccagagagggggttagtaagtgtgcccaaatatcacttttgggagcagaaggaggatttcacattcgtttctcttctcacgcgcccagaagtgatcactgcactaagtaaggtgcgggctgagtgcaacaaagtgacggccatgtccctttttcactcctctctgtccaagtactcacatctggaggagttcgaacagattcagtctcagacttttagccaggtgcagatgtttctgaaagattcttggatctcatcgctcaaggtcgcaatgagatcaagtctccgggacatgtcaaaaggttggtacaacctgtacgagactaactgggaggtctatctcatgtcaaaattaagaaaacttatggaactcgttaaatacatgctccaagatacacttcgcttcctagttcaggattccttggctagtttttcacaatttatcagtgatacatgctgctctgtgctgaattgcacagatgacatggtctggggggacgatctgataaactctccctacaggcccaggaagaacccattgtttattatggatctggttctggacagtagcggggtccactacagcactcctcttgaacagtttgaggcatcccttctgaacttatttgataaaggcatccttgccactcacgcagtgccacagctagagaaactcgttatggaagacatctttatttccggagacccattactcgaatccgttggattgcacgagccactggttgaggagctacgggctacaatagctagcgccgtttcaaaggctatgatcccgctgcaagcctacgcaaaagaatatcggaagtatttggaactgaacaacaacgatattgcttcattccttaaaacttatcagacgcagggactgttggcccaagaagtccgcgaggtagttctaacacacctgagagaaaaagagatcttggactctagtctgccaagttctattattatcgggcctttttatattaacactgataatgttaaacagtctcttagcaagaagcggaaagccttggccactagcgtgctagatatactggcaaagaacttacacaaggaggtggactccatctgcgaagagtttagatccatctcaaggaaaatatatgaaaaaccgaattcaattgaagaactcgcggagttgagggaatggatgaagggcatacccgaacgcctcgtcggcctcgaagaaaggatagtgaaagtgatggatgattaccaggttatggacgaatttctgtataatctctcttcagacgacttcaacgacaagtggatcgcttccaactggcctagcaagatcctgggtcagatagaactggtgcagcaacagcatgtggaagacgaggagaagtttagaaagatacagatcatggatcagaataatttccaggaaaaactggaaggactccagctggtggtcgccggatttagtatacacgttgagatcagtagagcccacgagatcgctaacgaggttcgccgtgtcaagaagcagctgaaggattgtcagcaactggccatgttgtacaacaatcgcgaaagaattttttccctgcctatcaccaactatgataagctgtcacgaatggtgaaggaattccaaccctacctggacctgtggaccactgccagcgattggttacgctggtcagagagttggatgaacgacccgttaagcgccatcgatgctgagcagctggagaaaaacgttgtggaagcttttaaaacaatgcacaagtgcgttaagcagttcaaagatatgcctgcatgccaggaggttgcacttgatattagagccaggatagaagaattcaagccttacatccctctgatccagggcctacggaatccaggcatgcgtatacggcattgggagaccctgagcaaccagataaatatcaatgtgaggccaaaggccaatctaacgttcgccaggtgcctcgagatgaatctccaggaccacattgaatctattagcaaagtcgccgaggtggcaggcaaggaatacgccattgaacaggccctcgataagatggaaaaggaatggtcaactatcctgttcaatgtgctgccatataaagccacagacacctatatcctcaaatcacccgacgaagcctcccaactgcttgatgaccatatagtaatgacacagaatatgagtttttctccttataagaagccttttgagcagcggattaactcatgggaaaataaattaaagcttacgcaggaagtcctggaagaatggttaaactgccagcggtcttggctttatttggagcctattttctccagcgaggatatcaatcagcagctgcctgtcgagtccaagcgctatcaaacaatggagaggatctggaaaaagataatgaaaaatgcttacgagaatagggaagttataaacgtttgtagcgacctgaggatgctggattccctgcgcgactgtaataagatcctcgatttagtccaaaagggcttaagcgaatacttagaaaccaagcggtcggcctttcctcgcttctactttttgtctgatgatgagctcctggaaattctgtctcagactaaggatcccaccgcagtccagccacaccttcggaagtgcttcgaaaatatcgctcgtttgctattccaggaggaccttgagatcacgcacatgtactccgccgaaggagaggaggttcagttatgctttagtatctaccccagcagcaacgtagaagattggctgcgggaggtggagcgctccatgaaagcttccgtgcatgacatcattgaaaaggcaattagggcttaccctactatgcctcgcacccaatgggttcttaattggccaggccaggtcacaattgcgggatgtcagacatactggactatggaggtggccgaagccctggaggctggcaacctgcgttcgcagttgtttcctcagctgtgccagcagctgtcggatctcgttgccctggttcggggaaaacttagtaggatgcagcgcgcagttctgtcagctctgatcgtgatcgaagtccatgccaaagatgtcgtatctaagctaatccaggagaatgtagtcagtgtgaatgatttccagtggatctctcagctgcggtactactggacaaacaacgacctgtacatcagggctgtcaacgcggagttcatttatgggtacgaatatctcggaaacagtgggcgtctcgtgattaccccattgaccgatagatgttacctgacactgaccggtgctctccatctgaaatttggcggagcgcctgctggccctgcaggaaccggcaaaacagagacaactaaggacctcggcaaggcactggccattcaaactgtcgtctttaattgctcagatcagttagactttatggcaatgggcaagttctttaagggactcgccagcgcgggagcctgggcttgtttcgatgagttcaaccgcatagacatcgaagtactctctgtggtggcccaacaaatcacaactattcaaaaagctcagcagcaacgcgtggagcgctttatgtttgagggtgtggaaataccacttgtgccgtcgtgtgcagtcttcatcaccatgaaccctgggtatgccggtaggactgaactccctgataatctcaaagctctgttccggcctgtcgcaatgatggtgccggactatgcgatgattaccgaaatcagcctgtactcttttgggttcaatgaagcgagcgtcctcgcgaagaaaattaccactacattcaaactatccagtgagcaactcagcagtcaggatcactacgactttggcatgagggccgtcaagaccgtcattagcgccgcagggaatctgaagagagagaacccttcgatgaacgaggaactgatttgccttagggcaatacgggatgtcaatgttcccaagtttctgcaggaagacttaaagttattttccggcatcgtatctgacctgttccctacaatcaaagaagaggacactgattacgggatcctcgacgaagccattcgtgaagcctgccgtaattctaatcttaaggacgtcgaaggattcctgacaaaatgtatacagctctacgaaaccaccgtcgttaggcacggattgatgttggtgggaccaacaggctcgggcaaaagcacctgctacagggttctcgccgctgcgatgacatcattgaagggccagccaagtatatctggaggcatgtacgaagccgtaaactactacgttctgaatcctaaatccataaccatgggtcagctgtatggcgaatttgaccttctgacccatgaatggacggacggaatcttctctagctttatccgggcaggggctatcacaagcgacacaaataagaaatggtatatgttcgacggacccgttgacgcaatttggatcgaaaatatgaataccgttcttgacgataacaagaaactctgtctctctagtggggaaattatcaagctaacagaggcgatgacgatgatgtttgaggtgcaagatctggcggttgcatctcccgctaccgtgtctaggtgcggcatggtttacctggagcctagtatcctgggtttgatgcccttcattgagtgctggcttagaaagctgcctcctctgctcaaaccttatgaagaacacttcaaagctctgttcgtttcctttttagaagagtcaatttcttttgtgaggtcatctgtcaaagaggtgattgcctctacaaattgtaatctcacaatgtcactcctgaagctactcgactgtttcttcaagcctttcctgcctagagagggtctcaagaagattccatcagagaaacttagcagaattgtcgaattgatcgagccatggtttatattctcccttatctggtccgtgggtgcgaccggggacagttcaggcagaacaagttttagccactggctgcggctgaagatggagaatgagcagctcactctgttgttcccggaagaggggttagtgttcgactatcgcttggaggatgcgggtataagcggcactaacgacagcgaggacgaagaagaagagtacaagcaggttgcttgggtcaagtggatggactctagtgccccttttactatggtgccggatacgaactattgtaacatcattgtacccaccatggacacagtccagatgtctcacctgctggacatgctgctcacaaataagaagccggtgctttgcatcggtccaaccggtaccggcaagaccctcaccatttcagataaactgctaaagaatttggccctggattatatttcacatttcctgacattttctgcaagaacgtccgccaaccaaactcaggatttcattgatagcaaactggataagaggcggaaaggggtgtttggaccccctcttgggcgaaactttatttttttcatcgacgatctcaatatgcctgcgctggagacctatggcgctcagccccctatcgagctactgaggcaatggatggatcacggaggctggtatgaccgtaagattatcggcgctttcaaaaacctcgtggatatcaattttgtttgtgccatgggcccacccggagggggtcgaaatacagtaacacccaggttgatgcgacacttcaattacctgagcttcgcagaaatggacgaagtaagcaagaagcgcatcttttctaccatcctgggtaactggctggacggactgttgggcgaaaagtcctatagggaacgcgtccctggggctccccatattgcacattttaccgagcccttggtggaggcaacaattatggtatacgccaccattaccagccagctccttccaactccagctaagtctcactacacatttaatctgagagatctgagcaaagtgttccagggcatgctaatggccgatcccgcaaaggtcgaggatcaagtgcaactactgcggctttggtatcatgagaattgccgagtgttcagggaccggctggtcaatgaagaagacaggtcatggttcgatcagttgttaaagagatgcatggagcagtgggaagtgacatttaacaaagtctgtcctttccagcctatactttacggggacttcatgagccccggtagcgatgtaaagtcatacgagctgataaccagcgagtcaaagatgatgcaggtcatcgaagaatacattgaggattataatcagatcaataccgcaaagttgaagctagtgctgtttatggacgctatgtcgcatatttgccgaatttccagaactctgagacaggctttgggcaatgccctcttgctgggtgtgggcggtagcggcaggtcgagcttaacacgcctggcttcccacatggcagaatacgagtgtttccaaattgagctctccaagaattatggtatgagcgagtggagggacgatgtgaagaaagtacttctcaaagctggcctgcagaacctgcccatcacattcctgttttccgacacccagattaaaaacgagagctttctcgaggacatcaacaatgttctcaactctggtgacattcctaacctctataccgcagacgagcaggatcagatcgtgtctacaatgcgaccctatatccaagagcaggggctgcagccgaccaaagctaatctaatggcagcttatactggacgggtgcgcagcaacattcatatggttctgtgtatgtcccccatcggcgaggttttcagggccaggttgaggcagttcccatccctggtcaattgctgtactattgattggttcaatgagtggccagctgaggctctgaagtccgtcgctaccgtgttcctcaacgagattccggagctggaatcttcccaggaggagatccaagggcttatccaggtgtgtgtctatattcatcaatcagtaagcaaaaaatgtattgagtacttggccgaattgaccagacataactatgttacacccaagtcctatctcgaactcctgcatatttttagtatcctcatcggccagaagaaactagaactcaagaccgctaaaaaccgtatgaagagcgggctcgacaagctcttgcggaccagtgaggatgttgccaagatgcaggaggatctcgagtctatgcatccactgctggaagaagctgcaaaggatactatgctgaccatggaacaaataaaggtagacacagcaatcgcagaggaaacacggaactctgttcagacagaggaaataaaagcaaatgaaaaagccaaaaaggcacaggcaattgccgacgatgcccagaaggatctcgatgaggcattgccagctttggacgctgcgctcgcaagtctgcgcaatctgaacaaaaacgatgtgactgaagtccgagcgatgcagcggccacctcctggagtgaaactggttatcgaggccgtttgtattatgaaaggcatcaagcctaaaaaggtgcctggggagaaacccggaacaaaggtggatgattattgggagccaggaaagggtttgctacaggacccaggacactttctggaatctctgttcaagtttgataaggataatatcggggacgtggtgatcaaggctatccagccttacatcgataacgaggaattccaacctgctacaatagccaaggtatcgaaagcctgcacttccatctgccagtgggtaagggcgatgcataaataccattttgttgcgaaagccgttgagcccaagaggcaggcgctgttggaggctcaagatgatctgggagtaacacagcggattctcgatgaggccaagcaaaggttgcgggaggtggaggatgggattgccaccatgcaggccaaatacagggaatgcatcacgaaaaaggaagaacttgaacttaagtgcgagcagtgcgaacaaagactcgggagagctggaaagctgattaacggcctgtctgacgagaaagtgcggtggcaagaaacagtggagaatcttcagtatatgctaaataatatatccggggatgtgttagttgccgcaggctttgtggcatacctgggtcctttcacaggacagtatagaactgtgctgtatgattcatgggtgaagcaacttcgatctcacaatgttccccacacaagtgagcccactcttatcggaacactcggtaatcctgttaagatacggtcctggcagattgcagggctgcctaatgacacgctctccgtcgaaaatggtgtgattaatcagtttagtcagcgctggacacatttcatcgacccacaatctcaggccaataagtggatcaagaatatggaaaaagacaatggcttagatgtgtttaagttgtccgatagagactttctcagaagcatggagaacgccatccgttttgggaaaccctgcttgcttgagaatgttggagaggagctggaccccgctctggagcctgtgcttctgaaacagacctacaaacagcagggtaatacagttttgaagctgggcgataccgtgatcccctatcatgaggactttagaatgtacatcaccacgaagctgcctaacccacattatacgcctgaaatcagcacaaagcttacactgatcaacttcaccctgagcccaagtggactcgaagaccagttgttgggacaggtggtagccgaggagcgacctgacctagaagaggccaaaaatcagttgatcatttccaatgctaaaatgcggcaagagcttaaagatatagaggatcagattctctaccgccttagttcctcagaagggaatccagtggacgatatggagctgatcaaagtgctggaggccagtaaaatgaaggcggcagaaattcaggctaaagtgagaatcgcggagcaaaccgaaaaagatatcgatctgacccgaatggaatatattccggtggctatccgtacccagatactgtttttctgcgtttcggacctcgccaacgtggatccaatgtaccaatacagtctggaatggttcctgaacatcttcttatctggcattgccaatagcgagcgcgctgataatctgaagaagcggatctcaaatataaacagatatctaacatattctctctacagcaacgtgtgccgcagcctgttcgaaaaacacaaattaatgttcgcatttctcttgtgtgtgagaatcatgatgaatgagggcaagattaaccagagtgagtggcgctatctgttgagcggagggtctatttctatcatgaccgagaatcctgcacccgattggctctcagatcgagcatggagagacattctggcattatccaatttacccactttcagtagctttagttctgacttcgtgaagcacctgagtgagtttagggtcatatttgactccctcgagcctcacagagagcccttaccaggcatttgggaccagtacctggatcaatttcagaaactgcttgtgttgcggtgcttaagaggggacaaggttacaaatgcaatgcaggatttcgtcgccaccaacctagagccacgtttcatagaaccacagaccgcgaacttaagcgtggtgtttaaagactccaactcaaccacgccactaatctttgtacttagtccaggaacagatcccgctgccgacttatataagtttgcagaagaaatgaagttctccaagaaactgtctgctattagtctgggacagggtcagggacctcgagcagaagcaatgatgcgctcctcaatcgaacggggaaaatgggtgttcttccagaattgccacctcgcaccgagttggatgcctgcactggagaggctgattgagcatatcaacccagataaagtccaccgggacttccgcctgtggttgaccagcctcccatccaataagtttcctgtgagtatcttgcagaacggatccaaaatgacgatcgagcccccacgcggtgtccgagcgaacctgctaaagagctacagcagcctcggggaagattttctcaacagttgccataaggtgatggaatttaaatcactacttctttctctctgcctctttcacgggaacgctctggagcgccataagtttgggccactcggtttcaacattccatacgaatttactgacggcgatctcaggatttgtatatcacagctgaagatgtttttagacgagtacgatgacattccttacaaagtactgaaatatacggccggtgagataaactacgggggtcgtgttacagacgactgggacaggcgctgcataatgaatatcctagaggatttctacaaccccgatgttctgtcccccgagcatagctattccgcctctggtatctatcaccagattccaccaacctatgacctgcacggatatctgtcctacatcaaatcactccccctcaatgatatgccagagatcttcgggctccacgacaacgcaaacattactttcgctcaaaacgagacttttgcactgctgggcacgataatccaactgcagccaaagagttccagtgcgggttctcagggacgcgaggagatcgtggaagatgtaacgcagaatatcctgcttaaggtcccagagccgatcaacctccagtgggttatggcaaagtacccagttctttacgaagagagcatgaatacagtactcgtccaggaggtcattcggtataaccggttgttgcaagtcatcacacaaacattgcaggacctcctgaaggccctgaagggcctggtggtcatgagctcccagctggagctgatggccgcatctctctataacaataccgtgcccgagttgtggtcggctaaggcctatccctctctgaagcctctttcaagctgggtaatggatctcctgcagcggctggactttctacaagcctggatacaggacgggatacccgctgtgttctggatttccggcttcttttttccccaagcctttctcactggtactctccagaatttcgccaggaagtttgtcatctccattgacactatctcctttgactttaaggtcatgttcgaagcaccctctgaacttactcagcgaccacaggtgggctgttatatacatggcctattcctcgaaggcgctagatgggaccctgaggccttccagctggccgagtcacagcctaaagagctgtacaccgaaatggccgtcatctggctgctgcccactccaaacagaaaggcccaggatcaagatttctacctttgccccatctacaaaacactgacgcgcgctgggaccttgagtaccacgggtcatagtaccaactatgtcatcgcagtagagatcccaacccaccagccacagcggcattggatcaagcgaggcgtagcgctgatatgcgccctcgattactac

SEQ ID NO: 221420 - DNA, 13416 bp, synthetic construct
  misc_feature 1..13416: note = Description of Artificial Sequence: Synthetic coding sequence
  source 1..13416: mol_type = other DNA
atggtgccagaagaggtggaagtggaaattgacgagatccctgtgctctcggaggagggcgaggaggaggaagagacttattcccagaaggtcgagtccgtcgataaagtacgggctaaaagggtgagcctgagaaccgaaagcctcggccagccactcaatagggaagatgaagaaatggacaaggagatcagcgaaaaactcccctccaagcgcacagcaaaacacatcatggagaagatgcacctccacatgttatgcaccccccttcccgaagaatttctcgaccagaatgttgttttctttctgcgaaatacaaaagaggcaatctctgaggcgacagatatgaaggaggctatggagatcatgccagagacactggagtatgggattataaatgctaatgtgctgcattttctgaagaatattatctgtcaggtttttttaccggctctgtcttttaatcagcatcggacctctaccaccgtgggggttacaagcggagaggtgtctaattcatctgaacacgagtcagacctacctcctatgccgggagaagcagtggagtaccattcgatccagttaatcagagatgaattcctgatgaatgtgcagaaatttgcatcaaacatacagcgcactatgcagcaacttgaaggggagatcaagttggagatgcccattatcagtgtggagggggaggtgagcgacctcgcggctgatccagagaccgtggacatactggaacaatgcgttattaactggcttaaccaaattagcacagccgtggaggctcagctcaaaaagacaccccagggtaaagggcctctcgccgagattgagttttggagagaacggaacgctactctgagcgccttgcacgagcagactaagctccccatagtgaggaaggtattagatgttatcaaggagagcgatagcatgctggtggccaatctccaacccgtattcacagaattgttcaagtttcataccgaggcctctgacaacgtgagattcctgagtactgtggagagatacttcaagaacattacccatggcagcgggttccacgtagtgttggataccattcccgcaatgatgagcgccctgagaatggtgtggatcatctcacgccactataacaaggatgagcgaatgattccactgatggagcgcatagcctgggagatagccgaaagagtgtgcagggtggtgaacttgcgtacactgttcaaagaaaatcgcgcatcagcacagtctaaaacgctcgaagctcgcaatactttgcgattatggaagaaggcgtatttcgatactcgcgctaaaattgaagccagtggtagggaagacagatgggagtttgacagaaagcggctatttgaacgcaccgactatatggctacgatatgtcaggatctgtcagacgtgctgcagatcctagaagaattttacaacatttttggtcccgagttgaaggcggtcacgggggacccgaagcgtatcgacgatgtactatgtcgagtcgacggtcttgtaactccaatggaaaacctgaccttcgaccccttttctatcaaaagttcacagttctggaaatatgttatggacgagtttaaaattgaagtactaatagatatcattaataaaatttttgtgcagaacctggagaatccccctctgtataaaaaccaccccccagtagcaggcgctatttattgggagcgctccctgtttttcaggatcaaacacactattcttcgttttcaggaggtacaggaaatccttgattccgataggggacaggaggtcaaacagaaataccttgaggtgggaagaaccatgaaagagtacgaggaccgaaaatatgaacagtggatggaggtcacagaacaagtgctccccgcactgatgaagaaatcactgctgaccaagagtagtattgccactgaagaaccatccacccttgagcgcggtgccgtgttcgccattaattttagtcccgcactgagggaaatcatcaatgagactaaatatctggaacagcttggattcacggttccagagttggccagaaacgtggccctacaagaggacaaattcctcagatatactgcagggatccagagaatgctagatcattaccatatgctcatcggaaccttaaacgacgctgaaagtgtgctcctgaaagaccattcccaagagctgttgagagtattccgttccggttacaaaagacttaattggaatagtctcggcatcggagactacatcactggctgtaagcaggcgattggaaagtttgaatcccttgtgcaccagatccataagaatgctgacgatatatcctcccggttgactctgatagaagccatcaacctgttcaaatacccggctgcaaagagcgaggaggagctccctggtgtaaaggagtttttcgagcacattgagagagagcgggcaagtgatgtggatcatatggtgcgctggtacttagctatcggcccactactcacaaaggtcgaaggcctcgtcgtccatacaaataccggaaaagcacccaagctggcatcctattataagtactgggaaaagaagatctacgaagtcctcaccaagttaattctcaagaacctccagtctttcaattcgcttatcttgggcaatgtgcctctgtttcacacagaaaccatcttaactgctcccgagatcattctccacccaaacacaaatgagatcgacaaaatgtgcttccattgcgtcagaaattgtgttgaaattaccaagcacttcgtacgctggatgaacgggtcatgtattgagtgcccgccacagaaaggagaggaagaagaggttgtcattattaacttctacaacgacatcagcctgaatcctcagatcattgagcaggcggtgatgattccacagaatgtacacagaattttaatcaacctgatgaagtatctgcagaaatggaagagatacaggccactgtggaagctcgacaaggccatcgttatggagaagtttgccgctaaaaaaccgccatgcgtcgcttacgatgaaaagctgcagttctatagcaagattgcatacgaagtgatgcggcatcctcttatcaaagatgaacattgcatccgactccagctccgacatttggctaacaccgtgcaagaaaacgccaaatcttgggtcataagccttgggaaattgctaaatgagagcgctaaagaggagctctacaacctccatgaagaaatggaacacctcgccaaaaatctgcgaaaaattcccaacaccctggaagacttaaaattcgtgctggcaactatcgccgagatccgcagcaagagtttggtaatggaacttagatatagggatgtccaagagcggtataggactatggccatgtataatctgtttccaccagatgccgagaaagaactagtggataagatcgagtccatctggagcaacttgtttaatgacagcgtgaacgtcgaacatgccctcggcgacataaaaagaacttttacagaattgacgagaggcgaaattatgaattatagggtgcagatcgaagagtttgccaagcgattctactcggagggcccagggtcggttggggacgacctggacaagggagtagaactgttaggagtctacgagcgcgaactcgcacgccacgagaagtcgcgtcaagagctagcaaatgctgagaaactgtttgatctccctatcactatgtaccccgaactgcttaaggtccaaaaagaaatgagcggactccggatgatttacgagctctacgagggcctgaaggtggcgaaggaagagtggtcacaaacactctggattaatctgaatgtgcagatcctgcaagagggcatcgagggattccttcgggcactccgcaaactcccgagacccgtgcgcggtctgtctgtcacttattacctggaggcaaaaatgaaggcttttaaggactcaattccgcttctgcttgacttgaagaatgaggcgctgcgagaccgccattggaaagaactgatggagaaaacaagcgtgtttttcgagatgactgagacttttactctggaaaacatgttcgccatggaactccacaagcataccgacgtcttgaatgaaattgtgaccgcggcaattaaagaagtcgccatagaaaaggccgtcaaggaaattttggatacctgggagaacatgaagtttaccgtagtgaaatattgtaagggcactcaagagagaggctacatacttggcagtgtagatgagataattcagtccctcgatgataacacattcaacctacagagtatttctggatcccggttcgtgggccctttccttcagacggttcacaaatgggagaaaactctgagtctgatcggcgaagtcatcgagatctggatgcttgtgcagcggaagtggatgtatcttgaatccatcttcattggaggcgacatccgctcccagctacccgaagaggccaaaaaatttgataatatcgacaaggtgtttaagagaattatgggtgagactctgaaagaccccgtcattaaacgatgctgcgaggctcctaatcggcttagcgacttacaaaacgtaagtgaaggactggagaagtgccagaagtccctgaatgattatctggactcaaagagaaatgcgtttccacgctttttcttcatatccgatgatgaattgctgtcaattctcggaagctcggatcccctgtgcgtgcaggagcatatgatcaaaatgtacgataacatcgcttcccttcggttcaacgatggtgattctggggaaaagctggtgtccgcgatgatcagcgcagagggggaggtgatggagtttagaaaaattctccgagccgaggggcgagttgaggactggatgacggcggtcctgaatgaaatgcggcgtacaaaccggctgattactaaagaggctatctttagatactgtgaggatcgatctcgcgtggattggatgttgctgtatcagggcatggttgtgctggctgcctcgcaggtctggtggacgtgggaagtagaggatgtgtttcataaagcgcagaaaggggagaagcaggcaatgaagaactacgggagaaaaatgcaccgccagatcgatgagttggtcacccggatcactatgcccctttctaagaacgaccgaaagaaatataacaccgtgctcattatcgacgtgcacgccagagacatcgtggatagttttatccgagggagtatcttggaagccagagagtttgattgggaatcgcaacttcgcttttattgggaccgggagccagatgaactaaacattcgccaatgtacaggcacctttggctacggatatgaatatatgggtcttaacggccgattggtgattaccccactcacagacaggatctacctgactctaacacaggcccttagcatgtacctgggcggtgctcctgctggcccagcagggacgggaaagactgaaactactaaagacctcgcaaaggctttgggcctcctgtgcgtggttaccaactgtggcgagggcatggattaccgcgctgtgggaaagatcttcagcggtttggctcaatgcggtgcttggggatgtttcgatgaatttaatcggatcgatgccagtgtgttatcagtgatcagcagccaaatacaaacaattaggaatgccttgattcatcagctgacaacgttccagttcgaggggcaggaaatatctctggacagtcggatgggcatctttatcacgatgaaccccggatatgctggtcggacagaactgccggagagtgttaaagccttgtttcgccctgttgtagtgattgtacccgatctgcagcagatttgtgagattatgctcttttccgaaggcttcctcgaagctaaaaccctcgctaagaagatgacggttctgtataaattagctagagaacagctctctaagcagtaccattatgatttcggcctcagggcgctgaaatcggttctcgtgatggctggtgagctcaaacgaggcagcagcgacctcagggaggacgttgtactgatgagggccttgcgtgatatgaatttacctaagttcgtgtttgaggatgtgcctttgttcctgggcctgattagcgatctttttcccggtcttgactgtccacgcgttcgctaccccgactttaatgatgcggtcgagcaggtccttgaggagaatggctatgcagtgctgccgatacaggtggataaggtcgtgcagatgtttgagacaatgttgacacggcatacaacaatggtggtgggaccgacccgcggaggcaaatcggtcgttatcaataccctgtgtcaggcccagaccaaactgggcctgaccaccaaactttatattctgaatcctaaagctgtgtctgtgattgaactgtacggtatcctggatcccactacccgtgattggaccgacggagttctgtccaacatcttcagagaaatcaacaagccaaccgataaaaaggagcgtaagtacattctgttcgacggcgacgtggatgcgctgtgggtggaaaacatgaactcggtgatggatgataatcgtctgctcactctcgccaacggggaaaggattagattgcaggcacactgcgcccttctgtttgaggtcggagatttacagtatgctagccccgcaacggtcagtcggtgcgggatggtgtatgtggatccaaagaacctcaaatacaggccctattggaaaaaatgggtcaaccagatacccaataaggtggaacagtacaacttaaactcactctttgagaagtacgttccatatctcatggatgtcattgtggagggaatagtggacggccgtcaggcagaaaagctgaaaacaatcgtcccacagactgacctgaatatggtgacgcagctggccaagatgctggacgctctcttggagggggaaattgaagacctggatctactagagtgctacttcctggaggcactctactgttctcttggggcatccctgctggaggatggtcgcatgaaattcgatgagtacatcaaaaggctggccagcctctctactgttgatactgaaggagtctgggctaatccaggggagctgcctggccagcttcccaccctgtacgattttcacttcgacaataagcggaatcaatgggtgccctggagtaagctcgtgcctgagtacatacacgccccagagcgcaaatttatcaacatcctagtgcacaccgtggatacaacgagaactacctggattctcgaacagatggtaaagataaagcagccggtaatctttgtgggtgagtcagggacgtcaaaaactgcaactacccagaacttcttaaaaaacctgagcgaagagacaaatatcgtgctgatggtgaacttctcttcacgaaccacatcaatggacatccagaggaacctggaggccaacgtagaaaaacggactaaggatacctacggcccacccatgggaaaacgattgcttgtgttcatggacgatatgaatatgccgagagttgacgagtacggcacccaacaaccaatcgctctgctgaagctgctcctggagaagggttacctgtacgatcgcggaaaggagctgaattgcaaaagcatacgtgatctaggctttatagcggcaatgggtaaggcgggtggcggacggaacgaggtggatcccagatttattagtctgttctcagtttttaatgtgcccttcccttccgaagaaagcctgcacctgatttactcctcaatactgaaaggccatacatcaacgtttcatgaatccattgtcgcggtgtcaggtaaattaactttctgtactttggctttatacaaaaatattgtgcaggatttgccacctaccccctccaagttccactacatcttcaacctgcgcgacctgtctcgtgtcttcaatggcctggtgctaaccaaccctgagagattccagacagttgcccaaatggtgcgcgtctggaggaacgaatgtctcagggtgtttcacgaccgacttattagcgaaaccgacaaacagttggttcagcagcatatcgggtctttggtagtggagcatttcaaagacgacgtggaagttgtcatgagagatccaattctcttcggagattttcaaatggcccttcacgagggtgaacctagaatttacgaggacatccaggattatgaggccgctaaggcgctgtttcaggagattctagaagagtacaacgagagcaacacaaaaatgaacttggtgctttttgacgatgcccttgaacacctgacgagggtgcaccgcatcattaggatggatcgtggtcatgccttgctggtcggggtgggcggttctggcaagcagagcttatccagactggcagcctttactgcctcttgcgaggttttcgagatactcctctcccgaggatactccgagaattcctttcgagaggatctgaaatctctgtatctgaagctgggcatcgagaataaagccatgatatttctcttcaccgatgcccacgtcgcagaggagggattcctagagctgatcaacaatatgctgacaagtggaattgtgccggcactgttcagcgaagaagaaaaagagtccattctgtctcagattggtcaggaggcactgaagcagggaatgggcccagcaaaagagtctgtctggcagtactttgtcaacaagtcagcaaacaatttgcacatcgtgctggggatgtctcccgtcggcgataccttacgaacttggtgccggaatttccctggcatggtgaacaatacaggaattgactggtttatgccttggccacctcaggcccttcatgccgtcgctaagagctttctgggctacaaccccatgataccggcagagaatattgagaatgtagttaaacatgttgtcctggtgcaccaatcggtggaccactactcacagcaattcctccagaaactaagacgcagcaactatgttacaccaaaaaactacctagattttattaatacatacagtaagctcctggatgaaaaaactcaatgtaacattgctcagtgcaaacggctggatggaggactagacaagcttaaagaagcaaccatacagctggacgagctcaatcaaaaacttgccgagcagaaaattgtgctagcagagaagagcgctgcatgtgaagctctgctggaagagatagccgtcaacactgcagtggctgaagaaaagaaaaagttggccgaggagaaggctatggaaatcgaggaacaaaataaggtcatcgccatggagaaggcagaggctgagaccacgctcgccgaggtcatgccgatcctcgaagctgccaagctggaactgcagaagctagacaagtctgatgtgacagaaatcaggtctttcgctaagcctcctaagcaggtgcaaaccgtctgtgaatgcatcttgattatgaagggatataaggaactcaattggaaaacagcgaagggggttatgtcggacccaaattttttacgttctttaatggagatcgattttgacagcatcacacagtcacaagtaaaaaacataaagggactcctgaagaccctcaataccactaccgaagagatggaggcggtgagcaaggcgggactgggcatgctaaaatttgttgaggccgtcatggggtattgtgacgttttcagagagataaaaccaaagcgcgagaaagtcgcacgcctcgaacgcaatttctaccttactaagagagaacttgaacgcattcagaacgagctggcagctattcaaaaagagttggaaacactgggtgccaagtacgaggctgctatcttggaaaaacagaagctgcaggaggaagctgagattatggaaagacgcctaattgccgcagacaaacttatatctggcttgggatctgaaaacattagatggctgaatgacctagacgaattaatgcaccgccgtgtgaaattgcttggcgactgtctattgtgtgcagccttcctcagctacgagggtgccttcacttgggagtttcgggacgagatggtcaataggatctggcagaatgatatcctggaacgagagatcccgctgtctcaaccatttagacttgaaagcctcttaacagacgacgtcgaaatatcccgctggggcagccaggggctgcccccagacgagctatccgtgcagaatgggatcctgactactcgtgcgagccgcttcccgttgtgtattgaccctcagcaacaggctctgaactggattaaaagaaaggaggaaaagaacaacttacgagtcgcaagctttaatgatcctgattttttgaagcaactcgagatgagtataaagtacgggaccccttttctcttcagggatgtggacgaatatattgatccagtgatcgacaacgttcttgagaaaaatatcaaggtttcccagggtaggcagttcataattttgggagataaggaagtggattatgattcaaacttcagattgtacctgaacacaaaactggcgaacccacgatattcccccagcgtcttcggaaaggccatggtgatcaactataccgtcaccctcaagggattggaggaccaactgcttagtgtccttgtcgcctacgagaggagagagctcgaagagcagagagagcacttgatccaagaaacatcagaaaacaagaatctactgaaggacctggaggacagtctcttaagagagcttgccacaagtaccggtaacatgctggataatgtggacctcgtgcatacattggaagagaccaaaagtaaggctactgaagtttcagagaaactgaagctagccgagaagacagccctggatatcgaccgtctgcgggatggctaccggcctgcagctcgcaggggggctatactgttctttgtgctgtccgagatggctctcgtgaattcaatgtatcaatattcgctgatcgcctttttagaagtcttccgtctaagtctcaagaagagtttgccggactccatcttgatgaagcgtcttagaaacatcatggacacgttgaccttcagtatctataaccacgggtgtaccggcctttttgagcggcacaagctcctattctctttcaatatgactatcaagattgaacaggccgaggggcgtgtgccccaggaggagctggatttctttctgaaaggcaacatatcactggaaaaaagcaaacgcaagaagccatgcgcttggctttccgatcaaggatgggaggatattatccttctgtctgagatgttctccgacaatttcgggcagctccccgacgatgtagagaacaatcaaaccgtttggcaggagtggtacgatctggacagcctagaacagttccctgttccgcttggctatgacaacaatatcacaccattccagaagctgctgattctgcgatgcttccgtgtcgatcgagtgtaccgggctgttacagattacgtgactgtgacaatgggggaaaagtacgtccagccaccaatgatttcctttgaggccatctttgagcagtctactcctcactctcctatcgttttcattctgtccccaggatcagacccagcaacagatctgatgaagctggccgaaaggtctggttttggcggaaaccgactcaaattcctcgcaatgggacaaggacaggaaaaggttgctttgcaacttctcgaaacggcagtggcccgtggtcaatggctaatgttacaaaactgtcacctgttggtcaagtggctgaaggacctggaaaaaagcctggagaggattaccaagccccaccctgacttccgcctttggctaaccactgaccccaccaagggatttccaattgggattttgcaaaagtccctgaaggttgtaacggagcctcccaacggactgaagcttaatatgagagccacatattttaagatctcacatgaaatgctggatcagtgcccccatccagccttcaaacccctcgtctacgttctcgcctttttccacgccgtggtacaggaacgaaggaaattcgggaagatcggttggaacgtctattatgactttaacgagtccgatttccaggtgtgtatggaaatcctaaacacttaccttaccaaagctttccaacagcgcgatccccgaattccatgggggagtcttaagtatctgattggtgaagttatgtacggcggaagagctattgacagtttcgaccgtcgaatattgaccatctacatggacgagtatttgggagatttcatctttgatacgttccagcccttccatttcttccgcaataaagaggtcgactacaagatacctgtgggcgacgagaaggagaagtttgtggaggcaatagaagcattgcccctggccaatacacccgaagtttttggtctgcatccaaacgccgaaatcggatactatacacaggctgccagggatatgtgggcccaccttctcgagttacagcctcaaacaggcgaatcttcttctggaatttcacgggatgattatatcggccaggttgctaaggaaatcgagaataagatgcctaaggtgttcgacttggatcaggtgcgcaagaggctgggtacaggccttagtccgacttcagttgtgctactgcaggagctggagcggtttaataaactcgttgtgaggatgacgaagtccctggctgagctccagcgggctctagccggagaggtcgggatgtcaaacgaactggacgacgttgcccgatcgctgttcattggtcatatccctaatatctggcgtcgtctcgcccctgatacgctaaagagccttggaaactggatggtgtacttcttgcggaggttctcacaatacatgctgtgggtaactgagtctgagcctagcgtcatgtggctgagtggactgcatattccagaaagctacctaacagcacttgtccaggcgacgtgtcgcaagaatggctggcccctggacagatcgaccctctttacgcaggtcaccaaatttcaggacgcagacgaagttaatgagcgagccggacaaggctgttttgtttccggtctctacctggaaggagccgattgggacatcgaaaaggggtgtttgattaaatccaaacctaaggtgcttgtcgtagacctgcccattctcaagatcatacctattgaagcacataggttgaaactacaaaatacttttagaacacccgtgtatactacctctatgagacgaaacgctatgggggtcgggctcgtatttgaggctgatctcttcactaccagacatatctctcactgggtgctgcagggggtgtgtctcacacttaacagtgattac

SEQ ID NO: 221421 - DNA, 13572 bp, synthetic construct
  misc_feature 1..13572: note = Description of Artificial Sequence: Synthetic coding sequence
  source 1..13572: mol_type = other DNA
atggccgcacaggtggctgccagagaggccagggacttcagggaagcacctactctgaggttgaccagtggcgctgggctggaggcagtgggcgctgttgaactggaggaggaggaggaaaatgaggaggaggccgcagcacgcagggcgagaagcttcgcccaggacgctcgcgtaaggtttttaggtggaagactggctatgatgctaggattcaccgaggagaaatggagccagtacctggagtccgaagacaaccggcaagtgctgggagaattcctggaatccacctcccctgcttgcctcgttttttcattcgccgcatctggaagactggccgctagtcaggaaatacctagggatgctaatcacaaactggtgtttatctcaaagaaaattacagaaagtatcggagtgaacgacttttcccaggtggtgctgttcggagagctgcccgcattgagtctcggccatgtgagcgctttcctggatgagattcttgtgcctgtactctctaacaaaaataatcacaaatcctggtcttgtttcaccagccaagacatggaatatcacatcgaggtcatgaagaagaaaatgtatatattccggggaaaaatgtccagacggacgttactccctattcctaccgtagccggaaagatggatttggaccaaaactgttccgaaaacaaacctccttcgaatgagcgaataatcctccacgccatcgagtccgtcgtgattgaatggtctcatcagatccaggagattattgaaagggattcggttcagcgtcttttgaatggactgcatttaagtccccaggctgagctggatttttggatgatgagacgagaaaatctgagctgtatctacgaccagctccaggccccagtcgtcttgaagatggtcaagattttaactaccaagcagagttcctacttccccaccttaaaggacatttttctcgcagttgagaatgcactgttagaggcgcaggatgtggagctgtacctgcgccctctgcgcagacacatacagtgtctgcaggagaccgagtttccacagactagaatcctgatcgcccctcttttccataccatatgcctgatatggtcccactctaaattttataacacaccagctcgagtaatcgttctgctgcaggagttttgcaacctatttattaaccaggctaccgcctatctatcacctgaggatctgctgagaggcgagatagaagagagtctggagaaggttcaggtagccgtaaacattctgaagactttcaagaatagcttcttcaattatcgtaagaagcttgcatcctacttcatgggcagaaaactgcgaccctgggatttccaaagccatttggttttctgtaggttcgataaatttctggaccggctaatcaaaattgaagatattttcgctacaacgctggaatttgagaagctcgagcgcctggaattcggcggaaccaaaggggctatcctaaatggacaagtccatgagatgagcgaggagttaatggaactatgcaagctttttaagcaatctacgtacgatccatcagattgtaccaatatggagtttgaatccgattatgtggcatttaagtctaagacactggaattcgatcggaggctcggcactattatctgcgaggcattcttcaactgtaacggcctggaggccgctttcaaactacttaccatttttggaaacttccttgagaaaccggtcgtaatggaaattttctccttgcactactccacactggttcatatgttcaatacagagctcgatgtatgtaaacagttatacaatgagcacatgaagcagatagaatgcgggcatgtggtgctgaacaaaaatatgcctttcacctcaggaaatatgaaatgggcgcagcaagtgctgcaaagattacagatgttctggtcgaactttgcaagtttaaggtacctttttctgggaaatccagatcatgctctggtgtatcagaaatatgttgagatgaccacacttctggatcaatttgaatccagaatctacaacgagtggaagtcaaatgtcgacgagatttgtgaatttaacctgaaccagccattagttaagtttagcgccattaatggcctgctgtgcgtcaattttgatcccaagctggtcgcagttctccgtgaggtgaagtatcttcttatgttaaaaaagcaggacatccctgacagcgcgctggccatctttaagaagcggaacaccattcttaaatatattgggaatcttgatcttttggtgcaggggtacaataagttgaagcaaaccctccttgaggtagaatatcccttgatcgaagatgaactgcgggctatcgacgagcagctaaccgctgcgaccacatggctgacctggcaggacgattgctggggctacattgagcgtgtcagagccgcaaccagtgaactcgagcaccgtgtcgaacgcacccagaaaaatgtgaaggtgatccaacagaccatgaggggctgggccaggtgcgtgctcccccctcgcagagagcaccgcagagaggcagctttcactctggaggataagggcgacctctttactaagaaatataagctgatccagggtgacggatgtaagattcacaacctggtggaggaaaataggaagctctttaaggcaaatccaagcctagatacctggaaaatctacgtggaattcatcgacgacatcgtggttgagggctttttccaagcaatcatgcacgatctggatttctttctgaagaacaccgaaaagcagctgaaaccagcaccattcttccaagcccaaatgatcctcctcccacctgagattgtgtttaagccgtctctagatcgtgaagccggtgacgggttctacgatcttgtcgaagaaatgctttgcaactcgtttcggatgagcgcccagatgaaccggatcgccacccacctggaaattaaaaattaccaaaatgatatggacaacatgctggggttggccgaagtcagacaggagatcatgaatagggtcgtgaacgtcattaacaaggtgctggactttcggaacaccctggagacacatacatatttgtgggtcgacgaccgggcagagttcatgaaacacttcctcctatacggtcacgctgtctcctcggatgaaatggatgcacacgcaaacgaggagatccctgaacagccccctaccctggaacagttcaaagaacagatcgatatctacgaagctctgtacgtccagatgagtaaatttgaggattttagggtcttcgactcttggttcaaagttgacatgaagccatttaaagtgtcccttctcacaatcatcaaaaagtggagctggatgtttcaggaacaccttctgagatttgtgattgattcactcaacgagctccaggaattcatcaaggagaccgactccggtctgcagcgggaactcaatgaaggcgatcacgacggtctcgtggatatcatggtgcacttgctcgctgtcagaagccggcaacgggctaccgacgagctattcgagcccctgaaagagactatcacactgctggagtcctacgggcagaaaatgcctgaacaggtgtacatccagctggaggagctccccgagaggtgggagaccactaagaagatcgctgctacggtaagacacgaggtgagccccttgcacaacgccgaggtaactctcatcagaaagaagtgtattttattcgacgctaagcaggccgaatttcgtgagcgattccgtcattatgcccctctcggtttcaatgctgaaaacccttatactgctctggacaaagcaaatgaagagctggaagcactggaggaggaaatgctccaaatgcaagaatcgacccgtctgtttgaggttgccctcccagaatacaaacagatgaagcagtgtcggaaagaaatcaaactgctcaagggcctgtgggacgttattatctatgttcgacgttccatcgacaattggaccaaaacacagtggcggcaaattcatgtcgaacagatggatgttgaattgagacgctttgctaaggcatcctctattacagagatctggagtctgaataaagaggttcgagtgtgggacgcatataccgggctggaaggtaccgtgaaggacatgaccgccagcctcagggccattactgagctgcagagtcccgctttaagggatagacattggcaccaattgatgaaggcaattggggtgaagtttctaatcaacgaagccaccactctggctgatctcctggccctgaggttacatagggtcgaggatgacgtgcggaggatagtcgacaaggctgtgaaagagctcgggactgagaaggtgatcactgaaatcagtcagacctgggctacaatgaagttcagttatgaagttcactacaggactggaattccactgttaaagagtgatgaacagttgttcgagacactggagcacaatcaggtgcagctgcaaacactattgcagtccaagtatgtggagtattttatcgaacaggtgctcagttggcagaacaaactgaacatagctgacttagtcatttttacatggatggaagtgcagcggacttggtcccacctagagagcatttttgtctgcagcgaagatatcagaatacagttagtcaaggatgcgagacgattcgacggagtagatgcggagttcaaggagctgatgttcaaaacagccaaagttgagaacgtgctcgaggcaacctgcagacccaatctttatgagaagctaaaggatctgcaaagtcggctgtccctgtgcgagaaggcactcgcagagtatctggaaaccaagcgcattgctttccccaggttttacttcgtctctagcgctgatctgctggatatcctctccaagggcgcacaacccaagcaggtgacctgtcatctggcaaagctctttgactcgattgcagatttgcagtttgaggataaccaggatgtgtcagcccacagagctgttggcatgtactccaaagagaaagaatatgttcccttccaggccgagtgtgagtgtgttggccatgttgaaacctggctcctccaactggagcagaccatgcaggagaccgtgaggcattctataactgaggctattgtcgcctacgaagagaagccaagggagttatggatctttgacttcccagctcaagtggctctcaccagctcacagatttggtggaccaccgatgtggggatcgcttttagccgccttgaggagggatacgaaacagctctgaaagactttcacaaaaagcagatctctcagttgaataccctgattacactcctgctaggggaactgccacccggtgatagacaaaaaatcatgaccatctgtaccatcgacgtccacgcccgtgacgtggtcgctaaattgatttcacagaagcaggttgtcgtttctccacaggcattcacgtggttgagtcaactccgacatcgatgggaagacacacagaagcactgcttcgtgaatatctgtgatgcacagttccaatatttctatgagtacctcggcaattcacccaggctggtgatcacaccccttacggaccgctgttatataactctgacacagagcttgcacctgacaatgtctggcgctccggcaggacctgccggtacaggcaagacagagaccactaaggacctcgggagggcgctgggtatgatggtttacgtattcaactgtagtgaacagatggattataagtcaataggcaacatatacaaaggcctggtgcagacaggagcctggggatgtttcgacgaattcaaccggatcagtgtcgaagttctctccgtggtggcagtccaggtaaagatgattcacgacgcgattaggaacagaaaaaagcgcttcgtgttccttggagaagctatcactctcaagccatccgtgggaatctttattaccatgaaccccggttacgccggtagaactgagcttccagaaaacctgaaagctctgttcagaccctgtgcaatggtcgcccctgacatcgagctaatttgcgaaatactgttagtggctgagggattcgttgacgctagggcactggctcggaaattcatcacactgtacactctgtgcaaagagctgcttagtaaacaggaccactatgattggggacttcgagcaatcaaatctgtgcttgtagtggcaggatctctgaagcgtggcgataagaacaggccggaggaccaggtcctgatgcgcgctttgcgcgacttcaacatgcccaagatagtgacagacgacatacctgtgttcctggggcttgttggtgacttattcccagccctggacgttccacgaagacgaaagttgcattttgagcagatggtgaggcagagcacactggagcttaggttacaaccagaggaatcatttatacttaaggtagtccagctggaggagctcttggcagtccggcatagcgtttttgtggtcggtaacgcaggcacggggaagtccaaaatcttgcggactttgaatcgcacctacgtaaatatgaagcagaagccagtgtggaatgacctgaaccccaaagccgtcacaacagatgagctgttcggatttatccaccatgccactcgtgaatggaaagacggaaaaatcgtgtactcgtacttcatagggctgttcagctccatacttagggagcaggctaaccttaagcacgacggcccaaaatggatagtacttgacggggatatcgaccctatgtggattgaatctttaaacacagtcatggatgataacaaggtgttgactctggcctccaacgagagaatagccttgactccctttatgcggctgttgttcgagattcaccatctgcgaagcgccacgcccgctacagtcagccgtgctggtattctctacgtgaacccccaggatctgggctggaacccttatgttgcttcttggatcgacagaaggaggcatcagtccgaaaaagctaacctcacaatcttattcgacaaatatgtgccagcttgcctggacaaactgaggactagttttaaaacgataacaagtatacccgagagttctcttgttcaaactctgtgtgtgctcctcgagtgtttattaactccggaaaacgtgccttctgactccccaaaagaggtttacgaggtgtactttgtgttcgcatgtatttgggctttcggagggacacttctgcaggatcaaatcagcgattatcaggccgacttttcgcggtggtggcagaaagagatgaaagcagtaaaattccccagccagggcaccatatttgactactacgtggaccacaagactaagaaactgctgccctgggccgacaagatagctcagtttacaatggatccagacgtgccgctgcagacggtgttggtgcataccacagagactgcccgactgcgctattttatggaactgctgttggagaaggggaagccgttgatgctcgtagggaacgcaggagtcggtaaaactgtcttcgtaggcgatacactagcctccctctctgaagattatatcgtgtcccgtgttccatttaactactatacaacatctactgccctgcaaaagatcctggaaaaaccactggagaaaaaggctgggcataactacggcccaggcggaaataaaaagctcatttattttatagacgatatgaatatgcccgaggtggatctgtatggaaccgtgcagccccatacgttgatacgccaacatatcgactacggtcactggtacgacaggcagaaggtcatgcttaaggagattcacaactgtcagtatgtcgcttgcatgaacccaatggtgggttctttcacaatcaacccccgtctccagaggcactttacagtatttgcttttaacttcccaagtctcgacgctctgaataccatttacggccagattttctccttccacttccagcaacaggccttcgctcctagcatcctgcgatccggccctacactgattcaggctaccatcgcatttcatcaaactatgatgtgcaactttctgccgacagcgataaaattccactacatctttaaccttcgcgatctgtccaatgttttccaaggtatcttatttgcctctcctgagtgcttgaaaggacctctcgacctgattcacctttggctccatgagagcgctcgggtgtacggcgataaactgattgataagaaagattgcgacttatttcaacgtaggatgctggaaacggcctataagtacttcgagggaatagatagtcacatgctgcttcaacagcctcttatatattgtcatttcgcagataggggtaaggatcctcactacatgcctgtcaaagactgggaagtgctgaaaacaattctcaccgaaacactcgacaattacaatgaattgaatgccgcaatgcaccttgtcctcttcgaggatgccatgcagcatgtgtgcagaatctcaaggattcttaggacaccacagggctgtgcccttcttgtcggagtgggcggatcaggaaagcagtctttgtcccgcctcgccgcatacctgaggggcctggaagtgtttcaaataacactgactgagggttacggcattcaggagctgcgggtcgatctcgccaatctttacattagaactggcgctaagaatatgcctacagtgtttttgctcaccgacgcgcaggtgctggacgaaagtttcctggttctcattaacgatcttctagcatctggggaaatccccgacctgttcagcgatgaagacgtggataagatcatttcagggatccacaacgaagtgcacgcactggggatggtggactccagagaaaactgctggaaattctttatggctagggtgcgccttcaactgaaaataatcctgtgcttcagcccagtaggcaggactttacgtgtgagggccaggaaattccccgctattgtgaactgcactgcaatagattggtttcacgcttggccgcaagaggccctggtgtccgtgtctcggagatttattgaagaaacaaagggcatcgaaccagttcacaaggacagtatctcactattcatggctcatgtgcacaccacggtgaacgaaatgagcacccgctactaccagaacgagaggaggcacaattacaccacccccaagtcgttccttgagcagatttccctatttaaaaatctcctcaagaaaaagcagaatgaggttagtgaaaagaaggagagactggtcaacggtattcaaaaattaaaaactaccgcttctcaggtgggggacctgaaagccaggttagcgagccaggaggctgagttacagctgcggaaccacgacgcagaagccctgatcaccaaaattggcttgcagacagaaaaggtctccagagaaaagactatcgccgacgccgaagagaggaaagtgaccgccattcagacagaggtattccagaaacaaagggagtgtgaggcggatctgttgaaggcagagccagcgctcgtggctgccacagccgcactcaatacactgaatagggtcaatctgagtgagctaaaggccttccctaacccacccatcgccgtcactaatgtcacagcagcagtcatggtcttactggcccctcgcggacgcgtgccgaaagacaggtcctggaaggctgccaaggtattcatgggcaaagtggatgactttctccaggccctgatcaactacgacaaggaacatatccctgagaactgccttaaagtcgtgaacgaacattatctgaaggatcctgagttcaaccctaatttgatcagaactaagagctttgccgctgcagggctctgtgcctgggtcatcaacatcattaaattctacgaggtgtattgtgatgtggaacccaaaaggcaggcgcttgcgcaggctaatctggaactcgctgccgctacagagaagctcgaggctattcgaaaaaaactggttgatctggaccgaaacctgagccgcctgaccgcttccttcgagaaggcaaccgccgaaaaggttcggtgtcaggaagaggtaaaccagacaaataagactataaaactggcaaaccggttggtgaaggaactggaagcgaaaaaaatcagatggggccagtcaatcaagagcttcgaggcgcaagaaaaaaccttgtgcggtgatgtacttttgacagcggcattcgtttcctatgtcggaccattcactcgacaataccgccaggaactggttcactgtaaatgggtccccttcctgcagcaaaaggtgagcatccctctgaccgagggactcgacctgatttcaatgctgacagatgatgctactatcgcggcttggaacaatgagggcttaccaagtgatagaatgagtaccgaaaatgcggcaattctcacccattgtgaacgttggcccctcgtcattgacccacagcaacaggggatcaaatggatcaagaacaagtacgggatggatctgaaagttacacatctggggcagaagggcttcttgaatgccattgaaacagccctggctttcggcgatgtgatcttaatagagaacctggaagagaccattgaccccgtgctggaccctctcctgggtcgcaacaccattaagaaagggaaatacatccgcattggggacaaagaatgtgaattcaacaaaaactttagattaatccttcacacaaagctggcgaatccgcattataagccagaactgcaggcccagactaccctgctaaacttcactgtgacagaagatgggcttgaggcccagctgctcgctgaggttgtctcaattgagcgcccagatctggagaagctcaaactagttcttactaaacatcaaaacgatttcaagattgagttgaagtacttggaagatgacctgcttcttcggctctcagcggcagaaggatccttcctcgacgacacaaagctggtcgagagacttgaagccacgaaaactactgtggccgagatagagcacaaggtgatagaagccaaggagaatgagcgaaaaatcaacgaagctcgcgaatgttatcgaccggtggctgcccgagcaagcttgctttacttcgtgataaatgacctgcagaagattaacccactctaccagttcagcctcaaagctttcaatgttctgtttcatagagctatcgaacaagctgacaaagtggaagatatgcaaggccgaatttctattctaatggagtcaattacacacgcagtttttctgtacacttctcaagcactgttcgagaaggataagctgacgttcctgagtcagatggcttttcagattttgttaagaaagaaggaaatagatccactggaattggacttcctgctccgctttactgtggagcacacgcatctgagcccggtggactttttgacctctcagagctggagcgctatcaaagccatagccgtcatggaggagttcaggggcattgacagggatgtcgagggctctgctaagcagtggaggaagtgggtcgagtctgaatgtcctgaaaaggagaaattaccgcaggaatggaagaaaaagagccttattcaaaagcttatccttctacgagctatgcggcctgaccggatgacatacgctctgaggaatttcgtggaggaaaagctgggcgcaaaatacgtcgagcgtactaggctggatttggttaaggctttcgaagagagcagtcccgcaacccccatcttctttattcttagtcctggggtggacgcactgaaagatctggagattctcggaaaacggttgggcttcaccatcgatagtggtaaatttcataatgtgtctctggggcagggccaagagaccgtggccgaagtggctctggaaaaggcatcaaaggggggacattgggtcattctacagaatgtacatcttgtagctaagtggttggggacgcttgaaaaactgctggaacgcttcagccagggtagtcatcgagattaccgagtattcatgtcagccgaatctgccccaactcccgacgaacatatcataccccagggcctcctcgaaaacagtattaagattaccaatgagcctcctactggtatgctcgcaaacctgcatgccgcactctataacttcgatcaggacacactcgaaatctgcagcaaagagcaggagttcaagtctatcctcttttccctttgttattttcacgcctgcgtggccggacggttgcggtttggccctcagggctggtctagaagctaccctttcaatcctggggatttgaccatttgcgccagtgtgctgtataattatctagaggctaacagtaaagttccgtgggaggatttgcgctacctgttcggagaaattatgtatggaggccacatcaccgatgactgggatagaaaactctgccgcgtttaccttgaggaattcatgaaccctagccttacagaggatgagctcatgttggcacccggttttgctgcccctccgtatctggattatgctggctaccaccagtatatagaagagatgctgccccctgagtctcctgccctctacggtctccatcctaacgccgagattgagttcttgactgttacgagcaatacactgttccgcacccttttggaaatgcagcctagaaatgccctatcgggcgatgagcttgggcagagtaccgaggaaaaggtcaaaaatgtgcttgatgacatcctagagaagcttcccgaggaatttaacatggccgagattatgcaaaagaactcaaataggtctccatacgtgcttgtctgcttccaggaatgcgagcgaatgaacattctaatccgggagattaggataagcctcgagcagctagacctctccctcaaaggtgaactcgcgctgtctcctgctgtggaagcgcaacaattcgcactctcctacgatacagtgccagacacctggagtaaactggcataccccagcacctatggtttggcccagtggttcaatgatttacttttacggtgcagggagctcgatacctggactcaagaccttaccctgcccgctgtggtgtggttaagcggcttcttcaacccacagagtttcctgaccgccattatgcagaccatggccagaaagaacgagtggccactcgataagacccggcttacagccgacgtgactaaaaagacgaaggaagattatggacatcctcccagagagggtgcatatttgcacggcttgttcatggaaggcgctcgatgggacactcaagccggtacaattgttgaagcgcgactgaaagaacttgcctgccccatgcccgttatcttcgcaaaggctacaccagttgacagacaggaaaccaaacagacgtacgaatgtccagtataccgcacaaagctgcggggaccttcctacatctggactttcagactaaagtcagaagagaagactgcaaagtgggtcctcgctggagtggccctgctgctagaggcctac

SEQ ID NO: 221422 - DNA, 1374 bp, synthetic construct
  misc_feature 1..1374: note = Description of Artificial Sequence: Synthetic coding sequence
  source 1..1374: mol_type = other DNA
atgagcgacgccaataaggcagccattgccgctgagaaggaagccctgaacctgaagttacctccaatcgttcaccttcctgaaaatataggggttgacactccaactcaaagcaagctgctgaagtaccgccgttctaaggagcagcagcaaaaaatcaatcagctcgtcatcgatggcgctaaaagaaatttggatcggactctgggtaagcgcactcctctattgcctcccccagattatccccaaacaatgaccagtgaaatgaagaaaaaaggttttaattatatctatatgaagcaatgcgtcgagtcatcaccgctggtgccgatccagcaggagtggttagatcacatgctgcgtctgattccagagtccttaaaggaagggaaggagcgcgaagagcttctggaatcgctgattaacgaggtttccagtgatttcgagaactcaatgaaaagatacttagtgcagagtgtgctggtcaagcctccagtcaagtcactggaagacgaagggggtcccctacctgagtcgcctgtggggctggactactctaacccttggcatagctcctatgtgcaggcgaggaatcaaatcttctctaatctgcacattatccatccgacaatgaagatgctgctggacctcgggtatacgactttcgccgacacagtccttctagacttcacaggcattagagctaaagggcctattgactgcgagtctttaaagaccgacctgtcaattcagacccgaaatgcagaggagaagatcatgaatacatggtatcccaaagtcatcaacctgtttacaaagaaggaggccctcgagggagtgaagccggagaagctcgatgccttttatagctgtgtgtccaccctgatgtcaaatcagctaaaagatttgctccgacgcaccgtggaaggcttcgtcaagttgtttgatcctaaggatcagcaaagactacccatcttcaaaattgaactaaccttcgacgatgacaagatggagttttaccccacgtttcaggacttggaagataatgtgttgtcactggtcgaacggattgccgaagcactgcaaaacgtccagactattccctcctggctgtctggtacgtctacccctgtgaatctggacactgagttgcccgagcacgtgctgcactgggccgttgataccttaaaggctgccgttcacaggaatctcgagggtgctcggaagcactacgaaacatatgtggaaaaatacaactggcttctcgacgggactgctgtggagaacatcgagacatttcagacagaggaccacaccttcgacgagtatactgaggagctggactgctgggtagtatgggaagtctatttttag

SEQ ID NO: 221423 - DNA, 2040 bp, synthetic construct
  misc_feature 1..2040: note = Description of Artificial Sequence: Synthetic coding sequence
  source 1..2040: mol_type = other DNA
atgttccttctgacgggtggtgtgtctctgaaatcagcagaaaaaaacccagatcccacctggctccaagataagtcttgggaggagatatgtcgcgcttctgagttccccgcattccgtggtctgcgccagcacttctgtgaacacatctatgaatggagggagatctacgactcaaaggagcctcacaacgcgaagttcccagctccaatggataaaaacctgaatgaactccagaagataatcatacttcgatgcttgaggcctgacaaaattaccccagcgattaccaattatgtgacagacaagctgggtaaaaaatttgtggaaccgccaccattcgacttgactaaaagttacctggactcgaattgtactattccacttatcttcgttctttcaccaggcgcagaccccatggcctcccttcttaagtttgctaatgacaaatctatgtccggcaacaagttccaggctatatcgctagggcaaggacagggccctattgccgctaagatgatcaaagcagctatagaagagggaacctgggtgtgcttacaaaattgccacttggctgtgtcctggatgccgatgctggagaagatttgcgaggatttcacctccgagacgtgtaatagttcttttaggttatggctcacaagctatccaagctctaagtttccggtcaccattctgcagaatggcgtgaaaatgactaacgagccgcctaccggccttcgcctcaatctactgcagagctatttaacggatcctgtttcggacccagagttttttaagggatgcagaggtaaggaactgctgttcatcaacgagtacgataccattccattcgaagctattagttacttgaccggagaatgcaactacggtggtagggtgaccgatgattgggaccgtcgcctgttactgaccatgctggcggatttttacaacttgtacattgtggaaaatcctcattataagttttcacccagtggcaactacttcgcccctcctaagggtacatatgaggactacatagagttcattaagaagctcccttttacccagcacccagaaatttttgggttacatgagaatgtcgacatcagcaaggacctacagcagacaaaaactttatttgaaagccttcttctgacacaaggcggttctaagcagacaggcgctagtggttcaactgatcagatccttcttgaaatcactaaagatatcctgaataagctaccctccgatttcgacatcgagatggcactccgtaagtatccagtccgatatgaagaaagcatgaacaccgtgcttgtgcaggaaatggagagattcaataatttgatcatcacaatcaggaacacgttgcgagatcttgagaaagccataaaaggagtggtggttatggatagcgccttagaagcactatccggatcgctgcttgttgggaaagttccggaaatttgggccaaaagatcatatccaagtttgaagccgttggggtcttatataacggatttcttagctcggcttaacttcctccaggactggtataatagtggaaagccctgcgtgttctggctctcaggtttcttttttactcaggccttcctaactggagccatgcagaattacgcaagaaagtatacgaccccaattgacctgctggggtatgagttcgaagtgattccttctgacacctcagacacctcccctgaggacggcgtgtacatccacggtctgtatctggatggggcaaggtgggacagggagtcaggacttcttgcagaacagtatcccaaactgctgtttgacctcatgccaattatttggataaaacccactcaaaagagtcgcattatcaagtccgatgcctatgtttgccccctgtacaaaaccagcgaacggaagggcacattatctaccaccggtcacagcacaaattttgtcatcgccatgcttttgaaaaccgaccagccaacaagacactggattaagcggggtgtggccctcctctgtcaactggatgattag

SEQ ID NO: 221424 - DNA, 9278 bp, synthetic construct
  misc_feature 1..9278: note = Description of Artificial Sequence: Synthetic coding sequence
  source 1..9278: mol_type = other DNA
atgtccgatgccaacaaggccgctatagctgccgaaaaagaggccctcaacctgaaactgccacccatagtgcacttgcccgagaatatcggggtcgatacccccacccagtctaaactgcttaagtaccgcaggagcaaagaacagcaacagaagatcaatcagctggttatcgacggagccaaaagaaatctcgatcggaccttgggcaaaagaacgccgctgttgcccccaccggactaccctcagacaatgacatctgaaatgaaaaaaaagggttttaattacatatacatgaagcagtgtgttgagtcatcccctttagtccctatacagcaggagtggctggatcatatgctgcgacttattccagaatccttgaaggaaggaaaagagagggaggagctgctggagtctctgattaacgaagtctcttctgacttcgaaaatagcatgaagcgttacctggtgcaatctgttctggtgaagcccccagtcaaatctctcgaggacgaggggggacccctccccgaatcaccagtgggcctggattattctaacccatggcactcaagctacgtccaagcccgtaatcagattttcagtaatctccatattattcacccaacaatgaagatgctcttagaccttgggtatacaacatttgctgacacagttcttctggacttcaccggcatacgggcaaaaggccctatcgattgtgagtccctcaaaactgacctgagcatccagacgcgcaacgccgaggaaaaaattatgaacacgtggtacccaaaggtcataaacttgtttacgaagaaagaggccttggaaggcgtcaaaccggaaaagctggacgcattttatagctgtgtgagcaccttaatgagcaatcaacttaaggacctcctacggcgaactgtggaaggattcgtcaaactgttcgaccctaaggaccagcaaaggcttccgatttttaaaatcgaactgacatttgacgacgataaaatggagttttaccccacctttcaggatttagaagataacgtactctccctggtagagaggattgccgaagcattacagaatgttcagacaatcccatcttggctctctggcacctccactccagtgaatttggacacagagttacctgaacacgttctccactgggcagttgatacgctgaaggccgcagtgcaccggaatcttgagggagcaaggaagcactacgaaacttacgttgagaagtacaactggctgctcgatggcactgccgtcgaaaacatagagacgttccagacggaagatcacacttttgacgaatataccgagttcatcgaaaagttcctttcacttgcttcagaaatcatgctactgccacagtggattcactacaccatggtccgattagactgcgaagatctcaagactggactcacaaataaggcaaaggctttcgccaacatcttgctaaatgatatcgcctcaaagtacagaaaagaaaatgagtgtatctgcagcgagtttgaggccattaaggaacatgcactgaaagtgccagagacgaccgaagagatgatggacctgattagttacgtggaaaaggcacggacggtgggtatcgaagaactgatccttcgcatccaagagagtaaaagacagatgagttacttcctcgacgtcttcctgtttccccaggaggacctcgctttgaacgcaacagtcctcatgtggcctcgaaagataaatccgattttcgacgagaatgatgagctgattgagaatgcaaagcataaaaaagagaatgagttgatggccaagagagaaaaactcatcctggagattgagaaggagtcccgccgaatggaggaattcaccgaatttgccgagctagagcgcatgcagcagtatgtcacagatgtcagacagctccagaagcgcattcaggagtctgaagaagccgtccagttcatcaataaggaagaggaactttttaaatgggagcttacgaagtaccccgaattggacaaattgaaagtgaatattgagccataccagaagtttttcaattttgtactgaaatggcaacggtctgagaagcggtggatggatggcggtttcttagaccttaacggcgaatccatggaagccgatgttgaagagttctctcgggagatttttaaaacactgaagttctttcaaacaaaactgaaaaaggagcttcaagaaaagcgtaaggcagcccgtaagaggtctctggaggaggaaaagattgaagaagaaccaaaggacaacgcaactattacaatgtgcagaatgcgagcacggcattggaaacaaatctccgagatcgttggatacgacttgactccggattcaggaacgaccctacgaaaagttctgaagctcaatctgacaccgtatctcgagcaatttgaagtcatctccgcaggggcttctaaagagttctcactcgagaaggcgatgaacaccatgatcggtacatgggaggatatcgcattccatataagcttatatcgcgataccggcgtttgtattttgtcttccgtcgatgaaatccaagcgattctggacgaccagataatcaaaacgcagaccatgcgtggctccccctttatcaagcctttcgagcatgagatcaaggcttgggaagatcggctgatcaggattcaggagactattgatgagtggctcaaagtgcaagcccagtggctgtacctggagccaattttttgtagtgaggacatcatgcagcagatgcccgaagaaggtagacaatttcaaactgttgaccgacactggagggacataatgaagttctgtgccaaagatccaaaagtgctcgctgctactagcctgactgggttactcgagaagttacagaactgcaatgagctcctggaaaagattatgaaagggctgaacgcatatctggaaaagaaaaggctgttcttccccagatttttcttcctctcaaacgacgaaatgctggaaatactgagtgagactaaggatcccttaagggttcagccacacttgaaaaaatgtttcgagggcattgcgaagcttgagtttttgcccaacctggatatcaaggctatgtactcaagtgagggggagcgagtcgaattgatcgcgctaatttccacttctgctgcaagaggtgctgtcgaaaagtggcttatacaggttgaggacctgatgttacggtccgtgcatgatgtgatagccgctgccagactggcttatcccgaatcggccagacgggactgggtgcgagagtggccagggcaggtagtactgtgtataagtcaaatgttttggacaagcgagacgcaggaggtcatttctggaggaaccgagggcctcaaaaagtactataaggagttgcagaaccagctaaacgagattgtggagctagtgcggggtaagttgtccaaacaaactcggacaaccctgggcgctttagtgaccatcgacgtgcacgctcgggacgtggttatggacatgattaagatgggtgtatcacatgatactgacttcctgtggctggctcaactacggtattattgggagaacgagaacgctcgtgtccgaataatcaactgcaacgtgaaatatgcctacgagtacctgggaaacagccctagactggttatcacacctctgacggatagatgctacagaaccctgattggagccttttacctgaacctcggcggtgcgcctgagggaccagcagggacaggcaagactgagactacaaaagacctcgccaaagcactggccgtgcaatgtgttgtcttcaactgttccgacggccttgattacctcgctatggggaaattcttcaagggcctggcctcatctggggcatgggcttgttttgacgaattcaaccgcattgagttagaggtgctgtcggtagtggcccagcagatcctttgcattcagagagccattcagcagaagctcgtcgtgttcgtcttcgagggcaccgaattgaagcttaaccctaactgcttcgtggccattaccatgaacccagggtacgctggccgatcggagctcccagacaatctcaaagtgcttttcaggacagtggcaatgatggtaccgaactacgccttaatcgccgagatctcgttgtattcctacgggtttctgaatgcccgacctctcagcgtcaagatcgtaatgacataccgcctgtgtagcgaacagctgtcctcccagttccattacgattacggcatgagagctgttaaggccgtactcgttgctgctggtaacctgaagctaaaataccccaacgaaaacgaggatatcctgcttctccggtctatcaaagacgtgaatgagcccaaatttctgagccatgacatacctctcttcaatgggattacctcagatctgttcccagggatcaagctcccagaggccgattatcatgagttcttggaatgcgcccatgaggcatgtaacgtgcataacttgcaacccgtgaagtttttcttggagaaaatcatccagacatacgaaatgatgattgttaggcatggatttatgttagtgggggagccttttgctgccaaaactaaagttctgcatgtgctcgcagacacgcttacactgatgaatgagcatggctatggcgaagaagagaaggtgatctatcgaaccgttaatccaaaaagcattacaatgggacagctcttcggccagtttgatcccgtctcccatgagtggacggacgggattgtggctaacacctttcgcgaattcgcactttccgaaacacccgatcgcaagtgggtggtttttgatggacctatagataccctgtggatcgagtcaatgaatacggttcttgatgacaacaaaaagttatgcctgatgtctggtgaaattatccagatgtccccacaaatgtccttaatctttgaaacaatggacctgtcccaggcctcaccggcaaccgtttcccgttgcggaatgatttatctagagcctagccaactgggatgggaaccccttgtttcctcctggcttaactcccttaaggggcctttgtgtgagccggaataccaggctctgttgcggggactgttcgcctggttaatcccacccagtctgaatcaaagggtcgagctttttcagctcaattatctgtataccacaattgtttccaaaatactaaagatattaattacattccggatttcaaattacttcaagtacgtgcctctcaagacacaatgcacttttatcaagttctttctacatcagcaggcctgttttatctttagtctgatctggagcatcgggggtagctgtgacaccgatgggaggcgggtgtttgacacattcatccggctaatcattcttggaaaggacgacgaaaaccctgtcccagatagcgtagggaaatgggaatgtccgtttgacgagaaagggttggtgtacgattacatgtatgagctgaaaaataagggcaggtgggtgcactggaacgagcttatcaagaataccaatttgggggacaagcagatcaaaattcaggatataattgtacccactatggatacgatccggtatacatttcttatggatctaagtatcacttacgctaagcctctgctattcgttggccctaccgggacagggaaaagcgtgtatgtgaaggataaactgatgaatcatcttgaaaaagaccagtatttccccttctatattaatctgtccgcccgtacatctgcaaatcaggtgcagaacatcatcatggccagacttgacaagcggagaaagggggtgtttgggcctcccatggggaaaaagtgcattatcttcattgacgatatgaacatgccagccttggaaaaatatggcgcacaaccgcctatagagctcctgcgccagttctttgactgtggacactggtatgatctgaaggacacaagcaagatcacactggttgacatcgagctgatcgcagccatgggcccaccaggcggtgggcgtaatcctgtaacgcccagatgcatccggcatttcaacatctgctctataaacagcttcagtgacgaaacgatggtgcgaatattctctagtatcgttgccttttacctgcggacccacgagtttcctccagagtattttgtgatcgggaaccagatcgtgaacggaaccatggagatttacaagcagagcgtggagaatctgctgcctacccccaccaagtcccactacacattcaatctgagagacttctcaagagttattagagggtgtcttcttatagaaagggatgcggtagctaataagcacactatgatcagactgtttgttcacgaggtgcttcgtgtattctacgatcgattgatcaatgacgatgatcggaggtggttgtttcaactcaccaagaccgtcataaaagatcacttcaaagagtccttccactcaatctttagtcatcttcgcaagcagaatgccccagtaactgaggaagaccttagaaatctgatgtttggcgattacatgaatccagacctggaaggagacgacagagtctatattgaaattcccaatatccaccatttctctgacgttgtggaccagtgtctggacgagtacaatcagacccacaagacgcgtatgaatctcgtcatctttcggtatgtacttgaacacctgagtagaatttgcagagtcctgaaacagagtggcggtaacgcactcctggtgggactgggcggatctggacgacaaagcctcacacgcctcgccacaagtatggctaagatgcacattttccagccagaaatttcgaaaagctacggaatgaacgaatggagggaggatatgaagtccttcatcgccgtccctgtcacgaaccgcatcgtcgacaacaagtcgaaaatcttagagaaacggctcagataccttaatgatcatttcacctataacctgtactgtaacatctgccgcagtctcttcgagaaagacaagctactcttttcctttctgctgtgtgccaacctgttgctggccagaaaggaaatcgaataccaagaactcatgtttctcctgaccgggggagtctctctgaagagtgccgagaagaatccggatccgacctggctgcaagacaagtcctgggaggagatctgtcgcgcttctgaattccctgcattcaggggactaaggcagcatttttgcgaacatatttacgaatggcgggagatctatgactctaaggagccacacaatgcgaagttcccggcacctatggacaaaaacctgaacgagctgcagaagatcatcattctcagatgcttgagacccgataaaattacaccagccatcacgaactatgtgaccgataagctcgggaagaaattcgttgagccgccaccctttgatttgaccaaaagctatttggactccaactgtacgatccctcttatctttgtgttgtctccgggagccgatcctatggcctccctgctgaaattcgcgaatgataagtcaatgtcggggaataagtttcaggcaatttctttgggtcaaggccaaggaccgatagcagccaagatgattaaggccgctatcgaagaggggacgtgggtatgtttgcaaaattgccatctcgccgtgtcttggatgcccatgttggagaaaatctgcgaagattttaccagtgaaacttgtaactctagcttccgcctgtggctaacgtcatacccaagttctaagtttcctgtgactatcctgcagaatggcgtgaagatgacaaatgaaccgcctacggggctccgcctgaatttactccagagctatctgaccgacccagttagtgatcccgagttctttaaggggtgcagaggcaaagagctcgcgtgggaaaagttgcttttcggggtgtgctttttccacgcccttgtgcaagaacgcaagaagttcggcccacttggttggaatatcccttacggtttcaacgaatcagatcttcggattagcatcaggcagctacagctgtttattaacgaatatgacaccattccatttgaagctatcagttaccttactggggagtgtaactacgggggtcgggtgacagatgactgggatcggcgtttgctgttgacaatgttagctgatttttataacctttacatagtggagaacccacactacaagttttctccatctgggaactacttcgccccaccgaagggaacgtacgaagactacatagagttcatcaaaaagctcccatttacacagcacccggagatctttggcttgcacgagaacgtggacatttccaaagacctgcagcagactaagaccctcttcgaatcccttcttttaactcaaggcggatccaagcagaccggtgcgagtggctctactgaccaaattcttctggaaatcaccaaagacattctcaataagctcccctccgattttgacatcgagatggcacttcgaaagtatcctgtcagatatgaagagtctatgaatacagtcctcgtgcaggagatggaacgctttaataatctcataatcactatccggaatactctcagggacttagaaaaggcgatcaagggagtggtggtgatggactcagctctggaggccctgagcgggtcgctcctggtcgggaaggtaccagagatatgggctaagaggtcatatccatcactaaaacctttgggcagctacatcacagacttcctggcgcgtctgaatttcctacaggattggtacaacagtggcaagccctgtgtgttctggctgtctggctttttctttacacaagcttttctaaccggcgcaatgcaaaattacgcacggaaatacacaacccctatcgacctgctggggtatgaattcgaagtgatccctagtgacacatccgacacatcgcctgaggatggggtttatatccacggattgtatctggacggcgcaaggtgggacagagagagtggacttctggccgaacaatacccaaagctgctctttgatttgatgcccatcatctggatcaagccaacacagaaatctagaatcatcaagagtgatgcctacgtgtgccccctctacaaaacctctgagagaaaaggtaccctgtctacgaccggacactccaccaactttgtcatcgcaatgctgctgaagactgaccagcccactcgtcactggattaaacggggagtcgccctcctctgtcagctggatgacta

SEQ ID NO: 221425 - DNA, 2355 bp, synthetic construct
  misc_feature 1..2355: note = Description of Artificial Sequence: Synthetic coding sequence
  source 1..2355: mol_type = other DNA
atgagtgatgccaacaaggctgctattgcagcagaaaaagaggcccttaatctgaagctgccacccatcgtgcatctgcctgagaacatcggtgtggacactcctacacagagtaagcttctcaagtacagacgcagcaaggaacaacagcaaaagattaaccaactggtcattgacggcgcaaagcgtaatctcgatcgcactcttggtaagagaactcccctgctgccaccaccagactatccacaaacaatgacatccgaaatgaagaagaaagggtttaactacatctacatgaaacagtgcgttgagtcttctccactggtcccaatacagcaggagtggctggatcacatgcttcggctgatccctgaatccttgaaggaaggcaaagagagagaagaattactggagagcctgataaacgaggtgagttcagattttgaaaatagtatgaagaggtatctggttcagtcagttttggttaaaccccctgtgaagagcttagaagacgagggcggtcccttaccagagagcccagtcgggcttgactacagtaacccttggcacagctcttacgtccaagctcggaatcagatttttagcaatctgcatatcatccacccaacaatgaaaatgctcttggacttaggttatacaacatttgctgataccgtcttactggattttaccggaatcagagcgaaagggccaatcgattgtgagtcccttaagacagatctatcaatccagacccgtaacgctgaggaaaaaatcatgaatacctggtaccccaaggttatcaacctatttaccaaaaaggaggccctggaaggagttaaaccagaaaagctggacgcattttactcatgcgtatcaaccctgatgagtaaccagctaaaggacctccttcgacgtacagtcgagggctttgtcaagctgtttgaccccaaggaccagcagcggctaccgatctttaagatcgagcttacgttcgatgacgataagatggaattctaccctacattccaggatctggaagataatgttctgtcactggtagaacgcatcgctgaagctctccagaatgtccagaccatcccatcctggcttagcgggacctccaccccagttaatcttgatacggagctgccagagcacgttctgcattgggctgttgacacactcaaggccgcagtacatcgtaatctagaaggagcaagaaagcattacgagacatacgtggaaaagtacaactggctgctggacgggaccgcagtggagaacattgagacgttccagactgaagatcatacctttgacgagtacacagagttcatcgaaaagttcctcagcctagcatccgagattatgctactcccgcagtggatccactatactatggtgcgcctggactgtgaagatctgaagaccggtctgactaataaagccaaggcatttgctaacatcctgctgaacgacattgctagcaaatatcgaaaggaaaacgagtgtatatgtagcgagttcgaggctatcaaagaacatgccctcaaggtccccgagactacggaggaaatgatggatttaattagttatgtcgagaaggcccgtacagtgggtatagaagagctgatcttaagaatccaggaaagtaaacgacaaatgagctactttctggacgtctttctatttcctcaggaagatctggcccttaacgctacagtgctcatgtggccacgaaagataaacccaatatttgacgagaacgatgaactcatcgagaatgccaagcacaagaaagagaacgaactgatggccaagcgggagaagctgatattggaaattgagaaggagtcgcggagaatggaggagttcaccgaattcgccgagctggagagaatgcagcaatacgtgactgacgtgcggcagctccagaagagaatccaggagagcgaagaggctgtccagttcataaataaagaagaagagctgtttaaatgggagctgactaagtatccagagttagataaattgaaggttaatatagagccgtaccagaaattctttaatttcgtgctcaagtggcaaaggagcgaaaagaggtggatggatggtggcttcctggacctgaatggggaaagcatggaagctgacgtcgaggagttttcccgtgagatttttaaaactttgaaattcttccagactaaattgaaaaaagaacttcaggagaagcggaaggccgcacgtaaacgaagcctggaggaggagaaaattgaggaggaacccaaggacaatgctacaattaccatgtgctcaacagtaatggagcagattaaagcctttaaagtttag

SEQ ID NO: 221426 - DNA, 687 bp, synthetic construct
  misc_feature 1..687: note = Description of Artificial Sequence: Synthetic coding sequence
  source 1..687: mol_type = other DNA
atggagacctttattcctattgaccttaccaccgagaatcaagagatggataaagaggagacaaaaaccaagcccagactgctcaggtacgaggagaaaaagtacgaagacgtcaagcccctagaaacacagcccgctgagattgccgaaaaggagacattagagtataagacagtccgcacgtttagcgagagccttaagagtgaaaaaaccgaggattaccttcgcgagtctataatccagcaacacatggtgagccctgaaccagccagcctgaaagagaagggaaagtcccggaggaaaaaagatcagactcacgcttgccccaatgtgcggaaagccaggccagtgtcctacgaccgaactgaaccaaaggatgacgacgtgatacggaatataatcaggctaagagaaaaactgggatggcagaccatcctgcctcagcattctttgaagtacggttcctctaaaatcgctattcagaagatcaccctcaaaaagcctttagaggatgatggggaattcgtctattgcctgccccgaaagtcccccaaaagcttgtacaacccctatgatctgcaggtcgtctccgctcataccgccaagcattgtaaggaattctgggtaattaccgccagtttcatatctaaacggtatttagtgatatgtggtgccgtgtatatatag

SEQ ID NO: 221427 - DNA, 687 bp, synthetic construct
  misc_feature 1..687: note = Description of Artificial Sequence: Synthetic coding sequence
  source 1..687: mol_type = other DNA
atggagacttttattcctatcgatttgaccactgagaaccaagaaatggacaaagaggagacgaagacaaaaccgagactgctcagatacgaagaaaaaaagtatgaggatgtcaagcctctggagactcaacctgccgagattgcagagaaggagaccctcgaatataaaacggtccgcacctttagtgagtcccttaagtctgaaaagacggaagactatttacgtgagtccatcatccagcaacacatggttagccccgaaccagcaagccttaaagagaagggcaagagtcggagaaagaaggatcagacccacgcatgcccaaatgtgcgcaaggctcgaccagtctcctatgacagaaccgagccgaaggacgacgacgtgatccgaaacataatccggctgcgcgagaagcttggctggcagaccatcctccctcaacatagcctgaagtatggatcctcaaaaattgccattcaaaaaatcacgctgaaaaagccccttgaagatgacggcgagtttgtgtattgtctgccgaggaaaagccccaagagtctgtacaatccttacgacctgcaagtcgtaagcgcgcacacagctaagcactgtaaagaattttgggttatcactgctagtttcatctcgaaacggtacctggtgatttgtggggctgtgtatatatag

SEQ ID NO: 221428 - DNA, 1362 bp, synthetic construct
  misc_feature 1..1362: note = Description of Artificial Sequence: Synthetic coding sequence
  source 1..1362: mol_type = other DNA
atggagaccttcattcctatcgatctcacaaccgagaaccaggagatggataaggaggagacaaaaaccaaacctaggctgctccggtacgaagaaaaaaagtatgaggatgtaaagcctctggaaacgcaacccgctgagattgccgaaaaggagaccctcgaatacaagacagtgagaaccttctcagaaagcctgaagagtgagaagactgaagattaccttagagaaagtatcatccagcagcacatggtcagccccgagccagctagcctgaaggaaaaaggcaagagtagacggaagaaagaccagactcacgcttgcccgaatgtgcgaaaggctaggccagtctcgtatgaccgaacggaacccaaagatgacgacgtgattcgtaatatcatcaggcttagagaaaaactgggatggcagactatcctccctcagcatagcctgaaatatggttcctctaaaatcgccatccagaaaataactctgaagaagccacttgaggacgatggcgagtttgtgtactgcctgccaagaaaatcccccaagtccctgtataatccatacgacctgcaggtggtgtccgcccatacagcaaaacactgtaaggagttctgggtcatcactgcttcctttatctccaaagtcattaacatagtaggctccgtgaaagaagtggaattgatcccaactctcgaatggctgtcagaaagaagacactattatcttttgcgtcagttcaagatcttttcagatttccgaatgaacaaagcattcgttacatggaaattgaatgtcaagcggattaaaacggagaagtcaagaagttttttatatcatcatctgtttctcgcagacgacctgtttcagacatgcttagtatacatccggggactgtgcgaggacgcaatcaacctcaaaaattataacgaccatgagaacaacttgtctgcgatctgcttagttaaattagactcatctcggacatactcattggacgaattttgcgaagaacaacttcagcaggccactcaggctctgaaacagctggaggatatacggaataaggcgatttcagagatgaagagcaccttcctgaaggtcgccgaaaaaaatgagattaaagagtattttgagagcaagttaagtgaggatgatacaactcactttaagctgcctaagtaccggaggttgctagagactttcttcaagttcgtgatgcttgtcgactatatcttccaggaactcatccggcagcttatgaacaccgcagtaacgctactacttgagctgtttaatgggagtgcgggaatgccttttagcgttgaaaagaagaacgaaaatttaattcgttag

SEQ ID NO: 221429 - DNA, 13548 bp, synthetic construct
  misc_feature 1..13548: note = Description of Artificial Sequence: Synthetic coding sequence
  source 1..13548: mol_type = other DNA
atggagacattcattccaatcgacctgacaactgaaaaccaggagatggacaaggaagaaacaaagaccaagccaaggttgctgaggtatgaggaaaagaaatatgaagacgtgaaaccactggaaacccagcctgctgagatagctgagaaggagactctcgaatataagactgtgcggaccttctccgagagtctcaaatcggagaagacagaagattaccttcgggagagtatcattcagcagcatatggtgtctccggaacctgcgtcactcaaagagaagggtaaaagccgaaggaaaaaggatcagacacatgcctgcccaaatgtgagaaaagccagacctgtgtcttacgatcggaccgagcccaaggacgacgacgtgatccggaacatcattagactgcgtgagaagctcggctggcagaccatactgccccagcactccctgaagtatggctcctccaaaattgcaattcagaaaatcactttgaaaaagcctttggaagatgacggcgaatttgtctactgtctacctcgcaaaagcccaaaatcactgtacaacccctacgaccttcaggtcgtcagcgcacacacagcgaagcactgtaaggagttctgggtgatcaccgccagctttatcagcaaggtgatcaatattgttggatctgtgaaggaggtggaactgatcccaacactcgaatggctttcagaacgaaggcattactacctgctgcgtcagttcaaaatcttcagcgacttccgcatgaataaggcctttgtgacctggaagctgaacgtgaagcgcattaaaaccgaaaaatctcggtcctttctttatcatcatctgtttctggctgacgatctgtttcaaacctgtctcgtatatatccggggtttgtgcgaggatgctataaacttgaagaattataatgaccatgaaaataacctgtctgcaatttgtctggtaaaactggacagcagcagaacatattcattggacgagttttgtgaggagcaacttcagcaggcaacacaggccctgaaacaattggaggatataaggaacaaagcgatctcagaaatgaagtcaacgtttcttaaggtcgcagaaaaaaacgagatcaaggaatacttcgagtccaaactgagtgaagatgacacaactcacttcaaactgcctaagtacagacgtctgctggaaacattcttcaagttcgtgatgctagtggattacatcttccaggagttgatcagacagctgatgaacacagcggtaaccctgctactagagctgttcaatggcagcgctggtatgccttttagcgtagaaaagaagaatgagaacctcataagaacctttaaggacaattccttcccaaccgggaaaactaccaacgattgtgaagaactggttgacaattctaaattgcacgctatatcagtccaaaaatcagaagtgaagaccgatactgacatcaacgagatcctgaactcggttgaggtgggtaaagaccttagaaagacctacgcgcctatcttcgaggtaaatttatgtctgaggattcccgcagaaagcgactcgtctgagaattccaaagaaaactttcatgaatctgatcaatgtcctgaagagtgtgttatgtttgaagacgaaatgtctgaaaataaggataattgcgtgaaaaagcactcctccgaagagctcttgccaaaggccaagaaatccaaagagattagctataaccttgaggatattatttccgacactgaaatagaaactgaatttgagaataagtacatgtactatgaattccccgagttccctactaatcttttcatcgaccctaaccgcctggaattcagcgttaagatccagaacatgctcaccaatatggagaagtgtataactaccatcacccctctctgccaggacccacaattgagcatattcatcgatctcgtgtcgatcatggacctccccaataagaccgggagcattatacattataaagaacagacccggtggcccgattgccacattctgttcgagacggacccagcctaccagaatatcattgttaacctcctaaccattatcggcaattccatgggcctggtgaacgcctattcccataaatttatcaaatattgtactatgactgagaaggcgaaaattatgagcatgaagataagcagtatgggcgagctgacctctaaggagtttgaggccattctgaatcgatttagaaactacttccgccatatcgttaacatggccatcgaaaaacggatcggtatttttaacgtcgtatccctggactaccagagtgaatgtctcctgtacatagacaatgtgattcatatgagtcacaccctcatccaaagcgtgattgaaaaaaagaataaaaacctgctcgaggtagtcgaatcctctctgcagcagttggagtgtgatccgaccgagatagaggagtttttagaacactttatctttttaaatgctatatcctctaagatctcaaaactggaaaaagagtttctaactatgagccagctatattctgtagcaaaacaccatcagatccacatctccgaggagcagatagccatatttcaggtcttgcttctcaagttcagccaattgaaatcctcaatgaaacttagcaagataaacaaagatactgccattactaaattcagagacaatctcgaagcttgtatatcggggttgcatgtcgatgtaggcaacttgaaagccaaaatccgcaccccactgcttctgtgcgctggcactcaggtttctaccgctatggaaatgattcaaactctgagcggtgaagccgcatcccttaccaataaagcaaaggcgtactcccattatcaagactgtttttctgactctcagagccacatgcattcagtgaatgtcgaagagatcacccagatagtgctgtccgaaatcagcgacatcgagggtgacctcaccctccggaaaaagctatgggaagcccaagaagagtggaagcgggcatcctgggagtggcgtaatagtagtctccagtctattgacgttgagagcgtgcagcgcaacgtgtctaagctgatgcacataatttccgtcttagagaaaggactccccaaatcagacatggtgactcatcttaagcaagtagtgaccgaatttaaacaggaattacccatcattatagccctcggcaatccctgcctgaagcccaggcactgggaggcactacaggaaataataggcaagtcagtgcccttagataagaactgcaaggtggagaacctacttgccctgaaaatgttccagtacgaaaatgagataaacgatatgagcacgtctgctacaaacgaggccgcactggagaaaatgctgttcaagatcatcgacttctggaacaccacacccttgcctctaatactccaccataccgaaatttacagtattttcatcatcccctccatagatgacatctccgcccaactagaagaatctcaagtgatcttggctacaatcaagggcagtccacatatagggccaatcaaagatttggtgaacgaatgggaccagaacttgactctttttagctatacgttagaggagtggatgaattgtcagaggaactggttatacctcgaacccgtgtttcactcatccgagatacggcgtcagctgccggcagagaccgaactcttctcccaggttatttcaatgtggaagaaaatcatgagcaagattcagaataagcagaatgcattgcagataactacatctgcaggggtcttagaaattttacaaaactgtaacattcacctcgagcacatcaagaaaagtctggaagactacctcgaggtgaaacggttaatctttcctcgtttttactttctgagcaacgccgagttacttgacatcctggctgactcacgaaaccccgagtctgtgcaacctcatctagtgaaatgttttgaaaatatcaaacagctcctgatttggaaacaagacattggaccacccgctgtaaaaatgttgatctccgccgagggcgagggtctggttctgccgaaaaagattcgagtgagaagcgctgtcgagcagtggttggttaatgtggaaaagagtatgttcgacgtcctgaaaaaagagcggtatatctacaatataatacttttgtttcagagtcagataatgttttacaatgactgtgtgaaatctttcgtcagctcatattccagggaaaagctggagaaggtacacgcaggccttatgtgtcacctggaggaggtggccgatctggtggtgctggacacctccaattccagaacgaaggccatcttgggcgcactgttgattttgtatgtgcattgtcgggatatcgtcatcaatctcctacttaaaaacatttttaacgcggaagatttcgagtggaccaggcacttacagtataagtggaacgagaagcagaagttgtgctacgtttctcagggaaatgcttcttttacttatgggtatgagtatctgggatgcacatcacgcctggtgatcactcccctgacagatcgctgttggctgacattaatggaagccttgcatctaaatcttggcggatgcccggctggaccagcaggaaccggaaagactgaaacagtcaaggatctggctaaaagccttggcaaacactgcgtggtgtttaattgcttcgaggatttggactacaagatcgtgcgtaaattcttctttgggctggtgcagtcaggcgcatggtcctgttttgacgaatttaacctgattgacctggaagttctgagcgttatcgcctctcagatcttgaccatcaaagcagccaaggacaactattccgcacggttcgtgctggagggcaaagagatacggatcaatatgtcctgcgccgttttcatcaccatgaatccaagatatggtggaggagtcgagctgcctgataatcttaagtctcttttccgaccggtggctatgatggtaccccattaccagatgatagctgagattattctcttctccttcggattcaagagcgctaacagtctgtccggcaaactgacaaatctttatgagctggctaggaagcagctgagtcagcaggatcattacaactttggtctgcgcagcctgaagattgtcttaattatggctggtacgaagaaacgcgaatttaagtgcctgagcgaggccgatgaaaccctgatagtgattgaggcaatcagggaggcatccttacccaagtgccccccagaggacgtgcctctgtttgagaatataatcggcgatatcttccctgaagtgaccgtgctgaaagtgaatcagctcgccctggagaaagttatctataccgcgacccagcaattgggcctgcagaattggagctcccagaaggagaagatcatccagttctacaaccaactccaggtgtgtgttggagtgatgctggtaggccctaccggcggagggaagacaacggtgaggcggatccttgagaaagcgctcactttgttgccaattgcagatttcttgagcgttgctgagcgtaaatccgcctctaagatatctgagaggaaaggtaaagtggacatttgtgtgttgaaccctaaatgtgtcaccctgagcgagctttacggtcaactcgatccaaatactatggagtggacggatggactcctgtcagcaactatccgctcatacgtctactttaacacccctaagaacaccaaaaaggacattgacctgcgcttgaagtcccggatcagtgacctgtcaaatgtgttcaagttagattcttcagacactaccgagacggacgataacatcttcgaggagatcgaaaaggtggtgaaaatccccgagaatcacaactttgactggcaatggatcattttggatggtcccgtggataccttttgggtggaaaaccttaattccgtgctcgacgacacccgcaccctttgtttggccaatagtgagagaatcgccctgactaataagatcagagtgatcttcgaggtagacaatctgagtcaggcttcgcctgccaccgtgtcccgatgtgccatggtgtacatggatcctgtggatctcgggtgggagccatatgtgaaaagttggctgctcaagactagcaaaatcatctcacagtcaggggtggactgtttagagttcatgattaagaatagtgttacagacggactgcagttcatcaggaatcggcagaagttccaaccctatcctatggaagacatcactgtggtcataaccctttgtcgaatcttggatgcatttttcgacttcatgggaaagaacggcggatttgagcagtccgatgaccttaatgacaccagttctaaagaagccaatagccagagagagtccgtgaccttcaaggatatcgagaaacgggacgaaaacacctggtaccctgagaaaaatcctgataagctgactaaaattattcaaaagctgttcgtgtttgcctttacttgggcctttggaggggctttgaatcgcgaagatgaacatagggagaatatccctttttgtccgagcctggagccggattccctcgcaaaagtaacatatgatttcgacaagttggtccacgaattatttggaaacagttcccaggtgggatggaagcactggggtcagtcccaaggacggagacgcaaaggaaactgtattaacttgcccacaggtgaatgcagtatcttcggatatttcgtagatattgagcaatgcgaatttattccgtggtccgacctggttccaaatgatcaaaccctgatccagcgaggaactagtctcttaacaaatttacagagatctgggggtaactttctaaaaattaccgaatgtggtgaatgcatcaattatactgccacccgggataccacttgtctctcattccttatgtctcttctgttgaaaaattcatgcccagtgctccttactggagagagcggcgtgggcaagactgcagccataaatcaaatgttggaaaagctcgagggtccaggcgcattcgatattaagcatggaagcatccttggagacacattattatactccgaaatcaagaaatctagtagtttaaagcagaacataacgattcttattcccgaaacccataagacggcaaccggctcatctgacaaccccacaaagaagcccgaagtcaggacaaacaagaagcttctgaaaaataatgaccacaagggcgtcgtcgtgagcacaatcaatttttcgactaatgtgaccgccgcaaagaccaaagagatgatactgaaaaagctgatcaggcgaacaaaggatacccttggggctcccaagaacaatcgcatactcatctttatcgacgatatgaatatgcctgtgagcgacatgtacggcgcacagccgccactggagctgattagacagctgttggacctggggggtgtctacgatacagaaaaaaatacttggaagaatatccaggacctaagtattgtggccgcttgtgtgcccgtagttaacgacataagccccagactgttgaaacatttcagtatgctggttctgcctcaccctagccaggacattctttgtacaatctttcaggcccacttgggcatttacttttctattaacaatttcacacccgaggtgcagaaatccaaggaccagatcatatcctgcagccttgcgatctatcaccaggtccggcagaacatgctgcctacgccgacaaaatgccactatatgttcaacctcagagacatgtttaaactcttgctcggcctcctccaagccgaccgcactgtggtgaatagcaaggagatggcagctcttcttttcgtacacgaggcaacacgtgtcttccacgacaggctgattgatttcactgacaagtctcttttctatcgtctgctgtctagggagctggagaactgtttccagatcgggatcgatggctgcggcaaaaagacatgtgccaccctggcctgctatttgaccgacaataagctctacagagtacctatctcacacaaatgcgcgtatattgagtttaaggaggtgtttaaaaaagtatttatacatgcgggtctgaagggcaaacccactgtattgatggtaccgaacctcaacatcgaacaggactccttcctggaagatctaaactatatcataagcagcggacgaatacccgatctgttcgagaatgtggaacttgatagtattgccatgaagatcagatacctgaccgagcagtcaggacatatggataacagacagtctctcctgagcttcttccaaaaaagaatctataaaaacctacacatcttcgttataatgagtccggagggaccctccttccggcaaaattgtagagtgtatcctagtatgatcagtagctgcactatcgattggtatgagcgctggccggaagaggccttgctgatcgtggccaattcgtttctgaaggagaaagttaacttcgagaatagggaaaatctcaaagagaagctggctcctacatgtgtgcaaatccacaaatctatgaaggacttgaatcgtaaatacttcgaagaaactggtcgcttttattacactacccctaactcttacttacagtttatggagacctttgcccacattctgcgagcccgagaggaggaaatgcaaaccaaaagggacagattccacatgggactatcaacgatcctggaggcgacgacactcgtcaccgagatgcaggaggaactacttatcttgggcccacaggtcgaacagaagactaaagaaaccgagacactgatggaaaaacttcgaaaagattctcaagttgtagagaaagtgcagatgcttgtcaaacaagacgaagagatcgtggcagaggaggtaaggattgtcgaagattatgcccagaagaccgcaaatgagctcaaaagtgtgctgccagcttttgacaaggccatagtcgctctgaatgccctggataaagccgatgttgctgagctgagagtttacaccagaccaccattcttggtcctcaccgtcatgaacgccgtgtgcattctgctgcaaaagaagcctaactgggcaaccgcgaagctcctcctctccgaaacagggttcctgaaaaaactaatcaatcttgataaagacagcattcccgacaaggtctttgtaaagctgaagaaaattgtcactctgcctgacttcaatcctcacaaaatatcactggtaagcgtcgcctgttgcagtctttgccagtgggtaatcgcattgaataactatcacgaagtgcagaaagtggtcgggcctaaacagatccaggtcgccgaggcgcagaatgtactgaaaatagccaggcagcgcctcgccgaaaaacagcgcggactgcagctcgtggaggaacacctgttatttctccaggcagcttataaggatacggtggccgaaaagcaattgcttgccaacaggaagaccatggcttcgcgacgctttcagtgtgccagcgtcctgctgacggtgttagaagacgagaagacgcggtggcaggagacgataaaccagatcgacaacaagctagaaggcatcctcggtgacatcctgcttagtgccgcttgcatcgtttacagtggcatcctgacacctgaattccggcaacttattgtcaacaagtgggagactttttgcattgagaacggtatctctctttcatcaaagttttccctgatcaaagtgatggcccagaagtatgagatcagtcggtggcacaatcagggtctgcctcatgggcagtactccgtcgagaacgccatccttatcaaaaacggccagcaatggcccctcctaatcgatccgcacagacaggcacacaaatggatccggcagatggaggggagccggttgcaaaagctcagcatcgaagacagcaattacactaagaagattgagaacgcaatgaagaccggtggttcagtgctgctgcagaatctactcgagacactcgctcccggactgaaggccatcctgaaaaaggatatctatcagaaaaaggggcattatttcatccgggtgggcgatgccgagtttgagtataattctaacttcaggctgtacctaagcacggagattgacaaccctcatttcctgccgagcgtctacaactttgtaaccatgatcaacttcaccgtgacttttcaaggcctgcaggaccagctgcttagcacagtggtgacgcatgaggtaccacatctagaagatcaacgctccaaacttctggaatcgatttcactcgacgctattactctcgaggagctcgaggaaaagacgctgaatctgctccaaaaggcactggggagcatcttggacgatgataagatcgtggacactctcagaaaatcaaagatgaccagcaatgagatcagtaagcgtattgaagctaccaaaaaagcggaatccgaaattcaggccattcgcaagaattatttaccgatcgccacaaggggtgcactcctctattttcttgttgctgatttgactcagattaattacatgtatcagttctcactagactggttccatcaggtgttcgtaagcagcgtggtgtcaaaatctaaggaacaggagcacagtttcaaacgggaaaaggtttcccccaaggaagttcacgaattcatttcgatttcaaaggagccaaacctggagaacgaaaagaatctgctcgacaaacatatcaaatcggcgatagacatgctgaccaaaagtatcttcaaggtcgtatctagcgccctgtttaacgaagataagctttgcttttcgttccgtctgtgcacagttatcatgcagaataacgctaatggcaatctcatacaggatgacattggattcctgccagaggaagaatggaacatcttcctgtattccggcattttgataaacatcaagtcagccctatcacagtcacggttgacttcaacgtttgaaattggagagtctcagcatctgcagtggctgtcggatagtagatggcggcagtgccagtacgtgtccacgcaccttgagccgttttccctgctctgtaagtcccttctgagcaatgtctcccagtgggatactttcaaaaactctaaggcggtctactccttgatctccacaccttttagtagcgagaacgctagccttgaggagaacacgaagcctccagaggagacagagttactcaatgagaataaggagacctgtaacccaatcaattttccatgggaaaaactgacaagtttccaacggttgatactcgtcaaagtgctgcgccctgagagcctgaataacagcgtgaggaaatttatcacagagaaaatggggaataagtacctccaaaggaccggtgtaaacctcaaagatgcgtacaaagggtccaatgcccgaacaccgctgattctgatccagactcatgggatcgatctaacaaacatactcctccgctttgcccaggagctgaaaggaacaacacatcacgttaccattatttccttagggagagatcaggctgccaaagccgaggacctgatcctgaaagccctgaccaagacccagcagtgggtgtttctgcaaaactgccacctggccacatcttttatgccacgactgtgcaccatagttgaatctttcaactcgcctaacgtgactattgaccccgaatttcgcctgtggctgtcatcgaagtcttactcttccttccccatccctgtcctgaagaaggggctcaaaatcgccgtcgagtcgccacaaggcttgaaatctaatttgcttcagacctttggttgcacagggtctggtgaggttactgaggagatctttgaaaacccagactgtggccagtggtggaaaaaactgctttttagcctttgcttttttaatgcggtgataaatgagagaaagaattatggcattttaggctggaacatcgcttacaaatttaattctagcgacttgggagttgccatcaaagtgctagaaaatagtctgaggggccagccctctatttcctggcaggctctcaggtatctgataggagaggtgatttatggcggacgcgtgattgacaactgggacaaaaggtgtctaaagactcttctgtataaattctgcaacccagaagtactgaaagacgacttttcgttttcaagatctgccagtatcaaggattacattcacatcattcagtccctgcccgacgatgatcttcctgaggtgctcggcatccacccggaagccatcagatcttgctgggaaacgcagggcgagaaatttatcgagaacctaattgcaatgcaaccgaagaccaccaccgccaatctgatgattcgacccgagcaatcgaaagacgagcttgtaatggagatccttagcgacttgctcaaacgcttgccattgacagtggagaaggaagaaatcgccgtgggcacaccctccacactgaaaagcatgatgagcagctcaatctgggaaagcctgagcaagaaccttaaagatcacgatcctctgattcactgcgtcctgctcactttcctgaagcaagaaattaagagatttgacaaattattgttcgtcatacataagtcactgaaagacttacagctcgcaatcaagggcgagatcatcctgactcaggaactggaagagatcttcaattccttccttaacatgcgggtgcccacactgtggcaaaagcacgcgtacagatcttgcaaacccttatcatcatggatagacgacctgatccaacgtctcaatttcttcaatacttgggcgaaagtggcatatacagccatccaaagaagatatatgcgcttcgtgacggtgtggaagcagtccattccatccacctcccagaagtgcaagcacccagaggattcagaaaacaacttctttgaggggtttcccagcaggtactggctccctgccttttttttcccccaggcctttctcgccgctgttctgcaggattacgggagaagtcggggaatcgccgtggatgcgttgactttcactcaccatgttatctccaacaccactgacaaggatgagaagttctctgtcttcatgcccaagaagctgaatattgtccgacgggctttcaaaggctctgcatcaagtcacacaggcgtctatatcttcggtttgttcatcgagggggcacgttggaatcgcgagcagaagattctggaagactcactgccgctggaaatgtgctgcgactttcccgatatttactttttaccgacaaagatcagcacaaaaaccccaaatgccagcaaccagacagattccgaactgtacgcctttgagtgccctgtttaccaaacccctgagcgcagtaggattcttgcgacaacagggctgccaactaattttctcactagtgtctaccttagtacgaaaaaaccccctagccactggattacgatgagggtggctctgctctgcgagaagaacgagaagtac

SEQ ID NO: 221430 - DNA, 13548 bp, synthetic construct
  misc_feature 1..13548: note = Description of Artificial Sequence: Synthetic coding sequence
  source 1..13548: mol_type = other DNA
atggaaacttttatcccaattgaccttaccacagagaatcaggagatggataaagaggaaaccaagacaaagccacgcttattaagatacgaagagaaaaagtacgaagacgttaaacctttagaaactcagccagccgagatcgcagagaaggagaccctggaatataaaactgtgcggacattttctgaatctctgaaatctgaaaagacagaggattatctgcgggaatcaatcatccagcagcatatggttagtcctgaacccgctagtctgaaagaaaaaggaaagtcccgcaggaagaaggatcagacacacgcttgtcctaacgtgcggaaggccaggccagtgagctatgataggacagagcccaaggatgatgatgtgatcagaaatattatcaggctgcgagaaaagctgggctggcagactattctgccacagcacagtctgaagtatggatcatctaaaatagctatccagaagatcactttaaagaaacctctggaggacgacggagagtttgtgtactgtctacctcgcaaaagtcctaaatctctgtataacccatacgatctccaggtggtttctgcccataccgccaaacattgcaaagagttttgggttataacggcgagctttataagcaaggtgataaatatcgtaggctccgtcaaagaggtcgagctaatcccaaccctggaatggctgagtgagagacgccattactacttactcagacagtttaagatcttttccgacttccgtatgaacaaggcttttgtcacctggaagctaaacgtgaagcgtattaaaaccgaaaaatctcggtcctttctgtaccaccacctattcctcgccgacgacttgttccagacctgcctcgtttacattcgaggcttgtgcgaagacgctatcaatttaaagaactataacgatcacgagaataacctgagcgccatatgtcttgtgaaactggacagtagccggacctacagccttgatgaattttgcgaagaacagctccaacaggccacccaggcgctcaaacagctagaggatattagaaacaaggctatatctgagatgaagtcaacatttctgaaggtggcagaaaagaatgagataaaggagtacttcgagtcaaagctttccgaggatgacaccactcatttcaagctaccaaagtaccgccgactcctggagaccttcttcaaattcgtcatgctcgtcgattacatcttccaggagcttatacggcagctcatgaatacagccgtcacacttctcctggaactgttcaacggcagtgccggtatgcctttctctgtcgagaaaaagaacgaaaatctcataaggactttcaaggacaactcttttccaaccggtaaaaccacaaatgactgcgaggaactcgtggataactctaaacttcacgcaatatctgttcagaagtctgaggttaaaacagacactgacatcaatgagatccttaactcggtcgaggtgggtaaagatctgaggaagacctacgcacccatttttgaggtgaatctttgcctgcgcatccccgctgaaagcgatagttcagagaacagcaaagagaacttccacgaatcagaccagtgcccagaagaatgcgtcatgttcgaggatgaaatgtctgagaacaaagataactgtgtaaagaagcactcaagtgaggagttattgccaaaggctaaaaagagcaaggaaattagctacaatcttgaggatattatttcagacactgaaatcgagacggagttcgagaacaaatatatgtattacgaattcccggaattcccaaccaacctgtttatagatccgaataggctcgagtttagcgtcaagatccagaacatgctgactaatatggagaaatgcattacgaccataactcctctctgccaggacccccagctctcaattttcatcgatttggtgagtattatggatctgcctaataaaaccggaagtataatccattacaaggagcaaacaagatggccggattgtcatattttgtttgagaccgatcccgcataccagaacatcatcgtgaacttgctgacaatcatcggcaatagcatgggcctggtgaatgcatattcacacaaatttatcaagtactgcacaatgactgaaaaagctaagattatgagcatgaaaatatcatccatgggggagttgactagcaaggaattcgaggccatcttgaatcgatttagaaactatttcaggcacatagtaaatatggccatcgaaaaacggatcggtatttttaatgtcgtgtctctcgactaccagtctgagtgcctgctatacatcgacaacgtgattcacatgtctcacacactgattcaatcagtgattgagaaaaaaaacaagaacctactagaggtagtggaaagcagcctccagcaacttgaatgtgatcccacagagattgaggaatttctggaacattttatcttcttaaacgccatttcatcaaagatttctaaattggagaaagagttcctgacgatgagtcaactatacagcgtggcaaaacatcaccaaattcacatttccgaggaacagattgctatcttccaggtactgcttctcaagttcagccagctgaagtcttcgatgaagctttctaaaattaataaggacaccgcaatcacaaagtttagagataacctggaagcttgcatcagcgggctacacgtagacgtgggaaatttaaaggctaaaataaggacaccactcttactctgcgccggtacacaagttagtaccgcaatggaaatgattcaaacactgtcgggcgaagccgcatctcttaccaataaggctaaggcctactcccactaccaagactgcttctctgatagccaaagtcatatgcatagcgtgaacgtggaggagattacgcagatcgtcctaagcgagattagcgatatcgagggtgacctgacattgaggaagaaactatgggaggcccaagaagaatggaaacgagcaagctgggaatggaggaattcatccctgcaaagtattgatgtggagagcgtgcaaaggaatgtgtccaaactcatgcatataatctccgtgctggagaagggtcttccaaagtccgacatggtgactcacttgaagcaggtcgttaccgaattcaagcaagagctgcctataataatcgcactcggaaacccctgcttgaagcccagacactgggaagcgctgcaggaaatcattgggaagtcagtccccctggataagaattgcaaggtcgagaacttactagccttgaagatgtttcagtatgagaacgaaattaacgatatgagcacctcagctacaaacgaggccgcacttgaaaagatgctcttcaagataatcgatttctggaatacaacacccctgcccttgatcctccaccacacggaaatttacagcatttttatcatcccttccatagatgatatctccgcacagctggaagagtctcaggtcatccttgccacgattaaaggaagcccccacattgggccaattaaggacttggtcaacgagtgggaccagaatctaaccctcttctcatacactctggaagagtggatgaactgccagagaaactggctgtacctcgagccagtgttccactccagcgagatccgtcggcagctgcctgccgagactgagctcttctcacaggtgatatctatgtggaagaagatcatgagcaagatacagaacaagcaaaacgcccttcagattaccaccagtgccggtgttctggagatacttcaaaattgtaacatacatctcgagcatatcaaaaagtccctcgaagactatctcgaggtgaagcggttgatattcccaagattttactttctatctaatgccgaacttcttgatatcctggccgatagccgcaatcctgagagcgtgcagcctcatctggtgaagtgttttgagaacattaaacagctgcttatttggaaacaggacatcggacctcccgctgttaagatgttaatcagcgccgagggtgagggcctagttctgcccaagaagattcgcgttcggtcagccgtggaacaatggctggtaaatgttgagaaatcaatgttcgatgtccttaagaaggaaagatacatctacaatattatactgctgttccagagccagattatgttttacaatgattgtgtgaagagctttgtctctagttacagccgcgagaagttagagaaggtgcatgcaggactcatgtgccacctagaggaggtggcggacttggtagtattggataccagcaatagccggacaaaagctatcctgggcgctctgcttatactgtatgttcattgtagagatattgtgattaatctgcttttaaaaaacattttcaatgccgaggactttgagtggaccaggcacctccaatataaatggaacgagaaacagaaactatgttacgtgtcccagggcaacgcttctttcacttacggatacgaatatctggggtgcacctctcgcctagttatcacccccctaacagaccgctgctggcttactctaatggaggccctccacttgaacttggggggatgccccgcaggaccagccggaacaggcaagacagaaaccgtgaaagatctggcgaagtctctggggaaacactgcgtagtcttcaattgtttcgaagacctcgactataaaatcgtgcgtaaattttttttcggactcgtccagtcaggagcctggtcttgtttcgatgagttcaaccttattgatcttgaggttctcagcgttatcgctagccagatccttacgattaaggctgccaaggacaactattccgcacggtttgtcctggaagggaaagagatacggatcaacatgtcctgcgcagtattcattacaatgaaccccaggtatggaggcggagtggagctccccgacaatctcaaatctttgttccgccctgttgctatgatggtgccccactatcagatgattgcagagatcattctgttctcttttgggttcaaatccgccaactcactgtctggcaaactaactaacctctacgagttggcaagaaagcagctgtctcagcaggatcattacaactttggcctgcggagcctgaaaatcgtcctgattatggcagggaccaagaagagagagtttaaatgcctgtccgaagccgacgagaccctcatcgttatcgaggccatccgcgaagcgtccctgccaaaatgccccccagaggatgtgccgttattcgaaaatataattggtgacattttcccagaagtgaccgtcctgaaggtcaatcagttagcgctggagaaggtgatctacaccgccacacaacagttaggactacaaaactggtcctcccagaaagaaaaaatcattcagttttataaccagttgcaagtatgcgtcggcgttatgttggtgggacctacaggcggaggcaaaacgaccgtccggcgaattttggagaaagccttgacgcttctgccgatcgccgattttctgtcggtcgctgagcgcaagagcgcaagcaaaatctcagagcgtaaaggtaaggtcgatatctgtgtgctgaatcccaaatgcgtcactctcagtgagttgtacggacagctcgatccaaataccatggagtggacagacggcctcctatccgctaccattaggagctacgtctactttaacactcctaagaatacaaagaaagatattgatttacgcctcaagagtcgcatttcggacctgtcaaacgtctttaaactagacagcagtgacacgaccgagaccgacgacaacatttttgaggagattgaaaaagtggtgaaaataccagaaaatcacaattttgactggcagtggattatattagatgggccagtggacacgttctgggttgaaaatctcaactctgtcctggatgatacacggactctgtgtttggctaactcagaaaggatcgcactgacaaacaagatcagggtcatcttcgaagtggataatctcagccaggcctcccccgcaaccgtttcacgatgtgcgatggtatacatggacccagtggaccttggctgggagccttatgtcaaaagttggttgttgaagacgtccaaaattatctcacagagtggcgtggactgccttgaatttatgataaagaattcagtgaccgatggcctgcagttcattcggaacagacagaagtttcagccctatcctatggaggacatcaccgtagtgatcactctctgccggatcctggacgctttctttgattttatgggtaagaacggcggtttcgaacaatcagatgatttgaatgacacatcatccaaggaagccaacagccagagggagtccgttacattcaaagatatcgagaagcgggacgagaacacctggtatccagaaaagaatccggacaagctcacaaaaataatccagaagctgttcgtattcgcctttacctgggcgttcggaggggctctcaaccgggaggacgagcaccgcgagaacattcctttttgtccatccttagagcctgactctctggcaaaagtcacatatgatttcgacaagctcgtgcatgagctcttcggcaacagctcccaagtgggttggaaacactgggggcagtctcaggggcgtcgccgaaaaggcaactgcatcaatctaccaaccggagagtgctctattttcgggtacttcgtggatattgagcagtgcgagtttatcccatggtcggacctggtcccaaatgatcagactctaattcagcgagggactagcctgctgactaatttacagcgtagcggtggcaatttcctgaagatcactgagtgtggcgagtgtattaattacaccgcaactcgggataccacctgtttgtcttttttgatgtctcttcttctcaagaattcttgcccggtgctactgacaggagaatctggggtggggaagacagcagcaatcaaccagatgcttgaaaagctcgaaggacctggagcttttgatattaagcacggcagtatcctgggcgataccctgttatactcagaaattaaaaaatctagcagtctaaaacagaacatcacaatactcattcccgagacgcacaagactgctaccggctcttccgacaatccaacaaaaaaacccgaagtccgcactaataaaaaactactcaaaaataatgatcacaagggcgttgtggtaagcaccattaatttttctaccaatgtcacggccgcaaagacaaaggaaatgattttgaagaagctcattcggaggacaaaagacacactgggcgcacctaagaataatcggatcctgatcttcattgatgatatgaacatgcccgtgagtgacatgtatggcgctcagccgccattagaactgatcagacagttacttgacctcggaggtgtttacgataccgagaaaaacacttggaagaacattcaagacctgtccatcgtcgccgcttgcgttccagtggttaatgatatcagtcctcgcctgctcaagcacttttcaatgctagtgttgcctcatccgtcacaggatattctctgcactatctttcaagcccaccttggcatctatttttccattaacaattttacacctgaagtccagaagtctaaagatcagataatttcatgcagtctggcgatttatcatcaagtgcggcagaatatgctacccaccccaactaaatgccactacatgtttaacctgcgcgacatgttcaagctattgctaggcctcctacaggcggatagaactgtggtgaactcaaaagagatggccgcattactgtttgtgcatgaggccacccgagtgtttcacgacagactgatcgatttcactgataagtccctgttttaccgactcctgtcccgcgagttagagaactgcttccagatcggcatcgatggctgtggcaaaaaaacatgtgcaacattggcctgctacttgactgataataagctatatagagttccaatttcccataaatgtgcctacatcgaattcaaagaggtgtttaaaaaagtgttcatccatgccggactgaagggaaaacccacagttctcatggtccctaatctgaatatcgagcaggattcctttctggaagatctgaattacattataagctccggacggatcccagacctgtttgagaacgtggagctggattccattgcaatgaagatccgctacctcacagagcagagtggtcatatggataataggcagtcactactgagttttttccagaagaggatatacaaaaacctacatatctttgtgatcatgagccctgaaggccctagcttccgccagaactgtcgtgtgtacccatccatgatcagctcctgtaccatcgattggtatgagcgttggcctgaagaggcgctcttgatagtggcaaattcctttctcaaggagaaagtcaactttgagaacagagagaacctcaaagagaaactagcccctacatgtgtgcagattcataagtccatgaaggacctaaacaggaagtatttcgaggaaaccggtcgattttactacacaactcccaacagttacctgcagttcatggagaccttcgctcatattctgagggctcgagaggaggaaatgcaaacaaagcgcgaccggttccacatgggactgtctacaatacttgaagccacgaccctcgtgacggaaatgcaggaagaattgctgatcctgggccctcaggtggaacagaagaccaaggagaccgaaaccctcatggaaaaattaagaaaagatagtcaggtggtcgagaaggttcagatgctcgtgaagcaggacgaggagatcgttgcagaggaagtcagaattgttgaggactatgctcagaagacagctaacgagctgaagtctgttttacccgctttcgataaagctattgtggcattaaatgctttggacaaagcggatgttgcagagttaagagtttataccaggcctcccttcctagttctgactgtgatgaacgctgtgtgcatcctcctccagaagaaacctaactgggctactgctaaactgctgctttcagagaccggcttcctcaaaaaactgatcaacctagacaaagacagtatcccagacaaggtgtttgtgaaactcaaaaaaatagtgaccctcccagatttcaacccacataaaatatcgctcgtgtcagtggcatgctgtagcctgtgccaatgggttattgctctgaacaactatcatgaggtgcagaaggtggtgggtcctaaacagatccaggtggcagaggcgcagaatgtattgaaaatagcgcgtcagagactggccgaaaagcagcgcggtctccagctggtggaagagcatctgctgtttctgcaggcggcatacaaggacacggtagctgagaagcagctgctggcgaatagaaaaacaatggcttcgcgtcggtttcaatgcgcatccgtccttctgaccgtgctggaggatgaaaaaacgaggtggcaggagacaataaaccaaattgataataagttagaaggtatactgggcgatatccttctcagtgccgcatgcatcgtctattcaggaattctaacacctgagtttaggcagttgatcgtcaataaatgggagacgttttgtattgagaacggaatttctctgtctagtaaattctcactgataaaagttatggctcagaagtatgagatctcgagatggcacaatcagggattgccacatgggcagtatagcgtggaaaatgctattttgatcaaaaatggtcagcagtggccgcttcttatcgatccgcatagacaggcccacaagtggatccggcagatggagggttcaagattgcagaaattatccattgaagactccaattataccaagaagatcgaaaacgcaatgaaaactggaggtagcgttttgctgcagaacctcctggagacacttgcacccggtctgaaagcgattctcaagaaggacatctaccaaaagaagggccactatttcatccgtgtcggcgatgcagagttcgagtataatagcaattttcggctatacttgtcaaccgaaattgacaatcctcattttctgccctcggtttataatttcgtcaccatgataaattttacagttacctttcaggggttgcaagaccagctgctctctaccgtcgtgacccatgaagtcccccatctggaggaccagagaagcaagttacttgaatcaatcagcttagatgccatcaccctcgaggagcttgaagaaaagacccttaacctgctgcagaaggcacttgggtccatcctggacgacgataaaattgtcgacacattgcggaagagtaagatgacctccaatgaaatctctaagagaattgaagccaccaaaaaagctgaatccgagatccaggccatcagaaaaaattatttgcccatcgccacacgaggcgctttgctctattttctggtggccgacctcacccaaataaactacatgtatcaattctctctcgactggttccaccaggtgtttgtcagtagcgttgtatccaaaagtaaagaacaggaacattccttcaagcgcgagaaagtctccccgaaagaagtgcacgaatttatcagcatatcaaaggagcctaatctggaaaacgagaagaatctgctcgataagcacatcaagagcgctatcgatatgttgacaaaatcgattttcaaggtcgtatctagtgcgctgtttaatgaagataagctctgctttagtttcaggctctgcaccgtgatcatgcagaacaatgccaacggaaatctgatacaggacgatattgggttcctgcctgaggaggagtggaatatcttcttatatagcggaattcttattaacatcaagtctgcgctctcacagtcccgcctgacctcaacgttcgagataggcgagagccagcatctgcagtggctgtccgatagcaggtggcgccagtgccaatatgtctctactcacttggagccatttagtcttctttgtaagtcactgctttctaacgttagtcaatgggacaccttcaagaattccaaggcggtgtattcccttatcagtacacctttcagcagcgagaatgcttctctggaggagaatactaaaccaccagaagaaactgagctcctgaacgagaacaaggagacgtgtaacccaatcaactttccgtgggagaaactcacgagtttccagcggctgattctggtgaaggtgctgagaccggagagcctgaataactcagtgagaaagttcatcactgagaagatgggaaataaatacttgcagcggaccggagtgaaccttaaagacgcttacaaaggctctaatgcgaggacacctctgattctaatccaaacccacggaatcgacctgaccaatatcctgcttcggtttgcccaggagcttaaggggacaactcatcatgtaacaatcatcagtttgggaagagatcaggccgcaaaagctgaggatcttattcttaaggcacttacgaaaacacaacaatgggtgtttctccaaaactgccatctggcgacaagctttatgcctagactgtgcactatagtggaaagctttaatagccccaatgtaacaatcgaccctgaattcaggctatggctgtcctccaaatcctacagctcattccccatcccagttcttaagaagggcctcaaaattgcagtggagtctccacagggcctgaagtctaacctcctacaaacctttgggtgtaccggctccggtgaggtgacagaagagatcttcgaaaatccagattgcggccagtggtggaagaaattgctgttctcactctgcttttttaacgccgtaattaatgaacggaagaattacggcattctgggttggaatattgcatataagttcaactcttctgacttgggggtggccatcaaggtccttgagaattccctaaggggccagcctagtatctcatggcaggcactgcggtaccttatcggcgaggtgatttacggagggagagtcatagacaattgggataagcggtgtctgaagacattgctctacaagttttgtaatcccgaagttttgaaagatgacttttcgtttagtcggagtgcttcgatcaaagattatatccacatcatacagtccctgcccgacgacgatttgcccgaggtcctagggattcacccggaagccattcgctcttgttgggagacccagggagagaaattcattgaaaatttgattgctatgcagcccaagaccaccacggcaaacctcatgattcgccctgagcagtctaaggatgagctagtcatggagattcttagtgacctcttaaagcgtttgccattaaccgtggaaaaggaggaaattgctgttggcaccccttccactttgaaatcgatgatgtcctcatccatttgggagagtttatccaagaaccttaaagaccacgaccccctcatccactgcgtgctgctcacttttttgaagcaggagattaaaaggttcgacaaactcctgttcgtgatccacaagtccctgaaagacttacaattggccattaaaggggaaatcatattaacccaagagttagaagaaattttcaacagctttctcaatatgcgagtgccaactctttggcagaagcacgcttaccgcagttgcaaaccactgagctcttggattgatgatctgatacagcgcttgaactttttcaacacctgggctaaagtcgcgtatacagctattcaaagacggtatatgcggtttgtgaccgtgtggaaacagtcaattccctccacaagccagaaatgcaaacaccctgaggactccgaaaacaatttttttgaaggatttcccagccggtattggttgcctgccttcttctttccacaagcttttttggccgctgtgctgcaagactatggacgctccaggggtatcgccgtcgacgcactcactttcacccatcatgtgatctctaacacgactgacaaggatgagaaattctccgtgtttatgccaaagaagctcaatatcgtgcgcagggcattcaagggttctgcctcttcccatacaggggtgtacatctttggactgttcatcgagggggcaagatggaacagggagcagaagatccttgaggactccttgcccctggaaatgtgctgcgattttcccgatatttactttcttcctacaaagatcagtacaaaaacaccgaacgcgtctaaccaaacggattctgagctgtacgcatttgagtgtccagtgtaccagacgcccgaacgaagccgcattctggctactactgggctcccgactaacttcctgacctccgtatatttatccactaagaaaccaccttcacactggattaccatgcgcgtggcactgctctgtgagaaaaacgagaaataa

SEQ ID NO: 221431 - DNA, 10524 bp, synthetic construct
  misc_feature 1..10524: note = Description of Artificial Sequence: Synthetic coding sequence
  source 1..10524: mol_type = other DNA
atgggtaggcggagccaatggatctgggccatgaggtgtcagatgctagtgcccgtactatccctccatattggcttagcacgggctctgggctgtggctgtatagcgtccaagatcgagtgcctaatcaggtgcaacgctccttttccattactggatgccgtgggaagcgttgcgtctcaagagctgcagagtctgacgggcactgttggggtgacgtccggagccgctgcatatccaaggtggaacctcgcaagggcaagagcccctccgcacctccctggcacccaggatcccctgcgaagggtccgcgaccctacacctatcgttgcaagttctcctggtcgaagaagaggatcatggtcaggcggatacggccaggaggcgtccgagcctggcgttgtcggcttatgttgcgccgtgttaccaatccatccttctctggcgctcgcaggcgttggaggccctgatttgagacggtttcaggaaggaccgcagcgccctagcgatcacggtgccgcagagaaacacatggagactttcattcctatagatctcaccactgagaaccaggagatggacaaggaagagaccaagacgaaacccaggctcctgagatatgaggagaagaaatatgaggatgttaagccgttagagacacagcctgccgaaattgctgagaaggaaacgttagagtacaaaaccgttcgcaccttctccgagtccctcaagtccgagaagactgaggagccgaaagacgatgacgtcattcgcaacatcatcaggctgcgggaaaaactcggctggcagactatccttccacagcattcattaaaatatggaagctctaagatcgctatccaaaagattacattgaagaaacccctggaagatgacggcgagttcgtatactgcctgcccaggaaatccccaaaatccttatacaatccatacgatctacaagttgtgtcagctcatacagctaagcactgtaaggagttttgggtcatcacagccagttttatctccaaacttgattcttccagaacctactccctcgacgaattctgcgaagaacagctgcagcaggcgacgcaagccctgaaacagctcgaggatatcagaaacaaggcaatttcggagatgaaatccacttttctgaaagtcgcggagaagaacgagataaaggagtacttcgagagcaagctgtctgaggatgacacgacacacttcaaattgcccaagtaccgcaggctcctggaaactttctttaagtttgtcatgttggtggattacatctttcaggagctaatcaggcaacttatgaatactgccgtgacccttctcctcgagctcttcaatgggagtgccggaatgcccttctcagtggaaaagaaaaacgaaaacctcatcagaacgtttaaggataatagcttccctacaggtaagacgaccaacgattgcgaggagctcgtagacaatagcaagttacacgctatcagtgtacagaagtctgaggtgaaaaccgataccgacatcaatgaaatcctgaactccgtcgaagtcgggaaggatctccggaagacctatgcgccaattttcgaggtgaacctgtgtctacgcatccccgcagagagtgatagctccgagaacagcaaagaaaatttccatgaatctgaccaatgcccagaggagtgcgttatgttcgaagatgagatgtcggaaaataaggataattgcgtcaagaaacattcatcagaggaacttctccctaaagccaagaagtctaaggagatttcttacaatctggaagacatcattagcgccaccatcacccctctgtgccaggacccgcagctgtctatttttattgatctggtgtctatcatggatttacccaataaaactgggagtatcattcactacaaggaacagaccagatggccagactgccacattttgttcgaaacagacccggcataccaaaacattattgtcaatctcctcacgattatcggaaattctatggggctggtcaatgcctatagccataaattcattaagtactgtacaatgaccgaaaaagccaaaattatgtccatgaagatttcgagcatgggcgaactgacatccaaggagttcgaagccattctgaacagattcagaaactatttcaggcacattgtcaacatggccatcgagaagcggatcggaatcttcaacgttgtcgtcgagtccagcctgcagcagcttgagtgtgacccgaccgaaatcgaggagttcttggagcactttatatttctcaacgccatttcgtcaaaaatctcaaaactcgaaaaggaattcctgacaatgtcacagctgtactccgttgctaaacaccatcagattcatatcagtgaggagcaaatagcaatttttcaagtgcttctactaaagttctcccagctgaagtcatcaatgaagctgtcaaaaataaacaaagataccgccatcacaaaattccgcgataatcttgaggcttgcattagtggtctgcatgtcgatgttggaaatctgaaagccaaaatcagaacccccctgctgctatgtgcaggcacgcaggtatccacggctatggagatgatccaaactctgagcggcgaggcggcatccctgactaataaggctaaggcgtactctcattatcaggattgctttagcgacagtcagtcacacatgcattctgttaacgtcgaggagataacccagatagttctgtccgaaatctccgacatagaaggtgacttaacacttcggaagaaactgtgggaggctcaagaagaatggaaaagagctagttgggagtggaggaactcatctctccagagcatcgacgtcgaatccgtacagcggaacgtgtccaaattgatgcacatcatatcagtcctggagaaggaaatttatagcatcttcatcataccatctattgatgacatctctgcccaactcgaggaatcccaggttatactcgccaccattaaagggtcaccacacataggacccataaagagccagatcatgttctataacgactgcgttaagagtttcgtttcaagttactcacgggaaaagctcgagaaggtgcacgcgggtctgatgtgtcatctggaagaagtagcagatttggtcgtgctggacacgtccaactctagaaccaaagccatcctgggagcgctgttaattctgtatgttcattgtagggatatcgtcataaacctgctcctgaagaatatcttcaacgccgaggattttgaatggacccgccacctgcagtacaagtggaacgaaaagcaaaaactctgctacgtgtctcagggcaatgccagcttcacctatggttacgagtacctgggatgtacttcccgtctggtgatcacacccctcacagataggtgctggctcactctcatggaggctctgcacctgaacctaggtgggtgcccagcaggcccagcgggaacagggaagaccgagaccgtgaaggatttagccaaatgcgctttgtttgccttcaagtgcaacacagctctgatcaagctgccaaatagcctcatagttctgacgtgttttggcttggagaaaactgtcctggtgatgaatacggtgatgtccttcaggtttgtcctggaaggcaaagagattagaattaatatgtcctgtgcagtgttcattactatgaacccacgctacgggggtggagtcgagcttcctgacaatttgaagtccctctttaggccagtcgctatgatggttccccattaccagatgatcgctgagatcatactgtttagtttcggattcaaatccgccaatagtctgagcggcaagctcacaaacctatatgagttagcaagaaagcagttgtcgcagcaggatcactacaacttcggtctcaggtcactgaaaatcgtgttgattatggccggaaccaagaagcgcgagtttaaatgcgatacaagtgattcactatcggaagccgatgagacactgatcgttattgaagcaattcgcgaagccagcctgccaaaatgtcccccagaagatgtaccactatttgaaaacataataggcgacatctttcctgaagtgaccgtgctgaaggttaaccagttggccctggaaaaggtgatttacaccgccacacagcaactgggcctccaaaactggagcagtcagaaggagaagattatccagttctataaccagctccaagtgtgcgtgggggtgatgcttgtggggccaacagggggaggtaaaacaactgtcaggcgtatccttgagaaggcattgactctgttgccgattgctgatttcctctcagttgcggagaggaagtcagcaagtaagattagtgaacgcaagggtaaagtggacatctgcgtgttgaaccccaaatgcgtgacactgtcagagctctatgggcagctggaccccaatactatggagtggaccgatgggcttctatcagctactatcaggtcatatgtttattttaacactcccaaaaatactaagaaagacattgatttgcggctaaaaagcaggatctcagacctgtctaatgtctttaagctggactcctcggatactaccgagacagatgacaacatcttcgaagaaattgagaaggttgtcaagatccccgagaatcacaactttgactggcagtggataattctggatggaccagtcgacaccttctgggtggaaaatctgaactccgtcttggacgatactcggactctgtgcctggccaattcggaaaggattgccctaacaaataagatacgagtgatcttcgaagtggataacctttcacaggcatcgcctgctaccgtgtcacggtgtgccatggtatatatggatcctgtggatctggggtgggaaccatatgtcaagtcatggctcctgaagacctccaagatcatctctcaatccggagtggattgtctggagtttatgataaagaattccgtcactgatgggctgcagtttataagaaatcgtcaaaagttccagccctatcctatggaggacatcaccgtggtgattaccctctgtcggattctcgacgctttctttgattttatgggaaagaatggtgggtttgagcagtctgacgacctaaatgacactagctcaaaggaagccaactcccagcgcgaatccgtcacattcaaggacatcgagaaaagggatgagaacacttggtatcctgaaaaaaacccagacaaactgaccaaaatcatacagaagctattcgtgtttgcgttcacctgggcatttggtggagcactcaaccgggaggacgaacatcgagaaaatattcccttttgccctagcctggaacccgactctctggctaaagtgacctacgactttgacaagctcgtgcacgagctgttcggaaactcttctcaggtcggaatcaatctgcccaccggggaatgcagtattttcggttatttcgtcgatatagaacagtgcgaattcatcccatggagcgaccttgtgccaaatgaccaaacattgatccagagggataatcccacgaagaaaccagaggtgagaactaacaagaaactgctcaaaaataacgatcacaaaggagtagtggtgtctacaattaatttttccaccaacgtcacagctgcaaaaaccaaggagatgatcctgaaaaagctgatcaggagaaccaaggacacgctgggcgcacccaaaaacaacaggattctcatctttatcgacgacatgaatatgccagtgtctgacatgtacggggctcaaccgcctctggagctcatccgtcagttgttggacttaggcggtgtgtacgatacggaaaagaatacttggaagaatatccaagatctgtcaatcgtggccgcatgtgtgcccgtcgtcaacgatatctcccctaggctgctaaaacacttcagcatgctcgtcctgccacatccgtcgcaagatatcctgtgcactattttccagatcggaattgacgggtgcggtaaaaaaacctgtgccacgctggcctgttacttgacagataacaagctgtaccgcgttcccatctcccacaagtgcgcctatattgagtttaaagaggtctttaagaaagtgttcatccacgctggattgaaaggaaagcccacagtcctcatggtacctaacttaaacatcgagcaggactcatttctcgaggatcttaactatattattagttccggcagaatccccgatttattcgagaatgtcgaattagactccattgcaatgaaaattaggtatcttactgagcagagtggtcatatggacaacaggcaatccctgctgagcttctttcagaaacgcatatacaagaacctgcacatttttgtgataatgagtcctgagggaccatcttttcgccagaactgtagagtctatccaagcatgataagctcctgcaccatcgactggtatgagcggtggcccgaagaagcgcttctcatagttgctaactcatttctaaaagagaaggtcaatttcgagaaccgagaaaatctcaaagaaaaactggcccctacctgcgtgcagatccacaaaagtatgaaggacctgaatcggaaatattttgaggagacagggaggttctattatacaacacctaattcttatctgcagtttatggagacatttgctcacatcctacgcgctcgggaagaggagatgcagaccaaaagagataggttccatatgggcctgtccaccattctggaagccactaccctcgtgactgagatgcaggaggagctcttgattttgggaccacaggtcgagcagaaaactaaagagaccgagactcttatggaaaaattgcgaaaggattcccaggtggttgagaaggtgcaaatgctggtcaaacaggatgaggagatagtggccgaagaggtaaggattgtagaagactacgcgcaaaagacagcaaatgagctgaagtccgtcttacccgcttttgataaagctatcgtggccctgaacgccctcgacaaggcagacgtagccgaactgcgggtgtacactcgtcctcccttcctggtcttgacagtgatgaatgcagtgtgtatcttgctacagaaaaaaccaaactgggcgactgccaagctgctgctgagtgagaccgggttcctgaagaagctgataaatctggacaaggacagcatacctgacaaagtattcgttaaactcaagaagatcgtcacactgcccgacttcaacccacataaaatctctttagtcagcgttgcatgttgttctctgtgtcagtgggttattgccctgaacaattaccacgaggtccagaaggtcgtcgggccaaaacagatccaggtagctgaagctcagaacgtgttgaaaatcgcgcgtcagagacttgctgaaaagcagagggggctgcagctcatctccagatggcacaaccagggcctgccccacggacagtatagtgtcgaaaatgctatcctgatcaagaatgggcagcagtggcctctgcttattgacccccatagacaagcacacaagtggattaggcagatggagggatccagattacagaagcttagcatcgaggatagcaactacacaaagaaaatcgagaatgccatgaagactgggggatctgtgctgctgcaaagctgtcaggcaagcacgtggagaaagaaactctatttgtcaactgaaatcgataatcctcatttcctcccaagcgtgtataattttgtgaccatgatcaacttcactgttacttttcaagggttacaggaccagctgctgagtaccgtcgtgacacatgaagttccccaccttgaggaccaacgctccaagttgttagagtctatttctcttgacgccataacgctggaagagttggaggaaaagaccctgaatctgctgcagaaggctttgggcagtatcttggacgatgataagattgtggacacactacgcaaaagtaaaatgacctctaatgaaatctcaaagaggatcgaggccaccaagaaggcagagagcgagatacaagcaatccgcaagaactaccttccaatcgcaaccagaggcgcactactgtactttttggttgccgatctgacacagatcaactatatgtaccaattttcccttgactggttccaccaagtgttcgtctcatcggtggtaagcaaatcaaaggagcaggagcactcattcaagcgggaaaaagtgtcaccaaaagaggtacacgaattcatatcgatctcaaaggagcccaacctcgaaaacgaaaagaatctgctggacaaacacatcaaaagcgctattgacatgctaacaaagagcattttcaaggtggtctcatcagcccttttcaacgaagacaagctgtgttttagcttccgcctttgcacagttatcatgcaaaacaacgctaacggaaacttaattcaggacgatatcgggttcctcccagaggaggagtggaacatctttctgtacagtggtattttaataaacattaagagtgctctctcacagagccgcctaacatctaccttcgaaataggcgagtcgcagcacctccagtggctcagtgacagtcgttggagacagtgccagtatgtaagtacccacctcgagccttttagtctcctttgtaagagcctcctctccaacgtttcacaatgggacactttcaagaactcgaaggccgtttactccttgatttcaacaccattcagttcggaaaatgccagcctggaggagaacaccaagccccctgaggagaagcacacgttctgccttttgttgcgcgcaatcaaccataccgggaccgacctgggacccgttggcagagggcagtggctgacttctaccgcatgcgatcgacacaccgacgtatgctcttttagcttcgccctcaatgatggagtccctgacgtggaacacgtccaggatatcttctacgggcactgtgtcgacaaatatcacgtgaaggttctgcgccctgagtcactgaataattccgtgcgcaaattcattactgagaaaatgggaaataagtatttacaaagaacgggggttaatctgaaagatgcctacaagggatcaaatgctcgaacacctcttatcctgatccagacccatggaagcgccagtataaaggattacatccacatcatccaatccttaccagatgacgacttgccagaagtgctgggtatccatcctgaagctattcggtcttgctgggaaacccagggagaaaaatttatagaaaacctgattgctatgcaaccaaaaactacaactgccaacctgatgatacgcccagaacaatccaaggacgaattggtgatggagattttatccgacctgctgaaaaggctgcccctgaccgtcgaaaaggaggaaatagctgtgggcactccctcgaccctgaagtctatgatgagttctagcatttgggagtctttgtctaaaaacctcaaggaccacgacccgctcatccattgcgtgctgttgaccttcttgaaacaggaaatcaaaagatttgataagttgcttttcgtcattcataagagtctgaaggacctccaactggccattaagggggagattattttgactcaggagcttgaggaaatcttcaacagttttttaaatatgagagtgcccacactttggcagaaacacgcgtatcgctcctgtaagccactctcatcttggatcgatgatttaattcagaggctgaatttctttaacacatgggctaaggtagcttacacagctattcagcggcgatatatgaggtttgttaccgtgtggaagcagagtattccgtcgaccagccaaaaatgtaagcacccggaggacagtgagaacaactttttcgaaggatttccatctagatactggttaccagcctttttctttcctcaggcgttccttgctgcggtgctacaggattacggacgctcaagaggtatcgccgtcgacgccctcacgtttacacaccacgtcattagcaacactaccgacaaggatgaaaaattttccgtttttatgcctaaaaaactcaatatcgtacgacgggctttcaaaggatcggcctccagccacaccggggtttatatcttcggtctttttatcgagggcgcacgctggaaccgagagcagaaaattctggaagatagtctacctctagagatgtgttgtgatttcccggatatttacttcctgcccactaaaatttccactaagacacccaacgccagcaatcagactgactccgaattgtacgcgtttgagtgtccagtctaccagactccagagcggagtcggatcctggccaccactggattacctactaacttcttgaccagtgtgtacctctccaccaagaaaccgcctagtcattggatcacgatgcgtgttgcccttctgtgcgaaaaaaacgaaaagtat

SEQ ID NO: 221432 - DNA, 2619 bp, synthetic construct
  misc_feature 1..2619: note = Description of Artificial Sequence: Synthetic coding sequence
  source 1..2619: mol_type = other DNA
atgtccagcaaggccgagaagaagcagaggttgtccggacggggttctagccaggctagttggtccggaagggctacacgtgcagcagtggccactcaggagcagggaaacgcccctgctgtgagtgaaccagagctgcaggccgagctgcctaaggaagaaccagagcctagactcgagggtccacaggcccagtcagaagagagcgtggaacctgaagcagacgttaagccactctttctgtctagggcggcacttacagggctagctgacgctgtctggacacaagagcacgacgcaattctcgaacatttcgcccaggatccaacagagtcaattttgactatattcatcgacccatgttttggtctgaaactcgagctcggcatgcccgtgcagacccaaaaccagcttgtgtactttattagacaggcaccagtgcctatcacctgggagaatttcgaagccacagtgcagtttggtacggtgcgaggcccatacattccggcactgctgagacttctgggaggggtgttcgcacctcagatatttgccaacaccgggtggccagagagcatcaggaatcatttcgctagccacttgcacaagtttctcgcatgcttgacagatactaggtacaagctggagggacatactgtgctctatatcccagccgaggcaatgaacatgaaaccagaaatggtcattaaagacaaggaattggtacagcgcctggagaccagcatgatccattggactcgacaaattaaagaaatgctgtccgcgcaggaaaccgtagaaaccggcgagaacctcgggccactggaagaaattgagttctggcgtaatcggtgtatggacctgtccggaatctctaagcagttagtcaaaaagggggtaaagcacgtagaatcgattctgcacctggccaaatcttcatatcttgccccatttatgaagctggcccaacagatccaggacggctctcggcaagctcagtcaaacctgacatttctcagcatcctgaaagagccataccaggagcttgcctttatgaaacctaaagacatcagttccaagctgcccaaattaatatcgctgatcaggatcatctgggtgaatagtccacattataatacccgggaacggctgacctctcttttcaggaaaatgtccaacgagataatcaggctctgctgtcacgccatcagcttagatcgtatctttgagggatatgtcagttccagcaaagaagatctgcaaggctgtatactttgctgccacgcctggaaagaccactatgtacaggccgttcagatgcatatccagtttagttcacgtgggtgggttctcgatcagacaagtattttcgcccaagtggacgcattcgtacagcgctgtaaagacctgatcgaggtgtgtgactgccagtaccattttgcaaggtgggaggacggcaaacagggcccactaccatgtttcttcggcgctcaggggcctcagatcaccaggaacctgcttgaaatcgaggacatctttcataaaaacctacacaccctccgtgccgtaaggggcggtatcctcgatgtgaagaatacctgctggcatgaggactataataaatttagggcgggaattaaggatctagaagtgatgacccaaaatttgatcaccagcgctttcgagctcgtgagagatgtgccgcacggcgtcctgttactggatacgttccaccggctggcgtcccgggaagcaattaagagaacctatgacaaaaaggctgtggatctgtacatgctgttcaactctgaactggctttagttaatcgggagaggaacaagaagtggcccgaccttgaaccctatgtagcccagtattcaggtaaagcaagatgggtgcatattctgcgacgacgaatcgatcgggtgatgacatgcttggccggagcacactttctcccgcgaattggaactgggaaagagtccgtccacacataccaacagatggtccaggccattgatgagttggtgcggaagacgtttcaggaatggacaagctccctcgacaaggactgcatcaggcggctagacaccccgctccttaggatttctcaggagaaagccggaatgctagacgtgaattttgacaagtacagaagccacctggctccgttcccctacacgccactactgcagctaagccaagaatttcacagccacctgctgacccctctcttcataattcttagtttatcccataccatatgcctcctgtccagcttctattttttcttttcttctttcatcttcgtttccccacacctgcctccctgttaccagcactttaatttcacgacctatcttaagacccagcagaataagaccatgatcggacaagctcgctggctaactcctgttattcccgcactgtgggaggccgaagttggagcctcactcgaaccaaggtcattaaggaccgcctgggccacttggcagaatcccgttagcgcaaagaataccaaaatctcttgggcctggtggcacaagcccgtggtttcagccacctgggagggggaagttgggggatcaccagaaccagggagacagcgtctgcagtag

SEQ ID NO: 221433 - DNA, 12591 bp, synthetic construct
  misc_feature 1..12591: note = Description of Artificial Sequence: Synthetic coding sequence
  source 1..12591: mol_type = other DNA
atgagtagcaaagccgaaaaaaaacagagattgtccggcagaggatcctctcaggccagctggagcggacgggctacaagggccgcagtggcaactcaggagcaggggaatgccccagctgtgtccgaacctgaactacaagccgaactccctaaggaagagcctgagcctagactggagggcccacaagctcagagtgaagaatctgttgagccggaggccgacgtgaaaccactgtttctgagtagggcagccttgaccgggttggctgatgccgtgtggacccaggagcatgacgcaatcctggaacactttgctcaggaccccacagagtctatcctgaccatatttatcgatccctgctttggattaaagctagagctcggcatgccagtccagacccagaatcaactggtgtatttcattcgccaggccccagtgcccatcacttgggaaaatttcgaggcaactgtccaatttgggacggtcaggggtccttacatcccagcactgctgcggttgctgggcggtgtgttcgcacctcagatctttgccaatactggatggcctgaatctataagaaatcacttcgcgtcacacctgcacaaatttcttgcttgcctgactgacacgagatacaaactagagggccataccgtgttgtacattcctgctgaagccatgaacatgaagccggaaatggtgatcaaagataaggagctcgtccagagactcgaaacttctatgatccattggaccaggcaaattaaagaaatgttgagcgcccaggagacagtcgagacaggagagaatctcgggcctctggaagagattgagttctggaggaatcggtgtatggacctgagcggtattagcaagcagctagtgaagaagggagtgaaacatgtcgagagcatcttacatctcgcaaaaagtagttacttagcgccatttatgaagcttgcccagcagatccaagatgggagtaggcaggcacaatccaatctgacttttctgagtattctgaaggagccttatcaggagctggccttcatgaaaccaaaggatatctccagcaaactgcccaagctgattagcctaataagaattatttgggtcaattccccccactacaacacacgcgagcggctgaccagcctgttccggaaggtctgtgactgtcagtaccactttgctcggtgggaggatggtaagcagggccctttgccttgcttcttcggcgctcaggggcctcaaatcactcgtaatcttctggaaatcgaggacatttttcacaagaatcttcacacactccgggctgtccgcggaggcattttggacgtgaagaatacttgctggcatgaggactataacaaattcagggccggaattaaggatctcgaagtgatgacccagaatctgattacatccgcctttgagttggtgcgggatgttccccacggcgtgctcctgctcgacacattccatcgcctggcgtcaagggaggctattaaaaggacctatgacaagaaggccgtggacctgtacatgctgtttaactccgaactggccctcgtcaacagggaacgcaataaaaagtggccagatctcgaaccctacgtggctcagtacagcggtaaagctagatgggtgcatattctgaggaggcgaattgaccgggtgatgacctgtctggccggagcccatttccttcccaggattgggacagggaaggagtccgtacacacataccagcagatggttcaggctatcgatgaactggttcggaagacattccaggagtggacttctagtttggacaaagattgcattaggcgtctcgatactcctttgttgcgcatctctcaggagaaggcgggaatgctcgatgtgaactttgacaagagcctcttaattctattcgcggagatcgattactgggagcgcttactgttcgaaactcctcactacgtggtgaacgtggcggagcgagccgaggatctccgcatccttcgggagaacctgttattagtggctcgggactacaataggatcatagcgatgctgagcccggacgagcaagcactattcaaagagagaatcaggctactcgataaaaaaatccacccaggccttaaaaaactgcactgggcgctaaaaggggctagcgccttcttcataactgaatgccgaatccatgcctcaaaggtccagatgatcgtgaacgagttcaaggcgagtacgctcactatcgggtggagggcccaggagatgtctgaaaagctactggtcagaataagtggcaagcgcgtttaccgagatctggaatttgaggaggaccaacgagaacaccgcgcagctgtccagcaaaagctaatgaacctgcaccaagatgtggtcaccatcatgacgaactcctacgaggtgtttaaaaatgatggcccagagatccagcagcagtggatgctctatatgatccgcctcgataggatgatggaggatgctctaagactgaatgtaaagtggagtttgctagaacttagtaaggccatcaatggagacggcaagaccagtcccaaccctctcttccaggtcctagtcatcctgaaaaatgacttacaaggcagcgtggcgcaggtcgagttttccccaactctccagacattggccggagtggtcaatgacatcgggaaccatctctttagtacgatatccgtgttctgccatcttccagacattctcactaaaagaaaattgcacagagaacctattcagaccgtggttgaacaggatgaggacataaaaaaaattcaaacccaaatctccagcgggatgactaataacgcgagccttcttcagaactatctgaagacatgggatatgtatcgcgagatctgggagattaataaggatagtttcattcaccgatatcagcggctaaatccaccagtctccagtttcgtggctgatatcgctcgatacaccgaggtggccaataacgtgcagaaagaggaaactgtcacaaatatccaattcgtgctgctggattgctcccacctcaaattttctctggtgcagcactgtaacgagtggcaaaacaaatttgcaactctcttgcgggagatggctgccggacgattgctagagcttcacacatacttaaaggagaatgcggagaaaatctctagaccacctcagacactcgaggagttaggcgtctctctgcaattagtcgatgcattaaaacacgatctggcaaatgtcgaaacccaaattccaccgatccatgagcagttcgcgatcctcgagaaatatgaagtaccagtagaggactccgtgctcgagatgcttgattcactaaacggtgaatgggtggtctttcagcagactttgctcgactcaaagcaaatgcttaagaagcacaaggagaaattcaagactggcctgattcattctgcggatgattttaaaaagaaagcccatacgttgctagaagactttgagttcaaaggacatttcacctccaatgtcggctatatgagcgccctggatcaaatcacccaggtcagagccatgcttatggccatgcgggaggaggaaaattctctgagggccaacctggggatctttaagattgagcaacctccatcaaaggatctacaaaatctagagaaggaattagatgcactccagcaaatttgggaaattgctagagattgggaagagaactggaacgagtggaagaccggacgttttcttatcttgcagaccgagaccatggagaccactgctcatgggctcttccggcgactcacaaaactggctaaggaatataaggatagaaactgggagataatcgaaactacccggtccaagattgaacagttcaagaggaccatgccactgatcagcgacctccgcaatccagccctgagggagaggcactgggaccaggtgcgagatgaaatccagagggaatttgaccaggaaagcgagagttttacattggaacagattgtggaactgggtatggatcaacacgtggagaagattggtgaaatctccgcgtcagcaactaaggaactggctatcgaggtggccctgcagaatatcgccaagacgtgggatgtcactcagctggatatcgtaccctacaaagataagggacaccatcggctgagaggaaccgaggaagtttttcaggccttggaagacaaccaggtggcactctctaccatgaaggccagtcggtttgtgaaggccttcgagaaggacgtggaccattgggaacggtgcctgtccctcatcctggaagtgattgagatgattctgaccgtgcaacgacaatggatgtacttagagaacatttttctgggggaggacatacgcaaacagctgccgaacgaaagtaccctctttgatcaggtgaattctaactggaaggccattatggataggatgaacaaggacaataatgcgctcagaagtactcaccatccaggcttgttagacacactgatcgaaatgaatactattctggaggatatacaaaagtcgctggatatgtacttagagactaagaggcatattttcccgagattctattttctcagcaatgacgacctgctagagattctcgggcagagtcggaatccggaagctgtacagccccatctgaagaagtgcttcgacaatattaaactcctgagaattcagaaggtcggcggtccctcatctaagtgggaggcagtgggtatgttttcaggcgacggcgaatacattgacttcttacatagcgtcttccttgaaggacccgttgaatcctggctgggggatgtggagcagacaatgcgcgtgaccttgagggacctgttgagaaattgccacctggccctacgtaagtttctgaacaaacgggataagtgggttaaggagtgggcaggacaagtcgtgataacggcttctcaaatacagtggacagcggatgttacaaaatgcctgctgaccgccaaagagagggcagacaaaaagattctcaaggtgatgaagaaaaaccaggtctcaatcctcaataagtacagtgaagctattagaggaaacctcaccaaaattatgaggttaaaaatagtcgctctggtgaccatcgagatccatgctcgtgacgtactggagaagctgtataagagtggtttgatggacgtaaatagttttgattggttgtcccaattgagattttattgggagaaagacttggatgactgcgtgatcaggcagacaaacacccagttccaatacaactacgagtacttggggaattcaggcagactggtcataacacctctgaccgatcgttgttatatgactttgactacggctctgcacctccatcgagggggatcccccaaaggcccagctggcacaggaaagaccgagacagtcaaggacctcggaaaagcacttggtatctatgtcatagtcgtcaactgcagcgagggtctggattataaatcaatgggcaggatgtacagtgggttggctcagacaggcgcatgggggtgctttgacgaatttaaccggattaacatcgaagtgttaagtgtggtggcccaccagattctgtgcattctgtctgccctggctgcgggacttactcactttcatttcgacgggttcgagattaacctggtatggagttgtggtatatttattactatgaacccaggatatgccggtcgcacagagctccccgagaatctcaagtcaatgtttagacccatcgctatggtcgtccccgactccacactgattgcagaaatcatcctcttcggcgagggattcggaaactgcaaaatacttgctaaaaaagtctatacactctactctttggccgtacagcaactaagtcggcaggatcactatgatttcgggctccgagctttaacgtctctgctaagatacgcaggtaagaagaggcggctgcagcccgacctcacagatgaggaggtgcttcttctgtctatgagggatatgaacatcgcaaaattgacctctgtggacgctcccctgtttaacgcaattgtgcaggacttattccctaacattgagctgccagtgatcgattatggaaagctgcgggagactgtggagcaggagatccgcgacatgggcctacagtctacgcctttcactttgacaaaggtgtttcagctgtatgaaacaaaaaacagtagacactcaacgatgatcgtggggtgtacaggaagcgggaaaacggctagctggcgcatcctccaagcaagcctcagctcactgtgcagagcaggcgatcctaattttaacattgtgagagaattcccgctgaatccaaaggctctgagccttggagagctttatggagagtacgacctgtctaccaacgaatggacggatggcatcctctcatcagtgatgaggactgcctgtgcagatgagaagcccgatgagaagtggatacttttcgatggccctgtggataccctgtggatcgaaaatatgaatagtgttatggatgacaacaaggtgctgacgctcattaacggcgagcgcattgcaatgccagagcaagtgagcctgcttttcgaggtagaagatctggctatggcaagccctgcgaccgtttctcgttgcgggatggtgtacactgactacgccgatctgggctggaagccgtatgtgcaatcctggctggaaaagcgccctaaggctgaggtggaaccgctgcagaggatgttcgaaaagctcatcaacaaaatgttagcctttaaaaaagacaattgtaaagaattagtcccactcccagaatactccggcattacctctctgtgtaaactgtattctgctcttgctacaccagagaacggggtgaatccggctgatggcgaaaattacgtgaccatggtggagatgactttcgtcttttcaatgatatggagtgtgtgcgcttctgtagacgaggaggggaggaagcggatcgactcttatctgagggagatcgagggatcatttccaaataaggacacggtttacgaatatttcgttgacccaaaaatccgctcttggacaagcttcgaggataagttaccaaagtcttggaggtatccccctaatgctccattctataagattatggtgcctacagttgatactgtgaggtacaattacttggtgtcatctctggtggctaaccagaacccaatcctgcttgtgggccctgtgggcacaggaaaaactagtatcgcacagagtgtgcttcagtctctccccagttctcaatggagcgtgctggtggtcaatatgagtgcccagaccacttctaacaatgtccagagtatcatcgagtctagggtggaaaagcgtacaaagggtgtatatgtcccatttggcggaaagtccatgattacctttatggacgaccttaatatgcctgcgaaggatatgtttggaagccaacccccattggagcttatacgtctttggatcgactacgggttctggtacgatagaaccaagcaaaccataaagtacatcagagagatgttcttaatggcagcaatgggtccccctgggggaggacggacagtaatatcccctcgcctgcgctcccgattcaacattatcaatatgacattccccactaaatctcagatcattagaatctttggcacgatgattaatcaaaaattacaggacttcgaagaggaagtcaaaccgatcggaaacgtagtgaccgaagcaaccctggatatgtacaacacagtggttcaacgctttctgcccacccccacaaagatgcactacttattcaatttgcgcgatatatctaaggtcttccaaggtatgctgcgagccaacaaagatttccacgacacaaaaagctctattactcgattatggatacacgaatgcttccgggtcttttccgacagactggtggacgcagctgatacggaagcctttatgggaatcattagcgacaagttagggtcttttttcgatctgacgtttcaccacctctgcccctcaaagcgacctccaatttttggcgattttctgaaagagcccaaggtctacgaggatcttacagacttgactgtgctgaaaacagtgatggaaacagccttgaatgaatacaatctctctccttccgtggtgccaatgcaactcgtgctttttcgggaagccattgaacatataacccggattgtgcgcgtgataggccagcctcggggaaatatgctgctagttggaatcggcggatctggaagacagtctctcgctcgactggcctcttcaatttgcgactacaccactttccagattgaagtcaccaagcactatcggaaacaggagttccgagacgatatcaagcgtctctaccggcaagcaggcgtcgaactcaagactaccagctttatcttcgtagacacccagattgccgatgaatcattccttgaggatattaacaacatcctgtccagcggagaggttcccaacctttataagccggacgagttcgaggaaatccagtcccatattatcgatcaggctcgcgtggagcaagttcccgaatccagcgacagtctgtttgcatatctgatagagagagtgcaaaacaatctccatatcgtgctttgcttaagccctatgggtgatccttttcgcaactggattcggcagtatccagctctggttaactgcacaacaattaactggttttctgagtggccacaggaagccctgctggaggtggccgagaaatgtcttattggcgtggacctcggaacacaggaaaacatacaccgaaaagtcgcacagattttcgtcaccatgcactggagcgtagctcaatatagtcagaagatgctgctagaacttagacgacacaactacgttaccccaactaaatatctcgaacttctgtccggctacaagaagctgcttggcgaaaagaggcaggagttgctggctcaggcaaacaagctgcgtacgggcctgtttaaaattgatgagacgagggagaaagtccaggttatgagccttgaactagaggatgctaagaaaaaggtggcggaatttcagaagcagtgtgaggagtacctcgtgatcatcgtgcaacagaagagagaggcagatgagcagcagaaagccctggagtcattaaacaagaaagatattggggaaatcaaatcctacggccgaccacccgctcaggttgaaatagtgatgcaggctgtcatgattctccggggaaatgaacctacctgggccgaggctaaacgccagctgggagaacagaattttattaaaagtttaattaatttcgataaggataatattagcgacaaggtcctcaaaaagatcggcgcttactgtgcccagcccgacttccagccagacatcatcggtagagtatccctcgccgctaagtcgctgtgcatgtgggtgcgtgccatggaactgtacggaaggctgtaccgcgttgtagagccaaaaagaatccggatgaacgctgccctggcgcagttgcgcgaaaagcaggctgcactggccgaggctcaggagaaactgcgagaggttgctgagaagttggaaatgttaaaaaagcagtacgacgagaagttggctcagaaggaagaactgcgcaaaaaatccgaagaaatggaactcaagctggagagggccggaatgctggtctccggcctagccggtgaaaaagcacggtgggaagaaaccgtccagggcttggaagaggaccttggttatttagtcggggactgtctgcttgccgcagcatttttatcctatatgggaccctttttgacaaattacagagacgaaatcgttaatcaaatctggattggaaagatctgggagctgcaggtaccctgctcaccttcctttgcaatagacaacttcttgtgcaaccccactaaggtgagggactggaacattcagggcctccctagcgatgcattttctactgagaacggcatcatagtgacacgcggaaatcggtgggcgctcatgatcgatccgcaagctcaggcactcaagtggatcaaaaacatggaaggtgggcagggtctcaagattattgacctgcagatgtctgattacctcaggattctggagcatgcaatccacttcggatatccagtccttctgcagaatgtacaggaatacctcgatccgactcttaatccaatgctaaacaagtcagttgccaggattggaggaaggctgttgatgcgaattggggacaaagaagtggagtataacaccaactttaggttttacatcaccacaaaactctcaaatccgcattactctccagaaacttctgccaagaccacaatcgtgaatttcgccgtcaaggaacagggcctggaggcccagctgctgggcatcgtggttaggaaggagcggcctgaactggaggaacagaaagacagcctggtcataaacatcgcagccggtaaacgcaaactcaaggagcttgaagatgagatcttgcgcttgttgaacgaagctactgggtctctgcttgatgacgtgcaactggtgaataccctccacacctctaaaattaccgcgactgaagtgaccgagcaactcgagacatctgaaacaaccgagataaacacggatttggccagagaagcgtacagaccatgcgcccagcgcgcaagcattctgttctttgttctaaacgatatgggctgtattgacccaatgtatcagttcagcttagacgcatacatatcactgtttatcctgagcattgataagtcccatcgaagcaacaaactagaggatagaattgactacctgaacgactatcacacttacgctgtctaccgatatacttgcaggacactgtttgagcgacacaaactgctcttttcatttcacatgtgtgcgaaaattctcgagaccagtggaaaattaaatatggacgaatataattttttcctgcgaggcggtgtcgtgttggacagagagggacagatggataacccatgcagctcatggttggctgacgcctactgggataatataactgaacttgataaactcactaacttccatggactgatgaacagcttcgagcaataccccagggactggcatctgtggtatactaatgcagctcccgagaaagccatgcttcccggtgaatgggaaaacgcatgtaacgaaatgcagagaatgctgatcgtccggtccctacggcaggaccgggtagcattctgcgtaacatctttcattattaccaacttaggaagccggtttatcgaaccacctgttctcaatatgaagtcagtgctggaggactctacaccccgttcgcctctggtcttcatcttgtctcctggcgtggatcccacaagcgccctcttgcaactcgccgaacacatgggtatggcccagaggttccatgcgctatccctgggccagggtcaggcacctattgcagccagactcctccgcgaaggagttacgcagggccactgggttttcctggctaactgccacctcagcctgagttggatgcccaatctcgacaagctggtggaacagttgcaagtcgaagaccctcacccatccttccggctgtggctgtcaagtattccccacccggactttcctatctctatactacaggtctctatcaaaatgacgacggagccgcctaagggcctaaaagccaacatgactaggctgtaccagcttatgtcagagccacagttcagccggtgtagcaagccagccaagtataaaaagctgttattcagtctgtgttttttccattcagtcctcctggaaagaaagaagttcctacaattgggctggaacattatttacgggttcaacgactctgatttcgaggtgagcgaaaacctgctgtctctgtacctcgacgaatacgaagagacgccttgggatgccttaaagtacctgatcgcaggtattaattacgggggtcacgtcaccgacgactgggataggcgattgctgaccacctacatcaatgactatttttgtgatcaatcactgtccacacccttccaccggttgtctgctttggagacatacttcatccctaaggatggaagcctagcctcttataaggagtacatttctcttctgccaggtatggaccccccagaagccttcggacaacatcctaatgcggacgtggcctcacagattactgaggctcaaacactgtttgacaccctcctgtccctgcaaccacagataactcctacacgagctggtggccagacccgagaggagaaggttctggaattggcagcagatgtcaaacagaaaattccggagatgattgactatgaaggtacgcaaaagctactggcgctggatccttcaccactgaacgtcgtcctgttgcaagaaatacagagatacaacacgttgatgcagaccatcctgtttagcctgaccgacctggaaatcccttcatgtgtatcccataagtccgagcgagtggtactcgaattgtcggcagtcaaacaccctagacagtag

SEQ ID NO: 221434 - DNA, 13284 bp, synthetic construct
  misc_feature 1..13284: note = Description of Artificial Sequence: Synthetic coding sequence
  source 1..13284: mol_type = other DNA
atgtctagcaaggccgagaaaaagcagcgactctctggccgagggagcagtcaggccagttggtccggacgggctactagagccgcagtggctacccaggaacaggggaacgctcctgctgtctctgagccagagctacaagctgaactaccaaaagaggagcccgagcccagactggaaggtccccaagcacagagcgaagaatctgtggagccagaggccgacgtaaaaccactgttcctaagtagagccgctctcacaggcctggcggatgctgtgtggacacaggagcacgatgccatacttgagcactttgcgcaagacccgaccgaatctattctgactatctttatagacccgtgttttggactaaagctcgaactgggaatgcccgtgcagacacaaaaccaactggtgtacttcataagacaggctccagtccctatcacgtgggaaaatttcgaagctaccgtccaattcgggacggtgcgcggaccatacataccagccctgctgcgacttctgggcggtgtttttgccccacagattttcgccaatactggctggcctgaatccatccgcaatcatttcgcgtcacatctccacaaatttctggcctgtctaaccgatacgcgctacaagttggaaggacacactgtgctgtacattccagcggaggccatgaatatgaagcctgagatggtgatcaaagataaagaactcgtccagaggctggagacttcaatgatccactggactcgacagataaaagaaatgctttcggcccaggagactgtggaaactggagaaaaccttggccctctcgaggagatcgagttttggcggaatcggtgtatggacctgagcggcatttctaaacaactggtgaagaaaggcgtgaaacacgtggagagtatcttgcatcttgctaaaagttcctatcttgcccctttcatgaagcttgcgcaacagattcaagatgggagcaggcaggcccaatcaaacctgaccttcttatccatcctgaaagaaccttatcaggagctagcattcatgaagcccaaggatatcagtagcaaactgccaaagctcatcagcctcataagaatcatctgggtgaactcaccccactacaacacccgggagcggctgacgagcctgtttcggaaagtctgtgactgccagtaccacttcgccagatgggaagacgggaagcagggccctctgccctgcttttttggagcccagggacctcagatcacaagaaatctcctagagatcgaggatatattccacaagaatctgcataccttacgagcagtgcgcggtgggattctggacgtgaagaatacttgttggcatgaggactacaacaagttccgagcaggaatcaaggacctggaagtgatgacacagaatctgataacctcggcttttgagctggtgagggatgtcccgcatggagtcctcctgctggatacttttcaccgcttagcctctcgagaggcgataaaacgaacatatgataagaaagcagtggacctttacatgcttttcaattctgagttggcactcgttaatagggagcgcaataagaagtggccggacctggaaccctatgttgcacagtactcagggaaagctagatgggtccacattctgagaaggagaatagatcgcgtcatgacttgccttgcgggtgcacactttctgccaaggattggtaccggaaaagaatcagtgcacacctaccagcagatggtacaggccatagatgaattagtgcggaagacatttcaagaatggacatcatcattggacaaggattgcatcagacgacttgatactcccctcttaagaatttcacaggaaaaggcgggtatgctcgatgttaattttgataagtccttactaattctgtttgctgagattgattattgggaacgtctgctttttgagacacctcactatgtcgtgaatgtagctgagagggccgaggatttgaggatcttgcgtgaaaacctcttattagtggccagggactacaataggattatagccatgctgtcccccgatgaacaagctctctttaaggaacgtatccgccttttggataaaaaaatacacccaggtcttaagaaactacattgggctttgaagggggcttcagcattcttcattactgagtgtaggatacacgcaagtaaagtgcaaatgatcgtaaacgaattcaaggctagtaccctcacaattggttggcgcgcacaggaaatgtctgagaagttgctggttcgtatatcagggaaaagagtgtatcgcgacttggagtttgaagaggatcagcgggagcatcgagccgcagtgcagcagaaactgatgaacttacatcaggacgtggtgacgatcatgaccaactcatacgaagtttttaagaacgacgggcctgagatccagcagcagtggatgctttatatgatccgactagacagaatgatggaagacgcactacggctcaacgtgaaatggtccctgctggagttgagcaaggccatcaacggcgacggaaagactagtccaaacccattgtttcaagtgcttgtgattctgaaaaatgacctccagggtagtgtggcacaggtggaattttcacccactttgcaaacactggccggagtggttaatgatatcggcaatcatctgttctctactatctctgtcttctgccatctacctgatatcttaactaaacgcaaactgcacagagaaccaatccaaacggtcgtggagcaggatgaggatatcaagaagatccagacccagatctccagcggtatgacaaacaacgcctcactgctgcagaactatctgaaaacctgggatatgtacagggagatctgggaaattaacaaggatagttttattcaccggtatcagagactcaaccccccagtgtcttcgttcgtggctgatattgcccgatacaccgaggtcgcgaataatgtccaaaaggaagagacagtaacaaatatacagtttgtgctgttggactgcagccacctcaagttcagcctggtccaacactgcaatgagtggcaaaataagttcgcgactctattgcgcgagatggccgctggcaggctgctggagctgcatacctaccttaaggaaaacgctgagaagatctctcggccacctcagacgctcgaagagctgggggtgtcgctgcagctagtggatgcactgaaacacgacctggccaatgtggagactcagatcccccctatccacgaacagtttgccattttagaaaaatacgaggtgcccgtggaagatagtgttctcgaaatgttggacagtctcaacggcgaatgggtggttttccaacagactcttctggactctaagcagatgttaaagaagcacaaggagaaatttaaaaccgggctgatacacagcgcggacgactttaaaaaaaaggcgcatacccttcttgaggattttgaattcaagggtcacttcacaagcaacgtgggatatatgtccgccctggaccagataactcaggttagagccatgttaatggcgatgagagaggaggagaattcacttcgagcaaatcttggcattttcaaaattgagcagcctccatcaaaggaccttcagaatttggaaaaggaattggacgcgctgcagcagatttgggagatagcaagagattgggaagaaaattggaacgagtggaaaacagggaggtttttgatccttcagaccgagactatggagaccactgcacatggcctgttcaggagacttactaaacttgctaaagagtacaaagaccgaaattgggagatcatagaaaccacccgatcaaagatcgaacagtttaagcgaaccatgccacttatatccgatctgcgtaatcctgccctacgcgaacgccactgggaccaggtgagagacgagattcaacgggagtttgatcaagagagcgagtctttcaccctggaacagattgtggagctgggcatggaccagcatgtggagaagatcggggaaatctctgcgtccgctactaaagagctggctatcgaggtggctctgcagaacatcgcaaagacctgggatgtgacccagctggacattgttccatacaaggacaaagggcaccaccgcctgcgaggtactgaagaagtattccaggccctggaggacaaccaggtcgccctatcgactatgaaggcctccagatttgtgaaggcatttgagaaggacgtggatcattgggaaaggtgtctgtcactcatcttagaggtgattgagatgattcttacagtgcagcgtcagtggatgtatttagaaaatatttttctgggagaagatatcaggaagcagcttcccaacgaaagcacgctcttcgaccaagtgaattcaaattggaaagcaataatggacagaatgaacaaagataacaacgctctgagatctacccatcatccagggctgctggacacactaattgaaatgaatactattctggaggatatccagaagagcctggatatgtatcttgaaacaaagagacatatctttccccgtttttacttcttgtctaatgacgatctgctagaaattcttggacagagcagaaaccccgaagctgtccagccacacctgaaaaagtgcttcgataacattaaactgctgcgtattcagaaagtgggtggacccagctctaagtgggaggctgtcggaatgttctccggcgacggcgagtacattgactttttgcattctgtgtttctggaaggtcccgtggagtcctggttgggcgacgttgagcaaaccatgagagtgacactccgcgacctgctgcgcaattgccacctcgcgctgagaaaattcctaaacaagcgcgataaatgggtgaaggaatgggctggacaggttgtgataaccgcatcacagatccagtggactgccgatgtgactaagtgtctgttgacggcaaaggagagggctgataaaaagatcctgaaggtcatgaagaaaaaccaggttagcattttgaacaagtactccgaagccatcaggggaaatctgacaaagattatgagactaaagatcgtcgcactggtgactattgagatacatgcgcgtgatgttttagagaagctgtacaaaagcggactcatggatgtgaattcattcgattggctgtcccaactccggttctactgggagaaggaccttgacgactgcgttatccgccagacaaatacccagtttcagtacaactacgaatacctcggtaattccggcaggttggtgataacgccactcacagatagatgctatatgactctcacaactgcgctgcacctccaccgcggaggaagtccaaagggacccgctgggaccgggaagactgagaccgtcaaggatctaggtaaggctctgggaatctatgttatcgtggttaactgttcagaggggctggattacaagtcaatgggcagaatgtactccggtctcgcgcagaccggtgcttggggatgctttgacgagttcaacagaatcaacatcgaggtactgagtgtggtggcgcaccagatcttgtgtattctgtccgctctcgctgctggccttacgcactttcattttgacggcttcgaaataaacttagtgtggtcatgcggtatctttattactatgaaccccggttatgcaggacggacagagctgcccgagaacctgaaatcgatgtttcgccctattgccatggttgtgccggatagtacacttatcgcagaaatcatcctgtttggagagggattcggcaactgcaaaattctggccaaaaaggtatatactctgtactcactggccgtacagcagctgagccgccaggatcactatgattttggcctcagggctctcacgtccctgttacgatatgccggtaagaagaggcggttgcagccagatctgactgacgaggaagtactgctactgtccatgagggacatgaatattgcaaaactgacaagcgtggacgcccctcttttcaatgccatcgtgcaggacctgttccccaatattgagctgcctgttattgactatgggaagctcagggagactgttgaacaggagattcgagatatgggcttgcagtctacacctttcaccctaactaaagttttccagctatacgagaccaaaaacagtcgacacagcactatgatagtggggtgtacaggctctgggaagactgcctcctggaggattctgcaggcttctctgagttccctctgtcgggctggcgacccaaatttcaacatagttagagaattccctcttaatcccaaggcactctctctgggtgaactgtatggcgagtatgatcttagcactaatgagtggacagacggcatcttgtcaagcgtgatgagaaccgcatgcgccgatgaaaaacccgatgagaaatggatcttgttcgacgggccagtggacaccctgtggatcgagaatatgaactcagtcatggacgacaacaaggtcttgactctgatcaacggcgagcggattgcgatgcctgagcaggtgtcgttgctctttgaagtcgaagatttggccatggccagcccggctactgtgtctcggtgcggcatggtgtatactgattacgctgacctgggatggaaaccctacgttcagagttggttagaaaagcggccaaaagcggaagtggaacctctgcaaaggatgtttgagaagctgataaacaagatgctcgcatttaagaaggataactgtaaggagttggtacccctcccagagtacagcggaattacttccctctgcaaactgtactctgccttggccactccggagaatggcgtcaatccggctgatggggagaattacgtgaccatggtggagatgacattcgtgtttagtatgatatggtctgtctgcgcgagtgtggacgaggagggacgaaaaaggatcgattcttaccttagagagattgaggggtcatttcctaataaggacaccgtgtatgagtatttcgtcgatccgaaaatcaggtcttggacgagctttgaggataaattaccaaagtcttggcgctatccgccaaatgcccctttttataagattatggtcccgaccgtcgatacagtgcgctacaactatctagttagcagtttggtcgccaaccagaatcctatcttactggtagggcctgtggggactggaaaaacgtctattgcacaaagtgtgctacagtctttgccttcctcacagtggagtgtactcgtggtgaatatgtccgcacagacgaccagcaataacgtgcagtctatcattgaatctagggtcgaaaagaggacaaaaggggtgtacgtaccattcggcggaaaaagtatgatcacctttatggatgaccttaacatgccagccaaagatatgtttggctcacagccccctctcgagctcatacgactgtggattgactatggtttttggtatgatcggaccaagcagaccatcaagtacatccgagaaatgtttctcatggcggcaatggggcctccgggaggaggcaggacagtgatttccccgcgtcttcgatcaaggttcaacattatcaatatgacttttccaacaaaatcgcagattattagaatctttggtaccatgatcaatcaaaagctgcaggattttgaggaggaagttaaacccatcgggaacgtagtgaccgaagccacactcgacatgtacaacactgtcgtgcagagatttctccctacgcctactaagatgcactacctatttaaccttagagacataagcaaggtcttccaagggatgctaagggccaacaaagacttccacgacaccaagagcagcatcacacgcctgtggatccatgagtgttttcgggtgttttccgatcgacttgtcgacgccgcagatacagaagcattcatggggattatatccgacaagctcggcagtttttttgatcttaccttccatcatctgtgtccctctaaacggccacctatatttggcgacttcctcaaggagcccaaggtgtatgaggacctgacagatctgacagtgctcaagacggtgatggagactgcactgaatgaatataatttgtccccgagcgtcgtgcctatgcagcttgttctctttagggaagccattgagcatatcactcgcattgtccgggtgatcggacagcctcgcggtaacatgttactggtgggcattggcggttccggaaggcaatctctcgcccgactggcctcgtcaatttgcgattataccacatttcagatcgaggtgacaaaacattataggaagcaggagttccgcgacgacatcaagagattatatagacaggctggcgtagaacttaagaccaccagtttcattttcgtggatacacagatcgctgacgaaagcttccttgaagatatcaacaacattctgtctagtggagaggtccccaatttgtacaagcctgacgagtttgaggagattcagtctcatatcatagaccaggctagggtcgagcaagtgcccgagtcttcggactctttattcgcctatctcattgaaagagtgcagaataacttacacattgttctttgcctgagtccaatgggtgacccattccggaattggataagacagtatcccgcacttgtaaattgtactaccatcaactggttctcagagtggcctcaggaagccttgctggaagtggcggagaagtgtcttatcggcgtggatctgggtactcaagagaacattcatcggaaagtagcccagatctttgtgacaatgcactggagcgtagctcagtattctcagaagatgctcctcgagctcagacgccacaactacgtcacacccaccaaatatctggaactgctcagtggctataaaaagcttctgggggaaaaacgacaggagctgctagcacaagcgaataagctcaggacagggctgttcaagattgatgaaactcgggaaaaggttcaggtgatgtcccttgaactggaggacgcaaagaagaaggttgcagaatttcagaaacagtgcgaagaataccttgtgatcatcgtgcagcagaagagagaggccgacgagcagcagaaggcagtcactgcgaactccgagaaaattgcagtagaagagatcaagtgccaggctctggccgacaatgctcagaaggatcttgaggaagccctcccagcgctggaagaagccatgcgggcactggaatccctcaataaaaaggatataggggagatcaaatcttacgggaggccccctgcacaggtggaaatcgttatgcaagccgtgatgattttgagaggcaatgagccaacctgggctgaagccaagaggcagctcggagaacagaatttcatcaagtcccttattaatttcgacaaggataatatctcagataaagtgctcaagaagatcggtgcgtactgtgctcagccagattttcagccagatattatcggccgtgtgagcttagccgcaaagtccctgtgtatgtgggtgcgcgctatggaactgtatgggcgactgtacagggtggtggagccaaaaaggattaggatgaacgccgctttggctcagctacgggaaaaacaagcagcactcgctgaggcacaggagaaattgcgagaggtcgccgagaagctggaaatgctgaagaagcagtacgacgagaagcttgcgcagaaagaagagctaagaaagaagagcgaggagatggagctgaaacttgaacgagccggtatgctcgtgtcaggactcgctggggagaaggccagatgggaggaaaccgtgcagggattagaagaggatttgggctatctagtgggagactgcctgctggccgctgctttcctttcatatatgggtccttttctgaccaactaccgcgatgagatcgtgaaccagatctggatcggcaaaatttgggagctacaagtgccttgcagtccctccttcgctatagacaacttcctctgtaatccaaccaaagtgagagactggaacattcagggccttccctccgatgcatttagcaccgagaacgggattatcgtcaccaggggcaacaggtgggctcttatgatcgacccccaggcccaggccttgaaatggataaaaaacatggagggagggcaaggactgaagattattgacctgcaaatgagcgattatctcagaatcttagaacacgcaattcatttcggatacccggtgctattacagaatgtccaggagtacctagatcccactcttaatcccatgcttaataagagcgttgcaaggattgggggtagactcttgatgcgcatcggggataaagaagtggagtacaacaccaattttaggttctatatcactacaaagctgtcaaatccccactatagtccggagactagcgctaaaaccaccatcgttaatttcgccgtgaaggagcagggtctggaagctcaactcttagggatcgtagtgcgcaaggagagacccgaactggaagaacagaaggacagcctggtcatcaacattgccgctggaaaaagaaaactaaaagaacttgaagatgagattcttcgacttctgaatgaggcaaccggctcccttctggacgatgttcaactggtcaacaccctacacacttcaaaaatcactgccacagaagtgaccgagcaactggaaacctctgaaactacagagatcaacactgatctggctcgcgaggcgtaccgcccttgcgcacagcgcgcatcaattctcttttttgtactgaatgatatgggatgcattgatcccatgtatcaatttagcctagacgcctatatttccctgttcatcctgtcgatagacaaatcgcaccgctcaaacaaactggaggaccgtatagactatttaaacgactatcacacatatgcggtgtatcgctacacctgtcgaactctattcgaacggcacaagctgttgttttctttccatatgtgtgccaaaatactcgagacttccggaaaactaaacatggatgagtataacttctttttaagaggcggtgttgttctggaccgagaggggcagatggacaatccatgtagttcctggctggctgatgcgtactgggacaacatcacggagctggataagctcaccaatttccacggcctgatgaattccttcgaacagtatccacgcgactggcacctgtggtacaccaacgccgctcccgagaaggctatgctgcccggtgagtgggaaaatgcttgtaatgagatgcagcggatgctaattgttaggtctctcagacaggacagagtagctttctgtgtgacctcattcatcatcacaaacctgggttcgagatttattgagccccctgtactaaacatgaagagcgtgcttgaggactctacacctaggtcccctctggtgtttattttgtcacctggggtggacccgacctccgccttgctccagctcgcagaacatatgggcatggcccaacggttccatgctctgtccctagggcaaggtcaggcgcctatcgccgcaagacttttgcgagagggggttacacagggtcattgggtgttccttgccaattgccacctctcactctcctggatgccgaatcttgataagctcgttgaacaactccaggtggaagatccacacccctcatttcgcctgtggctttcttcaatcccccaccctgatttcccaatctctattctacaggtgtccatcaagatgaccacggagccgccaaaaggactgaaagccaatatgacaaggttgtaccagctgatgagcgaaccccaattttcacggtgttcgaaacctgccaaatataaaaaacttttattctctctgtgtttcttccattcggtgctcttggagaggaagaagtttctccagctaggctggaacattatctacggatttaatgactctgatttcgaggtgtcggaaaacctcctgtccctgtacctcgatgaatatgaggaaacgccatgggatgccctgaaatacttaatcgctggcattaactacggtggccacgtgaccgatgattgggaccgccgtctcctgaccacttatattaatgattatttctgtgatcaaagcctctctacccctttccatcggctgtctgctctggaaacctatttcattcccaaagacgggagcctcgcgagttataaagagtatatttccctacttccaggtatggacccccctgaagcgtttgggcagcacccaaatgctgacgtggccagccagatcaccgaggcccaaaccctgttcgacactctgttaagtctgcagccgcagataacccctacccgtgctggaggccagacccgggaagaaaaggttctggaactggcagccgacgtgaagcagaagataccagaaatgatcgattatgaaggtacacagaagctgctggcactggatcctagccctttgaatgtcgtcctgttacaggaaatccaaaggtacaacactctgatgcaaacaattctattctcccttacagatttggagaaagggatccaggggctgatcgtgatgagcacctctctcgaggagatttttaactgcatctttgatgctcatgtgccccctctctggggtaaggcgtaccccagccaaaaaccactcgccgcatggacgcgggacctcgccatgagagtcgaacagttcgagctgtgggctagccgggcaagaccccctgtgatcttttggctcagtggctttacattccctaccggctttctgaccgcagtcttacagtccagcgctagacagaataacgtcagcgttgattccctgtcttgggagttcattgtcagcacagttgacgactcgaaccttgtgtacccaccgaaggacggcgtatgggtaagaggactgtacctggaaggcgctggctgggatcgcaaaaactcatgcctagtggaagcagaacccatgcagctggtatgcctcatgccaacaatccattttaggccagccgagtctcgcaaaaagtctgccaagggtatgtactcatgtccttgttattattaccctaatcgggctggaagtagtgatcgcgctagttttgtcatcggaatcgatctcaggtcaggggcaatgacacctgatcactggatcaaaagagggactgccttactgatgagtttggactcgtac

SEQ ID NO: 221435 - DNA, 12351 bp, synthetic construct
  misc_feature 1..12351: note = Description of Artificial Sequence: Synthetic coding sequence
  source 1..12351: mol_type = other DNA
atgggtgccactgggagactggaattgactctggctgccccaccgcaccctgggccagcttttcagaggagtaaagctcgtgagacacagggcgaggaagaaggatcagaaatgcagattgccaaatccgatagcatccaccatatgtctcactcccaagggcagccggaactcccacccctgcccgcaagcgccaacgaggaaccctccggactctatcaaactgtcatgtcgcactcattctacccgccacttatgcagcgaactagctggactctcgctgcaccctttaaggagcagcatcatcatcggggaccttcagattcaatcgcaaataactacagcctaatggcccaggatctaaaactcaaggacctcctcaaggtgtatcagcccgctactataagtgtgccccgagatcggactgggcagggcttacccagctcaggtaacagatcctccagcgagccgatgagaaagaagaccaagttctcttcgcggaacaaggaggattcgacgcggattaaattagccttcaagacctctatttttagccccatgaagaaggaggtgaaaacatctctaacttttcctggtagccggccaatgtcaccagagcagcagctggacgtgatgttgcagcaggagatggagatggaaagtaaggagaaaaagccaagtgaatcagacctggagaggtactattattacttgaccaatggaattagaaaagacatgattgcgcctgaagagggagaggtcatggtgagaatttccaaacttatatcaaacacgttgctcacttctcctttcctggaacccttaatggtcgtcctggtgcaagagaaagaaaacgattactattgttctctgatgaaaagcatcgttgactatattctcatggacccaatggagcgcaagcgtttgttcatcgaatcaatccctaggctctttccccagcgcgttatcagggccccagtgccctggcactctgtgtatcggagcgccaaaaagtggaacgaggagcacctccacacagtaaaccccatgatgctacggctgaaggagctctggttcgccgaattccgtgacctaagattcgtccgcaccgccgagatccttgcagggaaacttcctcttcaacctcaagaattctgggatgtgatccagaagcattgtctcgaggctcatcagacactgctgaataagtggatccctacttgtgcgcagctttttacgagccgtaaagagcactggatacactttgcgccaaagtccaattacgactcctcccgaaacattgaggaatacttcgcctctgtggcctcatttatgagtctccagttgcgggaactcgtgatcaaatcactggaggatctggtgtccttattcatgatacataaggacggaaatgacttcaaagagccctatcaggagatgaagttttttattccccagctgatcatgatcaaattggaggtgagcgagccgattatcgtgttcaatccaagcttcgatgggtgctgggagctgatccgagactctttcctggagatcataaagaattccaacgggatccctaagttgaagtatattccccttaagttcagtttcactgcagcggctgcggacagacagtgtgttaaggctgcagagcctggggaaccatcaatgcacgccgcagccaccgctatggcagagctgaagggctataacttgttgctgggcactgtgaacgcggaggaaaagcttgtaagtgactttctgatccagacgtttaaggtcttccagaagaaccaggtgggaccgtgtaagtacttgaacgtatacaagaagtatgtcgacctgctagataataccgctgagcagaacattgctgcgttcctgaaagaaaatcacgacatcgacgactttgtgaccaagataaacgccattaaaaaaagaagaaacgaaattgcaagtatgaacattacggtgccactggccatgttctgtttggacgcaacagcactcaaccacgatctctgtgagagagcccagaacttgaaggaccatctgatccagttccaggtggacgtcaaccgggatacaaacacaagcatctgtaaccagtattcccatattgccgataaagtttccgaggtgccagcaaataccaaagagcttgtatcattaattgagtttctcaagaaaagctctgctgtcactgtgtttaagctccgcagacagcttcgggatgcatccgaacggctggagttcctgatggattatgccgatctgccctaccaaattgaggatatcttcgacaactctaggaacctgctgctccacaaacgggaccaggccgaaatggatcttattaaacggtgctccgaatttgagctgcggttggaaggctatcatagagaactggagagcttccgtaagagagaggtgatgaccactgaagagatgaagcataatgtggaaaagctgaacgaattgagcaagaatctaaaccgtgcattcgcggagtttgagctgatcaacaaggaggaggagctgctagagaaagagaaatccacctatcctctccttcaagcaatgttaaagaacaaggttccatacgaacagctgtggtcaacagcatacgagttctcaattaaatccgaggagtggatgaacggccctttattcctcctgaacgctgaacagattgccgaagaaatcgggaacatgtggcgcacaacatataaacttataaagactctctcagatgtgcctgctccacgaaggctggcggagaatgtaaaaattaaaattgacaagttcaaacagtatatccccatcctctcgatttcatgcaatcccggtatgaaggataggcattggcagcaaatttctgagatcgtgggatatgaaataaagccaactgagaccacttgcttgtctaatatgcttgagttcggctttggcaagtttgtggaaaagttagagcccataggagcagctgcctccaaggagtattctctagagaaaaacctggaccgaatgaagctggattgggtgaacgtgaccttctcattcgttaaatacagggataccgacactaacatcctgtgcgccatagatgatatccagatgctgctggatgaccatgttatcaaaactcaaacgatgtgcggaagcccattcatcaaacctatcgaggcagagtgtaggaagtgggaagagaagctgattcggatacaagacaatctagacgcgtggctgaaatgtcaggccacatggctctacctggagcctatcttcagcagcgaggacatcatagcccagatgcccgaggagggtcgaaaattcggcatcgttgacagctactggaagtcgctcatgtcacaagctgttaaagacaatcgcattctagtggccgctgaccagcctcggatggccgaaaagctgcaggaagctaacttcttgttggaggacattcaaaaagggctcaacgactatcttgagaagaagagattgttttttccacggtttttctttctgtccaatgacgaactcctcgaaatcttgtctgagactaaagacccactgcgggttcagccacaccttaagaagtgtttcgagggcatcgccaagctggagtttacagacaacctcgagatcgttggcatgatctcttctgagaaggaaactgttcccttcatccagaagatctacccagcaaacgccaagggcatggtcgagaagtggctgcagcaggtcgagcagatgatgttagcctctatgcgggaggtgatcggcctaggtatcgaagcctacgtgaaagtgcctaggaaccattgggtgctccaatggcccggtcaggtggtgatctgcgtcagtagcattttttggacccaggaagtatcacaggccttggccgagaatacattactggacttcctcaagaaatccaacgatcagattgcacagatcgtgcagctggttaggggtaaactgagctctggagcccgtttgactttgggagctctgaccgtgattgacgttcacgcacgggacgttgtggccaaactgagcgaggacagagtgtctgatttgaacgactttcaatggatctcccagttacggtattactgggtggctaaagacgttcaagtgcagatcattacaactgaagcactatatggatacgagtacctgggcaatagtcctcggctagtcattacccctctgaccgatcggtgttaccgcaccctaatgggggcactcaaacttaatttaggcggagcccctgagggcccagcaggaacggggaaaactgaaactactaaggatctggccaaggccctcgccaagcaatgcgttgtctttaattgttctgacggtctggattataaggccatggggaaatttttcaaaggcctggcgcaggcaggcgcatgggcatgcttcgatgaattcaatcgcatcgaagttgaagtattgtcggttgtagcccagcagattctgagcattcaacaagctattattcggaaactaaagacatttattttcgaagggacggagctcagcttgaaccccacatgcgccgtgttcatcaccatgaatccaggctatgctggcagggcagaattacctgataatctcaaagccctgtttcgaaccgttgccatgatggtacctgactatgctttaattggcgaaatctcactctacagcatgggattcctggactctcggtccctggctcagaaaattgtggccacctatcgtctttgctcagaacagctatcctcacagcaccattacgactatggaatgcgcgctgttaaatccgtgctgaccgctgctggtaatttgaaacttaaataccccgaggaaaacgagtccgtccttttgctgagagcattattagatgttaatctcgcaaagttcctcgctcaagatgtccccctattccagggaatcatttctgaccttttccctggcgtggtgttacccaaacccgactatgaggtgtttctgaaagttttgaatgacaatattaaaaaaatgaagctgcaacctgtgccttggttcataggcaagatcattcaaatctacgagatgatgcttgtgcgtcacgggtacatgatcgtgggagacccaatggggggtaagacatctgcatataaggttcttgctgcggcactgggtgacctgcacgctgccaatcaaatggaggagttcgctgtcgagtacaaaattataaaccctaaagctataaccatgggccaactctatggctgctttgatcaggtgtcacacgagtggatggacggagtgctcgctaacgcgtttcgtgagcaagccagcagtctctcggatgatcggaagtggattatttttgatggacccgtggatgccatctggattgagaacatgaacactgtgctggatgacaataagaagctgtgcctgatgagcggtgagatcattcagatgaacagcaaaatgagtctgatcttcgaaccggctgacctagagcaagctagcccagctactgtctctcggtgtggtatgatttacatggagcctcaccaacttggatggaagccgctgaaagacagctatatggacacactgccgagttctttaacgaaagagcacaaggagctagtgaatgacatgtttatgtggctcgtgcagccttgcctcgaattcggcaggctgcactgcaagtttgtggtccaaacctccccaatccatctggctttctctatgatgcggctgtattctagtctcttggatgaaataagggcggtggaagaagaggagatggagttgggggagggtctttccagtcagcaaatctttctgtggctgcagggtctgttcctgttttctttggtgtggacagttgctggaaccattaatgctgactctcgcaagaagttcgacgtgttttttagaaatctgatcatgggtatggatgacaatcatcctcgacctaagtctgtgaaactaaccaagaataatattttcccagagagaggttctatttatgacttctattttatcaagcaggcaagtgggcattgggaaacctggactcagtacattaccaaagaagaggaaaaggtgccagctggggcaaaggttagtgagctcatcattcccaccatggaaaccgctagacagtccttcttcctcaaaacttatctcgaccacgagatccctatgctctttgtggggccaaccggcaccgggaaatctgccatcacaaacaattttttgcttcacctgcccaagaacacctatttgcctaattgcataaacttttccgccaggacctccgcaaatcagacgcaggacattatcatgtcaaagctggatcgtaggagaaaaggcttgtttggcccacccattgggaagaaggccgtagtgtttgtggacgatctgaatatgcccgcaaaggaagtctacggtgcacaaccccctatcgagctcctgaggcagtggatagaccacggctattggtttgataaaaaagatactactcgattggatattgtggacatgctgctggtgacagcaatgggcccacctggaggtggtaggaacgacataaccggcaggtttacgaggcacctcaacatcatttccatcaacgcctttgaggatgatatcctgactaaaatttttagttcgatagtggactggcattttgggaagggtttcgatgtgatgtttttgcgctacgggaagatgctggtgcaggccacgaaaaccatctacagggacgccgttgaaaattttttgcctacgccgagtaagtcccattacgtcttcaatctgcgtgacttctcacgagtgatccagggggttctgctgtgccctcacacccacctccaagatgttgagaagtgtattagactgtggattcacgaggtctacagagtcttttatgacaggctgattgacaaagaagatcgacaagtctttttcaatatggtcaaggaaacgactagcaactgctttaagcaaacgatcgaaaaggtacttatccatttaagtccaaccgggaagattgtagatgacaatattcgctcccttttcttcggcgactactttaagcctgagtctgatcagaaaatatatgacgaaattactgacctgaaacagcttaccgttgttatggaacattacctggaagaattcaacaacatatccaaagcgccaatgtcacttgtgatgttcaggtttgccattgaacatatctcccgaatctgtcgtgtcctgaaacaggacaagggacacttgttactggtcgggattggcggtagtgggaggcagagcgcagctaaactgagcacatttatgaacgcttacgaactctaccagatcgaaatcacaaaaaattatgccggtaatgattggcgcgaggacctgaaaaagatcattctccaggtaggcgtcgcaactaagagtactgtttttctgtttgctgacaaccaaatcaaggacgagagcttcgtcgaagacataaatatgctgttgaatacgggggatgtgcccaacatctttcctgccgacgaaaaggcagatatcgttgagaagatgcagacagcagccaggacccagggcgaaaaagtggaggtaacgccgctttccatgtataatttttttatcgaacgtgtgatcaacaaaatatccttttccctcgccatgtcaccgattggggacgccttccggaacagattgcggatgttcccctcactgatcaattgttgcaccatcgattggtttcagagttggccaactgatgcactcgagcttgtggccaacaagttcctggaggacgtcgagcttgacgacaacataagggttgaggtggtctcaatgtgtaagtactttcaggaatcagttaagaaattgagccttgactattataacaaactccggagacataattacgtgacgcccaccagctatctagaattaattcttacctttaaaacgctcctgaattctaagcgtcaagaagtcgcaatgatgaggaatcggtatttaacaggtttgcagaagttggactttgctgcctcgcaggttgctgttatgcaaagggagctcacagctttacaaccccagctaatcctcacttctgaggaaactgccaaaatgatggtgaagatcgaggctgaaacgcgggaggctgacgggaagaagctcctcgtgcaggccgatgagaaagaggccaatgtggccgcagccatagcccagggcattaagaacgagtgcgaaggcgatttggctgaggcaatgcccgcacttgaagccgctctagccgcacttgatacccttaacccagccgatatttcactggttaagagcatgcagaatcctcccggaccagtgaagctagtgatggagtccatttgcattatgaaagggatgaaacctgagaggaaacctgacccctcgggctccgggaagatgatcgaagattattggggagtgagcaaaaagattctcggagaccttaaattcttggagagcctgaagacatatgataaggataacattcccccacttaccatgaaacgcatccgggaaaggtttattaaccaccctgaattccagcccgcagtaattaagaacgtatccagtgcatgcgaaggactctgtaaatgggtgcgagccatggaggtttacgacagggtggctaaagtcgtggccccaaagcgtgagcgcctgcgggaagctgagggcaaattggccgctcagatgcagaaactgaatcagaaacgcgctgagcttaagctagtagtcgaccgcctgcaagccctcaatgacgatttcgaggagatgaacaccaaaaagaaagatctcgaagagaacatcgagatctgttcccaaaagctggttagagccgagaagctgataagtggcttgggcggagaaaaagacaggtggacagaggccgctaggcagcttgggatcagatatactaatctcaccggggatgttctgcttagttccggcactgtggcttacctcggagcgttcaccgtggactatcgagttcagtgccagaaccagtggctggccgaatgcaaagacaaggttatacctggcttttcagactttagtctgagccacacgctgggggatccaattaagatccgcgcttggcaaattgccggtcttcccgtggatagtttttctatcgataatggaataattgtcagtaattcgcgccgatgggcactgatgatcgatcctcacgggcaggccaataagtggattaaaaatatggaaaaggccaacaaactggccgttataaagttctccgatagtaactacatgagaatgcttgaaaatgcccttcagctcggtaccccagtcctcatcgagaatatcggcgaggagttggatgcttccatcgagcctattctcttgaaggccaccttcaagcagcagggagtcgaatatatgcggttaggagagaatattatcgaatacagcagagacttcaaactctatattacgacaagactccgtaatccacactatctgcccgaagtcgccgtgaaggtttgcctgttgaacttcatgattacacccttagggctgcaggatcagctcttggggatcgttgccgcaaaagagaagcccgaactggaggaaaaaaaaaatcagctgatcgtagagtccgccaaaaacaaaaagcatttaaaagaaatcgaagacaagatcctggaggttttgtctatgtctaagggaaatatactcgaagacgaaacagcgatcaaagtgttaagttcatccaaggtattaagcgaagagatctccgaaaagcagaaggttgccagcatgacggaaacccagattgatgaaaccaggatgggatacaaaccagtggccgtgcatagcgccaccattttcttctgcatctctgacctcgctaatatagagcctatgtatcagtattctctgacatggttcatcaatctgtacatgcactctctgacccattctaccaagtctgaagagttgaatttaagaatcaagtacattatagaccacttcacactctccatttacaacaacgtctgccgcagcctgttcgaaaaggacaaacttttgttctcactcctgttaacaatcgggatcatgaagcagaaaaaggaaatcaccgaggaggtctggtattttctattgactggcggaatcgccctagacaacccataccctaaccccgcacctcagtggctgagtgagaaagcctgggctgagatcgttcgggcttccgccctgcccaagctgcacggcctcatggaacacctggagcagaatctgggtgagtggaaactcatatacgacagtgcatggccacacgaggaacagctgcctgggagttggaagttctctcaggggctggagaaaatggtgatcctgagatgcctgcggccagacaagatggtgcccgctgtgcgagagttcatcgccgagcatatggggaaactatacattgaagcgccaacttttgacctccagggctcatacaatgactcgtcctgttgtgctccactaattttcgttctgtctcccagcgcggaccctatggctgggctcctcaagttcgccgacgaccttggcatgggaggcacaaggacccagacaatatccttgggccaagggcaaggcccaattgcagcaaaaatgattaataacgccatcaaggacggaacgtgggttgtactccagaactgccatttggccgcatcatggatgcccactcttgagaagatctgcgaagaagtcatcgtgcccgagagcaccaacgctagattccggctgtggctgacctcataccctagcgaaaagttcccggtgagcattctgcagaatggcataaaaatgaccaatgagccgcctaagggcctgcgtgccaacctccttcggtcatacttgaacgaccccatctccgatccggttttcttccagtcttgcgctaaggctgtcatgtggcagaagatgctcttcggtctctgtttctttcacgcagtcgtgcaggagagacgcaactttggacccctcggatggaatattccttacgagttcaatgaatccgatctcaggattagtatgtggcagatccagatgtttctgaacgactataaggaagtgcccttcgatgccctcacctatctcacaggagaatgcaactacggaggcagagtgaccgacgataaagatcggagactgctgcttagcctgctctccatgttttactgtaaagagatagaagaggactattacagtctggctccaggagacacctactacatcccaccacacggctcctaccagtcttatatcgactacctccgcaatctccccatcaccgctcacccagaagtgttcggactgcatgaaaatgctgacattactaaagacaaccaggaaacaaaccagctcttcgaaggcgtgctccttactctcccaagacaatctggagggtccgggaaatccccacaggaagtcgtggaagagttggcccaagacattttgagcaaactgccccgagattttgacctggaggaagtgatgaaactttaccccgtcgtctatgaggagtcaatgaacaccgtcctccggcaggagctcatccggttcaatcgtctcacgaaggtggttaggagaagcctgataaatttggggagagcaatcaagggacaggtgttgatgtccagcgagctcgaggaagtgtttaattccatgttggttggcaaggtgcccgctatgtgggccgcaaagtcttaccccagcttgaaacccttgggcggttatgtagctgatctgctggcaagattgacgttcttccaagaatggatagacaagggcccacccgtcgtcttttggatttcagggttttactttacgcagagcttcctgacaggtgtgagccagaattacgcgcgtaaatataccattcccattgatcatattggtttcgagttcgaagtgacaccacaggagactgtgatggagaataatcctgaggacggtgcctatatcaagggcctctttttagagggggcacgatgggatcggaaaactatgcagatcggggagagcctccccaagattctgtacgacccgcttcctattatttggctcaagccaggggagtctgcaatgttcctgcaccaggacatctatgtatgtcccgtctataaaacttcagccaggagagggacactttctaccactgggcatagtactaactatgtgctctcaattgagctgcctaccgacatgccacagaagcactggatcaatcggggagtggcatctctctgtcagctggacaactac

SEQ ID NO: 221436 - DNA, 2262 bp, synthetic construct
  misc_feature 1..2262: note = Description of Artificial Sequence: Synthetic coding sequence
  source 1..2262: mol_type = other DNA
atgggcgacatggattgttctagccaaaaaatcgccaagagtgattccatccaccacatgtcccattcccaaggccagcctgagctgccaccccttcccgcatcagcaaacgaggagcctagcggattataccagactgtgatgtcgcatagcttttaccctccactaatgcagaggacctcttggacccttgccgcaccattcaaagagcagcatcatcatcggggacctagtgactctatcgctaacaattactccctaatggcgcaggacctgaagctgaaagatctccttaaagtgtaccagccagcgacgattagcgtgcctcgtgatcgcaccgggcaggggctgccaagcagtggcaatcgatcttcttccgaacctatgaggaaaaaaacaaagttctcctctcggaacaaggaagactctaccaggatcaagctcgccttcaagaccagtattttctctcctatgaagaaagaggtgaagacatctctaacatttcccggaagtcgtccgatgtcaccagaacaacagctggacgtgatgcttcaacaagaaatggaaatggaaagcaaagagaaaaaaccgagcgagtcagacctggagaggtattactactacctaacaaacggaatcagaaaggacatgattgctccagaggagggcgaagtgatggtgcgcatctccaaacttatttcaaacaccctgctcaccagtccgttcctagaaccgttaatggtcgtgctggtgcaggagaaggagaacgactattactgctctctaatgaaaagtattgtcgattacattctcatggaccctatggagcgaaagcgcttgtttatcgagtctatcccgagactctttcctcaacgagttataagggcccctgtgccttggcattccgtgtatcggagcgccaagaaatggaacgaagaacatctgcatacagtgaaccctatgatgctgcggcttaaagagctgtggttcgcagaatttcgggacctgagatttgtgagaacagcggaaattctggccggaaagttgccgctccagcctcaagagttctgggatgtcatacagaaacactgtctggaggcccaccaaaccttactcaataagtggatccccacatgtgcccagttatttactagtcgcaaggaacactggatccatttcgcccctaagagtaattacgattcatctcggaatatcgaagaatacttcgcatcggttgcctctttcatgtcactccaactgagagaactggtcataaagagcctcgaggacctggtgtctctattcatgatccacaaggatggaaacgactttaaggagccttaccaggagatgaagtttttcattccccagttaataatgattaagttggaagtttccgagcccattattgtgtttaatccatccttcgacgggtgttgggagttgatccgggactctttcttagaaatcataaaaaatagcaacggtatcccgaaggtcgaatctgtcctgttccctgaactgaaggggtataatctgttactgggtactgtgaatgccgaagagaaactggtgtccgatttcctgattcagactttcaaagtgtttcagaagaatcaggttggcccatgcaaatatttaaacgtgtataaaaagtacgtcgacctgctggacaatactgccgagcagaatatagccgcattcctgaaggaaaaccacgacatcgacgattttgttaccaagatcaatgcaatcaagaagcgccgaaacgagattgctagcatgaacattactgttccacttgccatgttctgcttagatgctactgctttgaaccatgatctgtgcgagcgcgctcagaacctgaaagaccacctgattcagtttcaggtcgacgtgaaccgagacacaaatacatccatatgcaatcagtattcccatatcgccgacaaggtgtctgaggttcccgctaatacaaaggagttagtgtctctgatcgagtttttaaaaaaaagcagtgcagtcaccgtgtttaaactgcggaggcagctgagagacgcttctgaaaggctcgaattccttatggattacgcagacctcccctatgaagacataaagctgaacagcacgctgttcctgtggccagaccagatagaggacatctttgacaactctaggaatttgctgttgcacaagcgcgaccaagctgagatggatctcatcaaaagatatcgagagtcactcggcctgtcgtggaagtag

SEQ ID NO: 221437 - DNA, 5663 bp, synthetic construct
  misc_feature 1..5663: note = Description of Artificial Sequence: Synthetic coding sequence
  source 1..5663: mol_type = other DNA
atgggcgctactggtagactggagcttacgcttgcagcacctccacaccctggcccagccttccaacgctcaaaggccagagagacccagggggaagaagagggttccgagatgcaaattgcgaagtctgattctatccatcatatgagccatagtcaggggcagccagaacttccaccccttccggcttccgccaatgaggagccttcgggactctatcagacagtgatgagccacagcttctacccaccccttatgcagagaacaagctggaccctggctgctccttttaaggaacagcatcaccaccgtggccctagcgacagcattgccaacaattactcactgatggcgcaggacctgaaactcaaggatctcctgaaggtgtaccagcccgcaacaataagtgtgcccagggacaggacaggtcagggtctaccctcctccggaaatagatcatcctccgagcccatgcgcaagaaaaccaaattttcatcaaggaataaggaagactccactcggataaaacttgcttttaagactagcatcttcagcccaatgaagaaagaagtgaagacctctcttactttccccggatcccggccaatgtctccagagcagcagctggatgttatgcttcaacaagagatggagatggagtcaaaggagaaaaaaccgagcgaatccgatttggagcggtactactattacttaacgaatgggattagaaaagatatgatcgcccctgaagagggggaggtaatggttcgaatctcaaagcttatttccaacacattactgacctcccctttcctcgaaccactcatggtggttttagttcaggagaaggaaaatgactattactgcagcctcatgaagtctattgtcgactacatcctgatggacccgatggaacgcaaacggctgttcattgagtcgatccctagactgttccctcagcgtgttatacgagcccctgttccctggcattccgtatatcgttcggccaagaagtggaatgaggagcatctccacacagtgaatccaatgatgctgaggctgaaggaactatggtttgcggaatttcgcgacctgaggttcgttcgcaccgctgaaatcctggctggaaaattgccgttgcagccccaagaattctgggacgttatccaaaagcactgcttggaagcccaccagaccctgcttaataagtggattcccacttgtgctcagctgttcacttcacgcaaagagcactggattcacttcgcccctaaaagcaattacgattccagccgtaacatcgaggaatactttgccagtgtggcaagctttatgtctctccaattaagggaattggtgattaagtcacttgaggatctggtatctttatttatgattcataaggacggcaacgactttaaagagccatatcaggaaatgaaatttttcatcccccagctcatcatgatcaaactggaggtctcggagccaattattgtgtttaacccctccttcgatggatgctgggaactcattcgagatagttttttggagattatcaaaaactccaacgggatcccaaagctcaaatacattcccttaaagttcagcttcacggctgcagctgccgatcggcagtgtgtgaaggccgctgagccaggcgagccttctatgcacgcggctgccaccgcaatggcagagcttaaaggttacaacctcctgttgggaacagtgaatgcagaggaaaaactggtcagtgacttccttattcagacctttaaagtgtttcagaaaaaccaggtgggaccatgcaagtatctgaacgtatacaagaagtatgtagacctgctagataacaccgccgaacagaatatcgctgctttcctgaaggagaaccacgacatcgacgactttgtgacaaaaattaatgccattaagaagcggagaaatgaaatagccagtatgaatatcaccgtccctctggccatgttttgtttggacgccacagctctgaaccatgacctatgtgaacgtgcccagaacttgaaggaccatctgattcaattccaagtggacgtgaaccgcgacaccaatactagtatttgcaatcagtattcccatatagctgacaaggtttccgaggtgcctgcaaacacgaaggaactcgttagcctcatagagtttcttaagaaatctagcgctgtgacggtcttcaaactcaggcggcagcttcgcgacgctagtgagcgcctcgagtttctgatggactacgccgatctgccttaccagatcgaagacatatttgataattctcggaacttgctgttgcacaagagagaccaggcggagatggatctaattaaacggtgctctgagtttgagctgagactggaagggtaccaccgcgaactagaatcgttccgtaagcgcgaagtaatgactaccgaggaaatgaaacacaacgtggagaagttaaacgagctaagtaaaaatctgaacagggccttcgcagagtttgagttgatcaataaagaggaggagctcttggaaaaggagaagtccacatacccactcctgcaggccatgttaaagaacaaggtgccttatgagcaactgtggtcaaccgcatatgagttttcaatcaagtctgaggagtggatgaatggccctctgtttcttctgaatgcagaacagattgctgaggagattggcaacatgtggcggacgacctataagctgataaagactctgtcagatgtgcccgctccccgacggctcgccgaaaatgttaaaattaagatagacaagtttaaacaatacatacccatcttgtctatctcttgcaaccccggtatgaaggatcgacactggcagcagattagcgagattgtgggatatgagatcaagcccaccgagaccacatgcctgtctaacatgctggaatttggctttggaaaattcgtagaaaaactcgaaccaatcggggctgctgcctcaaaagaatacagtctagaaaagaacttggacagaatgaagctcgactgggttaatgtcacattttcttttgtgaagtaccgagacaccgacaccaatatcctgtgcgccatagacgacattcaaatgctgctggacgaccacgttattaaaacccagacaatgtgcggcagcccattcataaaaccaatcgaagcagagtgcagaaagtgggaagaaaagttgattcggatccaggacaacctcgacgcatggctgaaatgtcaggctacctggctttacttagaacctattttttcttcggaggatatcattgcccagatgcctgaggagggacggaaattcggcatcgtggacagttattggaagagtctgatgtcacaggcagtgaaagacaacagaattctggtggccgcagaccagccaaggatggccgagaagctgcaagaggccaactttttgttagaagacatccagaagggactgaatgattacttagagaagaagcgactgttcttccctcgcttctttttcctgtctaatgacgaactccttgaaatcctttctgagactaaagatcctttgcgcgttcagccccacctaaagaaatgcttcgaaggaatagctaaattggaatttacagacaacctcgaaatcgtgggaatgatctctagtgagaaggagacagttccgttcattcagaagatctatcctgcaaacgcaaagggaatggtggagaaatggttacagcaagtggagcagatgatgctggcatcaatgcgggaagtcatcggtttgggcatcgaagcctacgtaaaagtcccacggaatcattgggttcttcagtggcctgggcaggtggtgatctgcgtgagctccatcttctggacccaggaggtctcacaggccctggccgagaatacactgctggactttctgaagaaaagtaatgaccagatcgcacagattgtgcagctggtgaggggcaagctgtcttccggcgctcgcctgactttgggtgcactcaccgtcattgatgtgcacgcacgcgatgttgtggccaagttgagtgaggacagggttagcgaccttaatgacttccaatggatctcacaactgaggtactactgggtggcaaaggacgtgcaggtacaaattatcacaactgaggcgctctacggctacgaatacctgggcaatagtcctcgactcgttatcacgccactgactgacaggtgctatcgaaccctcatgggggcactcaaacttaatcttgggggagcaccggaagggcctgccggaaccggaaagaccgagaccacaaaggatctggctaaggccctagccaagcagtgtgttgtgtttaactgtagtgacggcctggactacaaagctatgggaaaattctttaaggggcttgcccaggctggggcatgggcttgtttcgatgagtttaacaggattgaggtggaagttctctccgtcgtggcccagcaaattctctccatccaacaagcgatcatccggaagctgaagacttttatattcgaaggaaccgaattgagcctcaaccctacgtgcgcagtcttcattactatgaaccccggttatgccggacgcgcagaactgcctgacaacctaaaagccctcttccgtaccgtggctatgatggtccccgactatgcactgattggggaaatctcattatattcgatggggttcctagattcccggagcctcgcccaaaagatcgtggccacataccgactttgcagcgagcaactgtcctcccagcaccactacgattacggaatgcgggctgtgaaaagtgtccttaccgctgctggaaacctgaagcttaaatacccagaggaaaatgaatcagtactattgctgcgcgctctgctcgatgtcaatttggcaaagttcctggctcaggatgtccctctgttccagggcattatcagtgatctgttccctggagtggtcctgcccaagcccgactacgaagtgtttctcaaggtccttaacgacaacattaagaaaatgaagctgcagcccgtgccatggtttatcggcaagatcatacagatatacgagatgatgctggtgagacatggatacatgattgtaggggaccctatgggcggtaagacatccgcgtacaaagtcctagctgcggcactgggtgatctgcacgccgctaaccagatggaggagttcgctgtggagtacaaaatcattaatcctaaagccattactatgggccagctgtatggttgctttgatcaagtttctcacgaatggatggatggggtcctggctaacgctttccgcgaacaggcttcttccctaagcgatgatcgcaagtggattatctttgacggccctgtggatgcgatttggattgagaatatgaatactgtgctggacgataacaagaaactgtgcttgatgtctggtgaaatcatccagatgaacagcaagatgtcgttgatattcgaacccgcagacttggaacaggcaagtcccgcaacggtttccaggtgtggcatgatctacatggagcctcatcagctggggtggaagccattgaaggatagttatatggacaccttaccttcttcattgacaaaagagcacaaggagctgatgaagagtggacaata

SEQ ID NO: 221438 - DNA, 462 bp, synthetic construct
  misc_feature 1..462: note = Description of Artificial Sequence: Synthetic coding sequence
  source 1..462: mol_type = other DNA
atgcttcacatggggttggcccacgttaagagaatgcctcggagcagccggttgcagtgcaaagaagcacaggctttcttttctttacagtccgggacttatcgcgttctctccaccccactcaagctgggcgtgtgggaagagaagaaacactgggctgccctcctccagcccgtgagtctcggccgtaaatggaaaaagcgcccttgtaacctggatgactacgtatgggggcagctgaaatatatccctttaaagtttagtttcacggccgcagcggctgaccggcagtgcgtaaaggccgctgagcccggagagccctccatgcatgctgccgcaacagcaatggcagggactcgcgcaggcaccactttcgacgagctgcagtgtcaggaagatatggtctgtaccaggtttgagaataaagcatacgttaacaccaatgattttactaggcaatag

SEQ ID NO: 221439 - DNA, 13875 bp, synthetic construct
  misc_feature 1..13875: note = Description of Artificial Sequence: Synthetic coding sequence
  source 1..13875: mol_type = other DNA
atgttcaggattgggcgacgacagctgtggaagcattctgttacccgggtcttgacccaaagattaaagggtgagaaggaagccaagagagcactgctcgacgcacgccacaattatctcttcgccatcgtggcatcttgcttagacctcaataagaccgaggtggaagacgctatcctcgaggggaatcagatcgagagaatcgaccagctgttcgccgtgggcggtctgcgacacctgatgttctactaccaggacgtggaagaggctgagacagggcagctgggatccctaggcggagtgaacctggtgagtggaaagatcaagaaaccaaaggtattcgttactgagggcaatgatgtggccttgacaggggtgtgtgttttctttatccgaacagacccctccaaggccatcaccccagacaacattcatcaggaagtgagcttcaacatgcttgatgctgcggacggtggccttttgaactccgtacggaggctgctgagcgacatctttataccagctctcagagccaccagccatggctggggagaactggaagggctccaagacgcagctaacatccgccaggagtttctctcctctttggagggatttgtcaatgtgttatctggagctcaggaatcgctgaaggaaaaggtgaatctcagaaaatgtgacattttggagctcaagaccttgaaagagcccacggattatttgactctcgccaacaatccagagactttgggaaagatcgaggattgtatgaaagtttggataaaacagacagagcaggtcctcgccgagaataatcagctgctcaaagaggctgatgacgtcggtcccagagcggaattagagcactggaagaagcggttgagtaagttcaattatctgctggagcaactcaaatcacccgatgttaaagcggtattggctgtgttggccgctgccaagtctaagctgctgaaaacatggcgcgaaatggacatcagaatcactgatgctactaatgaagcgaaggacaacgtcaagtacttgtataccctcgagaaatgctgtgatcccctatattcctctgaccccttgagcatgatggatgccatccccacactcattaatgccataaagatgatctattcaatttcacactactataatacgagcgaaaagatcaccagcctcttcgtcaaggtaaccaatcaaatcatctccgcctgcaaagcttatataactaataatgggaccgcctctatttggaaccaaccgcaggatgtggtggaagagaagatcctctccgcaatcaagctcaagcaggaatatcagctgtgttttcacaaaacaaagcagaaactgaagcagaacccaaacgcgaagcagtttgacttttcagaaatgtacatatttggcaagttcgagacttttcaccggaggttggcaaagattatcgatattttcaccaccctcaaaacttatagtgtgctgcaggattcgaccattgagggactcgaagacatggccaccaaatatcaggggatcgtcgccaccattaagaagaaggagtacaactttttggaccagaggaagatggacttcgatcaggattacgaggagttctgtaagcaaacaaatgaccttcataatgaactaaggaagttcatggatgttacctttgctaaaatccagaatacaaaccaggctcttcgcatgctaaaaaaattcgagcgtctcaacatccccaatctggggattgacgataaatatcaactcatcctagagaattacggagccgacatcgacatgatcagcaagctctacacaaaacaaaagtatgacccaccactggcgcgaaatcagccgcctattgctggaaaaattctctgggcgcgacagctgttccataggatccagcagcccatgcagttgttccaacagcaccccgctgttttatcgacggctgaggccaaacctataatcagatcatataaccggatggccaaagtgctcttggaattcgaagttctgttccatcgggcatggctgcgacagatcgaggaaattcatgtggggctggaggcctctctcctagtgaaggcccctggtacaggagaattgttcgttaactttgatccacagatcctgattctctttcgcgaaacagaatgtatggcccagatgggtctagaggtgagtcccttggcgacttctctgttccagaaaagagataggtacaagagaaactttagtaacatgaagatgatgctggccgagtaccagcgcgtgaaaagtaaaattccggctgctatcgaacaactgatcgtgccgcatctcgccaaagtggatgaggcgcttcagcctgggttggccgcactgacatggaccagcttgaacatcgaggcctatctggagaatacatttgctaagattaaggacctcgaattactgctcgacagggtcaacgatcttatagagttcaggatcgacgccatactagaggagatgagttccactccactgtgccagctaccacaggaggagcccctaacatgcgaggagtttttgcagatgacaaaggacctttgcgttaacggagctcaaatcctccatttcaagtccagccttgttgaggaggcagtcaatgagttggtaaatatgctgctagacgtggaagtgctgtccgaagaagaaagcgaaaaaatcagtaacgagaacagtgtaaattataagaatgagtcgtctgccaaaagagaagagggcaatttcgacacactaacatcttccatcaatgcccgagcaaatgccctgctacttactactgtgacccgaaagaagaaggaaaccgaaatgcttggggaggaggccagggaattgctgagtcattttaaccaccaaaatatggatgctctcctgaaggtgacacgcaacacccttgaagcgattcgtaaacgaattcattcaagccacacgattaacttcagggattccaatagtgcgagcaatatgaaacagaacagcctgcctatttttcgcgcttctgtaacactggccatacccaacatcgtgatggcaccagcccttgaagacgtgcaacagacgcttaacaaagccgtggaatgtatcatcagcgtacctaagggtgtccgccagtggtcatctgagctgcttagtaaaaaaaaaattcaggagcgaaagatggccgcattacaatcgaatgaggactctgactccgatgtcgagatgggggaaaatgagctgcaagacaccttagagattgccagcgtaaacttacccattccagtgcaaacgaagaattactacaagaacgtgagcgaaaataaggagattgtgaagctagtgtctgtgctctccacaattatcaatagcacaaagaaagaagtcattacctctatggactgctttaaacgttataaccacatctggcagaagggtaaggaagaagcaataaaaacgttcataacgcaaagccctctgctgtccgaatttgaatctcagatcttatacttccagaacttggagcaggagataaacgctgaacccgagtatgtctgcgtaggctccatagccctttacaccgccgacttaaagtttgccttaaccgcagagacgaaggcatggatggtcgtgatcggcaggcactgcaacaagaagtatagatcagaaatggagaacatcttcatgttgatcgaggagtttaataagaagttgaaccggccaatcaaagacttagacgatatccggatcgccatggcggcactgaaagagattcgggaggaacagattagcatcgatttccaggtggggcctatcgaggaaagctacgccctgttgaataggtacggcctgttaattgccagggaggagatcgataaagtcgatacacttcactacgcttgggagaagttgttagctagagctggagaggttcagaataaacttgtaagtttgcagccgtccttcaagaaggagttaatcagcgccgtcgaagttttccttcaggactgccaccagttctatttggactatgatcttaacggtcccatggctagcggtctgaagccccaagaagcttccgacagactgatcatgttccagaatcagtttgataacatttatcggaagtacatcacctatacaggcggtgaagaactgttcggcctgcctgcaacccaatatcctcagctcctggagattaaaaagcagcttaatctcctccagaagatctacactctttataactctgtcattgagactgtgaattcctattatgacatcctgtggtcagaagtcaacattgagaaaattaataatgagttgctggaatttcagaacaggtgtcggaagcttccgagggcactcaaggattggcaagcttttctagatctaaaaaaaattattgatgatttctccgaatgttgtccgctcctggaatacatggcatcaaaggcaatgatggagaggcactgggagcggatcacaacgctgaccggacattctttggatgtcggaaacgagtcctttaagttaagaaacatcatggaggctccacttctgaagtacaaggaggaaattgaggacatttgcatatcagccgtcaaagagcgcgacatcgaacaaaaactaaagcaggtaattaatgaatgggataataaaacctttacgttcggatctttcaaaaccaggggggagctgcttctgcggggagactccacatccgagatcatagcaaatatggaggacagtctcatgctcctcggatcactcctctctaaccggtacaatatgcccttcaaggcgcagatacagaagtgggtgcagtacctgtccaactccactgacatcattgagtcttggatgactgtgcaaaacctgtggatatatctagaggcggtgtttgtagggggagatattgctaagcagctccccaaagaggcgaagcgcttctcaaatattgacaagtcttgggtaaagataatgactcgcgcacatgaagttccatccgttgtgcaatgttgcgttggagatgaaacccttggccaactgcttccccacctacttgatcagctggagatttgtcagaaatcactcactggttacctcgaaaagaagaggttatgcttccccaggttctttttcgtgagtgatcctgcgctgctagaaatcctgggtcaggcgtccgacagccatacgattcaagcccatctgctgaatgtgttcgacaatataaaatctgttaaatttcacgaaaagatttatgatcggatcctctcgatctcatctcaggagggagaaaccatcgaattggacaaaccggttatggcggagggcaatgtggaagtgtggttgaactcactcttagaagagagtcagagttccctgcacctggttatacggcaggcggcagcaaacatccaagagacaggattccaactgaccgagttcctctccagtttccccgctcaggtgggccttctgggcatccagatgatctggacgcgggatagtgaagaggcactgcgaaacgcaaagttcgataaaaagattatgcagaaaaccaaccaggccttcctggagctgttgaacactctgatcgatgtgaccacccgggacctctccagtacagagcgggtaaagtatgaaacactgatcactatacacgtgcatcagcgagatattttcgatgacctgtgccacatgcacatcaagtctcctatggactttgaatggctgaagcaatgtagattttacttcaacgaagattctgataaaatgatgattcatattaccgatgttgccttcatttaccagaatgaattcctaggctgcacagatagattggttatcaccccattgacagacagatgctacataactctcgcccaggcactgggaatgagcatgggcggtgctccggcagggccagccggaactggcaagactgagacaactaaggatatgggcaggtgccttggaaagtacgttgtggtttttaattgttcagatcagatggactttcgaggattagggaggatcttcaagggccttgcccagtccggctcttgggggtgttttgatgagtttaatagaatcgaccttccggtgttgtctgtggcagctcagcaaatctcgattatcctgacctgcaaaaaagaacacaaaaaatcattcatcttcaccgatggcgataatgtcaccatgaacccggagttcggactgttccttacaatgaatcccggatacgccggtcggcaagagcttcctgagaatctgaagattaactttcgctccgtggccatgatggtgcctgacaggcagatcataattagggtgaaattggcttcatgtggctttatcgacaacgtcgtccttgctcgcaagttcttcaccctctataagctgtgtgaggagcaactcagcaagcaggtccactacgattttggcctgcgcaatatcctatctgtgctacgtactttgggtgcagccaagcgcgcaaaccctatggacacggaatctactatcgtaatgcgcgttctccgcgatatgaacctctcaaaattaattgatgaggacgagccattgttcctgagcctaattgaagacctgttcccaaacatactcttggacaaggcagggtatcccgagttagaggctgctatctcgcgacaggtggaagaggctgggcttatcaatcatccgccttggaaactcaaggtcatccagctgtttgaaactcagagagtgcggcatggcatgatgacgctgggcccatcaggggctggcaaaaccacgtgtatccatacgctgatgcgggcaatgactgattgcggtaaaccccatagggaaatgaggatgaacccaaaagccattacagctccacagatgtttggtcgactcgatgtagccacaaatgattggaccgacggcatcttcagcacactttggcggaaaaccctccgtgcaaagaagggggagcatatctggatcatcctagatggcccagtagatgccatctggatcgaaaacctgaactccgtcctcgatgataataaaacactgacactggctaacggtgaccgcattccgatggccccaaattgcaaaataatatttgagccacacaacatagacaacgctagccccgcaactgtgagccgaaacggaatggtgtttatgtcatcctccatactggattggtctccaattctggagggctttcttaaaaaacggagccctcaagaggctgaaattctccgacagctttacactgaatcatttcccgatctatatcggttttgtatccaaaacctggagtataagatggaggtgctcgaagcttttgtgatcacccaatccatcaacatgttgcagggacttattcctctaaaggagcagggaggggaggtttctcaagctcatctgggtcgactcttcgtatttgcactcctatggtcggcaggcgcagcgctagaactggatgggcgacgccgactggagctttggctgagaagcagacccacgggaaccttggaacttcctcccccagccggacctggcgatacagcatttgactattacgtagcgcctgacgggacgtggacccactggaatactaggacccaggagtatttgtaccccagtgacaccacccctgaatatggatctatattagtccccaacgtggacaatgtgagaacagacttcctgatccagacgattgccaagcagggcaaagctgttctcttgatcggagagcaggggactgccaaaacagtgatcattaaagggtttatgtctaaatacgatcctgagtgccacatgatcaagtctctgaatttctcaagcgcaacaacccccctgatgttccagcggacaattgaatcctacgtggacaagagaatgggcacaacatatggccctccagcagggaaaaaaatgacagtgttcatcgatgatgtcaacatgcccataatcaacgaatggggggatcaggtaacaaacgagatcgtgaggcaacttatggagcagaatggattctacaatcttgagaagccaggcgagttcacctcgatagtcgacattcagttcttggccgcaatgatccatccaggaggcggacgcaacgatattccacagaggttaaagcgccagttttctatattcaattgcacactaccatctgaagcttccgtcgacaagatcttcggggtaatcggcgtgggacactactgcacccagagaggcttcagcgaagaagtcagggacagcgtgactaagctggtgccattaacccggaggctgtggcagatgacaaaaataaagatgctgcccaccccggctaaattccactacgtgtttaatctgagagacctcagtcgtgtgtggcagggaatgttgaatactacctccgaggtgataaaggaacctaatgacctgctgaaattatggaagcatgaatgcaagagggtcatcgccgaccgcttcactgtttcgagtgacgtgacctggttcgataaggcccttgtttctttggtcgaagaggaattcggggaggagaagaaactgctggtggactgtggcatagacacctactttgtcgacttcctccgtgacgcccctgaagccgcaggggagacttcagaggaggcggatgccgagactcctaagatctacgaaccaattgaaagtttctctcacctgaaggaaagactgaacatgttcctgcagctctacaacgagtctatacgaggggctggcatggacatggtgttctttgccgatgccatggtacacctggtcaagatcagcagggttattagaacacctcagggcaacgccctcctcgttggcgtcggcggtagtgggaaacaatctttgacccgcctcgccagctttatcgcaggatacgtgtctttccagatcacactgacacgcagctacaatacaagcaatcttatggaagacctcaaggttctctaccgaacagcaggtcaacaggggaagggaattacttttatcttcacagataacgagatcaaagacgagtcatttcttgaatatatgaacaatgtcctctccagcggagaggtgtccaacttgtttgctagagatgaaatagacgaaattaacagcgaccttgcctctgtgatgaagaaggagttccccagatgcctacctaccaatgaaaacttgcacgactactttatgagtagggtgcggcaaaatctccacattgtgctttgtttctctccagtgggcgaaaaatttcgcaatagggcattgaagtttcccgcactgatctccgggtgcacaatcgattggttctctcgatggcctaaagatgcgctggtagccgtatccgagcatttcctgacatcttatgacatcgactgtagcctggaaatcaaaaaggaggtcgtgcagtgcatggggtcatttcaggacggcgtggcagagaaatgtgtggactatttccagcgctttcggagatccactcacgtcacgccaaaatcatatctatcgtttatccaaggctataagttcatatatggtgagaaacatgtggaagtgaggacactggcgaatcgaatgaacacgggattggaaaaacttaaggaggcctctgaatccgtcgctgccctcagcaaggagttagaggccaaggagaaagagctgcaagtcgccaatgacaaagctgacatggtgctgaaggaggtgacgatgaaggcacaagccgcagagaaagtcaaagcagaggtccagaaagttaaagatcgagcccaggctatagtggattccatctctaaggacaaggctatagctgaggagaaactggaagcagccaagccagccttagaagaggccgaagcggcactgcagacaatcagacccagcgacatcgcaaccgtgaggacgctgggcaggcctccccatctcataatgcgcatcatggactgcgtcttgttgcttttccaacggaaggtttccgcagtcaagattgatttggagaagagttgtacgatgccatcgtggcaggagtccctgaagcttatgactgctggaaacttcttgcagaatctacagcagttcccgaaggataccatcaatgaggaggtcatcgagttcttgtcaccttacttcgagatgccggactacaatattgaaaccgctaagagggtgtgcggcaacgtggctggcttatgctcttggactaaagcgatggctagcttcttctcaatcaataaggaagttcttccactgaaggccaatttagttgtccaggaaaaccggcaccttttagctatgcaggacctgcaaaaggcacaggcagaattggatgataagcaagcggagctagatgtggtacaggccgaatacgagcaagcaatgacggaaaaacagacacttcttgaggatgccgagcgatgtaggcataagatgcagaccgcttccaccctaatctccggattggcgggagaaaaagagcgatggaccgaacagtctcaggagtttgccgcacagacaaaaagactcgttggggatgtactgctggccaccgcctttctgagttactccggcccattcaatcaggagtttagggatcttctgctaaacgactggaggaaggagatgaaagcgagaaagattccattcggtaagaatttgaacctgtccgagatgctcatcgacgctcccaccatcagcgaatggaatctacagggcctgcctaacgacgacttatcaatccaaaatggaattatcgtaaccaaggccagtcggtaccctctcctgattgatccacagactcaaggaaagatctggataaagaacaaagagagtcgaaacgagctgcagataacatccttaaaccataaatatttccggaatcacctcgaagactccttgagcctaggcagacccctgcttattgaggatgtcggtgaggagctggaccctgctctagacaatgtcctggaaaggaatttcatcaagacggggagcacctttaaagttaaagtgggtgataaggaggtcgatgttcttgacggatttcgtctatacatcacaaccaaactgccgaatccagcttacacgccagaaatctcagcccgaacctcgattatagacttcaccgtgacaatgaaagggctggaggaccagctgctgggtcgagttatcctgacggaaaaacaggagctcgagaaggagcgcactcatttgatggaagatgtgactgccaataagcgcagaatgaaagagctagaggataatctgctgtacaggctgacatctacccaagggtccctggtggaggatgagagcctgatagtggtgctctctaatactaagcgaactgcagaggaggtcactcagaagttggagataagcgccgagactgaagtgcagattaacagtgctcgagaggagtaccgccctgtcgctacccgtggcagtatcttgtattttttgataactgagatgcggctggtgaacgagatgtatcagacatcacttagacagtttctgggcttgttcgacctgtctctcgcccgttccgtaaagtccccaattactagtaagcgaatcgccaatattatcgaacacatgacttacgaggtctacaaatacgcagcaagaggcctgtacgaagagcataagttcctgttcaccttgctgctgacccttaaaatcgacatccagcgcaatcgtgtaaaacatgaagaattccttactcttatcaagggaggggcatctctggatcttaaagcatgtcccccaaaaccgtcgaagtggatcctggatattacatggcttaacttggtggaactgtcaaagctcaggcagttttcggacgttttggaccagatctcacggaatgaaaaaatgtggaaaatttggtttgacaaggagaacccggaggaggaaccgctccccaacgcatacgacaagtccctcgactgcttcaggagactgcttctcattcgcagttggtgccccgatcgaaccatcgcccaggccagaaagtacatcgtcgatagcatgggcgaaaagtacgccgaaggagtgattctggatctggagaaaacctgggaagagagcgatccaagaactccgcttatatgcctcctctccatgggaagtgatccgacggacagcatcattgcattgggtaagaggttaaaaatcgagactagatatgtgtccatgggccagggccaagaggtgcatgcacggaaactgcttcagcagaccatggctaacgggggatgggctttattgcagaattgccacctcggcctggatttcatggacgaactaatggatatcataattgagacggagctggtacatgacgccttcaggctgtggatgacaactgaagcacataagcagttccccatcactcttctccagatgagtataaagtttgccaatgatccaccccagggactccgggcagggctgaaacggacttactctggagtgtcccaggatctgctggacgtcagtagtgggtctcaatggaaacctatgttgtatgctgttgcttttctgcactctactgtgcaggagcggaggaagttcggggctctgggatggaatattccttatgagtttaaccaggccgacttcaatgccacagtgcaatttattcagaatcacctagatgatatggacgttaagaaaggagtgagttggactacaatccggtacatgattggagaaatccaatacggaggtcgcgtgaccgatgattacgacaagagacttctgaatacctttgctaaggtttggtttagcgaaaatatgttcggtcctgatttctctttttaccaggggtataatatcccaaaatgttctacagtggacaactatcttcagtacatccagagtctacctgcttatgattcccctgaggtgtttggcctccatccaaatgcagacattacgtaccagtccaagctggctaaagacgtgctggacaccatcctgggcatccagcccaaagacacttcgggagggggtgatgagacccgcgaggcggtggtggccaggttagccgacgacatgttagagaagctccctccagactacgtgcccttcgaagtgaaagagcgcttacaaaagatggggccatttcagccaatgaacattttcctgcgacaggagatagaccggatgcagcgcgtcctgtcgctggtccggagcaccctgacagagctgaaactcgccattgatggcacaattattatgagtgaaaatctgagagacgctctggattgtatgttcgatgccagaattccagcttggtggaagaaggcatcttggatcagttcaactctggggttctggttcactgaactcatcgaacgaaattcccagttcacatcatgggtgtttaatgggcgaccccactgtttctggatgaccggcttctttaacccgcaaggttttctcacagcaatgcgtcaagagatcacacgcgcaaataagggctgggcgttggacaatatggtgctctgcaatgaggtcactaaatggatgaaggacgatattagtgcacccccaacagagggtgtctatgtatacggtctgtacttagagggtgccggttgggataagaggaacatgaagctcatagaaagtaaacccaaagtgctgtttgagctaatgccagtgattaggatctacgcagaaaacaataccttgcgcgacccccgtttctacagttgccccatatacaagaagcccgtgcggaccgacctcaactacattgccgcagtagacctgagaacggcccaaacacctgagcattgggtgctgaggggagtggcgctattgtgtgacgtcaagtaa

SEQ ID NO: 221440 - DNA, 12477 bp, synthetic construct
  misc_feature 1..12477: note = Description of Artificial Sequence: Synthetic coding sequence
  source 1..12477: mol_type = other DNA
atgacctttcgagccacagactccgagttcgatctcactaacatagaggaatatgccgaaaattccgcactaagcagattgaacaatatcaaggccaagcagcgtgtgtcctatgtcacatcaaccgagaacgaatcggatacacaaattctgactttcaggcacatcactaaagcacaggaaaagactaggaagcggcagcagcctataaagttggaacctctccccgtgttaaaggtatatcaggaccataaacagccagagtatattcacgaacaaaacaggtttcagcttatgaccgcgggaatcattaaacgccctgtgtccattgccaagaagagctttgctacttcctctactcagtttctggagcaccaggatgctgtcaagaagatgcagatccatcggccatatgtggaggtattttccccaagtccgccaaagctgccccataccggtattggtaaaaggggcctgttcggcacaagaagctcggcgtacccgaagtacacattccacgatcgcgaagaggtggtgaaggccaatatacgcgacccacttcaaatcataaaaataataagagaaaacgagcatttaggctttctttatatgattcctgccgtgccacggtcttctatagaatacgatacatacaatttgaaagtggtctcctatgaaaacatcaacaagaatgattattacaccatctctcagagggccgtcacccatatttacaatgaggatatcgagttcatcgagattgacagatgggaacaggaatacttatatcatcgggaacttactaaaatccctatctttagtctgtttcgaaaatggaaggccttctctgtctggcgaaagaacgttcggtcaaagaaaattactggctgccagaagagtttacaaaaaaatctcttcatagtcaacccacacctgaggcccgctcttcttaaaattaatgagctttgttaccacttgagctttatgggactctgctatattgaaaagtgtcatacctacactctccaggaatttaaggcagcccaggtgatcaggttggccgaagtaactgaacgcctgggcgaatttcgcaacgaggccaagtacgtggtgcggagggcttgccgctttgcactccgggctgctggattcgtccctgatgactgtgcatttggacccttcgaggactatcataaggtgcagagttccggtagcttcattaatacaccacatgagttgccgacttatggcgattccgaaaagatgacctacacagagcaagccagtaagcggcactactgcatgcgcctgacatgctttatccgactgaacgactatctgatcgagaacacgatgcatatcttaacagtaaacgctgtgaacagcctactcaaccaccttaccgacaaactgaaaagaaccccatccgccgatgtgattcagaaatggatcacagaggagaaacccgaggtgcctgataaaaaaggcactctgatggtcgagaaacaggaggaagacgagtcactaatcccaatgttcctgaccgaactgatgctcactgttcagtcactcctgtttgagccttctctagaagatttcctggatggtatccttggggcagtaaaccactgtcaaaatactgttctctcagtgccaaacctggtgccggacagttatttcgacgcatttaccagcccatatatcaataataagcttgagggaaagacctgcggcaccggtcccagtctcgctgcagtgttcgaggacgacaaaaattttcacaccataatctcccagattaaggagacaatccaggccgcttttgagtcagccaggatctatgccgcaacatttgagaaattccagatcttttttaaggagaatgagagcctggatctccaggctctaaagttgcaggagcctgacataaatttttttagtgagcagcttgaaaagtaccacaaacaacacaaagacgcggtcgctctcaggccaactagaaacgtgggactcctgctgatcgacaccaggctcctgagggaaaaactgattccaagcccactgcgatgtctagaggtgctaaattttatgctgcctcggcagtctaagaaaaaggtggatgctattatttttgaagcacaggatgccgagtacaaactggaatttgtgcccaccaccactaccgagtacgtgcattctcttctcttcttggatgaaattcaagagaggattgaatccctggaagacgaaggtaacatcgtgacccagatgtataagctgatggagcaatatcaggtacccaccccaccggaagacttcgccgtcttcgccaccatgaagccgagcatcgtggctgtgcggaatgctatagataagagcgtcggcgatcgcgaaagtagtattaagcagttttgtgtgcatctggggtctgacctggaggagcttaacaacgaagtgaacgaagtgaaactccaagcccaggatccccaaatactggacatcagcgcggatcaggataaaattcgcttaattctgaataacctgcagagcgtgctcgccgacctccaaaaacgcgcattccagtacaaaagctatcagaagaacttcaaggttgaggtgagcaagttcgaggcgctagaggaggtatccgccgagctcaaactcaaacagctgttatgggattcctttagcgagtgggataaactgcaacaggaatggctgaagtctaagtttgattgtcttgatcccgaagtgctgaacggacaggtctctaagtacgcgaaattcgtgacccaattggagaaggggctgccgcctaacagtgtcgtgccacagttaaaatacaaggtcgagaagatgaaggagaagctgccagtaatcattgacctacgaaatccaactctgaaggctagacattgggctgccattgaacagacggtcgacgccacattggtcgacgccgagatccctctgacactggaaaggttgtcccagctgcacgtgttcgatttcgggcaagaaatccaggacatctcgggccaggccagtggagaggccgcattggaggctattcttaaaaaggtggaggactcatggaagaccacggagtttgtgattctaccgcaccgcgatagcaaggacgtgttcatcctcggcggtactgacgatatccaagtgctgctggatgactccacgatcaatgtggctaccctggctagctccaggtaccttggacccctgaaaacacgggtcgacgaatggcaaaagcagctggccttatttaatcagactctggaagagtggttaacatgccagcgcaattggttatacctggagagcatatttaacgcacctgacatccagagacagctgcctgctgaagctaaaatgtttcttcaagtggataagtcttggaaagaaattatgagaaaggtgaatagactgcccaacgctctcagggctgctacccagccaggtctgctcgagacctttcaaaacaataacgccttgttggaccagatccagaagtgtctcgaggcctacctggagagcaagcgggtcatctttcctcggttctacttcctaagcaacgatgaactgctggagatcctggcccaaacacgcaacccacaggcagttcagcctcacttgcgaaagtgcttcgattcaatctccaagctggagttcgctttgatgcctccggctgagggaaaaattccaggaatcgatggagaaccagagaaagtatatactaatgacatcctggcgatgcttagtcctgagggcgaacgtgtttcactcgggaaggggttgaaggctcggggtaatgtcgaagagtggttagggaaggttgaagaagccatgttcacatcactcaggaggttgtgcaaggctgctattgccgactaccaaggcaagctcagaaccgactgggtggttgccggtcaccctagccaagtgattctcactgtttcccagataatgtggtgtagggatttaacagagtgtctggagacagagcatagtaatcatatccaagctctaaaaaatttcgaaaaagtgaactttgagaggctcaacgctcttgcagccattgttcaggggtccctgcctaaacttcataggaacattctgactgccctgatcactattgacgtacatgcccgagatatcgtaaccgagttggtacagagcaaggtggagaccgttgaatccttcgactggcagaggcaactgcggtactactgggatatagatctcgataattgcgttgccagaatggcactgagccagtacacatatgggtacgagtaccttggcgcatgcccccgtctggtgatcacccccctgacggatcggtgttacctttgtttgatgggcgcactccagctggatcttggcggtgcgccagcaggacctgccggtactgggaaaacggaaacgactaaagacctggccaaagctctcgccattcagtgtgtggtgtttaattgctctgatggactagattataaaatgatgggacgattcttttcaggtttggcgcagtccggcgcttggtgctgcttcgatgaatttaatcggatcgatatcgaggtgttaagtgtaatcgcgcagcagcttattaccattaggaacgccaaggctgctaaactgagcagatttatgtttgagggacgcgagatcaagttggttatgacatgtgcagcctttatcacaatgaatcctggttatgcgggtaggacagagctacctgataacctcaaagccctattcaggccattcgcaatgatggtgccaaactacgcccttatcgctgaagtcatactgtacagcgaggggttcgaatcctccaagattctcgcccgaaagatgactcagatgtataaactttgctctgagcagctaagccagcaagaccactatgatttcggcatgcgcgcagtgaaatccgttctggtgatggccggttctttgaaacgcgagaatccagacctcaatgaagatgtggtcctgattagggctctgcaggatagtaacctgcctaagttcttgactgatgacgctctgctgtttagcggcatcatttctgatttattcccgggagtacagattcccgagcacgactacggcatcctgcaaagcaccatagtcgacgtcatgaatcgacagaacctgcagcccgaaatgtgtatggttaggaaggttattcagttctatgagaccatgctcgtccgccatggcgtaatgctggttggcccaaccggcggaggaaaaactacggtttaccggatcttagccgagaccttgggcaatctgcagaagttgggtatcgagaacagtttctatcaggccgtgaagacgtacgtgttaaatcctaagtcaattaccatgggtgaactctacggcgaagtaaataacctcaccctcgaatggaaagatggtctcatggcgctgtccgtgagggccgcagtgaatgatacatccgaggatcacaagtggatcattagcgatggcccagtggacgccctgtggattgaaaatatgaatactgtactcgacgataacaaaatgctgtgcctcgccaactcagaaaggatcaagctgacacctcagattcatatgctgttcgaggtgcaggatctcagggtcgctagtccagccacagtgagcaggtgcgggatggtatttgtggacccagaggagctgaaatggatgccttacgtgaaaacatggatgaaggggatcagcaagaaactgacagaagagacccaggagtacatcctcaatctttttcagaggtatgtggacgaaggccttcacttcattaacaaaaaatgctctcaggcgataccacaggtagacatttctaaagtgacgacgctgtgttgcctactagagtccctgattctggggaaggacggggtcaatctcgccatggagcaaacaaagctaaacacaattctctgtcagacattcgtgttctgttatctgtggtccctggggggaaacctgactgagaactattacgattccttcgacacgtttatcaggacccagttcgacgataatccagacgcgcgactaccaaatagtggagacctgtggagcatccatatggactttgacaccaagaggctggacccatgggagcgcatcatccctactttcaagtataatcgcgacgtgccattctttgagatgctggtccctaccacggacaccgttaggtacggttacttaatggaaaagctactggccgtcaaacattctgtgctttttaccggcataactggggtgggcaaatctgttatcgccaaggggctgctcaataaaattcaggagagtgctggctacgtccctgtctacttgaatttcagcgcccagactagtagcgcccgtacgcaggagatcatcgagagcaaacttgagaggaaaagaaagaacattctgggggctccaggaaacaaaaggatcgtgatcttcgtcgacgacctcaacatgccccgactggatcgctacggcagtcagcctcccatcgagctactccgccagtaccaggacttcggagggttttatgaccggaataagttgttttggaaggagattcaggacgtcacaataatctccgcctgcgctcccccaggcggaggcaggaacccagtgacccctcgcttcatccggcacttctctatgctctgcctacccatgccatcagaacactccctgaagcagatttttcaggctatcttgaatgggttcttatcagacttccctcccgcagttaaacagacagcaagctccatcgtggaagcctcagttgagatttacaacaaaatgagcgtggatctgctgcctacaccagctaagagccattacgtgtttaacttaagggatctgtctaaatgtgtgcagggcatactgcagtgtgatcccggaacgatcagggaggagatccagatattccgcctgttttgtcatgagtgccaaagggtatttcatgatcggctcattaataacgaagacaaacactatttccacgtgatcctgacagagatggccaacaagcattttggcattgccatcgatctggagtacttcttgaacaaaccaatcatttttggtgattttattaagttcggagcagacaaggcagataggatctatgatgacatgccggatattgagaagaccgccaacgtcctacaggactatttggatgattataacttgacaaaccctaaggaggtgaagctggtgttctttcaggacgcgatagagcatgtgtccagaattgcccgaatgattcgacaggagagaggtaatgctctgctggttggcgtcggcggaactggtaaacagtccttaacacgtctggccgctcacatctgtggttacaaatgcctgcagattgaactttccagaggatacaactatgactctttccacgaggatctgagaaagctttataaaatggccggagttgaggacaaaaacatggtgtttctgttcaccgacactcagatagtggtggaggaatttctggaggacatcaataacatcctcaactcaggcgaagtaccgaatctgtttgaaaaggacgaactggaacaggtgcttgccgctacaaggccacgcgcaaaagaggttggtatttcggagggaaatcgtgatgaggtctttcagtattttattagcaaggtccggcagaaactgcatatcgtcttatgtatgtctccagttggggaggcgtttcgatctcgctgtaggatgttccctagccttgttaattgctgcacaatagactggttcgtgcagtggcctagggaagcgctgctcagcgtctcaaaaactttcttttcccaggtggacgccggtaacgaagagctcaaagagaagctgcctttaatgtgcgtgaacgtgcacctcagcgttagcagcatggctgagagatattacaatgagctcagaagaaggtactataccactccaacctcataccttgagctcatcaacctgtatttgagcatgctgtccgagaaacgtaagcaaataatcagtgcaagagaccgcgtgaagaacggtctgacaaaactgcttgagactaatatcctcgtcgacaagatgaaactagacttgtctgcacttgagcccgttctactggccaagagtgaagacgtggaggcactgatggaaaagctggccgtcgatcaggaaagcgctgatcaagtgcgcaacaccgtgcaagaggacgaggctaccgcgaaagtgaaggctgaggaaacacaagcaatcgctgacgacgctcagagagacctagacgaagccctgcctgcgctcgatgcggctaacaaggcattagactctctagataaggcagacatcagcgaaatccgggtgttcacaaagcctccagatttggtgatgacagttatggaggccatcagtatcttgctgaatgcaaaaccagattggccttctgccaaacagctgttgggtgactccaactttctgaaaaggctactggagtacgacaaagaaaacattaagccacagattctcgccaagctgcagaaatatatcaataaccctgatttcgtgcctgaaaaggtggagaaggtgtccaaggcatgtaaaagtatgtgtatgtgggtgagggcgatggatctttattccagagtagtcaaggtggtcgagccaaaacggcaaaagctgcgggcagcccaggctgaattggacattaccatggccacacttcgcgaaaagcaggccctactgcggcaggtcgaagaccagatacaggcccttcaagatgagtacgataaaggagtcaatgaaaaagagagtctagctaagactatggcacttactaaggcccgactggtgagagccggaaagttaacagcggctctggaggacgagcaagttcgctgggaggagtcgatccaaaaatttgaagaagagattagcaacattacaggaaatgtatttatcgctgccgcttgtgtggcttactacggggctttcacagcccaatatagacaatccctcatcgagtgctggatccaagattgccagagtctggaaatccccatcgacccttcgtttagcctgattaatatcctgggagacccctacgagattcgacagtggaacaccgacgggctacctcgcgatcttatctccacagaaaacggcatcctggtgactcagggcagacggtggccgttaatgatagaccctcaggaccaagctaacagatggatccgaaacaaggaatcaaaaagtgggctaaagattatcaaactgaccgactcaaatttcttacgcatcctcgaaaattcaatccgacttggtttgcctgtgctacttgaagaattgaaagaaacattagaccctgccttagagcccatccttctaaaacagattttcatttctgggggtcgtctactcattagactgggggactcagatatcgactacgacaaaaattttcgattttacatgacaaccaaaatgcccaacccccactacctgcctgaggtctgcatcaaggtgactataatcaactttactgtgactaagtctggactggaagatcagctgctgagcgatgtggtgagactggagaagcccagactggaagagcagagaatcaaacttattgtgcggatcaataccgataagaaccagttaaaaaccatagaggagaagatcctgaggatgctttttacatccgaggggaatatcttggacaacgaagagctgatcgatacattgcaggactctaagattacatctggcgcaattaaaaccaggttggaagaggcagaaagcactgagcagatgatcaacgtggcacgcgaaaaatatcgacctgtcgccacccagggatctgtgatgtacttcgtgattgctagccttagcgaaattgaccctatgtaccagtattctttgaaatactttaaacagctcttcaacactaccattgagacaagtgtaaagactgagaatcttcagcagcggctagatgttcttctggagcaaacactcttgacagcctacgtcaacgtttctcgtgggttattcgagcagcataagttgatttattcttttatgctttgtgtggaaatgatgcgtcaacagggtactctgagcgacgccgagtggaacttctttctgagagggtcggccggactcgagaaagagaggccacccaagcctgaagccccatggctgcctacagcaacctggtttgcctgctgtgacctcgaggagagtttccccgtcttccacggactgacacagaacattcttagtcaccctatttctatccgcctcggcagtttcgagacgtacattaatccacagaaatgggaagggtacagcaagatgaagcacgaggacaaacacatgcggcaagagaaagaagcggcacaccaggatccatggtccgcaggcctttcttcctttcacaaactgatcctgattaaatgctgcaaagaagaaaaagtggtgttcgctcttacggactttgtgatcgaaaacctgggcaagcagtttatcgaaacacctcctgttgaccttcctaccctgtaccaagatatgagctgtaacacaccgttggtattcatcttgtccaccggaagcgaccccatgggcgcatttcagagatttgccagagaaagcggctacagtgaacgcgtgcaatcaatttcacttgggcagggccagggcccaatcgctgagaagatggtgaaagatgcgatgaaaagtggaaactgggtttttctgcagaattgtcatttggcggtttcatggatgttagccatggaggaactaatcaaaacatttaccgatccggattcagccatcaaggatacattcaggttgtttctttcctcaatgccctctaatacattcccggtgaccgtcctgcaaaacagcgtgaaagtgactaacgaaccacccaaggggctgcgcgctaacatcaggagagcctttacggaaatgactcctagttttttcgaagagaacatccttggcaaaaagtggcggcagatcatcttcgggatttgcttcttccatgctattattcaggagcgcaaaaaattcggacccttaggttggaacatctgctatgagttcaatgactcggatcgggaatgcgccctcctgaacttgaagctgtactgtaaggaaggcaagatcccatgggacgctttgatttacatcaccggggaaattacttatgggggacgcgtgaccgatagctgggatcagaggtgcctgagaaccatactgaagcggttcttttcaccagagacactggaggaggattataagtattcagagagtggtatttattttgcaccgatggccgactcactgcaggaatttaaagattacattgaaaaccttccactcattgatgacccagaaatttttggcatgcacgagaatgccaacctagtgtttcagtacaaagagacctccactcttatcaacacaatcctcgaagtccagcctaggtcgagcacgggaggcgaagggaagtccaatgacgagattgtacaggagctggtggcctctgtacagacccgggtgcccgagaaactggagatggagggggcatctgaatccctcttcgtgaaagacttgcagggcaggctgaactcactcacaaccgtcttaggccaggaggtagaccggtttaataacctattaaaactaattcatacatctctggagacactgaacaaggcaatcgccggtttcgtcgtcatgagcgaggaaatggaaaaggtctacaactctttcctaaacaatcaggtacccgctctgtggagcaacacagcatacccttcactcaaacctctgggatcctgggtcaaggatcttatcctgcggacttctttcgtggatttgtggttgaaacggggtcagcctaagtcatactggatatccggctttttcttcccacagggcttcctgaccggaacccttcaaaatcatgccaggaaatataacctcccaatcgatgagctgtccttcaagtacagtgtgatcccaacctatcgagaccaggcggctgtgatagaggccgctaaaacggtccagtttgggcaggaactgccaatggacatggagttgcccagccccgaagatggggtgctagttcatgggatgttcatggatgcatcaagatgggacgataaagaaatggtaatagaggacgccctcccgggtcagatgaaccctgtactgccggtagtgcattttgaaccacagcaaaactataaaccgagccctaccctatatcattgtccactatacaaaactggtgcccgagctggtaccctatctacaacaggccattctaccaacttcgtggtcaccgtcctactcccctctaaacgatctaaggattactggatagcaaaggggtccgcacttttgtgtcagctgagcgagtac

SEQ ID NO: 221441 - DNA, 12477 bp, synthetic construct
  misc_feature 1..12477: note = Description of Artificial Sequence: Synthetic coding sequence
  source 1..12477: mol_type = other DNA
atgactttcagagccacagacagcgagttcgatcttaccaatatcgaagagtatgcagagaactctgctttgtcacggctgaacaacatcaaggccaagcagagagtctcctatgtcacatccactgagaacgagtctgacacacaaatcttaacattccggcacatcaccaaggctcaagagaagaccagaaagagacagcagccaatcaagctcgagcctttaccggtgctgaaggtgtatcaggaccataagcagcctgaatatatccacgaacagaaccgctttcagttgatgaccgccggaattattaaacgccctgtttcgattgctaagaaatcatttgccaccagctcgacccagttccttgagcaccaagacgctgtcaagaagatgcagattcatcgtccctacgttgaggtgttttcaccatctccccctaagctgccccataccgggattggaaagaggggtctgttcggtacccgcagttcggcgtatccgaagtataccttccacgatagagaggaggtggtgaaagcaaacattagagaccctcttcagatcattaagatcatcagagaaaacgaacacctcggattcctgtatatgatacctgctgttcccaggagcagcatcgagtacgacacctataacctcaaggtcgtctcttatgaaaatataaataagaatgactattacaccataagccaaagagccgtaacccacatctataatgaagatatcgagttcatcgagatcgacaggtgggaacaggagtatctctaccaccgcgaactaaccaaaatcccaatcttttccctgtttaggaaatggaaggctttctctgtgtggcgcaagaatgtgcgtagcaagaagatcactggatgccaaaagtctttgcagaagaatctcttcatcgtcaatccgcatctgcgacctgctctgttaaaaatcaacgagctgtgttatcacttgagtttcatgggcctgtgctacatcgagaaatgtcacacatacaccctccaagaattcaaagccgctcaggtgatccgattggcggaagtgactgagcgtctcggggagttcagaaatgaagccaaatacgttgttagacgagcctgccgttttgcgcttagggccgctggtttcgtgcccgatgactgcgcttttggaccctttgaggattaccataaggtacagtccagtggcagcttcattaacactccacacgagttaccaacctacggggacagtgagaaaatgacgtacacagagcaggcttcaaaacgccactactgtatgcgtctcacttgttttatccgattgaacgactatctgattgagaacacgatgcacattctgacagtcaatgcggtaaattctcttctcaatcacttgacggataaacttaagcgaaccccatctgccgacgttattcaaaaatggattactgaagaaaagccggaggtcccggataagaagggcacgctgatggttgagaagcaggaagaagatgaatctcttatacccatgtttttaactgaactaatgttaaccgtgcagtcgctgctcttcgagcctagcctggaggattttctagatggaattttgggagccgtgaaccattgtcagaatactgtgctgtccgttcctaacctagtcccggatagttacttcgacgcattcacgtctccctacattaataataagctggaaggaaagacctgtggaaccgggccaagcctagccgctgttttcgaagatgataagaacttccatacaataatcagtcagatcaaggaaaccattcaggctgcatttgagagcgcccgaatctatgccgctaccttcgagaagttccaaatctttttcaaagagaacgagtctttggatctgcaggcccttaaacttcaagaaccagacatcaatttcttctcggaacagctggagaaatatcataagcaacacaaggatgcagttgctctgaggccgactcggaatgtcggcctgctgctcatcgatactagactcctgagggaaaaactcatcccttcgccgctgagatgtcttgaggtgcttaattttatgctgccaagacagtccaaaaagaaggtagatgccattatctttgaggcccaagacgcagagtataaacttgagtttgtccctaccacgaccaccgagtacgtacattctctgctctttctggatgaaatccaggagcggattgagtcactggaagacgaggggaatattgtgacgcagatgtataaattgatggagcagtatcaagttccaactcctcctgaggacttcgcagtattcgccactatgaagcccagcatcgttgctgtgcgtaatgcaattgataagtctgtgggagatagagagtcctctataaaacaattctgtgtccacttgggatctgacctcgaagagcttaacaacgaagttaatgaagtaaagttacaagcacaggacccacaaattctagacatttccgctgaccaggataagatccggctcatcctgaataacctacaatccgtgttggctgacttgcaaaaacgggcattccagtataaatcctatcagaagaatttcaaggtggaagtttcaaagtttgaggcattagaggaggtcagcgcagaactaaaactcaagcaactcctatgggattccttctctgagtgggacaaactgcaacaagagtggttgaaatcaaagtttgactgcctggacccggaggtactgaacggccaggtgtctaagtacgcgaagttcgttacccagctcgagaagggcctccccccaaacagcgtggtcccgcagctgaaatataaggtagagaaaatgaaggagaagctgccagtcatcatcgacttgcggaatcccactctaaaggctcgccactgggccgctattgagcagaccgttgatgcgactctggtagacgcagagatccccctgacactcgagcggctgagccagctgcatgtgtttgatttcggacaggagattcaggatatctctggccaggccagtggcgaagctgcgctagaggcgatcctgaagaaggttgaggacagttggaagacgactgaatttgtgattctgcctcaccgtgatagtaaagacgtattcattctggggggaaccgacgacatccaggtgctattggatgatagcaccataaatgtcgccaccctggcaagctcaagatacctcggcccattaaagacccgagtggatgagtggcagaagcaactcgctctattcaaccagaccctggaggagtggctgacttgccagagaaactggctgtacctggaatcaatattcaacgcacctgacatccaacgacagcttccggcagaagctaagatgtttctgcaggttgacaagtcttggaaggagatcatgaggaaggtcaaccggctgcccaatgctctccgggcagctacacaaccagggctgcttgaaactttccagaacaataacgctttactggatcaaatccaaaaatgcctcgaagcatatctggagtccaagagggtgatctttcccagattttacttcctttcgaacgacgagctacttgagattctcgcccaaacccgcaatccccaggccgtacagccacacttgagaaagtgtttcgacagcatctccaagctggagttcgctttaatgcccccagccgaaggtaaaatcccaggcatcgatggcgagcctgaaaaagtgtacacaaatgacatccttgccatgctctccccggagggagagcgtgtgtcgctgggaaagggtctgaaagcacggggtaacgtcgaggagtggctcgggaaagtggaggaagccatgttcactagcctgcggcgtctctgcaaggcagctatcgctgactaccagggtaaactgaggacagactgggtagttgctggccatccttcccaggtcattctgactgttagccagataatgtggtgtagagatcttacagagtgcctggagactgaacacagcaatcacattcaggccctaaaaaacttcgagaaagtgaactttgagaggctgaatgcattggccgcaatcgttcagggtagcctgcctaaattgcaccgcaacattcttacggccctgatcaccatcgacgtgcacgccagagacatagtgacagagttagttcagtctaaggtggaaaccgttgaaagtttcgattggcagcgtcaactcaggtattactgggacattgaccttgataattgtgtggctcggatggccctctcacaatacacttacgggtacgaatatttgggggcttgtccgagactggtgattacacctctcacagaccgatgctacctgtgcctaatgggcgcactgcagctcgacctggggggagccccagccggacccgctggcacaggcaaaactgagaccactaaagacctggccaaggcgcttgctatacagtgcgttgtgtttaattgctctgatggactcgactataagatgatgggacgatttttctctggcttagctcagtctggcgcttggtgctgttttgatgaattcaacagaattgacatcgaggtccttagcgtcatcgcccaacagctaatcacaatccgtaacgcaaaggccgcaaaactgagcagattcatgttcgagggtcgcgagatcaagctcgtgatgacttgtgcagcgttcataacaatgaaccccggatacgccggacgcaccgaactgcccgataacctaaaagctctcttcaggccctttgccatgatggtgccaaattatgctctgatcgcagaagtgatactgtacagcgaaggctttgagagctcgaaaatactggcgagaaagatgactcaaatgtacaagctgtgctccgaacagcttagtcagcaggaccactatgatttcggtatgcgcgcagtgaagtccgtgctggtgatggccggatctctcaagagggagaatcccgacttaaatgaagatgtcgttctgatcagggcactgcaagattctaacttacctaagttcctgaccgacgacgccctcttattttccgggatcatcagtgatctttttcccggtgtccagatcccagagcacgactacggtattttgcaatctactattgtggacgtgatgaaccgccaaaatcttcagccagagatgtgtatggtacgtaaagtcatacaattctatgaaaccatgctggtgagacatggtgttatgctggtcggcccaactggcggtggtaagaccaccgtgtacagaattttggcagagacactaggcaatcttcagaaactgggaatcgagaattccttctatcaagccgtgaagacttacgtcctaaacccgaagtcaatcaccatgggcgaactgtacggcgaagtaaacaatctgaccctggaatggaaagacggactaatggccctgtctgtgagagctgctgtcaatgacacatctgaggatcataagtggataattagtgatggccctgtagatgccctctggattgaaaacatgaacaccgttctcgacgacaataaaatgctgtgcctagccaattccgaaagaataaaactcacaccacagattcatatgctttttgaagtgcaagaccttcgcgtcgcctccccagccaccgtgagccgatgtggtatggtctttgtcgatcctgaagaactgaagtggatgccgtacgtgaagacttggatgaagggcatctcgaagaaattaaccgaagagacccaggaatatattcttaatctgttccagcgatacgtggacgaaggacttcactttatcaacaaaaaatgttcacaagcgatcccacaggtggatatctccaaggttaccacactgtgctgtttgcttgagagcctcattctgggaaaagacggcgtcaacctggctatggagcagaccaaactgaatacaatactgtgtcaaacattcgtgttctgctacttatggagtctggggggtaatctgaccgagaactactatgacagctttgatacattcattcggacacaattcgacgataaccccgacgcccgactgcccaactcaggggacctgtggtcgattcacatggactttgacacgaagcgactggacccttgggaacggatcatcccaacctttaagtacaatcgtgacgtgcctttcttcgagatgctggttcccacaaccgataccgttcgctatggttatctcatggagaaactgctggccgttaaacactcggtgttgtttactgggattacgggggtgggaaagtctgtcatcgccaaaggactcctgaataaaattcaggagtctgccggatatgtccctgtatatctgaatttctcggcacagactagcagcgccaggacacaagaaattattgagtccaaactagaacggaaaagaaaaaacatcctcggagccccaggaaataaaaggatagtgatattcgtagacgatctgaatatgccccgtctcgataggtacgggagccagcctcctatcgaactactgcggcagtaccaggactttggtggcttttacgacaggaacaaactgttttggaaagaaatccaggatgtcaccatcatcagtgcctgtgccccacccggtggaggccgaaaccctgtgactccgagatttatcaggcacttctcaatgctgtgccttcctatgcccagcgagcactccctgaaacagatcttccaggcaatcctgaacgggttcttgtctgatttcccacctgcagtgaaacagaccgcctctagtattgtggaagcttccgtcgagatttacaacaagatgtctgttgatctcctccctaccccagccaagtcccattatgtgttcaatctccgagatctgtctaagtgtgtgcagggcatcctccaatgtgatccaggtaccatcagggaggaaatacagatctttaggctgttctgccacgaatgccaaagggtgttccacgacagactgattaataatgaagataagcactattttcatgttattctcacagagatggccaataagcacttcgggattgccattgatcttgagtattttctgaataaaccaattatattcggggacttcatcaagtttggcgcagacaaagccgaccgcatctacgacgatatgcccgacattgaaaaaaccgccaatgtgctacaagactacctcgacgactacaatctgaccaaccccaaggaggtgaagctcgtattttttcaagatgctatcgagcacgtgtctaggatagcacggatgattcggcaagaaaggggcaacgcactgctggtgggcgtgggaggcaccggcaagcaatccttaacccgtttggctgctcacatctgcggctacaagtgcctgcaaatcgaacttagtcgcggatacaactacgactcctttcatgaggacctacgcaagctgtataagatggcaggggtcgaggataagaatatggtatttctcttcactgacactcagatcgttgtggaagagtttctggaagatataaacaacatactgaactcaggagaagtacccaatttattcgagaaggacgaattggagcaggtgctggctgcgacacgcccacgcgctaaggaggtggggattagcgagggcaaccgcgatgaagtatttcaatactttatcagcaaagtgcgccagaagttgcatatcgtgttatgtatgagtcccgtgggcgaagcctttcgaagcaggtgcaggatgttcccctccctggtgaattgctgtactatcgattggtttgtacagtggccacgcgaagctcttctctctgtgagtaagacctttttcagccaggtggacgcgggaaatgaggaattgaaggagaaactaccgctgatgtgtgtgaatgtgcacctgtctgtgtcttccatggctgaacgatattacaatgaactgcggaggagatattacacaactcccacgagctaccttgaattgattaatctgtacctgagtatgctgagcgagaagagaaagcagatcattagtgcgagagaccgggtgaagaacggacttacaaagttactcgaaaccaacattctggtagacaaaatgaagctcgacctgtccgccctggagcccgtattgctcgcaaaaagtgaagacgtggaggctttgatggaaaagctggcagttgaccaggaaagtgccgatcaggtgcgaaataccgtgcaggaagatgaagcgacagccaaggtgaaggctgaggaaacgcaggctatagctgacgatgcccagagagatttagacgaggccctgccagctctcgatgcagcaaacaaagcactggactcccttgacaaggctgacatctcagagatccgagtctttacaaaacctcctgatctcgtaatgactgtcatggaagctatatctattctcttaaacgctaaaccagattggcccagcgcaaagcagctgctgggtgactccaactttttgaaacgcctgctcgagtacgataaagaaaacattaaaccacagatcctggccaagctgcaaaagtacatcaacaaccctgacttcgtgcccgaaaaagtggaaaaggtttccaaagcgtgcaagtccatgtgtatgtgggttagggcaatggacttatactctcgggttgtcaaagtggttgagcccaaaaggcagaaactcagggctgctcaagctgagctcgatatcaccatggccaccctccgggaaaaacaggcactgttgagacaggtcgaggaccagattcaggccctgcaggacgaatatgataagggggtgaatgaaaaggagtctcttgcaaaaacaatggctctcacaaaggcaagacttgtcagagccggtaagttaacagctgctttagaggatgagcaggtgcggtgggaagagtccatacagaagttcgaggaagagatttcgaacattacaggtaacgtattcatcgctgcagcctgcgtcgcctactacggagcttttaccgctcagtataggcagagtcttatagagtgttggatacaggattgccaatcgttggagatacctatcgaccccagtttctcattaattaacattctgggtgacccctacgagatccgccagtggaatactgatggcctgcctcgcgatctgatctctaccgagaatggcatactcgtgacccagggacgcagatggcccctgatgatagatcctcaggaccaggccaaccgttggatccgaaacaaggaaagcaagtccggtcttaaaattattaagctgacggatagtaactttcttcgtattctagaaaactctatccgactaggcctccctgttttgctggaagagctgaaggaaaccctggaccccgcattggaacctatactcctcaagcagatatttatcagcggcggacgattgttaatcagactgggcgacagcgatatcgactatgacaaaaactttaggttctacatgacaactaagatgcctaatccccactaccttcccgaagtgtgcatcaaagttactattatcaacttcaccgtgacaaaatcagggctcgaggaccagctattgtctgacgtggtgcggctcgaaaagcctaggctggaagaacagaggatcaaattaatcgtccggattaatactgataagaatcagttgaaaacgattgaagagaagattttgcggatgttgtttacgtctgagggcaatatcctcgacaatgaagaattaatcgacaccctccaggacagcaaaattactagtggggctatcaaaacccggctcgaagaagcggagagtacagaacagatgataaacgtcgcacgtgaaaagtaccggcctgtcgccacgcagggcagtgtgatgtactttgtgatcgcatcactctccgagatcgacccgatgtaccagtacagcttgaagtatttcaagcagctgttcaataccacgatcgaaacctcggtcaaaactgaaaatctgcaacagcggctggacgtccttctcgagcagacattattgactgcctacgttaatgtctctcgcggtttattcgagcagcataagctgatctacagctttatgctttgcgtagagatgatgaggcaacagggcactctctctgacgccgagtggaactttttcctgcggggatccgcaggcctcgagaaggaacggcctcctaagccagaagccccttggctgccaaccgcaacttggttcgcttgttgcgatctggaggaaagtttccctgtgttccacgggctgactcaaaacatcctgagccatcccatctccatccgccttgggagttttgaaacgtatatcaacccacagaaatgggaggggtatagcaagatgaagcacgaggacaaacacatgcggcaggagaaggaggccgctcaccaggatccatggtccgccggtttgtcctcgttccataaactcatcttgataaagtgctgtaaagaggaaaaagtggtgtttgcactaaccgattttgtgatcgaaaatctcgggaaacaatttattgagacaccgccagttgacctgcccacactgtaccaggacatgagttgtaacactcctttagttttcatcttgtcaacgggctctgatcccatgggtgcgttccagaggttcgcgagggaatccgggtatagcgagagagtgcagagcattagcctaggtcaaggacaggggccaattgccgagaaaatggttaaagacgccatgaagtctggtaactgggtctttctgcagaactgtcacctagcagtgagctggatgctagctatggaggaactgattaagaccttcacagatcctgattcggcgatcaaggacacctttagactgttcctttcctccatgccctccaacacgtttccagtgaccgttctacagaattctgtgaaggtcaccaacgaacctcccaaggggctgcgggcaaacatccgccgagctttcaccgaaatgacacccagcttctttgaggaaaatatattggggaagaagtggcggcagattatttttgggatttgcttcttccatgcgatcatccaggagaggaagaaatttggcccattgggctggaatatctgctatgaattcaatgactctgatcgcgagtgcgccctgctaaacctcaaactgtactgtaaagaaggaaagataccttgggacgctctcatctacataactggcgagattacttacggtgggcgtgttactgacagctgggaccagaggtgcctgcgcactatactgaagcgtttcttctcccctgagacacttgaggaggattacaagtacagcgagtcgggcatttacttcgctcccatggccgacagtctgcaggaatttaaagattatattgagaatctaccactcattgatgacccggagatttttgggatgcacgagaatgcgaacttagttttccaatataaggagacgtcaactctgataaacacgattcttgaagtacaaccacggagctcaacagggggtgaagggaagagcaacgacgagattgtacaagaacttgtggcatccgtgcagactagggtgcctgagaagttagagatggagggtgccagtgagtctctattcgtgaaagacctccagggcagactgaactcattgaccacagtgctcggccaggaggtagatcggttcaataacctgctcaagttgatccacaccagcctcgaaactttgaataaggccatcgctggcttcgtagtgatgtcagaagagatggaaaaggtgtataatagcttcctgaataaccaggttcccgctctgtggtcaaacacagcctaccccagcctgaagccgctgggatcgtgggtgaaggacttaattttaaggactagctttgtggacctgtggttaaaacggggacagcccaagtcctattggataagcggctttttttttccgcagggttttctaactgggactcttcagaaccacgctcggaaatataacctcccaattgacgagctcagtttcaagtattccgtcatccccacgtacagagatcaggctgctgtaatcgaagcagcgaagaccgtgcagtttggccaggagctaccaatggatatggaacttccaagcccggaggatggagtgctcgtgcatggcatgttcatggacgcaagcaggtgggatgataaggagatggtcatcgaggacgctcttccagggcagatgaatccggtcctgcctgtggtgcactttgagccgcagcagaactataagccttcccccacactctatcattgtcccctgtacaaaaccggagccagagcgggaaccctgtctaccaccggccacagtaccaacttcgtggtgactgtcctgctgccatctaagaggtctaaggattattggatagcgaagggctccgcactgctttgccagttgagcgagtaa

SEQ ID NO: 221442 - DNA, 7592 bp, synthetic construct
  misc_feature 1..7592: note = Description of Artificial Sequence: Synthetic coding sequence
  source 1..7592: mol_type = other DNA
atgacctttagggcaaccgactccgagttcgatctgaccaacatcgaggaatacgcagagaattctgcccttagccggctcaacaacatcaaagccaagcagagagtgagctacgtgacgtctaccgagaacgagtccgacacccaaatacttacatttaggcatatcactaaggcccaggaaaagactaggaagcgacagcaacccatcaaactggagcccctgcccgtgttgaaagtgtatcaggaccataagcaaccagagtatatccatgagcagaatcgatttcagctgatgacagcgggaataatcaaaaggcctgtgagcattgccaagaaaagcttcgcgacgtcaagcacacaattcttggagcatcaggatgctgtaaaaaaaatgcaaatccatcgcccttatgtggaggtgttcagcccctccccaccaaagttgccccatacagggatcggaaaaagagggctcttcggtaccaggtcaagtgcttatcccaagtacaccttccacgatcgggaggaagtggtcaaggccaacatccgggatcctctacagatcattaagattataagagagaacgagcatcttggctttctctatatgatccccgcagtgccaaggtcttccatcgaatacgatacctataacctgaaggtggtcagctatgaaaacataaacaagaatgattattacacaatcagccagagggctgtgacccatatatataacgaagacatagagttcattgaaatcgacagatgggaacaggagtacctataccatagagaactgacaaagatccccatcttcagtttatttcgcaaatggaaggctttcagtgtctggaggaaaaacgtgaggtccaagaagatcaccggatgccagaagtccctccagaagaacctttttatcgtgaacccacaccttcggccagcacttttgaaaatcaacgaattgtgttatcacctatcgttcatgggcctttgctatatcgaaaagtgccacacctacacgctacaggaattcaaggccgctcaggtcatccggctcgctgaagttacagagcggcttggtgaattccgcaacgaggccaaatatgtggttaggagagcatgtagattcgctcttagggcagctggattcgtgccagacgattgtgcgttcggccctttcgaggactaccataaggttcagagcagcggcagctttatcaacaccccacatgaattgccaacctatggtgacagcgaaaagatgacatatactgaacaggcgtctaagcgacattactgcatgaggcttacatgtttcatccggctcaacgattatctgattgagaatactatgcacattctgaccgtgaacgcggtgaactccctgctcaatcatttgaccgacaagttaaagcggacaccctcagccgatgtgatacaaaaatggattactgaagagaaaccagaagtccccgataaaaaaggcacactcatggtcgaaaaacaggaggaggacgagtcacttattcctatgtttttaacagagctgatgttgaccgtacagagtctgttattcgaaccatccttggaggactttttggacgggatcctgggggctgtgaatcactgccaaaacacggttctgtccgtcccaaatctggttcctgatagctatttcgacgcattcacatccccatatattaataataagttggagggcaaaacgtgcgggaccggcccttccttggccgcagtttttgaagatgacaagaattttcacaccattatttcccaaataaaagaaactatacaggctgctttcgagtctgctcgaatctatgccgctacgtttgagaagtttcagatttttttcaaagagaacgagtctctcgatctgcaggccctgaagttgcaggagcctgatatcaactttttctccgaacagttagaaaagtaccacaagcaacacaaagacgctgtggccctgagacccacccgtaacgtgggtcttctcctcatagacaccagattgctccgcgaaaaactgatcccttccccactccgatgcttggaggtgctgaactttatgttgccacgacagtccaagaaaaaagtggacgccattatttttgaagctcaagacgccgaatataagttggagttcgtgcccacgacaacaaccgagtacgtgcacagcctgttgtttctggacgaaattcaggaaagaattgagtcgctggaagacgagggaaatatcgtcactcaaatgtataagctgatggaacagtaccaggtccctacacctccggaggattttgcagtctttgctacaatgaagccctctatcgtggcagtgcggaacgctattgataaaagcgtgggagaccgggagagttctatcaaacagttctgtgtacacctgggctcagatttggaggagcttaataatgaagtcaacgaggtcaaactgcaggcccaggatcctcagattctggatattagtgcggaccaggacaagatcaggctgattttaaacaatctgcagtctgtgctggccgacttacaaaaaagagcattccagtacaaaagctatcagaaaaacttcaaagtggaggtgagcaagttcgaggcgctggaagaagtgtctgctgagctgaagctgaaacaactactctgggactctttttccgagtgggacaaactgcaacaagaatggttgaaatctaagtttgactgcctagaccctgaggtcctcaatggccaggtgtcaaagtacgccaagtttgtgacacagctcgagaagggcttgccccctaactcagtggtgccacagctcaaatacaaagtcgagaaaatgaaagaaaagctgccagtgattatcgacttacgcaatcccactttgaaggcgcgacactgggcagccatcgaacaaacagttgatgcgacactggtggacgctgaaataccattgacactcgagcgactaagccagttacatgtctttgacttcggccaggaaatacaggacatttcagggcaggctagtggcgaagctgccctggaggccatcctgaagaaagttgaggatagttggaaaactactgaatttgtcatcctgcctcaccgggattccaaggacgtgtttatcctcggtggcacggacgatatccaggtgctgctggacgactcaactatcaacgtagcaacattagcctctagtagatatctcgggccactgaaaacccgagtagatgaatggcagaaacaattagctttgtttaatcaaactcttgaggagtggctgacatgccaacggaattggctgtacctggagtcgatctttaatgctcccgacattcagagacaactgccggctgaagcgaagatgtttctgcaggtcgacaagagctggaaagagatcatgaggaaagttaatcgcctgccaaacgccctgagagctgccacccagccagggcttctagagactttccagaacaataatgctctgctggatcaaattcagaaatgcttagaggcttatttagagagcaaacgcgtgattttccctagattttacttccttagcaacgacgagctccttgaaattctggcccaaactcgtaatcctcaggctgtacagcctcatctgcggaagtgcttcgattcgatatcaaaattggaatttgccttaatgcccccagccgagggcaagatccccggaatcgacggagaaccagagaaagtgtacactaatgacatcctcgctatgctgtccccagaaggcgagagagtgtctctggggaaaggcttgaaagcccgaggcaacgtggaagaatggcttggcaaagtcgaggaagctatgttcacatccctgcggaggctgtgcaaagccgcaatcgccgactatcaaggcaaactccggaccgattgggtggtcgcgggacacccaagccaagtgatcctcaccgtctcgcagatcatgtggtgcagagatttaacagagtgcctggagaccgagcacagcaatcatattcaggcccttaagaattttgagaaggtgaattttgagaggctgaacgccctggccgctattgtgcagggttccttaccgaagctgcaccgcaacatcttgacagccttaattacgattgatgtccatgctcgggatatcgtgacggagctcgtgcagagcaaggtggaaactgttgaaagcttcgactggcaacgccaactgaggtattactgggatattgacctcgacaattgtgtcgcaagaatggctctttctcagtatacgtatggatacgaatacctgggtgcttgcccacgtcttgtaattactcctctcacagataggtgctacttatgcctaatgggggcactgcaactcgatctgggaggcgctccagctggtcccgcaggaacaggaaaaacagagaccacaaaggacttagcaaaagctctggctatccagtgcgttgtgttcaactgcagcgacgggctggattataaaatgatgggcaggttctttagcgggcttgcccagtcgggcgcatggtgttgcttcgatgagttcaatcgcattgatatcgaagtgctgagcgtaatagctcaacagttaatcacgattaggaatgctaaggctgccaagctatctaggttcatgtttgagggaagggagattaaactcgtgatgacgtgtgctgccttcatcacgatgaatccagggtacgccggaaggactgagctcccagataacctgaaagctttattcagaccatttgccatgatggtgcccaactacgcactgatcgccgaagtgatcctttacagcgagggtttcgaatccagcaaaatcttggcaagaaagatgacgcagatgtacaagttgtgttctgaacaactctcccagcaggaccactatgatttcggcatgagagccgtgaaatctgtccttgtcatggccggatctctgaaaagagagaacccagatctaaacgaggatgtggttcttatcagggcactgcaggatagcaatcttcctaagttccttacggatgacgcgcttctgtttagcggcattatttcggacctgtttccgggtgtacagattccagagcatgactacgggatcctgcagtcgaccatagtggatgtgatgaaccgccagaacctacaacccgaaatgtgcatggtgagaaaagtgatacagttttacgaaacgatgctggtccgacacggcgtaatgctggtcggccctacaggcggaggaaaaacaactgtttaccggatcttagctgagactttaggaaacctacaaaagctgggaatcgagaatagtttctatcaggcagtgaaaacgtacgtgctcaaccctaaatcgattacaatgggcgagctgtatggagaggtgaacaatctcacactcgaatggaaagacgggctgatggcgcttagcgtgagagccgctgtgaacgatactagtgaagatcacaagtggatcatcagtgacggaccagtagacgccttgtggatcgagaatatgaacacagtactggacgataataaaatgctgtgcctggcgaacagtgagcggataaagctgacacctcagatacatatgctattcgaagttcaagacctgagggtggctagtcctgcaaccgtgagcagatgtggcatggtatttgtggaccccgaagagttaaaatggatgccctatgtcaagacgtggatgaaaggcatatcgaaaaaattgaccgaagaaacacaagaatacatcctaaatctgttccagcgttatgtcgacgagggtttacatttcattaacaagaagtgctcacaggccattcctcaggtggatatcagcaaagtgacaaccttgtgttgcctgctcgagtctctgatcctcggaaaagatggggttaacttagccatggaacagaccaagctgaacacaattctgtgtcagacctttgtgttctgttacttgtggagtctggggggtaacctgaccgaaaactactatgacagcttcgacactttcatccgcacacagttcgatgacaatccagacgctcgcttgcctaattctggtgacctctggtcgattcacatggatttcgatacgaagaggttggacccgtgggaacgaatcatacctacttttaaatataaccgagatgtccctttcttcgagatgttggtacctaccacagataccgtgcgatatggctatctgatggagaagctcttggccgtcaaacattcagtgctgttcactgggattacgggagttggaaagagcgtcatagccaagggactcctcaacaagattcaggagtccgccggatacgtgcccgtctatctcaacttctctgcacaaactagtagtgctcgtacacaggaaattatcgagtcgaagttagaacgaaaaaggaaaaatattctgggagcgcctggcaacaaacgcatcgtgatatttgtggacgacctgaatatgccaagactggaccgctacggctctcagccaccaatcgagctgttacgtcagtatcaagattttggagggttttatgacagaaataagctgttctggaaagaaatccaggacgtaaccatcatttcagcctgcgcgccacccggagggggtcgcaatcctgtgactccaagattcatcagacatttctctatgctctgcctcccaatgccttctgagcacagcctcaaacagattttccaggcgatactgaacgggtttcttagtgacttccccccagccgttaaacagacagcgagcagcatcgtggaggcttcagtggaaatatataacaagatgtcagttgacctgttgccaacacccgctaagtctcactacgtcttcaatctgagagacctctctaaatgcgttcaagacaaacactttggcatagccattgacctcgagtactttcttaacaagccaataatctttggtgatttcattaagtttggagccgataaagccgaccgcatttatgatgatatgcccgatattgaaaagacggccaacgttttgcaggactatctggatgactataatttaacaaatccaaaggaggtgaagctggttttcttccaggatgcaattgaacacgttagccgcattgcacgcatgatccgccaagagagaggtaatgccctcctcgtcggcgttgggggaacaggcaaacaatctcttactagactcgcagcccacatttgtggatataagtgtctgcagatcgagctgtcaagagggtataattatgactctttccatgaggatttacgaaaactgtataaaatggccggagttgaggataagaacatggtgttcctctttacagacactcaaatagtagtggaagagttcctggaggacattaacaacatcctcaactcaggggaagtaccaaacctgttcgaaaaagatgaacttgagcaagttttggccgcaacgagaccgcgtgcaaaggaagtgggtatctcagaggggaatcgggatgaggtggggtgtgcccgagttgttatgtggctctaccacaagaacgtctctagccccttcattta

SEQ ID NO: 221443 - DNA, 14088 bp, synthetic construct
  misc_feature 1..14088: note = Description of Artificial Sequence: Synthetic coding sequence
  source 1..14088: mol_type = other DNA
ggggctgaggcccctccatccactgaggaagctgcacctccacggtccgaggaggaagaggctccgcgaccgccaacagtggaggcgcctgccgaagacggcttcagtccctctgcagaggatgctgtgagcagcgttgtggactatcgggacctgatcccttccgaggagggcatcgtcttgccagatgatcatgaggctgatctgaatagagtccgccagcggcttgcgccaaggcccgtccagtctgtcatcagtgaagtgctgagtctcccaagctcacgaaggtcatccaggtatcggagaagcatgtccgggttacccaacctccaagagaccctgaaagaacgtcaggccaggtttcgcgaagcgagagagtctaggcgcctcaaaattgacccctcctacaagtacatatttgagatcttagctgaaaaccttggtctggatattgtgacagtggaagaactcatccttgactgtcccagtttggaggcgtttaccaactttttcgccaaggacgggtgcaaaaccctaaagttcctctaccaggagggggatgtaccaggcattgagtgcggccgaacgatagctggtgccactaaaggggcaaagatgatgaagttgtacatcgacaatgccgctccagataaactcaagggactgtgcatcttcttcgtgcgttgccgaaatgacgttgccattaacgtgaagaccatccaggaagaagctctttttacggtccttgacgcatctaaaggtctactcaatggcatccgtgatatgttggctaacattttcctccccgcagtgctggccactaataattggggagccttaaatcagtccaaacagggggagtcagagaagcacatattcaccgagaccatcaacaggtacctgtccttcctggacggcgcacggatttctattgaggggaccgttaaattgaagacaatcgataacgtcaacttttcaaagctgcacacattcgaagaggttactgcggctgcttctaatagcgaaactgtgcatcagttagaggaggtgcttatggtttggtacaagcagatcgagcaagtgctcatcgagtcagaacagatgaggaaagaggcaggcgattccggtcccctgacggaactcgaacactggaagcgaatgtcagccaagttcaactacatcatagaacaaatcaaagggccttcctgcaaagctgtcattaacgtgctcaacgttgcccattcgaagctccttaagaactggagggatctagatgctcggatcacagataccgcaaacgagagcaaggacaacgtgcgttacctttacactcttgaaaaagtctgtcagcctctgtataaccacgatctggtgtctatggctcatggcatccagaatctgataaacgccatccgcatgatccacggagttagcagatattataacaccagcgagagaatgaccagtctgttcataaaagtcacgaatcaaatggtcacggcttgtaaagcgtacatcaccgacgggggactaaaccatgtgtgggatcaggagacaccagtggtgcttaaaaagatccaggattgtatctttctgtttaaagaatatcaggcttctttccataagacgcgcaagcttatcagcgagagctccggagagaaatcgtttgaggtgtcagagatgtacatcttcgggaaattcgaggccttctgcaagagacttgagaagataaccgagatgatcaccgtggttcaaacgtattctaccttatcaaactccactattgaaggaatcgatatcatggccattaaatttcgtaacatatatcagggcgtgaagaaaaagcagtacgacatccttgatccacgcagaactgagttcgatacagatttcctggactttatgacgaagattaacggcttggaagtacagattcaggcatttatgaattcctcattcggaaagatactgagctcccagcaggcccttcagttactgcagaggttccagaaattgaacatcccgtgtctgggactcgaaatcaaccacactatcgagcggatcctgcagtattacgttgctgagttggacgccacgaaaaagctgtaccactcccagaaagacgatcccccactggcacgaaacatgccacctattgccggaaagattctgtgggtgcgccagctttaccggaggatatccgagccaatcaattatttcttcaaaaactctgacattcttagtagtcctgatggcaaggccgttatccgccagtataacaagatcagctacgtgctggtcgagtttgaggttgtctatcatactgcctggatcagagagattagccagctgcactacgcactccaggcaaccctatttgtacgccaccccgagacaggcaaattactggtgaatttcgaccctaagattctggaagtcgtacgcgagacgaaatgtatgataaagatgaaactggatgtcccagaacaggccaagaggctgctcaaactagaaagcaagctgaaagccgataagctctacctgcaagggttgttacagtattatgatgaattgtgccaggaggtcccgtctgtgtttgtgaatttaatgactccaaagatgaaaaaggtcgaatctgtgttaagacaggggttgactgtactgacctggtcatctctaacactcgagtctttcttccaggaggtcgagctggtgttagacatgtttaatcagctgttgaagaaaattagtgacctgtgtgaaatgcatatagatacggtgcttaaagagattgccaagaccgtcttgataagcctgcccgaatctggcgcaacaaaagtcgaagacatgctgaccctgaatgaaacttacacaaaagaatgggctgacatactcaaccacaagtccaaacatgtggaagaagctgtcagggagctaattagtatttttgaacagatctatgaggtgaaatacaccggcaaagttgggaaacagtctgagcagaggaagcacgtagtctttggcagcgagactggcgaaggagagaacaacgattatgaggcaaacatagttaacgagtttgatacccatgacaaggaggacgaatttaaaaaggagtgtaaagaggtgtttgcttttttcagccaccagctcctcgactctcttcagaaggcgactcgcctctctctggataccatgaaacgaagaattttcgtcgcttccctttacggcagaaagcagagcgaggatatcatctcctttatcaagagcgaagttcatttagctatccccaatgtggtgatgataccctcactggacgacatccagcaggcgatcaaccgaatgatccagctcacattggaagtatctagaggggtcgctcactggggccagcagcagattcgacccataaaatcagtgatcccatcccccactactactgacgtcacacatcagaacacaggaaaacttctcaagaaggaagagaggagcttcgaggaagctatacccgcacgaaagttgaagaatttctaccccggtgtggccgagcacaaggacatcagtaagttggtgctcctcctgagcagttctgtcaactcactgagaaaagcagctcacgaggcactgcaagactttcagaagtacaaaactctgtggaccgaggatagggatgtgaaagttaaggaattcctggcaaacaacccatctcttactgagatccgcagtgagatccttcactacgcaacttttgagcaagaaatcgacgagttgaagcccataatcgtcgtcggggcacttgagttacatacagagccgatgaagctggccctctctattgaagctaaggcttggaaaatgctgctgtgtagatatctgaacgaggaatacaaaaaaaagatgagctacatgatagcattcataaacgagtacctgaaaaagctaagcaggcctatcagggaccttgacgatgttcggtttgccatggaggcactgtcctgcattagagacaatgagatccagatggacatgaccctggggccaatcgaagaggcgtacgccatcctgaaccgcttcgaagttgaggtgaccaaagaagaaagtgaggccgtggataccttgcggtattccttcaataaactccagagtaaggccgtgtccgtacaggaggacttggtgcaggtgcaacccaagttcaaaagcaatctgctcgagtcagtggaagttttcagggaggacgtgatcaatttcgctgaagcatacgagctagagggccctatggttcctaacattcctccacaggaggcctctaacaggttgcagatcttccaggcatcctttgatgacctgtggcggaagttcgtgacatattcatccggcgaacaactgtttggacttcctgtgacggattatgaggtgctgcacaagacaaggaaagaacttaacttgctccagaaattgtacggcttatatgataccgtgatgagctctatcagtggatactacgagatattatggggcgacgtggacatcgagaagatcaatgccgagcttctcgagtttcagaaccggtgcagaaagttaccaaaaggcctaaaggattggcaggctttccttgacctgaaaaaacggatcgatgatttcagcgagtcctgcccactactagagatgatgacgaataaggcaatgaaacagagacattgggacagaatctcagagctgaccggaaccccattcgacgtggaaagcgacagcttctgccttagaaatatcatggaggcccctttgctgaaacacaaggacgatattgaggatatatgcatctccgccatcaaggagaaagacatcgaagcaaaacttacccaagttattgagaattggacaaatcagaatctgtctttcgcagctttcaagggaaaaggagagctactgcttaagggcaccgaatcaggcgaaattatcaccctgatggaggatagcttgatggtcttgggcagtttgctgtccaaccggtacaacgccccttttaaaaagaatattcagaactgggtgtataagctgtccaccagcagtgatatcatcgaggaatggctggtggtccaaaacctgtgggtctatctggaggccgttttcgtcgggggtgacatcgctaagcagcttccccaggaggccaaacgattccaaaatatcgataaaagctggattaagatcatgcagagggcgcacgagaatcctaacgtcatcaattgttgcgtcggggatgaaacgatggggcagctgctaccacacctgcacgagcagctggaagtgtgtcagaaatcccttacgggatatctcgagaagaagaggcttctgttccccaggttcttcttcgtatccgatccggtgttgctcgagatcctaggccaagcctccgatagtcacacgatccagccacatctccccgctgtgagtgacaacattaatgaagtaaccttccacgccaaagattatgacagaataatggcagtcatatctagggagggcgagaaaatcgtactcgataacagcgtgatggcaaaaggcccagtggaaatttggctgctcgacctgcttaaaatgcagatgagttccctacataatatcatccggtccgccttttaccagatctctgattccgggttccagctactacccttcctatctcacttcccggcacaggtgggactgttaggtattcagatgctgtggactcacgattcagaggaagccctcagaaatgctaaagacgataggaagattatgcaggtgaccaaccaaaaatttctcgatatcctgaataccttgatcagtcaaacaacccatgatctctctaaattcgaccgtgtcaaattcgaaacactgatcaccattcatgtccatcagcgggacatttttgacgatctagtgaagatgcacattaagagccccactgactttgagtggctgaaacaaagccgtttttattttaaagaggacctggatcagaccgtggtatctattactgatgttgacttcatttatcagaacgagtttcttgggtgcaccgatcggctggtgatcacaccactgactgatagatgttatatcacgctggcccaggcgctcggaatgaacatgggaggcgctcccgcaggcccagccggtactggaaagacagaaactacaaaggatatgggtcgttgtctgggcaagtacgtcgtggtgttcaattgcagcgatcagatggattttagggggttggggcgaattttcaagggtctggctcagtcaggctcttggggctgtttcgacgagtttaaccggatcgagttgcccgtgctcagcgtcgccgcacagcaaatttatatcgttctgaccgctaggaaagagaggaaaaaacaattcatcttctccgacggggactgcgtcgatctcaatcctgagttcgggatctttctgacaatgaacccagggtacgccggtcggcaagagctgccagagaacctcaagatccagtttagaacagtggctatgatggtgcccgaccgtcaaatcattatgagggtgaagctagcctcctgcgggtttttagagaacgtgatcttagcgcagaaattttacgtgctctataagctgtgcgaggaacagttgacaaagcaggtgcattacgacttcggactgcggaatattctgtctgtgcttcggaccctcggtagtcagaagagagccagaccagaagacagcgaattgtcgattgtgatgcggggtctccgggacatgaacctttcaaaattggtcgatgaagatgagcccctgtttttgagcctgatcaatgatctgttcccgggactccaactggattcgaacacatacgctgaacttcaaaacgctgtggctcatcaggttcagatcgagggtcttattaatcacccaccatggaacttaaagctggtacagctgtatgagactagtcttgtgcggcacggccttatgactttgggtccgtcaggatccggcaagaccactgtgatcaccattctgatgaaagctcagactgaatgcggcagaccccacagagagatgcggatgaacccaaaagccatcactgctccccagatgtttggcagacttgatactgctaccaacgactggaccgacggaatattcagtaccctctggaggaaaaccctgaaagctaagaagggcgagaacatttttttaatacttgacggtccagtagacgccatatggattgaaaacttgaatagtgtgctcgatgacaataagactctgaccctagccaacggcgacagaatccctatggctccttcttgtaagctgcttttcgaggtccacaacatcgagaatgcatcaccagctacggttagcagaatgggtatggtctatatctcatctagtgctttgtcttggaggccaattctgcaggcatggctcaaaaagaggactgcgcaggaggccgctgtcttcctcactctctatgaaaaagtgttcgaggacacttacacttacatgaaacttaacttgaacccaaagatgcagctgctcgaatgcaattacatcgtgcagagtttaaacctccttgagggcttaattccttcaaaagaggaaggcggagtgagctgtgtagagcatctccacaagttatttgtcttcgggctcatgtggagcctgggggctctcctcgaactcgagtctagagagaaactggaagcgtttctgagacagcatgaatctaaactggatctccccgaaatcccaaaggggtccaaccagaccatgtacgaattttatgtcactgattacggagattgggaacactggaacaagaaactacaaccctattattatcccactgacagtatcccagagtacagtagtatcttagtgccaaatgtggataatattcggacaaattttcttatcgatacgatcgcaaaacagcataaagcagtgctgttgaccggagagcaggggaccgcaaagacagtcatggtgaaagcctatctaaagaagtatgaccctgaagttcaactgtcaaagtcactgaatttttccagcgccacagagcctatgatgttccaacggacgatcgagagctatgttgataagaggatcggatccacttatggaccacccggtggcaggaagatgaccgtgtttatcgacgacattaatatgccagtgataaacgaatggggtgatcagatcaccaatgagattgtacgccagatgatggaaatggagggcatgtacagcctggataaaccgggagactttactaccatcgtggacgtgcagctcatcgctgctatgatccatcccggaggcggacggaatgacatcccacagcgactgaagagacagttcactgtatttaactgtaccctcccttctaacgcctcaatcgataaaatttttggtatcatcggatgcggctacttcgacccctgtcgaagctttaagccccagatatgtgaaatgattgttaacctggtttctgtggggcgtgtcctgtggcaatggaccaaggtaaagatgctgccaacaccaagtaagtttcactatatattcaatctcagggatctgtctagaatttggcagggtatgctcaccatcaaggccgaagaatgcgcttctatccccaccctcctcagtctcttcaagcacgaatgttctcgggttatagccgaccggttcataacacctgaagacgagcagtggtttaacgctcatctgaccagagctgtggaggagaatatcgggtccgacgcagcgagctgcatcctgcccgagccttatttcgtagacttcctgcgagaaatgccagaacccaccggggatgagcccgaggattctgtcttcgaggttccaaagatctacgagctcatgccctccttcgacttcctggcagagaagctccaattttaccaaagacagttcaacgaaatcatacgaggaacctccctggatctggtgttctttaaagatgccatgacacatttgatcaagattagtcgtatcatacgtacttcttgcggtaatgcactcctggtgggtgtgggcggatcgggcaaacagtctctgtccagattggcttcttttatcgcagggtaccagatcttccagatcaccctgactaggtcctacaacgtgacaaacctgacagacgacctcaaagcactgtataaagtggccggagccgatggtaagggcattactttcattttcactgacagcgagatcaaggatgaggcgtttttggagtatctgaataaccttctgagctctggtgaaatttctaacctgtttgcgcgagacgaaatggatgaaataactcaaggactgatctccgtgatgaagagggagctgccgcgacatccgcctacatttgacaacctttatgaatacttcatcagcagatccagaaaaaatttgcacgtcgtgctttgtttttcccctgttggcgaaaaatttcgcgctagatccctgaaatttcccggactcatctcaggatgtaccatggactggttttcccggtggccacgcgaagcattaattgctgtcgcgtcttatttcctgtctgattataacatcgtctgctcttccgaaattaagcgccaagtggtagagacaatgggactcttccacgacatggtgtccgagtcttgcgagagttacttccagaggtataggcgccgagctcacgtgacacccaagtcttatttgtcatttatcaatgggtacaaaaacatctatgcagagaaggtgaaatttatcaatgagcaggccgagcgtatgaatattggccttgacaaactgatggaggcctcagaatccgtggccaagctgtcccaggacctggcagtgaaggagaaggagctcgccgtcgcctccatcaaagctgatgaggtcctggccgaggttaccgtgagcgctcaggcgtcagcgaaaattaaaaatgaggtgcaggaggttaaggataaggcacaaaaaatcgtcgacgagatcgactctgagaaggtgaaagcggagagcaaactggaggccgcaaagccggctctcgaggaggcagaggcagccctaaacacaataaaacccaacgatatcgctactgtgaggaagctcgccaagcccccacacctgataatgcggatcatggattgcgtcctgctgctgttccagaaaaagatcgacccggtgaccatggaccctgaaaagagctgttgtaagccctcctggggtgaatcccttaagctcatgagtgccactggcttcctgtggtcgttgcagcagtttccaaaggatactattaatgaggagactgtcgaactccttcagccatactttaatatggatgactatacgttcgagtctgcaaaaaaggtgtgcggtaatgtagccggacttctctcctggacattggctatggccatcttctacggaattaatcgcgaagtgctcccattgaaagcgaacctggcaaaacaagagggcaggctcgctgtggccaatgccgagctaggcaaggcgcaagcattactggatgagaaacaggctgagcttgataaggtacaagccaagtttgatgcagctatgaacgagaagatggatttattgaacgacgctgacacatgtcggaaaaagatgcaggccgcttctaccctaatcgatggcctgagcggggaaaagatccgctggacacagcagagcaaggagtttaaggcccagatcaataggcttgttggcgacatccttctgtgtaccggcttcctcagctatctgggaccatttaaccaaatcttcaggaactatctattgaaggaccagtgggaaatggaattgcgcgcaagaaagattcccttcactgagaacctgaatcttatctctatgctggtcgatccccctaccatcggagaatggggcctccagggtctgcccggagatgacctgagcattcagaacgggattatagtcacaaaggctacaagataccccttgctgatagatccgcaaactcagggcaagacgtggataaagtcaaaggagaaggagaacgaccttcaggtcacttccttgaatcataaatactttcggacacaccttgaagactcgttgagcctcgggcgacctctgctgatcgaggacatccacgaggagcttgatcctgcactggacaacgtactggaaaagaattttataaagtcaggaactacattcaaggtcaaggttggcgacaaagagtgcgacattatggacacttttaaactgtacatcacaactaaactcccaaacccggctttcaccccggagataaatgccaaaacaagcgtgattgactttacagttaccatgaagggtttggagaaccaactcctcaggcgcgtgatcttgaccgagaagcaggagctggaggccgagcgcgtgaaactgcttgaggacgtaaccttcaataagcggaaaatgaaagagcttgaggacaacctcctgtataaacttagcgccacaaagggctcgttggtggacgatgaatcactgataggcgtgctgcgaacaactaaacagaccgccgctgaggtgagcgagaaactacatgtggcagccgaaacagaaatcaagattaacgctgcgcaggaggagtttcgcccagccgcaacacggggatcaatcctgtacttcctgatcaccgagatgtctatggtcaatattatgtaccaaacttctctcgctcaattcctaaagttatttgatcagagtatggcccgttcagagaagtcccccctccctcagaaaaggatcacgaacatcattgaatatctgacctatgaggtattcacctacagcgtgagggggctgtacgaaaatcacaaatttctcttcgtactcctcatgacactgaagatcgacttacaacggggtactgtcaagcacagggaattccaggcacttatcaagggaggcgctgccctggacctgaaagcttgtcccccaaagccctacaggtggatccttgatatgacgtggcttaatctggtagagctgtcaaagttgccccaattcgctgaaattatgaaccagatctctcgtaacgagaagggttggaaatcctggtttgataaggacgcccctgaagaggagatcatcccggatggctacaacgactccttagatacctgccataaactactgctgatacgatcatggtgcccagatcgtaccgtcttccaggcacgaaagtatattgccgatagtctggaggagaaatacacagagcccgtcatcctgaacctagaaaagacttgggaggagagcgatacacggaccccactgatatgctttctctctatgggaagcgacccaacaaatcagatcgacgcacttgctaaaaagctgaagctcgaatgtcgaacgatcagcatgggacagggacaggaggtccacgccaggaagttaatccagatgtcaatgcagcagggtggctgggtgctgctgcagaactgccatctgggtttggagtttatggaggaattattggagaccttgatcacaaccgaggcatccgatgacagcttccgcgtctggataacaactgaaccacacgacaggttcccgatcactttgctccagacatctctgaaatttacaaatgaacctcctcagggtgtgcgggctgggctaaagagaacctttgctggaataaatcaagatcttctggacatttctaatctccccatgtggaagccgatgctttataccgtagcctttcttcacagtacagtgcaggaacgacgcaagttcggcccactgggctggaacattccctacgagttcaattccgctgactttagtgcatctgttcagtttattcagaatcacctggacgagtgcgacatcaagaagggcgtaagctggaatacagtgagatatatgattggagaagtccaatatggcggacgtgtgaccgatgattttgacaagcggctgctcaactgctttgccagagtgtggtttagcgagaaaatgttcgaaccaagcttctgcttttatactggttataagattccgctgtgcaaaacattagatcagtacttcgagtacatccagagcctaccttccctcgacaaccccgaagtatttggactgcacccaaacgcagatataacttaccagagcaacacggcctcagctgtgctcgaaacgatcacaaacatacagccaaaggagtctgggggaggcgtgggcgagacacgtgaagcgatagtgtacaggctgagcgaagatatgctaagcaaattgcctcccgactacatcccacatgaagttaaaagccgtctgattaagatgggccatctgaatagtatgaatatctttctcaggcaggaaatcgatcggatgcaacgagtaatctccatcctgcgttcgagcctgtctgatttgaaactggccatcgaggggacaattatcatgagcgaaaacctcagagatgcactggataacatgtacgatgcccgaatcccccagctgtggaagcgcgtgagctgggatagttctaccctcgggttctggtttacggagctgctggagaggaatgcccagttctctacttggatcttcgaaggcaggcctaatgtgttttggatgacaggcttcttcaaccctcaagggttcctgaccgccatgagacaggaggtgacgagagcacacaaaggttgggcactcgatactgtgaccatccacaacgaggtcctgagacagacaaaagaggagatcacatccccacctggcgagggtgtgtacatctacggtctctacatggatggagctgcatgggaccggcgaaacggcaaactgatggaatcaacccccaaagtcttattcacccaactgcctgtgcttcatatcttcgctattaattctacggctccaaaagatcccaagctgtacgtttgtccaatttacaagaagcccagaagaactgacctgacgttcattactgtggtgtaccttcgtacagtgctcagcccagaccactggattttacgcggtgttgccctactgtgtgacataaagtag

SEQ ID NO: 221444 - DNA, 13473 bp, synthetic construct
  misc_feature 1..13473: note = Description of Artificial Sequence: Synthetic coding sequence
  source 1..13473: mol_type = other DNA
atgatgaagttgtacattgacaacgctgccccagataaactcaagggtctttgtatcttcttcgtgcgttgccggaatgacgtggccataaatgtgaagacaattcaagaggaagcgctttttacggttctagacgccagtaaaggccttctgaatggaatccgggatatgttagcaaacatttttctgcctgcagtcctggcaacaaataattggggcgctttgaaccaatccaaacagggcgagagcgagaagcatatctttacggagactatcaatcgatacctgtcattcctggatggggcacgaatcagcatcgagggaaccgtgaaactgaagaccatcgataatgtaaatttttcaaagctgcacaccttcgaggaagtcactgccgcagcttccaatagtgaaacagtccatcaacttgaagaggtattaatggtgtggtataaacaaatagagcaggttcttatcgaatccgagcaaatgagaaaggaagcaggcgactctgggccactcaccgaattggagcactggaagagaatgagcgccaagttcaactatataatcgaacagattaaaggcccatcatgcaaagctgttataaatgtcttgaacgtggcccattctaaactactgaagaattggcgcgacctcgatgctcggatcaccgacaccgccaacgagtcgaaagacaatgttaggtacctgtatactctggagaaggtctgtcagccactgtacaaccacgatctggttagtatggcccatggtattcagaacctgattaatgcaattcgcatgattcacggcgttagcagatactacaatacttccgagcgcatgaccagcctttttattaaagtgactaaccagatggtcaccgcctgcaaggcatacatcactgatgggggtctaaatcacgtgtgggaccaagaaacacctgtggtgctgaaaaaaattcaggattgtatttttctctttaaagaataccaggcaagtttccataagacccggaagctgattagcgagtctagtggggaaaagtcgttcgaagtgtccgaaatgtatatcttcgggaagttcgaggccttttgtaaaagactggagaagataactgagatgatcacagtcgtgcaaacctacagtaccctatctaattctaccattgagggcattgacataatggcaatcaaatttcgcaacatctaccagggagtgaagaaaaaacagtacgatattctcgatcccaggcgcactgagttcgatacagactttctcgatttcatgacaaagatcaatggcttggaggttcagattcaggcatttatgaacagttctttcgggaaaattctcagctctcagcaggcgctccagttgcttcagcgattccagaagcttaacataccctgcctcggattagagataaaccacacaatcgagcgtattctgcaatattatgtagcggagctagatgccacaaaaaagctataccactctcagaaagatgatccacctctcgcacgcaatatgccccctatagccggtaagatcctttgggtgcgacaactgtaccggaggatttctgagcctatcaattactttttcaaaaatagcgatattcttagctcgcccgacggtaaggctgtgatcaggcagtacaataagatcagttatgtattggtagaatttgaggtggtctaccacacagcctggatccgtgaaatctctcagctacactacgccttacaagcaacgctgtttgttcgacaccctgaaaccgggaaactgctcgtaaattttgacccaaagatcctagaggtagtgcgagagaccaagtgcatgatcaaaatgaagctggacgtcccagaacaggcgaagaggctcttaaaattggagagcaagttgaaagccgataagctgtacctccagggtttactccagtactacgacgaactctgccaggaggtcccgtctgtgttcgtgaatttgatgacgcctaaaatgaaaaaagtggagtcagtgctgcgtcaggggctgacggtactgacttggtcttctctgaccctggagtcctttttccaggaggttgaattggtcttggacatgttcaaccagttgctgaaaaagatttccgacctctgcgagatgcacatcgacactgtgttgaaagaaattgccaagaccgtcctgatttcactccctgaatccggagcaactaaggtcgaagatatgttaacactgaacgagacctacaccaaagagtgggccgatatcctcaatcacaaatctaagcacgtggaagaggctgttagggaattgatttccatttttgagcaaatttacgaggtgaaatatacagggaaagtcggcaaacagagcgagcaaaggaagcatgtggtcttcggctcagagacaggagagggggaaaacaacgactacgaagccaacatcgtgaatgaattcgatacacacgacaaggaagatgagtttaagaaggagtgtaaggaggtgtttgccttcttttcccatcaacttttggactctcttcagaaggccacgcggcttagtttggataccatgaaaaggagaatcttcgttgcctcgctatacgggcgtaaacagtctgaggacatcatatccttcattaaaagtgaggttcacctggccatcccaaacgtagtcatgataccctctctggatgacatacaacaggctattaaccggatgattcagctgacactggaagtgagcaggggcgtggcacattggggccagcaacagattcgccctattaaaagcgtgatcccatccccaactaccaccgatgtcacccaccagaatacaggcaagctgttaaagaaggaggagcggtcattcgaagaggcaattcctgctagaaagcttaaaaatttctatccaggagtagctgagcacaaggatatctctaagctggtgctgctgctgtcttcttcagtcaatagcttgcgcaaagccgctcatgaagccctgcaagacttccaaaagtacaaaactctttggacagaggacagagatgtcaaagtgaaggaattcttggcgaataatccctccctcactgaaatccggagcgagatccttcactacgccactttcgagcaggaaatagatgagctcaagcctatcatagttgtgggtgccctggagctacataccgaaccaatgaaattagcattgtcaatcgaggctaaagcttggaaaatgttactgtgcaggtacctcaacgaggaatacaagaaaaagatgtcctacatgatcgccttcatcaacgaatatttaaagaagctcagtaggcctattcgggatctggatgacgtgagatttgcaatggaagccttatcatgcatacgagacaacgagattcaaatggacatgactttgggccctattgaggaggcctacgccatcttgaatcggttcgaggtggaggttacaaaggaggaaagcgaggctgttgacaccctgcgctactcatttaataagctgcaatctaaggccgtgtccgttcaggaagacttggtgcaggtccaaccaaagttcaaatctaacctgctggagtctgtagaggtctttagggaagacgtcatcaactttgccgaggcttacgagctggaaggtcccatggtgcctaacatcccccctcaagaggctagcaatcggcttcaaatcttccaggcatccttcgacgatctttggaggaagtttgtgacctattccagcggcgaacagttgttcggcttacctgtgactgactatgaggtcctgcataaaacccggaaagaacttaatctgttgcagaagctttacggcctttacgataccgtaatgtcctccatcagtgggtattacgaaattctgtggggcgacgtggacatagagaaaatcaatgctgagttgctagagtttcagaatagatgccgtaagctgcccaagggccttaaggactggcaggcgtttttagacttgaagaagagaatcgacgatttctccgaatcctgcccacttctggagatgatgacgaacaaagcgatgaagcagcgccactgggatcgcatatctgagctcaccggtactccattcgacgtcgaatcggacagcttctgcctccgaaacattatggaagctcccttactcaagcataaggatgatatcgaggacatctgcattagcgctataaaagagaaggacatcgaagccaaactaacacaggtgatcgaaaactggaccaaccaaaatctcagtttcgccgcttttaagggtaaaggggagttgttactcaaaggcactgagtcaggagaaatcatcactctgatggaggattcactcatggtcttggggtccttgctctctaacagatacaacgcgccttttaagaagaacatccagaactgggtgtataaactgagtacttcttctgatatcatcgaagagtggctcgttgtgcagaatctatgggtatatttagaggccgtgttcgtggggggagatatcgctaaacagttaccccaagaagctaagaggttccagaacattgataaaagctggattaaaataatgcagcgggcacatgaaaatccaaatgtcatcaattgctgcgtgggggacgaaactatgggccaactcctaccccacctgcacgagcagttagaagtgtgccaaaagagtctgactggttacttggaaaaaaagagacttctctttccacggtttttcttcgttagcgatccagtcctcctcgaaattctaggccaggcttctgactctcacacaatccagccgcacctcccggcagtaagcgataacattaatgaggtgaccttccatgcaaaagactatgatcgtatcatggctgttatttccagggaaggcgagaagattgtcctggacaattcagttatggccaaagggcctgtcgagatctggctattagatctcctgaagatgcagatgtcgtcccttcataatatcattaggtctgcattttaccagatctccgattctggctttcagctgctccccttcttaagccacttcccagcacaggtcggattgcttggaatccagatgctgtggacacatgattccgaggaagccctgcgcaatgctaaagatgatcggaaaattatgcaagtgaccaaccagaaatttctggatatattgaacaccctgatttcacaaacaacacatgatttaagtaaatttgatcgggttaaatttgaaacccttatcacaattcacgtgcatcaacgggatatcttcgatgacctcgtcaagatgcatatcaagagccctactgatttcgagtggctcaaacagagtcgcttttacttcaaggaagatctggatcagaccgtcgtgtctattaccgatgtcgacttcatatatcagaatgagtttctgggctgtacagacaggctggtcattactccccttactgacaggtgttacattaccctggcgcaggcgcttggaatgaacatgggaggtgcaccagccggacccgcaggcacaggaaaaactgagaccaccaaagatatgggcagatgcctgggcaagtacgtagtggtattcaattgttctgaccagatggattttaggggactgggccgaatctttaaaggtctcgctcagtctggttcctggggatgttttgatgagtttaatagaatagagcttcccgttctgtcagtcgcagcacagcagatttacatcgtgttgaccgccaggaaggagagaaaaaagcagttcatcttttcagacggtgattgtgtggacttgaacccggagttcggaatattcctcactatgaaccctgggtatgctggtcgacaggaactgccagagaatctgaagatccagtttcggactgtggcaatgatggtacccgacaggcagattatcatgcgagtgaaactggctagttgtggctttctcgagaatgttatcctcgcacagaagttctatgtgctgtataagctgtgcgaggagcagttaaccaagcaggtccattacgactttggtttgcggaacatactgagcgttctgcgcaccctggggtcacagaagcgcgcacggcctgaagattccgaactgtctatcgtaatgcggggactgcgcgacatgaatctctccaaactggtcgacgaagacgagccactttttctgtctctcatcaacgacctgttccctgggcttcaactagattcaaacacctatgccgagctgcagaacgccgttgcacaccaggtgcagatagaggggctcattaatcatccaccatggaacctcaagcttgttcaactctacgaaacctctctggttcgtcacggactcatgaccctaggtcccagtggctctggcaaaaccaccgttattaccatactcatgaaggcacaaaccgagtgcggaagaccccaccgcgagatgagaatgaacccgaaagccatcaccgcaccccagatgttcggacgcttagacacagcaactaatgactggacagatggaatctttagcaccctttggcgaaaaacccttaaggccaaaaaaggggagaacatcttccttatcttagacggacccgtcgatgccatctggatagaaaatctgaatagcgtgctggacgacaacaaaactttgaccttggcgaacggggatagaatcccaatggccccaagttgtaagttgctattcgaggttcacaacattgagaatgccagtcccgcaacagtgtcccggatgggcatggtgtatataagcagttccgccctaagctggcgccctatactgcaggcctggttgaaaaagcggacagctcaggaggccgctgtgtttctgaccctgtacgagaaagtgtttgaagatacatatacctacatgaagctgaatcttaatcctaagatgcaacttttggagtgcaattatattgtgcagagtctgaatcttcttgagggactgatcccctccaaagaagaaggtggcgtgagctgcgtggagcatttgcacaaactgtttgttttcgggctcatgtggtccctaggggctctgctcgagctagagtcgagagagaaattggaggcctttctgcgccagcatgaatccaaacttgacctgcctgaaatcccaaaaggatctaaccaaaccatgtatgaattttatgtgaccgactacggcgattgggagcattggaataaaaaattacagccttattactatcctacagactccatcccagaatattcgagtatcctggtgcctaacgttgataacatcagaactaactttctcatcgatacgatagccaagcagcacaaggccgtcctgctcaccggggaacagggcaccgccaaaactgtcatggtgaaggcttatttgaagaagtacgatcctgaggtgcagctcagcaagagcctgaacttttcttctgcgacagagccaatgatgttccaacgtaccattgagtcctacgtcgacaagaggataggctctacttacggaccaccaggcggacgaaaaatgacagtatttatagatgatattaacatgccagtgatcaacgaatggggggaccagattacaaacgagatcgttagacagatgatggaaatggaaggaatgtattcactggataaacctggcgactttaccacaattgtcgacgtgcagctgatagccgcaatgatccatccgggtggaggtagaaatgatattccgcaacgcctgaaaagacagttcacggtctttaactgcaccctgccaagcaatgcaagcattgacaagatcttcgggatcatcgggtgtggatatttcgacccatgccgtagctttaagccccaaatctgtgagatgatcgttaacctcgtaagtgtcggtcgtgtgctgtggcagtggaccaaggtcaagatgctgccgacccccagcaagttccattacatcttcaacctgagagatctgagccgcatctggcagggcatgcttacgattaaagctgaggagtgtgctagtatccctaccttactgtcgcttttcaagcatgaatgctcccgcgtcattgcggaccgattcattaccccagaggacgaacagtggtttaatgcacaccttacccgggctgttgaagaaaacatcgggagcgacgcagcatcctgtatcctgccggaaccgtacttcgttgatttcttgagggagatgcccgagcctaccggtgacgagccagaggactcagttttcgaggtgccaaaaatatacgagttgatgccctcatttgatttccttgccgagaagctgcaattctatcagagacagttcaacgaaattattagaggcacaagtctggatttagtcttcttcaaggacgcaatgactcatctaataaagatatctcggatcatccgaacctcatgtggcaatgccctccttgtgggcgtgggcggatccggtaagcaatctctcagtagattggcctctttcattgccggttaccagatctttcagattacactgaccagatcctacaacgtcacgaaccttacagatgatctaaaggccctctacaaggtcgcaggcgctgatggcaagggcatcacattcatcttcactgattctgagatcaaggacgaggcctttctcgagtatctcaataatctcttgtcatccggcgagattagcaaccttttcgctcgagacgaaatggacgaaattactcaaggactgatctcagtgatgaagcgggaattaccacggcacccccctaccttcgataatctctatgaatattttatcagtcgcagtagaaaaaacttgcacgtggtgctctgcttcagtcccgtcggagagaagttcagagctagatccctcaaatttcctggcttgatttccggatgtaccatggattggttttcaagatggcctcgggaggccctgatcgctgtggctagctattttctttcagattataatatcgtctgttcttcggagatcaaaaggcaagtggtggaaacaatgggcctgtttcacgacatggtgtctgagtcgtgcgagtcatactttcaacgctacaggaggcgtgcgcacgtaacccctaaaagttacctgagtttcattaacggatataagaacatttacgccgagaaagtgaaattcattaatgagcaggcagagcgcatgaacataggtctggataaactgatggaggcttcagaatctgtcgcgaagctatcccaggatctggcggtcaaagagaaagagctggccgtcgctagcattaaggcggatgaagtcctagctgaagttacggtgagtgctcaggccagcgccaaaataaaaaacgaagtccaagaagtcaaagacaaggctcagaaaattgtagacgagattgatagtgagaaggtcaaggcagagtctaagctagaagccgctaaaccggctctcgaggaggccgaggccgcactcaacacaatcaagcccaatgacatagcgaccgtgagaaagctcgccaaacccccacacctgatcatgagaataatggactgtgtgctccttctgttccagaagaagatcgaccccgttacaatggatcccgaaaaatcgtgttgtaagcccagttggggcgagagtttgaagctgatgtccgccacgggctttctgtggtccttgcagcagttcccaaaggatacgatcaacgaggagactgtggagctgcttcagccgtatttcaacatggacgactatacctttgagtcagccaagaaagtatgcggtaacgtggctggtctcctgtcctggacgttagcgatggcaattttttacgggattaaccgggaggtgctgcccctcaaagcaaacctcgccaaacaagagggcaggctcgcggttgctaatgcggaacttggcaaggcacaggctctgcttgacgaaaagcaagcagaacttgataaggtccaggctaaatttgacgccgctatgaacgaaaaaatggatctgcttaatgatgcagacacttgcaggaagaaaatgcaggctgccagcactctgatcgatggtctgagcggcgagaagatccggtggacacagcagagcaaagagtttaaggcccagattaatcggctagtgggggatatccttctttgtactgggttcctgagctacctcggtcctttcaatcagatctttcggaattacctgctcaaggatcaatgggagatggaactccgggcaagaaaaattccattcaccgaaaatctgaaccttattagcatgctcgttgatccacctactatcggcgagtggggactccaaggattgcccggtgatgacctgtccattcagaatggaattatcgttactaaggcaacacgatatcccctcctgatcgaccctcagacacaggggaaaacttggattaaatcaaaagaaaaggaaaatgatctgcaggttaccagtctcaaccacaagtacttcagaactcacctggaagactccctcagtctcgggaggcccttgcttatcgaggatattcacgaagagttagaccccgctctcgacaatgtccttgagaagaactttataaaatcgggcaccacatttaaagtgaaagtaggcgacaaggagtgcgacataatggacacattcaagctgtatataaccacaaagctgcccaaccccgcattcacccctgagatcaacgccaagacgtccgtgatcgactttaccgtaactatgaaggggctggagaatcaactgcttcgcagagtcatcctgactgagaagcaagagttggaggccgaacgagtgaaactactggaggacgtgacattcaacaagaggaagatgaaggagctggaggacaacctcctctacaagctgtcagctactaaaggcagtcttgtcgacgacgaatcactgataggcgttttacggactactaagcagactgccgcagaggtgtctgagaagcttcatgtggccgctgaaacagagattaagataaatgccgcacaagaggagttccgtcccgcagcgactagggggagcattctttactttctgatcacggaaatgagcatggttaatatcatgtaccagacaagtcttgctcagtttctcaaactattcgaccagtcaatggccagatcagagaagtctccattgccccagaagagaattaccaacatcatcgagtacctaacctacgaggtttttacttatagtgtcaggggtctctatgagaaccacaaatttctgttcgtgctgctgatgactctcaaaatagatctccagcgcggtacggtcaaacatagggagttccaggccctgatcaagggcggagccgcactggacttaaaagcgtgccctcctaagccttatcgatggattttagatatgacctggctgaatctggtggaactgtctaagttgccccagttcgcagagatcatgaaccagatcagtcggaatgagaaggggtggaagtcttggtttgacaaagatgctccagaggaagagattatacccgatgggtacaatgactccctggatacttgccacaagttacttctgatccgatcttggtgccctgacaggacagtgttccaggccagaaagtacattgccgattcattggaggagaaatacaccgagcctgtaatcctgaatttagagaaaacctgggaggaatctgatactcgtactccccttatctgttttctcagcatggggtccgacccgaccaaccagatcgacgctcttgcaaagaagctgaaactggaatgtagaaccatttctatgggccagggccaagaagtccacgccagaaagctgatccagatgtcaatgcaacaaggcggttgggttctattacagaactgccacctaggtctggaattcatggaggagcttttagagaccctaataacaaccgaagcatctgatgacagttttcgtgtttggataacaaccgaaccccacgatcggtttccgattaccctcctgcagacctctctgaagttcaccaacgaacctccacagggggttcgcgctggcctcaagcgcacctttgccggaattaatcaagatctccttgacattagtaatctccccatgtggaagcccatgctatacaccgtcgcattcctccacagtactgtccaggagagacgaaagtttggcccactcggctggaatatcccgtatgagttcaatagcgcggacttttctgcatcagtgcagtttattcaaaaccatctggacgagtgtgacataaagaaaggagtctcgtggaatactgtgagatacatgataggggaagtgcaatatggcggacgcgtcacggacgattttgacaagagactactcaattgttttgcgagagtgtggttcagtgagaaaatgtttgaaccatcattctgcttctacaccggctataagattcctctgtgcaaaacgcttgatcagtactttgaatacattcagtccttgccctcactggacaaccctgaggttttcggcctgcacccaaatgccgatatcacttaccaatccaacacagccagtgctgtcctcgaaaccataactaatattcaacctaaggagtccgggggtggcgtgggcgaaacgagagaggccattgtgtaccggctttccgaagatatgctctctaagctgcctcccgattacattccacacgaggtcaagagcagactaattaagatggggcatttgaattcaatgaatatttttcttcgacaagaaatcgaccgtatgcaaagagtgatttcaattctcaggagtagcctgtccgacctgaaactggccatcgaaggaactatcatcatgagcgaaaatttaagggatgcactcgacaacatgtacgacgccagaattccacagttgtggaaacgcgtttcctgggattcctcaacgttgggattctggtttacagaactcctggagcggaatgcacagttctccacctggatctttgaagggcgacctaacgtattttggatgaccggattctttaatccacagggcttcctcactgccatgcggcaggaggtgacacgcgctcacaaaggatgggccctggacactgtaacaatccacaacgaagtgcttagacagactaaggaagagattacctccccacctggagaaggcgtatacatttacggattgtacatggacggagcagcatgggatcgtagaaacgggaagcttatggagagcacccccaaggttttatttacacaattgccagtcctccatattttcgctatcaatagtacagcgcctaaggaccccaaactttatgtatgtcccatctacaaaaagcctcgaaggaccgatcttacattcatcaccgtggtttacctgagaaccgtcctgagccctgatcactggatcttacgcggagttgccctcctgtgtgatatcaagtat

SEQ ID NO: 221445 - DNA, 13365 bp, synthetic construct
  misc_feature 1..13365: note = Description of Artificial Sequence: Synthetic coding sequence
  source 1..13365: mol_type = other DNA
atgatgaaactctacatcgacaacgcagcaccggacaaactaaaggggctgtgcatcttcttcgtgcgctgtagaaatgatgttgccataaatgtaaaaacaattcaggaagaggcattatttaccgtactggacgcctcaaaaggactcctcaatggcatacgggacatgctggctaacattttcctgccagccgtattggctactaataattggggagctttgaaccagtccaagcagggcgaatctgagaaacacatctttaccgaaacgatcaaccgatacctgagcttcctggacggggctaggatcagtatcgaaggaaccgtgaagctgaagaccatcgacaacgtcaatttttccaagctgcataccttcgaggaggtcacagcggcagctagcaatagtgagacagtgcaccagcttgaggaggtccttatggtttggtataaacaaatagaacaagtcttgatcgagagtgaacagatgagaaaagaggctggtgacagtggacctctgacggagctagagcactggaaacgaatgagtgctaaattcaattatattattgagcagattaaagggccatcctgcaaagccgtgattaacgtgcttaatgtggcccactctaaattgcttaaaaactggcgggatctcgacgccagaatcactgacacagcaaacgaatcaaaagacaacgttcggtatttatataccctcgagaaggtctgccagcccctatacaaccacgatttagtgtccatggcgcatggtattcagaaccttattaacgccatccgtatgatccacggggtgagcagatactataatacgtctgagcggatgacaagtctgtttatcaaagtgaccaaccagatggtgacagcttgcaaggcttatattaccgatggaggcctaaatcacgtgtgggaccaggaaacaccagtggtactgaaaaaaatccaagattgcatctttttattcaaggaatatcaagccagcttccacaagacgaggaagctgatatccgagtcaagcggcgaaaagagctttgaggtgagcgaaatgtatatatttggtaagtttgaggctttctgtaagaggttggaaaagattaccgagatgatcaccgtggtccagacatattcgacattgtctaacagcaccatcgaaggaatagatatcatggctatcaagtttagaaatatttaccaaggtgtcaagaagaaacagtatgatatcctggatccgcgtcgaacagaattcgacaccgacttccttgactttatgaccaaaatcaatgggttggaggtgcagatccaggcctttatgaattcttccttcgggaaaatcctgtcatctcagcaggcactgcaattgctgcagaggttccaaaagctcaatattccgtgtctgggcttggaaattaatcatacaatagagcgcattctgcagtattatgtggccgaattggacgctacgaagaaattataccactcccagaaggacgacccccctctcgccagaaacatgccaccaatagctggaaagattctgtgggttcgccagctgtaccgcagaatttcagaacccattaactacttcttcaaaaacagcgacattctgagttcacccgacggaaaagcagtgatccggcagtacaataaaatctcttatgtgctagtagaatttgaagtggtgtatcataccgcctggatcagagagatatcccagttgcattatgccctgcaggccactctatttgtgcgtcaccccgagaccggaaaactgctggtaaacttcgaccccaaaatactagaggtcgttagagaaaccaaatgtatgatcaaaatgaaactcgacgtccctgagcaggccaagcggcttttaaagctggagagtaaactgaaggccgacaagctctacctacaaggactcttacaatactatgacgagctgtgtcaggaggtgcctagcgtgtttgtgaatttgatgacgcccaagatgaaaaaggttgaaagtgttctacgacaggggctaacagtcctgacctggtccagcttaaccctggagtctttcttccaggaagtggagcttgtccttgacatgtttaatcagctcctcaaaaagatctctgacctgtgtgagatgcacatcgacacggtgctcaaagaaatagccaaaactgtcttaataagcttgccggagagcggagccacgaaagtggaggacatgctcacacttaacgagacctataccaaagaatgggcagatattctgaatcacaaaagcaagcatgtggaggaggcagtgagagagttaatttcgatctttgagcaaatctacgaagttaagtatacaggaaaagtcggcaaacaaagcgaacagagaaaacatgtggtgttcggatccgaaacaggtgagggtgaaaataatgattatgaggcaaatatcgtgaatgaattcgatactcatgacaaggaagatgagtttaagaaggaatgtaaagaagtgtttgcctttttcagccaccagctccttgactccttgcagaaggcaacaagattatccctagacaccatgaaacgcaggattttcgtggcgtctctgtatgggaggaagcagtcagaagacatcatcagtttcataaaatccgaagtgcacctcgctatccctaacgtggtgatgataccttccctggacgacatccaacaagcgataaacaggatgatacagctgaccttggaagtttcccggggtgtggcccactggggtcagcagcaaatacgtccaattaaaagtgtcatcccatctcctacgacgaccgatgtcacacatcagaacaccgggaagctgctgaagaaggaggagcgttcgtttgaggaagccatacccgcaagaaagctgaagaacttctacccaggagtcgcagagcacaaggatatctccaagctggtcttgctgctctccagcagtgttaactctctcagaaaggccgctcacgaggcccttcaggatttccagaagtataagactctgtggaccgaagaccgcgacgttaaagtgaaggagtttctcgcgaacaatcccagtctcactgaaataagaagcgaaatactgcattacgcaacgtttgagcaggagattgacgaacttaagccaattattgtcgtaggcgcacttgaactgcacaccgagcccatgaaactggctctctcaattgaagccaaggcgtggaaaatgctcctgtgtaggtacctgaatgaagaatacaaaaagaaaatgagctacatgatcgcttttatcaacgaatacctaaaaaaactgtccagacctataagggacctagatgacgtccgctttgcgatggaggccctctcatgtatacgcgataacgaaatccagatggacatgactctcggaccgatagaggaggcttacgcaattctcaacagatttgaagtagaggtcactaaagaagaatctgaggcagttgataccctgcgatatagcttcaataaactacagtccaaggcggtgtctgtccaggaggacctagtccaggtgcaacccaaattcaaatctaatttgttagagtctgtggaagtttttcgcgaggatgtcatcaacttcgccgaagcgtacgagctcgagggaccgatggtgcctaacattcctccccaggaggcaagcaatcgtctccagatctttcaggcgtcctttgatgacctgtggagaaagttcgtgacctacagtagtggcgaacagctgtttggtctgcccgtgacggactacgaggttctgcacaagactcggaaggaactgaatctgctgcagaagctttatgggctctatgacaccgtgatgtcttcaatttcagggtactatgaaatcctgtggggcgacgttgacatcgagaaaataaacgccgaactgttggaatttcagaaccggtgtaggaaactcccaaagggcctgaaggattggcaggcgtttctcgatctcaagaaacgtattgacgacttcagtgagtcgtgtcccttactggagatgatgaccaataaggcgatgaaacagaggcactgggatagaatcagcgagctgacaggaacaccgtttgacgtggagagtgacagcttctgtttgcgaaatatcatggaggctcctttactcaagcataaggatgacatcgaagacatttgcatctccgctattaaagaaaaggacatcgaagccaaactcacacaagtgatcgaaaactggacaaatcagaatctgtcattcgcagccttcaaaggcaagggagaacttctcttgaaggggactgagagcggtgagatcattacgctgatggaggattcactgatggtgctgggatcccttctgagcaaccgctacaatgcaccgttcaaaaagaacatccagaactgggtttataaactctctacctccagcgacattattgaggaatggctcgtggtacaaaatctgtgggtctacctcgaggcggtgtttgtgggaggtgacattgctaagcagttgccccaagaagctaaaaggtttcagaacatcgacaagagttggatcaaaattatgcagcgggctcacgagaaccctaacgttattaattgttgcgttggtgatgaaacaatggggcagctcctgccccaccttcacgagcagctggaggtgtgtcagaagtctttgaccggctacttagaaaagaagcggctcctgtttccacgattcttttttgtgtccgatccagtcttgctggaaatcctcggccaggcctctgactcgcacacgatccagccacacctacctgcagttagcgacaatatcaacgaagtgacatttcacgctaaggactacgataggattatggccgtcatttcaagggaaggtgaaaaaatcgtcctagataatagcgtgatggcaaagggaccagtcgagatatggctcctggaccttctgaaaatgcaaatgtcatcgcttcacaatattattcggagcgccttctatcagatttcagacagtggttttcagctgcttccattcctctcccactttcccgctcaggtgggattgttgggaatccagatgctttggacgcacgactcagaggaagccttgcgaaatgccaaagatgaccgcaagataatgcaagtgacaaatcagaaattccttgatatcctgaacacgctgatatcgcagaccacgcacgatctgtccaagtttgacagagtgaagttcgagacacttattaccatccacgtgcaccagagggatatctttgacgatctggttaaaatgcacatcaagagcccaacagacttcgagtggctcaaacaaagccgcttttattttaaggaggacctggaccagaccgttgtctccattaccgatgtggactttatatatcagaatgagtttctcggttgcactgatcgactggtcatcacccctctcactgataggtgttatatcacgctcgctcaggctctgggcatgaacatggggggagccccagctggacccgcaggcactgggaaaacagagaccactaaagacatgggcagatgcttggggaaatatgtcgttgtttttaactgcagcgaccagatggactttcggggactggggaggatctttaagggcctggcgcagtctggatcctggggctgttttgacgaatttaaccggattgaactgccagttttgagtgtagctgctcaacaaatctacatcgtgctcaccgcacggaaagagagaaagaaacagtttatctttagcgatggcgattgtgtggacctcaacccagagttcggaattttcctcactatgaaccctggatatgcaggccgtcaggagttgccagagaatctcaagatccaattcaggactgttgccatgatggttcctgataggcaggtgcattatgacttcggcttgagaaacatccttagtgttctccgtacattaggaagtcagaaacgtgctaggcccgaggattcagaactctctatcgtgatgcgcggactgcgagacatgaacctttcgaaactagttgatgaggacgagccgctgttcctctctctgattaacgacctgtttcctggcctccagcttgatagtaacacatacgccgagctgcagaacgctgtggctcaccaggtccagatcgaaggtctgattaatcatccaccctggaacttgaaattagttcagctgtacgagaccagccttgtcagacatggccttatgactttggggccttccggttcaggtaaaacgacggtgattacgattctcatgaaggcacagacagaatgtgggaggcctcatagggagatgagaatgaacccaaaggctattaccgctccacagatgttcggacggcttgacaccgctactaatgactggaccgacggcattttctccactctctggcggaaaactcttaaagccaaaaagggggaaaacatctttctcattctagacggacccgtcgacgctatttggatcgaaaacctgaattctgtgttggacgacaacaaaaccctcaccctggcgaatggggataggattcccatggctccttcctgcaaattactgttcgaggttcacaacattgagaatgcaagcccggctacggtttctcggatggggatggtttacataagcagctccgctctgtcctggagacccatactgcaggcctggcttaagaagcgcaccgctcaagaggccgcagtgttcctcacgctgtacgagaaagtgtttgaggatacgtacacatatatgaagctcaatctgaacccaaagatgcagcttctcgaatgtaactatattgtgcagtccctcaatctgctagagggcctgattccttctaaggaggaaggcggagtgagttgcgtggagcatcttcacaagctttttgtcttcggcctcatgtggtccttgggcgctttattggaactcgagagccgtgagaagctggaggcctttctgcgccagcatgaatctaaactcgatcttccggagatacctaaggggtcgaaccagacgatgtacgaattctacgttaccgattacggcgactgggagcattggaacaagaaactgcagccgtactactatccaaccgactccataccagaatactcaagcatcctggtacccaatgtagacaatatcaggactaactttctgatagatactattgccaagcagcacaaggcagtgctacttacaggcgagcagggcactgccaagactgtgatggtgaaggcctatttgaagaagtacgatcccgaagtgcagctgagcaagtcattgaacttttcctccgctaccgaacctatgatgtttcagagaactatcgaaagctacgtcgataaaaggatcggctctacctacgggcctcctggaggcagaaagatgacggtgttcattgatgatatcaacatgccagtgatcaacgagtggggagatcagattacaaatgaaattgtcaggcagatgatggaaatggaagggatgtactcccttgataagccaggtgacttcactaccatagtcgatgtacagctcattgccgctatgattcaccctggcggaggtcgcaacgacattccccagcggttgaagagacaattcactgtgttcaactgcactctgccctccaacgctagtatagataagatatttggcattatcggctgtggttactttgacccctgtcgcagcttcaagccgcagatctgtgaaatgattgtgaatctcgtctcagtcggccgtgttttgtggcagtggaccaaggtgaagatgctgccaactccctcaaagttccattatatttttaatttgagggacctctctaggatttggcaggggatgctcaccatcaaagcggaggagtgtgcatctattcccacactgctatccctatttaagcatgagtgctcccgcgtgatagccgacaggttcatcacccctgaggacgagcagtggttcaatgcccaccttacccgagccgtggaagaaaatattggatctgatgccgcatcttgcatacttcccgaaccttattttgttgatttcctaagggagatgccggagcccacaggtgatgagcccgaggacagcgtgttcgaggtccccaaaatctatgagctgatgcccagcttcgatttcctggcagaaaagctgcaattttaccaacgccaattcaacgagatcatcagagggacttccctggatctcgtgttcttcaaagacgcgatgacacacttgatcaagatttcccggatcattaggacgtcttgtggcaatgccttattagtgggagtcgggggaagcgggaaacagtctttaagtcgcttggcttcatttatcgccggatatcaaattttccaaatcacattaactcgttcgtataatgttaccaatttgaccgacgacctgaaagcactttacaaggtagccggtgcagacggcaaaggcattacattcatctttaccgatagtgagatcaaagatgaagcattcttagagtacttgaacaacctactgagctcaggggaaataagcaatctgttcgccagagacgaaatggacgaaattacccaggggctaatatcggttatgaaaagagagctgccacgccacccaccgacttttgacaatttgtatgagtacttcatttctcgcagtagaaagaatctccatgttgtcctgtgctttagccctgtgggggagaagtttagagctcggtccctcaaatttcccggactgataagcggatgcaccatggactggttctctaggtggcctagagaggcgcttatcgcggtcgcgtcgtactttctgagtgactacaacattgtttgcagtagtgaaatcaaaagacaagtggttgagactatgggattgttccatgacatggtctctgagtcttgtgagtcttacttccagcggtatcgcagacgtgctcacgtgacacccaagagctacctctcattcatcaacggctataaaaacatctatgccgaaaaagttaagtttataaatgaacaggccgagaggatgaacatcggactcgataaactcatggaagccagtgaaagcgtggctaagctgtcccaggatcttgccgtgaaggaaaaagaactcgccgtggccagcatcaaggcagatgaagtcctggccgaagtcacagtctctgcacaggcctccgcaaagattaagaatgaggtgcaggaggtgaaggacaaggctcagaaaatagtagatgagatcgactctgaaaaagtgaaagccgagagtaaactggaggcagccaagcccgcacttgaggaggccgaggccgcattgaacacgattaaacccaatgacattgcaacagttcgcaaactggccaagccaccgcacttgatcatgaggataatggactgcgtactactgttgttccagaagaagatcgacccagtgactatggaccctgagaagtcttgctgcaaaccttcctggggcgagagtcttaagctcatgtccgccaccggattcctctggtccctccaacaatttcccaaggacacaattaacgaagaaaccgttgagcttctgcagccttacttcaacatggacgactatacctttgagtccgccaagaaggtttgtgggaacgtcgccggactcctcagctggacacttgcaatggcaattttttacggcatcaacagagaggtgttacctttgaaagctaatctggcaaagcaggagggacggctagctgtggcgaatgctgaactggggaaagcacaagccctgctggatgagaagcaagcagaactggataaggttcaggctaaatttgatgccgctatgaacgagaaaatggaccttttgaacgatgctgacacctgtcgaaaaaaaatgcaggcggcatcgacacttattgacgggctgtctggggaaaagatccgttggacccaacaatcaaaggagttcaaagcccagatcaaccggctcgtgggcgacatcctgctgtgtaccgggttcttgtcttacctgggtcccttcaaccagatcttcaggaactatctgctgaaggaccaatgggaaatggagctccgtgcaagaaaaataccatttaccgagaatttaaatttgataagcatgctggtcgatccaccaacaatcggggagtggggactgcagggcctgccaggtgatgacctgagcatccagaatgggatcatcgttacaaaggctactaggtaccctctcctgatcgacccccaaacacagggcaagacctggataaaatcaaaagaaaaggaaaacgatcttcaggtgacttcactgaaccacaaatacttccggacccacctggaggatagtctaagcttgggacgacccttgcttatagaggacattcacgaagagttagaccccgctttagataatgtcctagaaaagaactttatcaaaagcggtacgacatttaaggtgaaagttggcgataaagaatgtgatattatggacacctttaagttatacatcacgaccaaactgcccaatcccgcattcactcccgagattaatgctaagacctcagtgatcgactttaccgtaaccatgaaagggctcgaaaatcagttactgagaagagtaatcttaacggaaaagcaagagttagaggccgagcgagtcaagctgctggaggacgtcacctttaacaaacggaagatgaaagaacttgaagacaacctactgtataaactgagcgcaaccaaaggctcgctggtggatgatgaatctctcattggggtcctgaggactacaaagcagacagcagctgaagtgtctgagaagctgcatgttgctgctgagacagagatcaaaattaacgctgcccaagaagaatttagacctgccgcaacacgcggaagcatcctgtacttcctgatcactgaaatgtcaatggtgaacataatgtatcagacatcccttgcccagttcctgaagctctttgaccaatcaatggccagatccgagaagagtccgctgccccagaagcggatcaccaacatcattgaatatctgacatacgaggtctttacctatagcgtccggggactttatgagaatcacaaattcctatttgtccttctgatgacgctcaaaattgatctgcaaagaggcactgtaaagcaccgggaatttcaagcattaattaagggaggcgctgccctcgacttaaaagcctgcccaccaaagccttaccgatggatcctggacatgacctggctgaacctggtcgagctcagcaaacttcctcaatttgcagagatcatgaaccagatctctagaaacgagaagggttggaaaagttggttcgacaaagatgctccggaggaggaaatcatccctgatggctacaacgacagcctggatacctgccacaagttgttgcttataaggtcttggtgtccagatagaacagtctttcaagccaggaagtatatagctgacagcttggaggagaagtacactgagcccgtcattctgaatctcgagaagacctgggaagaatcggacacccgcacaccattgatatgtttcctcagtatggggagcgaccccacaaaccaaatcgacgccctcgccaagaaactgaagctggaatgccgtactatcagcatgggccagggccaggaggtccatgccagaaagttgatccagatgagcatgcagcagggtggatgggtgctactccagaattgtcatttgggactagaattcatggaggagttgctcgagacactcattacgactgaggcatccgacgactcctttcgggtttggattactaccgaacctcacgacagatttcccatcaccctattgcagacctccctgaagttcaccaatgagccacctcagggtgttagagctggactgaagcgcacatttgctggaatcaaccaagatctgctagatatcagcaatctccctatgtggaagccaatgttgtacactgtggccttcctgcatagcactgttcaggagcggcgtaagttcggaccgttaggctggaacataccttacgagttcaacagcgctgacttctcagcctcagtccagtttattcagaatcacctggatgagtgtgacattaaaaagggcgtttcatggaacaccgtgcgctacatgatcggtgaggtacaatacggcggaagggtgactgacgatttcgataagagactactgaactgttttgctagggtgtggttcagcgaaaagatgttcgagccctctttctgcttctacaccggttataagatccctctgtgcaagacactggaccagtactttgaatatatccagtctctgccgtctttggacaatcctgaggttttcggattgcacccaaatgctgatataacataccagtccaacactgcctcagcggtgctggagaccatcaccaatattcaacccaaagagtcaggagggggagtcggagaaacgagagaagctatcgtgtaccgcttgtccgaagatatgctatcaaaactgcctccagattatatcccacatgaggtcaagtcacggctcattaaaatgggacacctgaattccatgaacattttcttacgccaggaaatagataggatgcaaagggtgattagcatcctacgcagtagcttgtcagacctgaaactcgccatagaaggcaccattattatgtcggaaaatctcagagatgcactggataatatgtatgacgccagaattccacagttgtggaagagggtgtcttgggactccagcacgctcggcttttggtttacagaactgcttgagcggaacgcacaattctcaacttggatcttcgagggccgtccaaacgtcttttggatgacgggctttttcaacccacagggcttccttaccgctatgcgccaggaagtcacccgagcacacaagggctgggctctcgacaccgtgacaatccacaatgaagttctcagacagacaaaggaagagatcacgagtcctccaggagagggagtgtacatttacggcctgtatatggacggcgcagcatgggaccggagaaatggcaagttgatggagagcactcctaaagtcctgttcactcaattgccggtgctccacatcttcgctatcaattctaccgctcctaaagacccgaagctatacgtatgtcccatctacaaaaagcctagaaggacagatctgactttcataaccgttgtgtacctcagaacagtactgtctcccgatcactggatcctgcgtggggtggccttgttatgcgatatcaaataa

SEQ ID NO: 221446 - DNA, 12567 bp, synthetic construct
  misc_feature 1..12567: note = Description of Artificial Sequence: Synthetic coding sequence
  source 1..12567: mol_type = other DNA
atggagaaagatgccgaagatggcgcaccaagtgagggggctgaggcgccaccatcgaccgaagaagctgctccgccaaggtctgaagaggaagaggcccctagacctcccacagtagaggcccctgcggaggacggattctcaccctcagctgaggatgcagtaagttccgttgtggactatcgcgacttgatcccctcagaggagggaatcgtgctgccggacgaccacgaggcggacttaaatagggtaaggcagaggctggccccacgtcctgtgcagtccgtgatctctgaggtcctcagcctgccaagctcccggagatcttctaggtatcgaagaagtatgtctgggttgccgaacctccaggagaccctgaaggagcgtcaggctcgcttccgtgaggccagagaatctcggcgactgaagatcgacccatcctataaatacatatttgaaattctggccgagaatttgggactcgacattgtcacagtggaggaattaattctcgattgccctagcctggaagcctttacaaatttctttgcaaaggacgggtgcaagaccttaaagtttctctaccaggagggtgatgtcccaggaattgaatgtggcagaactattgctggggcaacaaaaggcgcaaagatgatgaaactctatatcgacaacgcagcccctgacaaacttaagggcctgtgtatctttttcgtcagatgtcggaacgacgttgccattaacgtgaaaacaatccaagaggaggccctgttcaccgtgcttgatgctagcaaagggctcctgaatggtattagggatatgttagccaatatattcctgcccgctgtattggcgactaacaattggggtgctcttaaccagagtaagcaaggagaatccgagaaacacatcttcactgagacgatcaacaggtaccttagttttctagacggcgctaggattagcatagaaggcacagttaagctgaaaacaattgataacgtgaacttcagcaaactccataccttcgaagaggtcaccgccgcagcatccaacagtgaaaccgtgcatcaacttgaggaggttctcatggtgtggtacaagcagattgaacaggtgctaattgagagcgaacagatgcggaaggaggccggtgattctggtcccttgaccgagctggagcattggaaacggatgtcggctaaattcaattacatcatcgaacagatcaaagggccatcctgcaaagccgtcataaacgtgttgaatgtggcacatagcaagctcctcaagaattggcgtgatttggacgcacgcattacagatactgccaacgagtctaaggacaacgtcagatatttgtacactttagagaaggtctgtcagcctctttataaccatgatctcgtgagcatggcccatggcatccagaatctgatcaatgctatacgtatgattcacggggtgagtcgatactacaatacatctgagagaatgacctcactgttcatcaaggtgacaaaccagatggtaactgcctgcaaggcctatatcactgatggaggccttaatcatgtgtgggaccaagagaccccagtagtcctcaagaagatccaggattgcatcttcttgttcaaagaataccaggcctcgttccacaaaactcgaaagctcatttccgagagcagcggcgaaaagagctttgaagtttcggagatgtatatttttggcaaatttgaggcattctgcaagcggctcgaaaaaattaccgaaatgatcacagttgtgcaaacatattcaacactgagtaactccacgatcgagggaatcgacataatggctattaagttccggaacatctatcaaggcgtgaaaaagaaacagtacgacatcctcgatccgaggcgcactgaatttgacactgatttcctggactttatgacaaagatcaacggactggaggtccaaatccaagccttcatgaatagtagtttcggaaagattctgtcctcccaacaggcgctccagctgctgcagcgcttccaaaagctcaacattccctgcctggggctcgaaattaatcacaccatagagagaatacttcaatattatgtcgccgaactcgacgctaccaaaaagctttatcactcacagaaggatgatccccctttagcacgcaacatgccacccattgccggaaaaatcttatgggtcaggcagctctacaggaggatctccgagcccataaattacttctttaagaatagtgatatattgtcctcccccgacggcaaggcagtaattcgccagtacaataagatttcttacgtgctcgttgaatttgaggtcgtgtatcacaccgcctggatccgagagatcagccaactccactacgcccttcaggccactttgtttgttaggcaccctgaaacagggaaactccttgtcaatttcgatccaaagattctcgaagttgtgagggagactaagtgcatgattaaaatgaagctggatgtcccggagcaggctaaaaggctattgaaactggagagcaaacttaaggcagacaagttatatctgcagggtttgctccagtactatgatgaactatgtcaggaggtcccaagcgtctttgtaaacctaatgacaccaaaaatgaagaaggtagaatctgttctcagacagggtcttactgtcctgacttggagcagccttacactcgaatccttctttcaggaggttgagctggtgcttgacatgtttaaccagctcctcaagaagatttctgacttgtgtgaaatgcacatcgacacggttcttaaagaaatcgctaaaactgttctgatttccctgccggagtccggcgcaaccaaggtggaagatatgctgacgctgaatgagacttacacgaaggaatgggccgatatactgaaccataagtccaagcatgtggaggaggccgttagggagctaatctctatctttgagcagatatacgaggttaaatacaccggaaaggttggtaaacagtccgaacagcgtaaacatgtggtctttggctcggagactggcgagggagagaacaatgattacgaagccaatatcgttaacgagttcgacacccacgacaaagaagacgagtttaagaaggagtgtaaagaggtgtttgcttttttttcacaccagcttctcgacagtctgcagaaggccactcgtttgtctctggatacgatgaagcgcaggatttttgtagcatcattatacggtcggaaacagtcagaggatatcatttccttcataaagtctgaggtccatctcgctatacccaacgttgtcatgataccatcgctggatgatatccagcaagccattaataggatgattcagttaactctcgaggtctcaagaggtgtcgcccactggggccagcagcaaattaggcccatcaaaagcgtgatcccttctccaacaacaacagatgtcacacatcaaaatactggaaagcttctcaaaaaggaagagcgcagtttcgaggaagctatccctgctcgtaaactcaaaaatttttatcctggcgtagcagagcacaaggatatttcaaagcttgtgttacttctgagcagcagtgtcaattccctccgaaaagcagcccatgaagctttgcaggattttcagaaatacaaaactctatggacagaagatcgagacgttaaagtgaaggaatttctggccaataacccttctctgaccgaaatacgctcagagattttgcactacgcgacctttgaacaggaaatcgatgaactgaagccaatcatagtcgtgggcgctctcgaactccatactgagcccatgaagctggctctttctattgaagccaaagcttggaagatgctactttgtcgctacctcaacgaagagtacaagaagaagatgtcctacatgattgcttttatcaacgagtacctcaaaaaattatcgcgaccaattagagacctcgacgacgtgcgattcgcaatggaggcactgtcttgtataagggataacgaaatacagatggatatgacactcgggcctattgaggaagcatacgcaatccttaatcgcttcgaagtcgaggtcaccaaagaggaatccgaggctgtagacactctgcgctacagttttaacaaattgcaatcaaaagccgtgtccgtgcaggaggacttggttcaagtgcagcccaaatttaagtcaaatttgctggaaagcgtggaagtgtttagggaggacgttataaactttgctgaagcctatgagctcgagggtccaatggttccaaacattcccccacaggaggcttcaaaccgcctgcagatcttccaagcaagcttcgacgatctctggaggaaattcgtgacgtatagttctggcgagcaactattcgggctgcctgtcaccgactatgaggtgcttcataaaacacggaaagaacttaatttgttacagaagctgtatggactttacgatacagtgatgagttccatatccggatattacgagattttgtggggggatgtggacatagaaaaaattaacgccgagctgttggagttccaaaacagatgccgcaagttgcccaaaggactgaaggactggcaggcgtttttggacctgaaaaagaggatcgacgacttcagcgaatcctgtcctctgttggaaatgatgaccaataaggctatgaagcagagacactgggaccggatctccgagttaacaggcaccccgttcgatgtggagtccgactcgttctgcctgaggaatatcatggaggcaccgctgctgaaacacaaagacgacatcgaggatatttgtatctccgcgataaaggaaaaggatattgaagcgaagctaacccaggtaatcgaaaattggacaaaccagaatctgtccttcgccgcttttaaagggaaaggggagcttctcctgaaggggactgagtctggagaaattattacccttatggaagactcgctaatggtgctggggtcattactatcaaaccggtacaatgccccattcaagaaaaacatacagaactgggtgtacaaattgtctacctcatcagacatcatagaggaatggttggtggttcagaacctttgggtctacctagaagccgtattcgttggcggtgatatcgccaaacagctcccgcaggaggcaaagcggtttcaaaatatcgataagtcatggatcaagatcatgcaacgcgcacacgaaaacccgaatgtgataaattgctgtgtgggcgacgaaaccatgggtcagctgttaccccacctgcatgagcagttggaggtatgtcagaagtcattgacaggctatctggaaaaaaaacgcctgctgtttccacgttttttcttcgtgagcgatcccgtactgcttgagatactaggccaagcatcagacagccacaccatacagccacatcttcccgctgttagtgacaatataaacgaggtgaccttccacgctaaagactacgataggatcatggccgttatttcacgagaaggggagaaaattgtgctggataacagcgtgatggctaagggacccgtagaaatctggctcctggacctgctgaagatgcaaatgagttcattacacaatattattagatccgccttttaccagatcagcgatagcggttttcagcttctgccgttcctgtctcattttccagctcaggtgggcctcctaggaattcaaatgttatggacacacgatagcgaagaagccctgcgcaatgctaaggatgaccgaaaaattatgcaagtcacgaatcagaagttcctggatattcttaacaccttaatttctcagaccacccacgacctctccaaattcgacagggtgaaatttgagaccctgataaccattcacgttcatcagcgggatatcttcgatgatctcgtcaagatgcacattaagtcacccacagactttgaatggctgaagcaaagccggttttacttcaaggaggatctggaccagaccgtcgttagcatcactgatgtggacttcatataccaaaatgaatttttggggtgcactgatcgccttgtcataacacctttgaccgaccgctgttatatcacactagcgcaggccctcggtatgaatatggggggtgccccagctggacccgctgggactgggaaaacggagactacgaaagatatgggcagatgcctgggaaaatacgtcgtcgtgttcaactgctcggatcagatggattttcggggtcttgggcgtatttttaagggactggcccagtctgggtcatggggatgtttcgatgagttcaatcgtatcgaacttcctgtgctgtccgtggccgctcagcagatctacattgtcctgacggctcggaaagagcgtaagaaacaattcattttctccgacggggactgtgtggacctgaatcccgagtttggcatcttcctaacgatgaaccccggatacgcaggcaggcaggaactgcctgagaatttaaagatacagttccgcacagtcgccatgatggtgccagataggcaaatcatcatgcgggttaaactagcttcctgcggatttctcgagaacgtgattcttgcacagaagttctatgtattgtacaaattgtgcgaggagcagctcactaagcaggtacattacgactttgggctgagaaacattctctcggtgttgcggactctcggttctcagaagcgggcacgccctgaagattctgagttgtcgatcgtcatgagaggcctcagggacatgaacctgagtaaacttgtggatgaagatgaacccttgtttctatccctgattaatgatctgttcccagggcttcagctcgacagcaatacctatgccgagctgcagaatgctgttgcgcatcaggtgcagattgagggcctaatcaatcaccccccttggaacctgaagttagtccaactttatgagaccagcttggtacggcatggcctgatgactttgggaccgtctggaagcggcaagaccacagtgatcacaatcctgatgaaagcccagacggagtgcggcaggccacatagagagatgcggatgaatcctaaagccattactgcaccacaaatgttcggtcgacttgacaccgcaactaatgactggacagatgggatcttcagcacactgtggaggaagaccctgaaagcaaagaaaggggagaatatattcctgattctggatgggccagtagatgccatctggatcgaaaacctcaattctgtccttgacgataacaaaaccttgacattggctaatggggaccggatcccaatggcaccatcttgcaaacttttatttgaggtacataacatagagaatgccagcccagccactgtcagcaggatgggaatggtctacatctcgagctccgcattatcatggagaccaatcctgcaggcctggctcaagaaacgcacagcccaggaggctgcagtgtttttaaccttgtacgaaaaggtgttcgaagacacttatacttacatgaagctgaacctcaacccgaaaatgcaactcctcgagtgcaactacattgtgcagagcctgaatctgctggagggcctgattccgagcaaggaggagggcggtgtatcatgtgtcgaacacctccataagctcttcgtgttcggcttgatgtggagcctcggcgctctgctcgaactggagagtcgcgagaaacttgaggcctttcttcggcagcacgagtcaaagctggatctgcctgagatcccaaaagggtcaaatcagactatgtacgaattttatgtgaccgactacggtgattgggagcactggaacaagaaacttcaaccgtattattaccctaccgattccatcccagaatacagcagcattctcgttcctaacgtcgacaatattcgaaccaattttctgatagacacaatagccaaacaacacaaggctgttctgctgacaggcgagcaaggcactgccaaaactgtgatggttaaagcttacttgaagaagtacgaccccgaggttcagcttagcaagtccctgaacttcagcagtgcaacagagcctatgatgttccagcgaacaattgagtcttatgttgacaaaagaattgggagtacctatggtcctcccggagggcgtaaaatgactgtgtttatcgatgacataaatatgcctgtcattaacgaatggggcgaccagattactaatgagatcgtgaggcagatgatggaaatggagggaatgtattctctcgacaagccgggagatttcaccacaattgtggatgtgcagctgattgcggctatgatacatcctggtgggggaaggaacgatatccctcagaggctcaagcgtcaatttactgtgttcaactgtacactcccttcaaacgcgagtattgataaaatctttggcattattggctgcgggtacttcgacccatgcaggagcttcaaaccccaaatctgtgaaatgattgttaatttggtgtcagtggggagggtgctgtggcaatggacaaaggtgaaaatgctgcctacaccgtcgaagttccactacatatttaaccttcgggaccttagtcgcatttggcagggaatgctgacaattaaggccgaggagtgtgcctcgatcccaaccctgctgagtttgtttaaacacgagtgttctcgcgtgatcgctgatcggttcattactcccgaagacgagcagtggttcaatgcgcacttaactcgcgctgtggaagagaatattgggtctgatgctgctagctgcattttgcctgagccttatttcgtcgactttcttagagaaatgcctgagccaacaggggacgagcccgaagattcagtttttgaggtcccaaagatatatgagctaatgcctagctttgacttcctagcggagaagctccagttctatcagagacagttcaacgagatcatcagaggcaccagtttggacttggtgttttttaaggacgcaatgacacacttgattaaaataagtagaattattcgtacttcttgtggcaatgcgttactggtgggtgtggggggatcggggaaacagtctttaagtagactcgccagctttatcgccggatatcagatattccagatcacactgactcgctcttacaacgtaacaaacctcactgatgacctaaaggccctttacaaggtagcaggcgcagacggtaagggtattacattcatttttactgactcagagattaaggatgaggcattcctcgagtatcttaacaacctgttgtcaagtggcgagatctccaacttgttcgcacgcgatgaaatggatgaaatcactcagggactcatctcagtgatgaaacgcgagcttcctcgacatccccctacatttgataacctctatgagtattttatttcacgcagcagaaagaatctccacgttgtcctttgttttagccccgtgggtgagaaatttagagcacgcagcctcaaattccccggtctcatttccgggtgcactatggattggttttctaggtggcctcgcgaggctctgatcgcggtggcatcttatttcctaagcgactacaacatcgtgtgttcctcagaaattaaacgacaagtagtagaaacaatgggtctatttcacgacatggttagcgagtcttgtgagtcatactttcagcgatacagaaggagggcccatgtgacccctaagagctacctcagctttatcaacggctacaaaaacatatatgccgagaaggttaaatttatcaatgaacaggcggagcgcatgaatatcgggctggataagttgatggaggcaagcgaatccgtagctaagctctcacaagatctcgccgtcaaggaaaaagaattagcggtggcgtcaatcaaagccgacgaagtgctggcagaggtcactgtctccgcacaggcctcggccaaaataaaaaacgaggtgcaagaggtgaaggataaagcacagaaaatcgttgatgaaatcgattccgagaaagtgaaggccgaatctaagctcgaagcggcaaaaccagctctagaggaggccgaggccgctctcaacactattaaacccaacgatatcgcgacagtaagaaagttagccaaacctccccatctgattatgcgcataatggactgcgtgctgcttctgtttcagaagaaaattgaccctgtcaccatggatccggagaagtcctgctgtaaacctagttggggagagtcactgaaactgatgtctgcgaccggttttctctggagtctgcaacaattccctaaggacaccattaacgaggaaaccgtagaactgttgcaaccgtatttcaacatggatgattacacgttcgaaagcgctaaaaaagtctgcgggaacgtggcgggtctgctttcttggactctggctatggcgatattctatggcatcaatagagaagtactgcccttgaaggccaacctagctaaacaggaggggaggctggccgtagccaacgccgagcttggcaaggcccaggccctgctggatgaaaagcaggctgagctggataaggtgcaagcgaaatttgacgccgctatgaacgagaaaatggacctgctgaatgacgctgacacatgccgtaaaaaaatgcaggccgcaagcacccttattgatggattgtccggcgagaagattcggtggacacagcagagcaaggagtttaaggcccagatcaatcggctggtcggtgacattcttttgtgtacgggtttcctgtcctacctagggcctttcaaccaaatttttcgaaactatctgcttaaagatcaatgggaaatggaattgcgcgctcggaaaataccattcaccgagaatctcaatcttattagcatgctggtcgaccctccaacgattggcgaatggggcctgcagggactccccggagacgacctcagcattcagaacggaattatcgtaaccaaggccaccagataccctctgctgatcgatcctcagacgcaaggcaagacttggattaaatcaaaggagaaagagaacgacctgcaagtcaccagtctaaatcataagtacttccgcactcacttggaagatagtctttctcttggtaggcctctgctcatcgaagatattcacgaggaattagatccagctcttgataatgtgctggaaaaaaattttatcaagagcgggacaacatttaaagttaaagttggcgacaaagaatgtgacatcatggacacctttaaactctatattaccaccaagttgcccaacccggcttttacccctgagatcaacgctaagacttcagtgattgactttacagtgacgatgaagggactcgaaaatcagctcctgaggcgggtcattctgacggagaagcaggaacttgaagccgagcgcgtgaagttgctggaggacgtgaccttcaacaaaaggaaaatgaaggagctcgaggataacttgctctataagctcagtgctacaaagggatcccttgtcgacgatgagtccctgattggtgtgctgaggacaacaaaacaaaccgctgcagaggtgagtgagaaactgcatgttgccgctgagactgaaattaagatcaacgccgcacaggaagagtttcgccctgcagcaactcgtggctcaattttatacttcctaattacggagatgagcatggtcaacataatgtatcaaacgagtctcgcacagttccttaaactctttgaccagtctatggccagatcagagaaatctcctctcccacagaagcgaattacaaacatcattgaatacctgacatacgaggtgttcacctatagcgtccgaggactgtacgaaaaccataagttcctttttgtgctgctgatgaccctcaaaatcgacttgcagaggggaaccgtaaagcatcgcgaattccaggccctgattaaaggtggcgcagccttagaccttaaggcttgtcctcccaagccgtaccggtggattctggacatgacgtggctcaatctggtggagctgtccaagctcccacaattcgcagagattatgaatcagatttcaagaaacgagaagggctggaagtcctggtttgataaggatgccccagaggaggaaatcattccggacgggtacaatgacagcctggatacatgccacaagttacttctgatccgcagttggtgtcctgaccggactgtctttcaggccagaaaatacatcgccgattctctcgaggagaagtataccgaacctgtcatcttaaacctggaaaaaacctgggaagaaagcgataccagaacccccttaatctgctttttgagcatgggcagcgacccaaccaatcagattgacgcactggcgaaaaaactgaaactggaatgtcgcacaattagtatgggtcaggggcaggaggtgcacgcacgtaagcttatccagatgtctatgcaacaggtttgcgacaagcgtctattactgcttcaacattattgctag

SEQ ID NO: 221447 - DNA, 13461 bp, synthetic construct
  misc_feature 1..13461: note = Description of Artificial Sequence: Synthetic coding sequence
  source 1..13461: mol_type = other DNA
atgcgtcttgccgaagaaagagcagcactggcggctgaaaacgctgacggggaaccgggagccgaccgacgactgcgattgctaggcacgtacgtcgcgatgtctctccggcctgcggcaggagcctgggagcgttgcgccggatccgccgaggcagaacagctgctccaggcttttctgggccgagacgctgcagagggcccacgcccactactggttgtaaggcccggaccacgcggtcttgcaattagaccaggcttggaagtcggacccgagtctggactggccggagctaaggccctatttttcttaagaaccggccctgaaccgccaggtcctgattcgtttagaggtgcggtggtttgtggggacttacctgcagcacctctggaacacttggctgctttattttctgaagtcgtactccctgttctggcaaatgagaaaaatcgcctgaactggcctcatatgatctgtgaggacgtgcgccgacatgcacacagtctgcaatgtgacctatcagtgattctggaacaggtgaaggggaaaacactgctccctctgcctgccggttctgagaaaatggagttcgcggattccaagtctgagactgttttagactcaatcgacaaatcagtaatctacgccatcgagtccgccgtgatcaagtggtcctaccaagtgcaagtggtgctcaaaagggagtctagccagcccctgttgcagggggaaaatcctacaccaaaagtggagcttgaattttggaagtccaggtacgaagacttgaaatacatctacaaccagctccgcactattacagtgcgcggaatggccaaactcctggacaagctgcagagttcttacttccctgcatttaaggctatgtacagggatgtcgttgctgccctggcggaagcacaggatattcacgtgcatctgatccctctacaacgacatctggaggcactggagaatgctgagttccccgaggtgaagccacagcttaggcccctgctacacgttgtgtgcctgatctgggcaacctgtaaaagttaccgttctccaggaaggctcaccgtgcttctgcaggagatctgcaatctgctgatacaacaggctagcaattacctgtctcccgaggatctcctgaggagcgaggtagaggaatctcaaaggaagctgcaggtcgtgtccgatacactgagtttcttcaagcaagaattccaggatcgccgagaaaatttgcatacctacttcaaagagaaccaagaggtgaaggagtgggactttcaatctagcctggtcttcgtacggttagatggatttctgggacagttacatgtggtggagggcctactcaagaccgcacttgacttccacaaactggggaaggtggaattctccggtgtgcgagggaacgcacttagccagcaggtccagcaaatgcacgaggaattccaggagatgtatcgcctcttatccgggagttccagcgattgcctgtacctccagtctactgacttcgagaatgatgtctctgagtttaatcagaaagtggaagatctcgacagaagactcggcactatcttcatccaagccttcgacgatgcccctggtcttgagcatgctttcaaactactggacattgccggaaacctcttagagcggccactggtcgccagggacacttctgataagtacctcgtgttgatccagatgttcaataaggatctggatgccgtgcgcatgatttattcacagcacgtgcaagaggaagctgagctgggtttctctccagttcataagaacatgcctaccgtggctggaggcttgcgctgggcccaagaactccggcaaagaattcagggcccattctctaacttcgggaggattacccacccttgcatggaatccgcggaggggaaaaggatgcaacagaaatacgaagacatgctgtctcttcttgagaagtacgagactagactctatgaggactggtgtagaactgtgtctgagaaaagtcaatacaatctttcccagcccctcctgaaaagagaccctgaaactaaggaaattacgattaacttcaacccacagctgattagcgtgttgaaggaaatgtcctacctggagcctcgggagatgaagcacatgcctgaaacagcagcggcaatgtttagctctagggacttctaccgacagctggttgctaatctagagctcatggcaaactggtacaacaaagtgatgaagaccctgctggaggttgagtttcctttggtagaagaggaactgcagaatattgatctgcgactaagagcggcagaagagactttgaactggaagacagagggcatatgtgattatgtgactgagataacctcctctatacacgacctggagcagcggatccaaaagacaaaggataacgtggaagaaattcagaacattatgaagacttgggtgaccccaattttcaagactaaggacggcaagagggagtcactgctgagcctcgacgaccgccacgataggatggaaaaatattataatctgatcaaggaatcagggcttaagattcacgcacttgtccaggagaatctgggcctgttttccgccgatcccacaagtaatatctggaaaacatacgtgaattctatagacaacttgctgctgaacggatttttcctagccattgaatgctccctcaagtacttattggagaacactgagtgtaaagctggccttacccccatctttgaggcccagctttcccttgccattccagagctagtgttctatccaagtctcgagagtggcgtcaaagggggattctgtgacattgtcgagggccttattacatccatcttcaggatccctagtctggtcccccgactgtcaccacagaatggatccccccactaccaagttgatctcgacggcattcctgatctggccaacatgagacgaaccctgatggaacgcgtgcaaagaatgatgggactttgctgtgggtatcaatccacatttagtcagtattcatacttatatgtggaggaccggaaagaagtactgggccaatttcttctctatggtcacattctgaccccggaggagatcgaggatcacgtagaagatggaatccctgaaaatccgccactcctgtcacagttcaaggtgcagatcgattcatacgagaccctctatgaggaagtgtgcaggctggagccaattaaagtctttgatggttggatgaaaattgacatcagaccattcaaggcctccctcttaaatattattaagagatggtcactgctgtttaagcagcacctggtcgaccatgtgactcactctttggctaatctcgacgctttcataaaaaaatccgaatccggactgctgaaaaaagtcgaaaagggggatttccaggggctggtggaaatcatgggccacctaatggcagtgaaagaaaggcagtccaacacagacgaaatgtttgaacctttgaagcaaacaatagagttactgaaaacatatgagcaagagctccctgagaccgtatttaagcagctcgaagagctacccgagaaatggaataatatcaaaaaagtcgccattacagtgaagcagcaagttgctccccttcaggctaacgaggtaaccctgcttcggcaacgttgcaccgcattcgatgctgaacagcagcagttctgggagcagttccacaaagaagctccttttagatttgatagtatccatccacatcaaatgctcgacgccaggcatattgagatccagcagatggagagtaccatggcttccataagtgagtccgccagcctgttcgaagtgaatgtgcccgattacaagcagctgaggcaatgtcgcaaagaagtgtgtcagttgaaggaactttgggacactatcgggatggtaacctcgtctatccatgcttgggaaaccactccttggagaaatattaacgtagaggctatggagctggagtgcaagcaatttgcgcgacacatcagaaaccttgataaggaggttcgcgcatgggacgctttcaccggattggagagtacagtgtggaacactttgagctctcttcgtgccgtggctgagttacaaaaccccgcaataagggagagacattggagacagcttatgcaggccaccggcgtctctttcactatggaccaggataccaccctcgcccacctactgcagctgcagctgcatcactacgaggatgaggtgagggggattgtcgataaagctgccaaagagatggggatggagaaaactcttaaagagctgcagactacctgggctggcatggagttccaatacgagccccaccccaggactaacgtgccgctgttgtgttctgatgaagatctgattgaggtcctcgaagacaaccaggtgcaacttcaaaatctcgtcatgtctaaatacgtggccttcttcttagaagaagtatctgggtggcagaaaaagctcagcacagtagatgccgtaatcagtatttggtttgaggttcaaagaacatggactcacctggagagcatcttcacgggatccgaggacattagggcccagctacctcaagatagcaagcgattcgagggaattgatattgactttaaagaactcgcctacgatgctcagaaaattccaaacgtggttcaaactaccaacaagcccggactttatgaaaaacttgaggacatccaaggcagactgtgtctgtgcgagaaagcactggctgaataccttgatacaaaaaggctggccttcccccgtttctatttcctgagcagtagtgatctcctggacatcctctcaaatgggactgcgcctcagcaggtgcagaggcatctgtcgaagctttttgataatatggccaagatgaggttccagctggatgccagcggagagcctaccaaaacatcccttgggatgtacagcaaagaggaggaatacgtcgctttcagcgagccgtgcgactgttcaggacaggtcgagatttggctaaatcatgtgttaggccatatgaaggcaactgtccgccacgagatgactgagggagtgacagcctacgaggaaaaaccgcgagagcagtggttgtttgatcatcccgctcaggtggccctcacatgtacccagatctggtggaccaccgaggtggggatggcttttgccaggctggaggaaggatatgagagcgcaatgaaagattattataagaagcaggtggcacagttgaagactttaataacaatgctcatcggccagctgtctaaaggagaccggcagaaaatcatgacaatctgcactatcgatgtgcacgcacgagacgtcgtagccaagatgatagcccagaaagtagataatgcacaagcctttctatggcttagtcagctccgccatagatgggacgacgaagtgaagcactgtttcgccaatatttgcgatgcacaattcctttattcttacgaatatttgggaaacaccccaaggctcgtaattactccactgacggacaggtgctacatcactttgacacagagcttgcacctcaccatgtcaggtgcccctgccggtccggcaggtacaggaaagactgaaacgacgaaagatctgggcagggcattaggtatcctggtttacgtgtttaattgctccgagcaaatggattataagagttgtggaaacatctacaaaggcctggcccaaaccggagcgtggggatgctttgacgaattcaacagaataagtgtggaagtactttcagtcgttgctgtccaggtcaaatctatacaagacgccatacgcgacaaaaaacagtggttttctttcctgggcgaggagatcagcctgaatcccagtgtgggcatttttattaccatgaaccccggatacgccggacgcaccgagctgcccgagaatctaaagtcgctgtttcgcccttgcgccatggtggtccccgacttcgaactcatttgtgagattatgctcgtcgccgagggcttcattgaagctcagtccctggcccgaaagttcattacgctgtatcaactgtgtaaggagctgctgtctaagcaggaccattatgactgggggctgcgtgccataaagagcgttctcgtggtggcgggtagcttgaaacggggagatccagacagacccgaggaccaagtgctgatgaggtcacttagagacttcaacattcccaaaatcgtgactgacgacatgccaatctttatgggattgatcggggaccttttcccggctctggacgtacctcgacgccgagatcctaatttcgaggcactggtgcgtaaagcaatcgtcgacctgaaactccaagcagaggataacttcgtcttgaaagtggttcaactcgaggaattgctggccgttcggcacagcgtattcgtcgtaggaggagccggaactgggaaatctcaggtcctgaggagtctgcacaagacatatcaaataatgaagcgaagacccgtgtggacggacctgaatcccaaggcagttactaatgatgagctgtttgggatcattaaccccgctacaggcgagtggaaggatggactgttttcaagcatcatgcgagagctagccaacatcactcacgacgggccaaaatggattttgctcgacggcgacatagatcccatgtggattgagtcactcaacacggtgatggatgataacaaggttttgacactggcttccaatgagaggattccattgaatcctactatgaaactgctgtttgaaatctcgcatctgagaacagctaccccagctacggtgtcacgcgctggtatcctgtacatcaaccctgccgacctggggtggaaccctccagtctctagttggatcgaaaaaagagagatccagacagagcgcgctaacctgacaatactattcgataagtatctccccacatgcctcgatacactgagaaccagattcaaaaaaatcatccccattcctgagcagagcatggtacagatggtctgtcatctcctagaatgcttactcacaacggaagatatccctgctgactgtccaaaggaaatctatgagcactacttcgtattcgctgcaatctgggcatttggcggagcgatggtgcaggaccagctggtcgactacagagcagaattctctaaatggtggcttaccgaattcaagactgttaagtttccttcacaggggacaatcttcgattattacattgatcccgaaaccaagaagttcgagccctggagcaaactcgttccacagttcgaattcgatcctgagatgccccttcaggcctgtctggtgcacacaagtgaaaccattcgcgtctgctacttcatggaaaggttgatggccagacagagaccagttatgctggtgggaacagccggtacggggaagagcgtgctcgtgggtgccaagcttgcttctcttgatcctgaagcctatcttgtaaagaacgttccctttaattactacacaaccagcgccatgcttcaggccgtgcttgagaagcctctggaaaaaaaagccggacggaactacggccctcctggaaataaaaagctgatctatttcatagatgacatgaacatgccagaggttgacgcctatgggacagtgcaaccccacaccatcattcggcagcatctggactacggtcattggtatgacaggagcaagctgagtctgaaggaaattaccaatgtccagtacgtgagctgcatgaatcccacggccggaagctttacgatcaacccacgcctgcagcgacacttctccgtattcgttctgagtttcccaggcgcagacgctcttagttctatttatagcataatattgacacagcatcttaagttgggaaatttccccgcttcactccagaaatcaataccacctctgatcgatttggcgctggcctttcaccagaaaatcgccacaacattcctgccaactggcattaaatttcactatatctttaatctgagggattttgccaatatattccagggcatcctgttcagtagcgtcgaatgtgtgaagagcacctgggatcttataaggctctatctgcacgagtcaaatcgggtgtatagagataagatggtggaagaaaaggatttcgatctgttcgacaaaatacagaccgaggttttgaagaaaaccttcgatgatattgaggatccagtagagcagacacagtcacctaatctgtactgccactttgctaacggaatcggagagccaaagtacatgcctgtgcagagttgggagctgctgacacagacactggtcgaagccctcgaaaaccacaacgaagtgaatacagtcatggatttggtgctgttcgaggacgcgatgcgtcacgtgtgtcatatcaatcgtatcctggagagtcctcgtgggaacgccctgctcgtgggagttggaggctctggcaaacagagtttaaccaggcttgctgccttcatcagctccatggacgttttccagattaccctgcggaaagggtaccagatccaggatttcaagatggatctcgcatcactctgtctcaaagccggagtgaagaatctcaacacagtctttctgatgactgatgctcaggtcgctgatgaaagatttctggtcctgatcaatgatctgctggcctccggcgagatcccagatctttattctgatgacgaggtggaaaacattattagtaacgtacggaacgaagtgaaatcccaggggctcgtggacaatcgggaaaactgttggaaattctttatcgataggattaggcgccagctaaaggtgacactgtgttttagtcccgtgggcaataagctgcgtgttcgttctcgcaagttccccgctatagtgaactgcacggcgattcactggtttcacgaatggccacagcaggcccttgagtcagtgtccttgaggttcctgcagaacaccgaggggatcgagcctaccgtgaagcaaagcatctccaaatttatggccttcgttcatacgtccgtgaaccagaccagccagagctatctgtctaatgagcagaggtacaattatacaactcctaagagtttcttagagttcattagactgtaccagagcttactacatcggcatcggaaagaactgaagtgcaaaaccgaaagactcgagaatgggctgttaaagttgcatagcacctccgctcaagtcgatgacctgaaggccaaactggctgcccaggaggtggagctgaagcagaagaacgaggacgcagataagctgatccaggtggtgggtgtggagaccgataaagtcagccgggaaaaggctatggcagatgaggaagaacagaaggttgccgtgatcatgctcgaggttaagcagaagcagaaggactgcgaggaagatctcgccaaggccgagcctgcattaacagccgctcaggcagctctcaatacccttaataaaaccaacctgactgagttaaagtcatttggatctccgcctcttgccgtcagtaatgtctccgctgcggtcatggtcctgatggctcccagaggcagagtgcctaaagatagatcgtggaaagccgctaaagtaacaatggcaaaggtcgacggatttctggattcacttattaactttaataaagagaatatccacgaaaattgtctgaaagcaatccgaccttaccttcaggacccagaattcaaccctgaattcgtcgcaaccaaatcatacgccgcagccggattgtgcagttgggtcatcaacattgtgcgattttatgaagttttctgtgatgttgaacctaagcgtcaggcactgaataaagcaaccgcagatttaactgccgcacaggaaaagctggcagctatcaaagctaagatcgcccatctgaatgagaatcttgctaagctgacagctcggttcgaaaaggccacagccgataaacttaagtgccagcaagaagcagaggtgacggcagtgactatctccttagcgaaccgactcgtcggcggactcgccagcgaaaacgtgcggtgggccgacgccgttcaaaacttcaagcagcaagaaaggactctttgcggggatatccttctgatcactgcatttatctcatacctaggattttttaccaagaagtatagacagtcacttctggaccgaacatggcgtccataccttagccaattaaaaacgcctattccagtcacaccggcactcgacccacttcggatgcttatggacgacgccgatgtggccgcatggcagaacgaaggcctgcccgcagataggatgtctgtcgagaacgctacgatcttgatcaattgtgaaagatggcctctgatggtagatccacagctccaaggtataaaatggatcaagaacaagtatggagaagatctgagggtcacacaaattggacagaaaggctatctacagatcattgagcaagccctcgaagcaggtgccgtggtcttaattgagaacttggaggaatccattgatcctgtgcttgggcctctgctcggcagagaggtcataaaaaaaggaagattcattaaaatcggagataaggagtgcgagtacaatcccaagttcagactgatcctccacaccaagctggcgaacccccattatcaaccagagttacaagctcaggccaccttaataaacttcactgtgacgcgcgacgggcttgaagaccagctgctggccgcagtcgtgtcaatggagcggcctgatctggaacaactgaaatccgacctgactaagcagcagaatgggttcaaaattactttaaagaccctcgaagattctctgctttcgcggctgtcctcggctagtggaaattttctcggagagacggttctcgtcgagaacctcgaaatcacaaagcagacggccgctgaggtggagaaaaaagtacaggaggccaaggtgaccgaggtcaagataaacgaagcccgagaacactacaggcccgctgcagctagggcttccttgctgtacttcataatgaatgacctttcaaaaattcatccgatgtaccagttctctctcaaagccttttcaatagtctttcagaaagccgtggaaagggctgcccctgatgaatctttgagagaaagagttgcaaaccttatagactctattaccttcagcgtctaccagtatacaatcagaggtctgttcgagtgtgacaagttgacctatctcgcccaactgacctttcagatactgttgatgaatcgggaggtgaatgccgtcgagctagactttcttctcagaagtcctgtgcagactgggaccgctagccccgtggaatttctgagtcatcaggcctggggtgccgttaaagtactctctagcatggaggaatttagcaatctagatcgcgacatcgagggatccgccaaatcgtggaaaaagttcgtcgagtccgagtgccctgaaaaagaaaaactcccacaggaatggaagaataaaacagcccttcagcgactgtgcatgttgcgggctatgcgtcctgacagaatgacttacgccctgcgtgacttcgttgaggagaagcttggctcaaagtatgtcgtaggacgcgctcttgatttcgccaccagctttgaagagagcggacctgcaactccaatgttcttcatactgtcacctggagtggaccctctgaaggatgtggagagccagggacgcaagctcggctacaccttcaataaccagaatttccataacgtttcgttgggacagggacaggaagtggtggccgaggcggcactcgatctcgctgcaaaaaaggggcattgggtcattctgcaaaacattcacctggttgcaaaatggctgagtacccttgaaaaaaagctggaggaacacagtgagaattcccatcccgagtttagggtgtttatgtccgctgaaccggctccctcccccgaagggcacatcatccctcaggggatcctggagaacagcatcaaaatcaccaatgaacccccaacaggtatgcacgccaatctccacaaggcactcgacaacttcactcaggatactttagagatgtgctccagagaaactgaattcaagagcatcctatttgccctgtgctactttcacgcagtggttgccgaacggaggaagtttggtcctcaggggtggaatcgatcttatcctttcaacaccggggatctgactatctcagtcaacgtgctttacaacttccttgaagctaatgccaaggtgccgtacgacgatttaaggtacttattcggcgaaattatgtacggcggacacattactgatgattgggacagaaggctgtgtcgcacctacttaggggagtttataagaccagagatgttggagggcgaactgtcactagctccaggctttcccctaccagggaatatggattataacggctaccaccagtacattgacgctgagttgccacccgagtctccatatctctatggactccaccccaacgctgagattggattcctgacccagacatccgaaaagctgttcaggacagtgcttgagctgcagcctcgggacagccaggcccgtgacggtgcaggtgccacacgggaggagaaggtgaaggccctcctggaagagatcctcgagagagtcacagatgagtttaacattccagagcttatggccaaagttgaagagcgtaccccttacattgtggtggcattccaagagtgcggaaggatgaacattcttacacgcgaaatccagaggtcccttcgagaactcgagcttggtctcaaaggcgagttgaccatgaccagtcacatggagaaccttcagaacgcactctattttgacatggttcctgaatcatgggcgcgaagagcctacccgagcaccgctggactggccgcatggttcccagatttactgaatcggattaaggagctggaagcctggacgggggacttcactatgccgtctacagtctggctgactggattttttaaccctcagagctttctaacagctatcatgcagagcacagccagaaagaacgagtggcctctggaccagatggctctgcagtgcgatatgacgaagaagaatagggaagagtttcggagcccaccacgggaaggcgcatatatccacgggctttttatggagggagcctgttgggacacccaggcgggaatcattaccgaggccaaactgaaagatctcaccccaccaatgccagttatgttcatcaaagctattcccgcagacaagcaggattgccgctccgtgtactcatgccctgtatacaaaaccagccagagaggtccgacatacgtctggactttcaatctaaagacaaaggagaacccttcaaaatgggtgctggccggagtggccttactgcttcagatttag

SEQ ID NO: 221448 - DNA, 1002 bp, synthetic construct
  misc_feature 1..1002: note = Description of Artificial Sequence: Synthetic coding sequence
  source 1..1002: mol_type = other DNA
atgaaggactttgtcctaggacgcgacaaggtccaggaagccaaggtgacagaagtcaagataaatgaagctcgcgagcattatcgcccagccgcagcaagggctagcctgctgtactttattatgaatgatctctcaaaaatccacccgatgtatcagttcagcctgaaagcattctccatcgtgttccagaaggccgtagaacgagccgcacccgacgagtctttacgcgaacgggtcgcaaatctgatagactcgattactttttcagtataccagtacacgatcaggggactctttgagtgcgataaacttacttatctggctcaactgacctttcagattctgcttatgaacagggaggtgaacgcggtggaactcgatttcttgctgcggtctccagtccaaactggaactgcctccccagtggaattcctgagtcatcaggcgtggggcgcagttaaggtgctttcgtctatggaagaattttccaacctagatagggatatcgagggcagcgcaaagtcctggaaaaagttcgtggaatctgaatgcccggaaaaagagaagcttcctcaggaatggaagaataaaaccgctctgcagcgactgtgcatgttgagagccatgcgcccagatagaatgacttacgccctccgggacttcgtcgaggagaagctggggtcaaaatacgtcgtcggacgggcactcgattttgccacgtctttcgaagaatcgggccctgcgacacccatgttctttatcttgtccccaggagttgaccctttgaaggacgtggaaagccaggggaggaagctcggctatacattcaacaaccagaactttcataatgttagcctggggcagggccaggaggtcgttgcggaagccgctctagacctggccgcaaaaaaaggccactgggtgattctgcaagttaagagatgctcattcttcacattttatcaccctgcccactgtcttgagcattcaagacactag

SEQ ID NO: 221449 - DNA, 2397 bp, synthetic construct
  misc_feature 1..2397: note = Description of Artificial Sequence: Synthetic coding sequence
  source 1..2397: mol_type = other DNA
atgaacgatctcagcaaaatccaccccatgtaccagtttagtctgaaagccttttctatagtcttccagaaagccgtggagcgggctgcacccgatgaatctctcagagaacgcgtggctaatctaatcgacagcatcacgttttcagtgtaccagtatactatccgaggtctgtttgagtgcgataagctcacttatctagcccagctgacttttcagatattgttgatgaacagagaggtgaacgctgtagagctggatttcctgctccggtcgccagtgcagacgggtaccgcgtcccccgtcgaatttctgtcacatcaggcgtggggggcagttaaggttttgtcgagcatggaagaattctcgaatctagaccgggatattgagggctctgccaaatcttggaaaaaatttgtcgagagcgaatgtcctgaaaaagagaagctccctcaggagtggaagaacaagaccgccctgcaacgcctgtgtatgcttagggctatgaggccagatagaatgacatacgctttgagggactttgtggaggaaaagttgggatcaaagtacgtggtggggcgagcgttggactttgccacatcttttgaggagagcggccctgctactcctatgttctttatcctgagtcccggtgtggatccattgaaggacgttgagtctcagggccgaaaacttggatacacttttaacaatcaaaacttccataatgtgtctttagggcagggccaggaggtggtggccgaagcagctctcgatttggccgcaaaaaaaggacattgggtgatccttcagaatattcacctggtcgccaagtggttgagtaccctggaaaaaaagttagaggaacactccgagaactcacatcccgagtttagggtcttcatgtcagcagagcctgctccttcaccagaaggccacatcatcccccagggaatcctggaaaactctattaagattacgaatgagccacctacgggaatgcatgctaatcttcacaaggccctggacaactttacccaagacactctggaaatgtgcagtagggaaaccgaattcaaatccatcctgttcgcactgtgctatttccatgccgtcgtcgccgagaggcgcaaatttggccctcagggttggaatcgttcctacccattcaacacaggcgacctgacaattagcgttaatgttttgtacaacttcctagaggcgaacgcaaaggtcccttacgacgacctgagatacctcttcggggaaataatgtacgggggtcatattaccgacgattgggaccgtaggctgtgtagaacctacctcggtgaattcattcgccctgaaatgctggaaggagaactgtcgctggcgccaggattccccctgccagggaatatggactacaacgggtatcatcagtatattgatgccgaactgccacccgagagcccctatctttacggtttgcatccgaatgcagagattggattcctgactcagaccagcgaaaagttattccgcacagtactggagctccaacctcgggacagccaagcgagggatggggcaggtgccactagggaggaaaaagtaaaggccttgctagaagagattttagaaagagtgactgatgagtttaatatccccgagcttatggccaaggtggaggagcggactccctacatcgtggtggctttccaggagtgtggccgaatgaacattctcacacgcgaaattcaacgatccctgcgagagctcgagctcggtttaaagggtgaactaacaatgacctcacacatggaaaatctgcagaacgcgctgtacttcgatatggtacccgagtcatgggcacggagggcctaccccagtacagcgggtctcgctgcatggtttccggatttgcttaatagaattaaggaattagaggcatggaccggagattttaccatgcctagcacagtatggctaaccggattctttaacccccaaagctttctcacagccatcatgcagtcaacagcaagaaagaacgagtggcccctcgaccagatggcactccagtgtgacatgacaaagaagaatcgtgaagagtttcgttctcctccacgggagggcgcttacattcacggactttttatggaaggcgcatgttgggacacacaggccggtattatcaccgaggctaagttgaaagacctcacccctcccatgcccgtgatgtttattaaggctatacccgcagataagcaggactgtagatccgtctattcatgccccgtgtataagacatctcagcggggacccacgtacgtgtggacttttaacctcaagacaaaagaaaatccctctaagtgggtcctggcaggcgtagccctgcttctgcaaatttag

SEQ ID NO: 221450 - DNA, 8978 bp, synthetic construct
  misc_feature 1..8978: note = Description of Artificial Sequence: Synthetic coding sequence
  source 1..8978: mol_type = other DNA
gaggtccgcggaatcgtcgataaggctgctaaagagatgggaatggagaagacgctgaaggagctgcagactacatgggctggcatggagtttcagtacgagccccacccccgaaccaacgtcccacttttgtgctcagacgaagaccttatcgaggtgctggaagataatcaggttcagttgcagaatctcgtcatgagtaagtacgtggctttctttctggaagaagtgagtggttggcaaaagaagctgagcacagtggacgctgtaatctctatttggtttgaggtgcaacgaacttggacccatctcgagagcattttcaccggatcggaggacatccgcgcacagttgccacaggacagcaagagatttgaaggcatcgacatcgactttaaagaacttgcctacgacgcgcaaaaaatcccgaatgttgtacagacaaccaataagcccggtctgtatgaaaaactggaagacatccaggggcgtttgtgtctgtgtgagaaggcactggccgagtacctggacacaaaacggctggcgttccctcgattttacttcctgtcctcttcggatctgttggacattctctctaatggcaccgctccacagcaagttcagagacatctctccaagctgttcgacaatatggccaaaatgaggtttcagctcgacgcatctggagaaccgacaaaaacttccttggggatgtactcgaaggaggaagaatacgtcgcgttctctgagccttgcgactgctctggtcaggtcgagatttggttgaaccacgtcctgggtcatatgaaggctaccgtcaggcatgaaatgactgagggcgtgacggcttatgaggaaaagccccgagaacagtggctgtttgatcacccggcacaagtggccttaacctgtactcagatctggtggaccaccgaggtgggtatggcgtttgcacggctggaggagggttatgagagcgctatgaaggactattataagaagcaggtggcccagttgaaaacactgatcactatgctcattggacagttgtcaaagggagaccgacagaagattatgacgatctgtacgattgatgtccacgccagagatgtcgtcgcgaagatgatcgcccagaaggtcgacaacgcccaagccttcctctggctgtctcaactaagacaccggtgggatgacgaggtgaaacactgcttcgccaacatctgtgatgctcagtttctttacagctatgagtatttgggcaacacccccaggctagtgatcactcccctaacagatcgctgctatatcaccctcacccagtccctacatcttaccatgagcggcgctcccgcagggccagcaggtacgggaaaaaccgaaaccacaaaggacctgggcagggctctcggtattcttgtgtatgtcttcaattgtagcgaacaaatggactacaagagttgtgggaatatatacaaaggactggctcagactggggcatgggggtgttttgatgaattcaatcggatttctgtggaagtgctcagtgttgtcgcagtacaggttaagtcaatccaagatgccataagggataaaaagcagtggtttagctttctgggcgaagagatttcccttaacccttccgtggggatatttattacaatgaatcccggttacgcaggaagaaccgaactgccagaaaacctgaaatccctgttccggccatgtgccatggtggtgccggattttgagttaatctgcgagatcatgctggtagctgagggattcattgaggcccagtctctcgcaaggaaatttattacactataccagctatgtaaggagctgttgtcaaaacaggaccactatgattggggtctgcgagccattaagtccgtgttagtagtcgcgggatccttaaaacgaggcgatccagatcgcccagaagaccaggtgctaatgaggtccctccgggactttaatattcccaagattgtgacagatgacatgcccattttcatgggcctaattggagatctgttccctgctctagatgtcccacgaaggagagatccgaatttcgaagcactcgtccgcaaagctattgtggacctgaaactgcaggcagaggacaattttgtgctgaaagtcgtgcagctggaagaactgctcgccgtacgacattccgtgttcgtagttggaggagcagggactgggaaatctcaggtgttaagaagcttgcacaagacttaccagattatgaagaggaggcccgtttggaccgatcttaatcctaaggccgtcaccaatgacgagctgttcggcattataaacccggcaacaggcgagtggaaggatggcctttttagctctattatgcgagagttagccaacattacgcacgatgggccaaaatggatactgctggacggggatatcgacccaatgtggattgagagcctcaatacggtgatggatgataataaagtgctgactctcgcctcaaatgaacgtataccattaaaccctacaatgaagttgctgttcgagatttcccatctacgtacggccactcctgctacagtctcgcgcgctggcattttgtatatcaacccagcagatctaggatggaaccctcccgtgagcagctggattgaaaagcgagagatccaaacagagagggccaatctgactatcctgtttgacaaatatctgccgacctgccttgacacccttcggacaaggtttaaaaaaatcatccctataccagagcagagcatggtccaaatggtgtgccatctgttggagtgtttgctgaccactgaagacattcctgccgactgtccgaaagagatatatgaacactattttgtgttcgcagcaatttgggcctttggaggggctatggtgcaagaccagttggtggactatcgcgctgagttttcaaagtggtggctcaccgagtttaaaaccgtcaagttccctagccaggggacaatcttcgactattacatcgaccccgaaacaaagaaatttgagccttggtctaagctggtaccccagtttgagttcgatcctgagatgcctttacaagcctgtcttgttcatacctctgaaaccatccgggtgtgctattttatggagcgcttgatggctcgtcagcgaccagtgatgttggtggggacggccggaaccgggaaatccgttctcgtgggagcaaaactcgcctctctggacccagaggcatacctggtcaaaaacgtgccgttcaattattacaccacctctgccatgcttcaggccgtcttggagaagcctctggaaaagaaggccggacgcaactatggccctccaggaaataagaaactgatttacttcattgatgatatgaacatgcccgaagtggacgcctacgggaccgtgcagccccacaccattatcaggcaacacttagattatggccattggtatgatagaagcaaactgagtctgaaagagatcactaatgtccagtacgttagctgtatgaacccaaccgccggatcattcacgataaatccacgattacaacgacatttctctgtgtttgtgctgtccttccccggagcggacgcgctgtccagcatctactccattatacttacccagcaccttaagctgggtaattttccagcatcacttcagaaatcaatcccacctctgatagacctagctctcgccttccaccaaaagatagccacaacattcttgccaaccggcattaagtttcactatatcttcaacctgcgggattttgcaaacattttccaaggcatcctcttcagctcggtggaatgcgtcaagtccacgtgggatctgattcggctgtatctacatgagtctaaccgtgtttatagggacaagatggttgaggaaaaggatttcgacctgtttgacaaaatccagacagaggtgctgaagaaaacatttgacgatatcgaggacccagtggagcagacgcagtcacccaacctctattgtcactttgctaacgggattggtgaacctaagtacatgcccgtccagtcttgggaattgctgacacagactctggtcgaggccctcgagaatcacaacgaagtgaacacagtgatggaccttgtgctgttcgaggatgcgatgaggcatgtatgccatattaatcggatcctggaaagtccgagaggcaatgcgctcttagtgggggtgggaggatcagggaagcagagcctgacccgcctggccgctttcattagttcaatggacgtgttccagatcacactcaggaagggctaccaaatccaagactttaaaatggatttggccagcttgtgcttgaaagctggcgtgaagaatctaaataccgttttccttatgaccgatgctcaggtggcagatgaacgatttctcgtgctcataaatgatttactagcgagcggcgaaatccccgatctgtactccgacgacgaggtggagaatattatttctaatgtccggaacgaagtcaagagtcagggccttgtggacaacagggaaaattgctggaaattcttcatcgaccggattcgaaggcagctgaaggtgacgctctgtttctcgcctgttggcaataagctgcgcgtgagaagtcgaaaatttcctgcgattgtaaactgtaccgccatccattggtttcatgagtggcctcagcaggcacttgagagtgtgagtctccggtttcttcaaaacactgaagggattgaaccgacagtcaaacagtccatatcaaagttcatggcctttgtgcacaccagcgtgaaccagaccagtcagtcctacctttccaatgagcagcgatacaattacactactccaaagagctttcttgagttcattaggttgtatcagagtctactccaccgccatagaaaggagttaaagtgtaagacagagcgtctggagaatggcctcctcaaactacatagcactagcgcgcaagtcgacgacctgaaggccaagttggccgctcaggaagtggagctcaagcagaaaaacgaggatgctgataagctgattcaggtggttggtgtggaaaccgataaggtatcccgcgagaaagcaatggcggacgaggaagaacagaaagtggcagttattatgttggaagtgaagcagaaacagaaagattgcgaagaggatctggccaaggccgaacccgcactgacagccgctcaggcggcactcaacacactgaacaagaccaacctgactgagcttaagagttttggctctccacctcttgcggtgtcaaatgtgtcggcagctgtgatggtgcttatggcgcctcgaggtagggtgccaaaggacagaagctggaaggccgcaaaggtgaccatggcaaaggtggacggcttcttggacagccttatcaatttcaataaagagaacattcatgaaaattgcctcaaggccatacggccatacctccaggatcccgagttcaaccctgagttcgtcgcaaccaagtcctacgccgctgcaggtctttgcagttgggtcataaatatcgtgcgcttctatgaggttttctgcgacgtggagcctaaaagacaggccctgaataaggccacagccgacctcacagctgcgcaggagaagctggctgccatcaaagcaaaaattgcacacctgaatgaaaatctcgctaaattaaccgctaggttcgaaaaagccacggcagacaaactgaaatgtcagcaagaggcagaagtaaccgccgtgaccatctccttggccaatcggctggttggtggcctcgctagtgaaaatgtacggtgggcagatgccgtccagaactttaaacagcaggaacgaaccctgtgtggagatatcctgctcattaccgccttcatttcttacctgggttttttcaccaagaaatatcggcagtccctcctggatcgaacctggcgcccatacctgtctcaacttaagacccctattccagtaacacctgccctggacccactgagaatgttaatggatgatgccgacgtagctgcatggcaaaacgagggcctccccgcagatcggatgtcagtcgaaaacgccactatcctgatcaactgcgagagatggcccttgatggttgatccacaactgcagggcattaagtggatcaagaataaatacggcgaagaccttagagtgacccagatcggacagaaagggtatctgcagattatcgagcaggcattggaggctggcgctgtggttctcatcgagaatctcgaggaatccatcgatccagtactggggcctctcctcggcagagaggtcatcaagaaaggcagatttatcaaaattggagataaggaatgcgagtacaatccaaagtttcgcttgatccttcacacaaagcttgcaaaccctcattatcagccagaattacaggctcaggcaacccttatcaacttcactgtaaccagagatggcctcgaggaccaattgctcgccgctgtggtgtcaatggaacggcctgatctggagcagttaaagagtgacctgaccaaacagcagaatggcttcaaaatcacactgaaaacattagaggattcactgctttccaggctgagtagtgcttctggaaattttctgggcgaaaccgtcttggtggagaatctcgaaatcacaaagcagacggctgctgaagtcgagaagaaggtgcaggaagccaaggtgactgaggtgaaaattaatgaagccagagaacactaccgaccggcagccgctagggccagtctgttgtactttatcatgaatgacctcagtaagattcacccaatgtatcaattttcgttaaaggcgttctccatcgtgttccagaaggcagtcgagagggccgctccagatgagagcttgcgggagagggttgctaacttgattgatagcatcaccttttccgtttaccagtacactattcgtggactcttcgagtgcgataaactcacttacttagcccagctcactttccaaatactgttgatgaaccgagaagtgaacgctgtcgagctggacttcttactacgcagccctgttcagactggcaccgcgtcgcccgtggaattcttaagtcatcaagcctggggggcagtcaaagtgctctcgtctatggaagagttttcaaaccttgaccgggatatagagggttcagccaagagttggaaaaagttcgtggagtcagagtgccctgaaaaagagaagctgccccaggagtggaagaataaaaccgctctgcaaagactgtgtatgctgcgggctatgcgcccagatcggatgacatacgcactgagagatttcgtggaagagaaattagggagtaaatacgtagtgggaagggctctggattttgccaccagctttgaggagtccggtcccgcaactcccatgttctttatcctgagccccggagtggaccctctgaaggacgtagagagtcaggggaggaaactcggatataccttcaacaatcagaacttccacaacgtgtctttaggccagggccaggaggtagtggcagaagcagctcttgacctggcagcaaaaaaaggccattgggtaatcctccaggatacactcgagatgtgctcacgagagactgaatttaaatccattcttttcgccctgtgttattttcatgccgtggtcgcagaacgtaggaaattcggaccccaaggttggaatagaagctacccatttaacacaggcgaccttaccatttctgttaacgtgctgtataactttctagaagcaaacgcaaaggtgccctacgatgacctccggtaccttttcggggaaattatgtatgggggtcacataacggatgactgggaccgacgcttgtgccgaacctatctgggggaattcatcaggcccgagatgctggagggcgagctcagcctggcacctgggttccccctgcctggtaatatggactacaatgggtaccaccagtatatcgatgctgagttgccaccagagtccccatacctgtacggtctgcatccgaacgccgaaatcggcttcctgacacagaccagcgagaaattgttcagaaccgttttagagctgcaacctcgggacagccaggctcgtgatggggctggagctacacgggaggagaaggttaaagctttattagaggagatcctggaaagagtcaccgatgagttcaacattcccgagctgatggcaaaagtggaagagcggacaccttacatcgttgtagcctttcaagagtgtggcaggatgaatatcctaactagagagatacagagaagtttaagggaacttgagttggggctgaagggagaactcaccatgacctcccatatggagaatctgcagaatgcgttatatttcgacatggttcctgagtcctgggccagacgggcatatccctccacagcaggcctagcagcctggttccctgatctgctaaaccggattaaggaacttgaagcctggaccggtgacttcactatgcccagcactgtgtggcttactggcttctttaacccccaatccttccttacagctataatgcagagtaccgctagaaagaacgaatggcccctggatcagatggcgctgcagtgcgacatgactaaaaaaaatagggaggaattccgatcgccacccagagaaggagcgtacatacacggcctatttatggaaggcgcatgctgggacacgcaggctggaatcatcactgaagctaaactcaaagaccttaccccccctatgccggttatgttcatcaaggccatacccgctgataaacaagactgccgcagcgtgtattcctgccccgtatataagacttcacagcgtggtccaacttacgtatggacattcaatcttaaaacaaaggaaaacccaagcaaatgggttctggcaggtgtcgcactgctcttacagattta

SEQ ID NO: 221451 - DNA, 13233 bp, synthetic construct
  misc_feature 1..13233: note = Description of Artificial Sequence: Synthetic coding sequence
  source 1..13233: mol_type = other DNA
atgaggctagcagaggaaagggcggcattggctgcagagaacgccgacggcgagcccggagccgaccggagactgaggttgctgggcacctacgtcgctatgagcttgaggccagctgcgggtgcatgggagagatgtgctggaagcgccgaggctgagcaattgttacaggcctttcttggcagagatgccgctgagggccctcgacccctgctggtcgtccgccctggccctagggggctggccataaggccagggttggaagtcgggcctgaatccggtttggcaggagccaaggcgctgtttttccttagaaccgggcctgagcccccaggacctgacagctttaggggcgctgtggtctgcggtgatttacccgctgcacctcttgagcatcttgccgctctgttctccgaagtggtacttccagtcctggctaatgagaagaataggctgaactggccacatatgatttgtgaggacgtgaggaggcacgcccacagcttgcagtgcgacctgagcgtgatcttggaacaggtgaagggcaagaccctgttacctttacccgctggatccgagaaaatggaatttgctgacagtaagagtgagacagtgctggactcaatcgacaagagtgtgatatacgctatcgaatctgccgtcattaagtggagttatcaggtgcaggttgtcttaaaaagggagagctctcagccactgcttcagggcgaaaatcctaccccgaaagtggagctcgagttttggaagtcgcggtacgaagatctgaagtatatctataaccagctgcggaccatcaccgtgcgcggtatggccaaactgctggataaacttcagtcatcatatttccccgctttcaaggcaatgtaccgcgatgtcgtggcggctctcgccgaggcccaggatattcatgtccatctcataccactccagcgccacttagaggcgctggaaaacgcagagttccctgaggtaaagccccagctgaggccattacttcatgtcgtgtgcctcatttgggccacttgcaagtcataccgctcacctggcaggctaaccgtcctgctgcaggagatctgcaacctgttgatacaacaggcctccaattatctctcgccagaggacctgcttagaagcgaagtggaggaaagtcagcggaagctgcaggttgtgtctgacacactgtcttttttcaaacaagagttccaagacaggagagaaaaccttcatacctacttcaaggagaaccaggaggttaaggagtgggatttccaaagtagtttggtttttgtaaggctcgacggctttctgggacagcttcatgtggtggaagggctgctcaagaccgctctggacttccacaagctgggcaaggtggaattctcgggagttaggggtaatgctctcagccagcaggttcagcagatgcacgaggaatttcaggagatgtatagattattgtctggctctagcagcgattgcctttatctccagtcaacagatttcgaaaacgacgtgagcgagttcaatcaaaaggtggaagacttggatcggagactgggtaccattttcattcaggcattcgacgacgctcctgggctggagcacgcgtttaagctcctggacatcgccggtaaccttttggaaaggcccctcgtcgcgcgagacacctctgataagtacttggtgctcatccagatgttcaacaaggacctggacgccgtgcgtatgatttactcacagcacgtgcaggaagaggcagagctagggttttcaccagtgcacaaaaatatgcccaccgtcgccggtggcttgcgttgggcccaggaattacgtcaacggattcagggtccattctccaactttgggcgaattacgcacccatgcatggaatccgccgagggcaagagaatgcaacagaagtatgaggatatgctatcgttgcttgagaagtatgagactcgactgtatgaagattggtgtagaactgtctccgagaagtcgcagtacaatttgagccagcctctactcaagcgtgatcccgagaccaaagaaattactatcaatttcaatcctcagctcatttcggttctcaaggagatgagttatttggagccgagggagatgaagcacatgcctgaaactgccgctgctatgttcagctctagagacttttataggcagttggtagccaatttggagctgatggctaactggtacaacaaagtgatgaagaccctgctggaggtggagtttccgctggtagaagaagaactccagaatattgatcttaggcttagggccgcagaagagactctcaattggaagacagagggaatctgtgattacgtcaccgagatcacatctagcattcatgacctagagcagcgcattcaaaagacaaaagataatgtggaggaaattcagaacattatgaaaacatgggttaccccaatattcaagacaaaagacggcaagcgcgaaagcttgctctcattggatgatcgccacgaccggatggaaaaatattataaccttattaaggaaagtggcttaaagatacacgctctggtccaagagaacctggggctcttttctgcagacccaacctccaatatttggaagacctatgttaacagcatagataatcttctgctcaacgggttcttcctggctatcgagtgttccctgaagtacctcctggagaataccgagtgtaaggctggtttaacgcccatctttgaggctcagctctccctggcaattcctgagttggtcttctaccctagtcttgagtctggcgtgaagggtgggttctgcgatatcgtcgaagggctcatcacttctatttttagaatcccctcattggtgccgagactcagcccccagaatggctccccacactaccaggtggatctcgatggcatcccagacctggccaatatgcggagaactctgatggagcgagtccagcgcatgatggggctgtgctgcggttaccaatcaacattcagccagtattcttatctctatgtggaggaccggaaagaagtactggggcagtttttgctctacggccacatcctgacccccgaagaaatcgaggatcacgttgaggacggcattcctgagaatccacccttactttcccagtttaaggtgcaaatcgactcctatgaaactttgtacgaggaggtgtgccgcctggagcctattaaggtgttcgacggttggatgaaaatcgacatcaggcccttcaaagcctctctcctgaacattattaaacgctggtctctgttgttcaaacagcatctcgtcgaccacgtaacacacagcctcgccaaccttgacgctttcattaagaaaagcgagagcgggttgctgaagaaggtggagaaaggcgactttcagggattggtggagatcatgggtcacctgatggcagtgaaggagcgtcagtccaatacggatgagatgtttgaacccctcaaacagacaatcgagctcctgaaaacatacgaacaagagttgccggaaaccgtgttcaagcagttggaagagctgccagagaaatggaataacatcaagaaggtagccattactgtgaaacagcaggttgcaccgctgcaagctaacgaggtcacactgctgcgtcagaggtgtactgcctttgacgctgaacagcagcaattttgggagcaattccacaaggaggcacctttcaggtttgacagcatacaccctcatcaaatgctggatgcacggcatattgaaattcagcagatggagagcactatggcctcaataagcgaaagtgcatctctgtttgaagtaaacgtccccgattataagcagctgcgacagtgccggaaagaagtgtgtcagctgaaggagttgtgggacaccattggcatggtgacttcaagcatccacgcgtgggaaaccacgccttggcgcaacattaacgtggaagctatggagctcgaatgtaagcagtttgctagacatatccgcaacctggacaaagaggtgcgggcttgggacgcattcaccggcctcgagtctaccgtgtggaacacattatcaagcttaagggccgttgccgagctacaaaaccccgcaatccgggaaaggcactggagacaattgatgcaagctactggggtgagcttcaccatggaccaagacacaaccctggcgcatttactccagcttcagctgcatcactacgaggatgaagtaaggggaatcgtggataaagccgctaaagagatggggatggagaagactcttaaggagctgcagactacttgggcagggatggaattccaatatgaacctcacccacgcacgaatgtgcctctgttgtgttcagacgaggatctgatcgaagttctggaggacaatcaagtccagcttcaaaatctagtaatgagtaagtacgtggcctttttccttgaggaagtcagtgggtggcagaagaagctgagtactgtggacgccgttatctctatctggtttgaggtccagagaacgtggacccatctcgagtcaatttttaccgggagtgaggatattcgagcacagttaccacaagacagcaagcgattcgaagggatagacatagacttcaaggagctggcctatgatgcacaaaaaattccaaacgtggtgcagacaactaataagcccggactctatgaaaaactggaggatattcaaggtcgcttatgtttgtgtgaaaaagctctcgccgaatatttggatactaaaagattagcctttccccgattttacttcctctcctctagcgacctgctggacattctgagcaatgggactgctccccagcaagtacagaggcatctgtcaaagctgttcgacaacatggctaagatgaggtttcagctagatgctagcggcgagcccactaaaacctcactgggtatgtacagcaaggaggaggagtacgtggctttctcagagccctgtgactgttccggacaagtggagatctggcttaaccacgtgcttggtcacatgaaggccaccgtccgtcacgagatgaccgagggtgtgacagcctacgaggaaaaaccaagggagcagtggctatttgatcatcccgctcaagtggccttgacctgtactcagatctggtggacaacagaagtgggaatggcatttgccaggctcgaagagggctacgagtcagctatgaaagattattacaaaaaacaggtggcccaactgaaaactctcattactatgctcattggacagctctccaaaggcgatcgccagaaaatcatgacaatctgtacaatagatgtccatgcacgcgacgtggtggccaaaatgatcgcacaaaaagtagacaacgcccaagcttttctttggctgagccagctgcgacatcgatgggatgacgaggtaaaacactgttttgccaatatttgtgatgcccagttcctttattcgtacgagtatctcggtaacactcccagactagtgataacaccactgaccgatcggtgctatattactctgacacagtctttgcacctgactatgtcgggcgctccagccggaccagcagggaccggtaaaacggagactaccaaagatcttgggcgagcccttggaatcctggtctacgtattcaactgcagcgaacagatggattataagagctgcggaaacatctacaagggcctggcccaaaccggggcttggggttgttttgacgagttcaaccggatatcggtcgaggtattgagcgttgttgctgtgcaggtcaaatcgatccaagatgcaattagggataaaaagcagtggttttctttcctgggggaggagatttccttgaacccatcagtgggcatatttataaccatgaatcctggatacgccggtcggaccgaactcccagaaaatcttaagagcctgttcagaccctgcgccatggtggtccctgattttgagcttatctgtgaaatcatgctagttgcagagggattcatcgaggcccaaagcttggcccgaaagttcatcacactgtaccagctgtgtaaagaactcctatccaagcaggatcattacgattggggccttcgcgcaataaaaagcgtcctagtggttgccggaagcctgaaaagaggagaccctgatagacccgaagatcaggtcttgatgagatctttacgcgattttaatatccccaagatcgtaacagatgatatgcctatttttatggggctgatcggcgacctgtttccagccctggatgtgcctcgccgacgcgatcccaactttgaggccctggtcaggaaagcaattgtcgatttgaaactgcaagctgaagacaattttgtgctaaaagttgttcagcttgaggagctgctggccgtccgccactccgtattcgtcgtggggggagccggaaccggcaaatcgcaagtgctacgtagcctgcataaaacttaccagattatgaagcgacggccagtgtggaccgacctaaatccaaaagcagttacaaatgacgaactattcgggatcataaatcccgctactggagaatggaaggatgggttattttccagcattatgcgcgagctggctaatattactcatgacgggcctaagtggattctgctcgatggggatatagaccctatgtggatcgaaagcttaaatacagtcatggatgataacaaggtgctcactctcgcaagcaacgagcgcattccccttaatccaactatgaaactcctgttcgagatttcccatctccggacggctaccccagctactgtttccagagccggtattctgtacataaatccggctgaccttgggtggaacccccctgtctcatcttggattgaaaagcgagaaattcagacagaacgggcaaatctcaccatcctgttcgataaatatcttccgacgtgtctggatacgctccgaacacgatttaagaagatcatccctatccccgagcaaagcatggtgcaaatggtatgccacctgctggagtgtctgctcaccaccgaggatatccctgctgactgtccaaaggaaatatacgagcactacttcgtgtttgccgctatttgggccttcggtggtgctatggtccaggaccaattagtcgactatagagcagagttttcaaagtggtggctgacggaatttaagacggtgaagtttccttcccaaggcaccattttcgactactacatagatccagagacaaagaaatttgagccatggagtaaactagtgccacagttcgaatttgatccagagatgcccctccaagcttgcttggtacacacttcagagaccatcagggtgtgctatttcatggaacggctcatggctcgccagagacccgtaatgcttgtggggacggcaggaactggtaaaagtgtgctcgtcggcgctaagctggcgagtctggatcctgaggcttatcttgtcaaaaatgtgccatttaactactacacaacatctgccatgttacaagcagtgctagaaaagccactggaaaaaaaagcgggaagaaattatggccctccaggaaataagaagctgatctacttcattgacgatatgaacatgccagaggtcgacgcttacggcaccgtacagcctcacaccattatccggcagcatctggattatggacactggtacgatcgctcgaagttaagcctcaaggagatcactaacgtccaatacgtgtcctgcatgaatcctacagctgggagcttcactattaaccccagactgcaaaggcacttttcagtgttcgtactctctttccctggcgctgatgcgctttcctcgatttactcaataattctgacccagcacctgaagttggggaacttccccgcatcgttacagaagtctattcctcccttaatcgatcttgccctggcgtttcaccagaagattgccaccactttcttgccgacaggaatcaaattccactatatctttaacctcagagattttgctaacatttttcaaggaatcttgttctcttccgtcgagtgtgttaagtcgacctgggacttaatccggttgtatcttcatgagtccaaccgggtgtaccgggacaaaatggttgaggagaaggattttgacctgttcgacaagattcagaccgaggtactgaagaagaccttcgatgacattgaggatcctgtggaacagacacagagccctaatctgtactgccattttgctaacggaatcggtgagcccaagtacatgcccgtgcagtcctgggaactgcttacccagactctcgtggaagctttggaaaatcacaacgaggtgaacacagtcatggatttagtattgtttgaggacgccatgaggcacgtgtgccacatcaatcgaatcctcgagagtccgagaggcaatgcactgttagtgggggttggcggttctgggaaacagagcctgacccgactagccgcttttatttcttcaatggatgtcttccagattacattacgaaaaggttatcagatccaggatttcaagatggacctcgcctctttgtgtctgaaagccggagtgaagaatctgaataccgtctttttaatgactgatgcacaggttgctgacgaaagatttctggtcttaatcaacgatctgttagcaagcggagaaatcccagacctgtatagcgacgatgaagtagagaatataatctccaatgtgaggaacgaggtcaagagtcaggggctggtggataaccgggaaaactgctggaagtttttcatagatagaatccgtagacagctaaaggtgaccctttgttttagccctgtaggaaacaagctccgagtgcgaagccggaagttccctgccatcgtgaattgtaccgcaatccattggtttcacgagtggccccagcaggcccttgagagtgtatcactcagattccttcagaatacagagggaatcgaacccacagtgaagcagagtatcagcaagttcatggccttcgtccacacttccgtgaaccagacttcccagtcgtacctgtctaatgagcagcgctataattatacaactcctaagtcctttttagaattcatccggctttatcagtctctgctgcacagacatcggaaagaattgaagtgcaaaaccgagcggttagagaatggtttgttgaaactgcacagtaccagcgcccaggtcgatgacctcaaagcgaagttagctgcgcaggaagtcgagcttaaacaaaagaacgaggacgccgataagctcatccaggtagtcggcgttgagacagacaaagtcagtcgggaaaaggcaatggcagacgaggaagaacaaaaagtggcagtgattatgctcgaggttaagcagaagcaaaaggactgcgaagaggacctagcgaaagccgaacctgccctcaccgcggcacaggctgcgttgaataccctgaacaaaaccaacctcaccgagcttaaatcctttgggagtcccccattagctgtttccaacgtcagtgccgcagtgatggtactcatggccccaaggggtcgcgtccctaaggacagaagctggaaagcagccaaggttactatggccaaagtcgacggcttcctggattctctgatcaacttcaacaaggaaaacattcatgaaaattgcctgaaggcgatcagaccctatctccaagatcctgagtttaatccagaattcgtggccacaaaatcctacgcagctgctgggttgtgttcctgggtgattaatatcgttaggttttatgaggtgttctgtgacgtggaacctaaacggcaggccttgaataaggcaaccgctgacttgacagctgcccaggagaaactggcagccattaaggccaaaatagcacatctgaacgagaatttagctaaattgaccgctagatttgaaaaagcaacggcagacaaactgaaatgtcagcaggaggccgaggtcactgccgtcacgattagcttggcaaatagactcgtaggcggactcgctagtgaaaatgtaaggtgggccgatgctgtgcagaatttcaagcaacaagaacgcactctgtgcggagacatcctgctgatcaccgcctttataagctatctggggttctttacaaagaagtacaggcagtccctgctggataggacttggcggccttatctgtctcagctgaaaacccccatcccagtgacccctgctttggacccactgagaatgctcatggacgacgctgacgtcgccgcatggcagaatgaaggacttcctgcagatagaatgtcggtcgaaaacgcaacgatcctgatcaattgcgaaaggtggcctctcatggtcgatccccagttacagggcatcaaatggataaagaacaagtatggagaggatttaagggttacgcaaatcgggcagaaaggatacttacagattatagaacaggcccttgaggcaggggctgtggtgcttatcgagaacctggaagagagcatcgaccccgtgctgggtccactgttgggtcgggaggtgatcaaaaaggggagatttattaagatcggcgacaaggagtgcgaatacaacccaaagtttcgactgatcttacacactaagctggccaacccccattatcagccagagcttcaggctcaagctaccctgatcaattttaccgtaacgcgtgacgggctggaggatcagttactagctgccgttgtgagcatggaacggcctgatctggagcagctgaagtccgatctcactaagcagcaaaacggcttcaaaatcacactcaagaccctggaggattcactcctttcacgtctcagtagcgccagtggcaatttccttggagagactgtgctggtcgagaaccttgagatcaccaaacagacagctgcagaggtcgaaaaaaaggtgcaagaggccaaagttaccgaggtgaaaatcaatgaagctcgggagcattatcggccagctgctgctcgcgctagcttgttgtacttcattatgaacgacctgtctaaaatccacccaatgtatcaattcagcctcaaggctttcagcatcgtgtttcagaaggcagtcgagcgagctgccccagatgaatcattgcgagagagagtcgccaatctcatagacagcattacatttagtgtgtatcagtatacgatcagagggctgttcgagtgcgacaaactgacttaccttgcccagctcacattccagatcttactcatgaatagggaggtgaacgcagtcgaactcgatttcttgctgagatcgcctgtgcagaccgggacggcttcacctgtggagttcctaagccaccaggcctggggagcggttaaggtgctatcgtccatggaggaattttcgaacttagatagggatatcgaaggctctgccaaatcatggaaaaagttcgttgagagcgagtgccccgagaaagagaaattgccacaagagtggaagaacaaaacagctctccagcgattgtgcatgctgagggccatgaggcccgacagaatgacctacgcgctcagagactttgtcgaggaaaagctgggaagcaagtacgtggtaggacgcgcactggattttgctacttcttttgaggagagtggccctgcaacacctatgttttttatattgtctccaggtgttgacccattaaaagacgtggagtctcaaggaagaaaactgggatacactttcaacaatcagaatttccacaacgtgagcctggggcaaggacaggaagtggtggctgaggccgctctggatctggccgcaaagaaaggacattgggtgatcctgcaggatactctggagatgtgcagccgtgagacggaattcaaaagtatccttttcgcattatgctatttccatgcagtggtcgcagagcgtaggaaattcggccctcaagggtggaacagatcctatcccttcaacacgggggaccttacaattagtgtgaatgtgctgtacaactttctggaggcaaacgctaaggtcccctatgatgatctgcgttacctctttggagagattatgtacggagggcacattaccgatgattgggacagaagactgtgtcgcacatatctgggcgaatttattaggcccgaaatgctggagggggaactatccttggctccagggttcccattgcccggaaacatggattacaatgggtatcaccagtatattgacgccgaactgcctcccgagagcccctatctatacgggctgcacccaaatgctgaaattgggttcctcacccagacctccgagaaacttttccgcactgtactggaacttcagccacgggattcccaggctagggatggtgcaggggctactagagaggagaaggtgaaggcattattagaggagatccttgagagagtgacagatgaattcaatatcccagagctgatggctaaagtggaagaacggaccccgtatatagtggtcgccttccaagaatgcggacgaatgaacattctcaccagagagatccaacgtagtctgagagaacttgagctaggacttaagggcgaattgacgatgacatcgcacatggaaaatctccagaacgctttgtatttcgatatggtgcccgaaagttgggcaagaagagcatacccttccactgccggtcttgccgcatggtttcctgacctcctgaacaggattaaggagcttgaggcctggactggtgactttactatgccaagcacggtatggttgactggcttttttaacccgcaaagctttctgacggccattatgcaatccactgcccgaaaaaacgagtggcccctcgaccagatggcactgcagtgtgatatgacaaagaaaaatagggaagagttcaggtcaccacctcgggagggcgcatatatacacggccttttcatggaaggtgcttgctgggatacacaagccggtattatcaccgaggcaaagcttaaggatctgacccccccaatgcccgttatgttcataaaagctattccagctgataaacaggactgcagatctgtgtatagctgtccggtctacaagacatctcaacgcggaccaacctacgtctggacttttaaccttaaaaccaaggagaatccctccaagtgggtcctggccggagttgctctcctgcttcagatttaa

SEQ ID NO: 221452 - DNA, 2100 bp, synthetic construct
  misc_feature 1..2100: note = Description of Artificial Sequence: Synthetic coding sequence
  source 1..2100: mol_type = other DNA
atgatacccgctagcgccaaagctccacataagcagccccacaaacagtctatttccatcggtaggggaaccaggaagcgggatgaggattcaggcactgaggtaggcgagggtactgacgagtgggcgcagagcaaggcaaccgtgcgtcctccggatcagctcgagctcacggacgccgagttgaaggaagagttcacacgtatcttgacggctaacaatccacatgcccctcaaaatattgttaggtattcatttaaggaaggaacttataaacctatcggttttgttaaccaactggcagttcactatactcaggtaggaaacctcatccccaaggattctgacgagggacgacggcagcattatagagatgagttggtggctggctcacaggagtccgtcaaagttattagcgagaccggtaatctggaagaggacgaggagcctaaggagctggaaaccgaacctgggagccagaccgatgtcccagccgctggcgctgctgagaaagtgactgaggaggagctaatgaccccaaagcagcccaaagaacgtaaactcactaaccagttcaatttctctgagagagcatcccagacttacaataatccagtacgggacagagagtgccagactgaacccccaccaaggactaacttttctgcaaccgctaatcagtgggaaatctatgacgcctacgtcgaggagctggagaagcaggagaagactaaagagaaggagaaggcaaagactcccgtcgcaaagaaatctgggaaaatggcaatgcgcaagttgaccagcatggagtcacaaactgacgacttgatcaagctgtctcaggccgctaagatcatggaacgcatggtgaaccaaaatacctacgatgatattgctcaggactttaagtactatgacgatgcagctgatgagtatagggatcaagtgggaaccctgctgcctttatggaaatttcagaacgacaaggctaagagactgtctgtcaccgcgctttgctggaaccctaagtacagggatttgtttgctgtcggctatggatcttatgacttcatgaagcaatcccggggaatgttgctgctgtacagcctgaaaaatccaagcttcccagaatatatgttttccagcaactccggtgtcatgtgtctggacatacacgtggatcatccctaccttgtcgctgttggacactatgacggtaacgtcgctatctataatctgaaaaagcctcattcacagcccagtttttgctcctccgctaaatcaggaaaacattccgaccctgtctggcaggttaagtggcaaaaagatgacatggaccaaaacctgaacttcttttctgttagcagcgatggcaggattgtctcttggacactagtcaaaagaaagctagttcatatcgacgtaattaagctcaaggtggagggctcaacaactgaagtacccgaggggctccagttgcaccccgtgggctgcggcacggcatttgattttcataaggaaattgattatatgtttttggttggcaccgaagagggtaaaatctataagtgctctaaaagttattcttcccagtttttggatacttacgatgcccataatatgagcgtggataccgtctcatggaacccttaccatacaaaagtctttatgtcatgctcctctgattggaccgttaaaatatgggatcacacaattaagacacctatgttcatttacgacctaaatagcgctgtcggggacgtggcctgggctccctactcctcaactgtgttcgccgctgtgaccaccgatggaaaggcccacattttcgatctggctatcaataaatacgaggcaatctgtaatcagccagtggcagccaaaaagaatcggcttacgcacgtgcagttcaatctgatccatccaatcattatcgtcggggatgacagggggcacataatctctctgaaactgagtccgaacctacggaaaatgcccaaagagaaaaagggtcaagaggtgcaaaagggtccggcagttgaaatagcaaagctggacaagctgcttaacctcgtcagggaggttaagattaaaacctag

SEQ ID NO: 221453 - DNA, 585 bp, synthetic construct
  misc_feature 1..585: note = Description of Artificial Sequence: Synthetic coding sequence
  source 1..585: mol_type = other DNA
atggaccagaaccttaactttttcagcgtctcatccgacggcaggatagtgtcctggacgctggtcaaacggaaactggttcatatcgacgtgattaagctcaaagtcgaaggatcaacgactgaggtcccagagggactgcagcttcatccagtcggttgcggaactgctttcgacttccataaggagatcgactatatgtttttagtggggaccgaagaaggcaagatctataagtgttctaagtcctacagctcccaattcctggacacgtatgatgcccacaatatgtcagtggatactgtgagctggaatccatatcatactaaagtttttatgagctgctcttctgattggaccgtaaaaatttgggaccataccattaagaccccgatgttcatctacgacttgaactccgccgtgggcgatgtggcttgggccccttatagtagcacggtgtttgcagccgtcaccacagacggcaaagaaaaaaagggccaggaagtgcaaaaggggccagcggtggagattgccaagctggacaaactgctgaacctggtcagagaggtgaaaatcaagacatag

SEQ ID NO: 221454 - DNA, 870 bp, synthetic construct
  misc_feature 1..870: note = Description of Artificial Sequence: Synthetic coding sequence
  source 1..870: mol_type = other DNA
atgatccccgcatctgccaaggcaccgcacaaacagccccacaagcaggatgaggatagcggaacagaggtgggggaagggaccgatgaatgggcacagtccaaggccactgttcgacctcctgaccagcttgagttgacagacgcagagctcaaggaggagttcacacggatactaactgctaacaacccgcacgccccacagaatatcgttcgatattcattcaaagaaggcacttataaacctatcggctttgtgaaccagcttgccgttcattatacacaggttggcaatctgattcctaaagattctgacgaaggacggagacaacattatagagatgagctggtggctgggtcccaagagtcagtaaaggtgattagcgagaccggcaatctggaagaagatgaagaacccaaggagttggaaaccgaacctggatcacagaccgatgtccctgccgcaggcgctgctgagaaggtgactgaagaagagctaatgacgccgaagcagccaaaagagcggaaacttaccaaccaattcaatttctcagaaagagcttctcagacgtacaataatcccgtgcgcgatcgcgagtgccaaacagagcccccacccagaacaaatttcagtgccacagcgaaccagtgggaaatttacgatgcatacgtggaggaattggagaagcaggagaagaccaaagaaaaagagaaagccaagaccccggtcgctaagaagtcaggaaaaatggcgatgaggaaactgacttccatggaaagtcagaccgatgatctgattaagctctcccaggccgcaaagatcatggaacgtatggtgaaccagaatacctatgacgatatagcacagtag

SEQ ID NO: 221455 - DNA, 870 bp, synthetic construct
  misc_feature 1..870: note = Description of Artificial Sequence: Synthetic coding sequence
  source 1..870: mol_type = other DNA
atgatccctgcttccgccaaagccccacataaacagcctcacaaacaggacgaggacagcgggacggaggtcggcgaggggactgatgaatgggcccagtccaaagccacagtgagaccgcctgatcaattagaactgacagacgccgagcttaaggaggagttcacacggatcctgaccgccaacaacccacacgcccctcagaacatcgtgcgatatagcttcaaggaaggcacatataagccgatcgggtttgtgaaccagttggccgttcactatactcaggtgggcaatctgatccccaaagattccgatgagggcaggaggcagcattatcgggacgagctggtggcaggatctcaggagtcagtcaaggttatcagtgagaccggaaacctcgaggaagacgaggagcccaaagagctcgaaaccgaacctggatcccagacagacgtccctgctgccggtgctgccgaaaaagtgacagaggaagagctcatgaccccgaagcagccaaaagaacgtaaactaactaatcaatttaacttctctgaacgtgcatcccaaacttataataaccccgtcagagatcgtgaatgccagacagaacccccaccaaggacaaactttagtgccacagcgaaccagtgggagatctacgacgcctatgtagaggagctggagaagcaggaaaagactaaggagaaagaaaaggcgaaaacaccggtagcaaagaaaagtggcaagatggctatgcgcaaactgacttctatggagtcccagaccgacgatctgattaagctgtcccaggccgctaaaatcatggaaaggatggttaatcagaatacttatgacgacatagcccagtag

SEQ ID NO: 221456 - DNA, 429 bp, synthetic construct
  misc_feature 1..429: note = Description of Artificial Sequence: Synthetic coding sequence
  source 1..429: mol_type = other DNA
tagtgcggaacagccttcgacttccacaaggagatcgactacatgttcttagtcggtacggaggaaggaaaaatatacaaatgtagtaaaagttactcctcccagttcctggatacatatgacgctcacaatatgagtgtcgacaccgtcagttggaacccgtatcatactaaggtctttatgagctgctcctctgactggacagtaaagatctgggaccataccatcaagacacctatgttcatctacgatctgaatagcgcggttggggacgtggcttgggccccatactctagtaccgttttcgcggctgtcacaaccgacggtaaggagaaaaagggccaggaggtgcagaagggccctgccgtggagattgcaaagctggacaaactcttaaacttagtgcgcgaggtgaagatcaaaacctag

SEQ ID NO: 221457 - DNA, 507 bp, synthetic construct
  misc_feature 1..507: note = Description of Artificial Sequence: Synthetic coding sequence
  source 1..507: mol_type = other DNA
atgattcccgcaagcgccaaagcgccacataagcagccccataagcaaagtattagtatcgggagggggacccgtaagagggacgaagattcaggcactgaagtgggcgaaggcaccgatgagtgggcccaaagcaaggccaccgtcaggcccccagaccagctggaattaacagatgccgaactcaaagaggagtttactcggatactcaccgccaataaccctcacgctcctcagaacattgtgcgctatagcttcaagaagcagtggtccctcggcttcatcccaaagcttaagcggaaaatcccggtgaattattggggccaggatgaaggagaaatcagtaatgaaacggtccgtgtgatctactcactggggattttcattatgaaaatcgtgaccatcctcctgaacataaatatcgaacaccttttgtgcgtgcgccactgtgtgaatcgactgtttctgttgttcctgattttgattataatcatgcaaattcggtag

SEQ ID NO: 221458 - DNA, 1209 bp, synthetic construct
  misc_feature 1..1209: note = Description of Artificial Sequence: Synthetic coding sequence
  source 1..1209: mol_type = other DNA
atgcgaacaactcttacaccctcatgctcctccgccctggacccccaggagataaaacgagcagcaactcacctatcctggcatccagacgggaaccggaaactggcagttgcctactcctgtctggactttcaacgagcaccagtggggatgtccagtgactcttacatctgggaccttgagaatcccaataagcctgagctggctcttaaaccatcctctcccctagtaacactggagtttaaccctaaagattctcacgtgctcctgggaggatgttacaacggccagatcgcttgctgggacaccaggaaaggtagcctggtggctgagctctctaccatcgaatccagccaccgagacccagtgtatggcactatctggctgcagtccaaaacagggacagaatgtttcagcgcctccacagacggtcaggtcatgtggtgggacattaggaaaatgagcgaaccaactgaggtggtgattctcgacattacaaagaaggaacagttggagaatgcgcttggtgccatcagcctggagtttgagtctactctgcccacaaagtttatggtggggaccgagcagggcatcgtcatatcatgcaaccggaaagccaaaactagtgcggagaagatcgtgtgcacatttccgggacaccacgggcctatctacgccttgcagaggaatccattttacccaaagaacttcctcaccgtgggagattggaccgccaggatctggtctgaagactcccgggaatcatccataatgtggactaagtatcacatggcgtacctgacggacgccgcttggtcccctgtgaggcccaccgtgttttttaccactagaatggatggaacgctggatatctgggactttatgtttgaacagtgtgacccgacactctcactcaaggtctgcgatgaagcattgttttgcctccgagtgcaggataatggatgcctgattgcttgcggttcacagctggggactaccacactccttgaggtgtcccctgggctgtctactctccagcggaacgaaaagaacgttgccagctccatgtttgaacgcgaaacaaggagggaaaagatcttggaagccaggcacagggagatgagactgaaggagaaggcggctaccaaatcccggagaaggccgggagggggtgggggacggggaagttcaggtgggcgtagaggctag

SEQ ID NO: 221459 - DNA, 1818 bp, synthetic construct
  misc_feature 1..1818: note = Description of Artificial Sequence: Synthetic coding sequence
  source 1..1818: mol_type = other DNA
atggagattgtttacgtttatgtgaaaaagaggtccgagttcggcaaacaatgtaacttcagcgacaggcaggctgagctgaatatcgatataatgccaaaccccgaactggctgagcagtttgtggagcgcaaccccgtggacaccggaatacaatgctccatcagtatgtccgaacacgaggctaattcagagagatttgagatggaaacacggggtgtcaatcacgtggaggggggttggcctaaggacgtgaaccctctggagctggagcagaccatacgtttccggaagaaggtagagaaagacgagaattacgtgaacgccatcatgcagctgggttccatcatggagcattgcatcaaacagaacaacgccattgacatctatgaggaatatttcaacgatgaggaagcgatggaggtgatggaggaagacccctcagctaagactattaatgttttccgtgatccacaggagattaaaagggctgccacccatctgagttggcacccagacggcaatcgaaagctcgcagtagcctacagctgcttggactttcagcgggctcctgtcggtatgtccagcgacagttatatctgggatctggagaacccaaacaagccggagctggctctcaagcctagctcaccccttgttactttagagtttaaccctaaagatagccatgttctgctcggcggttgctataatggccagatcgcttgctgggatacacgaaaaggctcactcgtcgcagagctgtctacgattgagtccagccacagagatccagtgtatggtacaatctggttacagagcaagactggaacggaatgcttttctgcatccacagacggtcaggtcatgtggtgggatattcgcaagatgagcgagcctaccgaggttgtcattcttgatatcaccaagaaagagcagctggaaaacgctctgggggcaatctcccttgaatttgaatcaacgctgcccacgaagtttatggtaggcaccgagcagggcatcgttatcagttgcaaccgtaaagcgaagactagcgcagaaaagatagtctgtactttccctggccaccacggcccaatctatgccctccagcgcaatccgttctaccccaaaaacttcctaacagtaggagattggacggctcgaatttggagtgaggatagcagggagagctcaatcatgtggacgaagtaccatatggcttatctgactgatgccgcatggtctcccgttcgccctacggtgtttttcactaccagaatggatgggacactggacatatgggatttcatgtttgagcagtgcgatcccaccctgagcttgaaagtttgtgatgaagccctgttttgcctcagagttcaggacaatggttgtctcatcgcttgtggcagccagctcggcactactactctcctcgaggtttcacctggtcttagcacactccagagaaatgagaaaaacgtggcatcatccatgtttgagcgcgaaacccgtcgtgaaaagatcctggaagctaggcacagagagatgcggttaaaggagaagggcaaggccgagggacgtgacgaggaacagacagacgaagagctcgctgtggacttagaggccctggtgagcaaagcagaggaggagttctttgatattatattcgccgaactgaagaagaaagaagccgacgccattaagctaacccccgtgccccagcagccttccccggaggaggaccaggtggtcgaagagggagaggaggccgcaggcgaggagggcgatgaggaagtggaagaggatcttgcttag

SEQ ID NO: 221460 - DNA, 1818 bp, synthetic construct
  misc_feature 1..1818: note = Description of Artificial Sequence: Synthetic coding sequence
  source 1..1818: mol_type = other DNA
atggagatcgtgtacgtgtacgtcaagaaaagaagtgagtttggaaagcagtgtaactttagtgatcgccaggcagaactgaacatcgacatcatgcctaatcccgagctggctgagcaattcgtcgagagaaacccagtcgacacagggatacagtgtagcatcagtatgtctgaacatgaagccaactccgagaggtttgagatggaaacacgaggagtgaaccatgtggaaggtggttggcccaaggacgtaaacccactggagctggaacagaccatcagattccgcaaaaaggttgagaaggatgagaattacgttaatgccatcatgcagctgggcagcatcatggagcactgtataaaacagaacaacgcaatcgatatatacgaggaatattttaacgatgaggaggcgatggaagtgatggaggaagacccctccgccaaaactattaacgtctttcgggacccccaggaaataaaacgagccgcaacacacctgtcatggcacccggacgggaacaggaaattggcagtggcctattcctgtcttgatttccaaagagcaccagttggtatgtccagcgactcttacatttgggacctggaaaacccaaataagcctgaactcgccctgaaaccatccagtcctcttgtcacacttgaattcaacccgaaggattcacacgtactgctgggcggatgctataatgggcagatagcctgttgggacacacggaaagggtccctagtggcagaactgagtacaattgagagcagtcatagggaccctgtctacggtacgatttggctgcaaagcaaaaccgggaccgaatgcttcagcgcttctaccgacggccaggtgatgtggtgggacatcagaaaaatgtccgaacccacagaggttgtcattttggacattactaagaaggagcaactggagaatgctctgggggctatctcacttgaattcgaaagtacccttcctacgaagtttatggtcggcacggaacaggggatcgtcatctcttgcaacagaaaagctaaaacaagcgctgagaaaatcgtatgcacgtttccgggtcaccatggccctatttacgcactgcagcggaaccctttttatccaaagaattttcttacagtgggtgactggaccgctcgtatatggtctgaagatagtcgcgaatcatctattatgtggacaaaatatcatatggcctacctgaccgacgctgcatggtcaccagtcaggccaacagtatttttcacaacccggatggatggaaccttggacatctgggattttatgtttgagcagtgcgacccgactctgtctctcaaggtgtgtgatgaggccctcttttgtctgagggtgcaggataacggttgcctgattgcatgtggttcacaactcgggacgaccacactgttggaagtctccccaggtctgagtaccctccaacggaacgagaaaaacgtggcgtcgtcaatgttcgaacgagagaccaggcgggagaaaatactggaagcaaggcatcgcgagatgcggctcaaggaaaaggggaaggctgagggacgagatgaggaacagaccgacgaggagctagctgtcgacttggaggcgctggtgtccaaagccgaagaggaatttttcgacatcatctttgccgagctgaagaagaaggaggctgatgcgatcaaactgacacccgtgccccagcaaccctcacctgaagaggatcaggtggtggaagaaggcgaagaggcagctggcgaagagggcgacgaagaagtagaggaggatctagcatag

SEQ ID NO: 221461 - DNA, 234 bp, synthetic construct
  misc_feature 1..234: note = Description of Artificial Sequence: Synthetic coding sequence
  source 1..234: mol_type = other DNA
atgaagaagctgaagattctatacatgtccaacaaccttgtcaaagactgggctgaattcgtgaagctggccgaattaccttgcctggaagatctcgtctttgtggggaaccccctggaagaaaaacattctgccgagaacaactggattgaagaggccactaaacgggtacctaagctgaagaaactagacgggacacccgtaattaagggagatgaggaggaagacaattag

SEQ ID NO: 221462 - DNA, 456 bp, synthetic construct
  misc_feature 1..456: note = Description of Artificial Sequence: Synthetic coding sequence
  source 1..456: mol_type = other DNA
atggatgcctccctttctatgctcgccaactgcgaaaagctaagcctgtccactaattgtattgaaaaaattgctaacctcaacggtctgaagaatcttcggatcctgtccttgggcaggaacaacataaaaaatctaaatgggctggaagccgtcggagataccctggaggagctctggattagctataattttatagagaagctcaagggaattcacatcatgaaaaagctcaaaattctttatatgagcaacaatcttgtcaaggattgggccgaattcgtcaaactggctgaactgccttgcctcgaagatctggtgttcgtggggaaccccctagaggagaaacattcagcagaaaataattggatcgaagaggcaaccaagcgggttcccaaactgaagaaactggacgggacaccggtaattaaaggtgacgaagaggaagataactag

SEQ ID NO: 221463 - DNA, 573 bp, synthetic construct
  misc_feature 1..573: note = Description of Artificial Sequence: Synthetic coding sequence
  source 1..573: mol_type = other DNA
atggccaaggctactacgatcaaggaggcacttgcacgctgggaggaaaaaacaggccagcggccttcagaggccaaggaaattaagctatacgcacagatacctcctattgaaaaaatggatgcgagcctctccatgttagccaactgcgagaaactcagcctaagcactaattgcattgagaagatcgcaaacctcaacgggcttaaaaacctgcgcatcctcagcctgggaaggaataacataaaaaacctcaacgggctggaagccgtaggggacacattggaagaactttggatttcgtacaatttcatagaaaagctgaaggggatccacattatgaaaaaattgaagattctgtatatgtcaaataatctggtgaaagattgggcggagttcgtcaaactggccgaattgccttgtctggaagatctggttttcgttggaaaccccctagaagaaaagcactccgcagagaacaactggattgaagaagcaactaagagagtccctaagctgaaaaagctggatggcactcctgtgattaaaggggatgaagaggaggacaactag

SEQ ID NO: 221464 - DNA, 174 bp, synthetic construct
  misc_feature 1..174: note = Description of Artificial Sequence: Synthetic coding sequence
  source 1..174: mol_type = other DNA
atgaagaaactgaagatcctgtatatgtctaataatttagtaaaagattgggccgagtttgtgaagctggccgagcttccctgcctggaagatttagttttcgtcggcaaccccctagaggagaaacattcagctgaaaacaactggatagaggaggccaccaagagagtatag

SEQ ID NO: 221465 - DNA, 456 bp, synthetic construct
  misc_feature 1..456: note = Description of Artificial Sequence: Synthetic coding sequence
  source 1..456: mol_type = other DNA
atggatgccagcctcagtatgctggctaattgcgaaaagctctcgttgtctactaactgtattgagaaaatcgcgaatctgaacgggctaaaaaaccttcgtatactttcccttggcaggaacaatataaaaaacttaaatggcctcgaagccgtaggcgatactctcgaggagctttggatcagttataacttcattgagaaactcaaggggattcatatcatgaagaaattaaaaatcttatatatgagcaacaaccttgtcaaggactgggcggaatttgtcaagttagcagagcttccttgtctggaggacctcgtgttcgtaggcaatcctctggaggaaaagcattccgccgagaataactggatagaggaggccactaagagagtcccaaagctgaagaagctggacggtactcccgtgataaaaggagacgaggaggaagacaactag

SEQ ID NO: 221466 - DNA, 195 bp, synthetic construct
  misc_feature 1..195: note = Description of Artificial Sequence: Synthetic coding sequence
  source 1..195: mol_type = other DNA
atgaagaagctgaagatcctttacatgagtaataatctcgtcaaagactgggcggagttcgttaaactcgcagaactgccctgcctggaagacctggtttttgtgggtaacccactcgaggagaagcattccgccgagaacaactggatagaggaggcaaccaagagggtcccaaaattgaagaagttagactag

SEQ ID NO: 221467 - DNA, 159 bp, synthetic construct
  misc_feature 1..159: note = Description of Artificial Sequence: Synthetic coding sequence
  source 1..159: mol_type = other DNA
atggacgccagtctgagcatgctggccaattgtgagaagctcagcctctctaccaactgtatagagaagattgcaaatctcaatggcctcaaaaacctgcgtattctcagtctggggcgaaacaatatcaaaaatttgaacggactggaggcggtgtag

SEQ ID NO: 221468 - DNA, 198 bp, synthetic construct
  misc_feature 1..198: note = Description of Artificial Sequence: Synthetic coding sequence
  source 1..198: mol_type = other DNA
atgaaaaaactgaagattttgtacatgtccaacaacctggttaaggactgggccgaattcgtaaagctggcagagctgccatgtctggaggatttggtgttcgtggggaacccgctagaagagaagcattccgccgaaaataactggatagaggaggctactaaacgagtgcccaagcttaagaagctagacggttag

SEQ ID NO: 221469 - DNA, 843 bp, synthetic construct
  misc_feature 1..843: note = Description of Artificial Sequence: Synthetic coding sequence
  source 1..843: mol_type = other DNA
atggtcacggctaacaaagctcacacaggacaaggttcttgctgggtggctacattggcatccgcaatgatccctccagcagatagcttgctgaagtatgatactcccgtgttagtcagtcggaatacagagaaaagatcaccgaaggctaggcttcttaaagtttcaccccagcagccaggaccttctggaagcgctccacagccccctaaaactaagcttccgtccactccgtgtgtgcctgaccccaccaagcaggcagaagaaatcctgaatgcaattcttcctccccgagaatgggtggaggatactcagctgtggatccagcaagtgtctagcacaccttccacacgcatggatgtcgtacaccttcaagagcagttggatctaaaactccagcaacggcaagccagggaaactggcatttgccctgtgcgaagggaactttacagtcagtgctttgatgagctgatccgagaagtgaccattaactgtgcagagcgcggactgctactgctccgcgtgcgggatgagatccgcatgacaattgcagcttatcagacactgtacgagagcagcgtggcctttggaatgagaaaggctctgcaagctgagcagggaaaatcggatatggagcggaaaatcgctgagctcgagaccgagaaaagagacctcgaaaggcaggtaaacgaacagaaagccaagtgtgaagccactgagaagagagaatcagaacggcgacaagtggaagagaaaaaacataatgaggaaatacagtttctcaagcgtacgaaccagcagctgaaagcacagctggagggaatcattgctcccaaaaaatag

SEQ ID NO: 221470 - DNA, 399 bp, synthetic construct
  misc_feature 1..399: note = Description of Artificial Sequence: Synthetic coding sequence
  source 1..399: mol_type = other DNA
atgccgtattatccccaggacgagctgattcgcgaagttacgattaactgcgccgaacgcggacttcttctcctccgggtgcgcgacgagattcgtatgacaatcgccgcttaccagactttgtatgagagcagtgtagccttcggaatgagaaaagcgctgcaggccgaacagggtaaaagcgacatggaacggaaaattgcagagctggaaaccgaaaaacgggatctagaacgacaggttaacgagcagaaggccaagtgcgaagccaccgaaaagcgagagtcagagcgtcgacaggtcgaggagaaaaagcacaacgaagaaattcagttcttgaaaaggacaaatcagcagctgaaagctcagttggagggcataatcgctcccaaaaagtag

SEQ ID NO: 221471 - DNA, 13941 bp, synthetic construct
  misc_feature 1..13941: note = Description of Artificial Sequence: Synthetic coding sequence
  source 1..13941: mol_type = other DNA
atgagcgagcctggtggtggtgggggagaagacggtagcgctggtcttgaagtgtctgccgtccagaacgtagctgacgtcagcgtcctgcagaaacatctacggaagctggtgccactgctccttgaggatggcggtgaagcccctgcagctctcgaagcagccctagaagagaagtccgccctcgaacagatgcgaaaattcttgagcgatccacaggtacacacagtactggtagagagatcaaccttgaaagaggacgtgggagacgagggggaagaagagaaggaatttatttcttataacattaacatcgatatccattacggcgtcaaaagtaatagtttggcattcattaagagaacaccagtgattgatgccgacaagccggtaagttcccagctgcgcgttctgactctgagcgaagattccccatatgagactctccacagcttcattagcaatgctgtagcaccattctttaaaagttacatcagagagagcggaaaggccgacagggacggcgacaagatggcacctagcgtggaaaaaaaaattgcagaactggagatgggtctcctccatctccaacagaatatcgaaatccccgagatatccctgcccatacacccgatgattacgaatgtggctaagcaatgctacgagcgcggtgaaaagcctaaggtgactgacttcggcgataaagtggaagaccccactttcctgaaccagctccaatccggagtaaatcggtggattcgagaaatccagaaggtaaccaaactggatcgagatcccgcaagtggcacagcccttcaagagatatcgttttggctcaatctcgaaagggccctataccggattcaagaaaaacgcgagagcccagaggtcctgctaacacttgatatcctgaaacacggaaagcgttttcacgccactgtctccttcgatacggacacaggtctaaagcaggctctcgagacagtgaatgactacaacccccttatgaaggacttccctctaaatgatctattatccgctaccgaactggataagattagacaagctctggttgcaatcttcacccacctgcggaagatcagaaatactaaatatcccatccagagggccctgcggttggtggaagctatttcgcgggatctgtctagccagttgctcaaggtgctagggacgaggaagttaatgcacgtggcatacgaggagtttgagaaggtcatggtggcttgcttcgaggtgtttcagacctgggatgacgaatacgagaaactgcaggttctcctgcgcgatatcgtaaaaagaaaaagggaggaaaatttgaagatggtatggagaatcaatccagctcaccggaagctgcaagctcgattggatcagatgcgcaagttcaggcgccagcatgaacagctgagagcagtcattgtgagagtgctgcgacctcaggtcacggcagtggcccagcagaaccagggagaggtgcccgagcctcaggatatgaaggtagcagaggtactttttgatgcggctgatgccaatgcaattgaggaagtgaacctggcctacgaaaatgtgaaagaggtggacggactggatgtttccaaggagggaactgaggcgtgggaagcagctatgaagcgctacgatgaacggattgaccgcgttgaaacccgcattaccgctcgactccgggatcagctaggtacggctaagaatgctaatgaaatgttccgaatcttctctcgcttcaatgccttatttgtgaggccgcacatcaggggggctatacgagaatatcagacccaactaatccagcgggtgaaagacgatatcgagtctttgcacgataagttcaaggtccaatatccacagagccaggcgtgcaagatgagccatgtacgcgatctgcctcccgtttctggttccatcatttgggccaagcagatcgaccgtcagctgacagcttacatgaaacgcgtggaggacgttctgggcaagggttgggagaaccacgtggaaggccagaaactgaaacaggacggcgacagcttccggatgaaattgaatacccaggagatttttgacgactgggctcgcaaagttcagcagaggaacctgggcgtttcaggcagaattttcactatcgaaagtaccagggtgcggggacgtactggaaacgttctgaagctcaaggtcaactttctgccagaaattatcactctgtctaaggaagtgcgaaacctcaaatggctcggctttagagtacctctggccattgtgaacaaggcccaccaggccaatcaactttatccattcgctatttctttaatcgaatccgttagaacttacgaaagaacttgcgagaaggtggaagagcgaaacaccatcagcctgttagtggctggactgaaaaaggaggtccaggcactgatcgcagaaggaatcgccctggtgtgggagtcgtacaaacttgatccatacgtccaacgactcgctgagacggtgtttaacttccaggagaaggttgacgatcttctcataatcgaggagaagatagacctggaggtccgatctctggaaacgtgcatgtatgaccacaaaacattctcagagatattgaaccgggtccagaaagccgtcgatgatctgaatttgcactcctattccaacctgcctatttgggtaaacaaattggacatggagatagagaggatcctgggggtcagactacaggccggactgagggcctggactcaagtgctgctcgggcaagcagaagacaaagccgaggtggacatggataccgatgcgccacaagtgtcccacaaaccagggggagaaccaaagattaaaaacgtcgtccacgagctccgaattacaaatcaagtcatttatctcaatccgccaatagaggaatgtagatataaactctatcaagagatgttcgcctggaagatggtagtgctttctcttccccgtatccagagtcaaagataccaggtgggtgtgcactacgagcttacagaagaagagaaattctacagaaatgctctgactagaatgcccgacgggccagtggccctggaagagtcttactcggcagtgatgggtatcgtgagcgaagtggagcagtatgtcaaggtgtggctccagtatcagtgcctgtgggatatgcaggcagagaacatatacaaccgacttggcgaggatcttaacaaatggcaggccctcttggtccaaatacgaaaagccagaggaaccttcgataacgccgagaccaagaaagaattcggacccgtcgtaatagactatgggaaagtccagagcaaggttaatctcaaatacgatagctggcacaaggaagtcctgtctaagttcggacagatgttgggcagcaacatgaccgaatttcatagtcagatctcaaagtcgcggcaggagctagaacagcacagtgtcgatactgcttctacctcggatgccgtgacttttatcacatacgtccagtccctcaagcgcaagataaagcagttcgagaaacaagtggaattgtaccgaaatgggcagcgcctgctagagaaacaaagattccagttccctccatcctggttatacattgacaatatcgagggggagtggggcgcttttaacgacattatgcgaaggaaagattccgctatccaacagcaggtggctaacctacagatgaagatcgtccaggaagatcgcgctgtggagtcaaggaccactgatctgttgactgattgggagaaaacaaaaccagtcacagggaacttacgccctgaagaggccctgcaagcactgacgatctatgaaggcaagttcggccgtctaaaagacgatcgcgagaagtgcgccaaggccaaagaggcattggaacttactgacaccggcctactgagcggtagcgaagagcgagtgcaagtcgctcttgaagagcttcaggatctgaagggtgtgtggtctgagctgtcaaaggtgtgggagcagatcgaccaaatgaaggaacagccatgggtgtcagtgcagcctcggaagcttagacagaacctcgatgccctgttgaatcagctcaagtccttccccgctcggctgcgacagtacgcaagttacgaattcgtacagcggctcctgaaagggtatatgaaaattaacatgctggtgatcgagctgaagtcagaagccctgaaggaccggcactggaagcagctcatgaagaggttgcatgtcaactgggtcgtgtcagagctcacattagggcagatttgggacgtggacctacaaaagaacgaagccattgtgaaagatgtgcttctggtggcgcagggtgaaatggctctagaagagttcctcaagcagataagagaagtctggaacacctatgaactggacttggtcaattatcagaacaagtgcaggttgatacggggatgggatgacctctttaacaaggtaaaggaacacatcaattctgtgagcgctatgaagctgtccccctactacaaggtttttgaagaagatgccctgtcttgggaggataagctcaatcggattatggccctgttcgacgtctggattgatgtacagaggaggtgggtttatctggaaggcatttttaccgggtcggccgacatcaagcacctgttgcccgtggagacgcagcgtttccagtctatctccactgagttcctggctttgatgaagaaagtcagcaagagtcccctggtcatggatgtgcttaacatccaaggggttcaaaggtccttggagaggttagcagacctgctcggcaaaattcaaaaagccctgggcgaatatctagaacgggagcgctcaagttttcccaggttctatttcgttggtgacgaagacctgctcgaaattatcggcaatagtaagaatgttgctaagctgcagaagcactttaagaaaatgttcgcaggtgtgtctagcattatcctgaatgaggacaactccgtggtccttggtatcagttcacgggaaggggaagaggttatgtttaagacgccggtatctatcaccgagcatcccaaaatcaacgaatggctcaccctagtcgagaaagaaatgcgtgtgactctggctaagctgctagccgaatcggtcactgaagtggagatcttcgggaaggctacttctatagaccccaatacttacataacttggatagacaagtaccaggcgcaattggtggtgctgagcgcccagatagcctggagcgagaatgttgagaccgctctgagtagcatgggaggcggtggagatgccgcacctctgcactctgtgctgtccaatgtagaggtaaccctcaatgtgttggccgattccgtgttgatggagcaaccgccactaaggagacgtaagctcgagcatcttattacagagctcgtgcaccagcgtgatgttactcggagcctgatcaagtctaaaattgacaatgccaaatctttcgaatggctgtcacagatgcgcttctatttcgatcccaaacagacagatgttctgcagcagctcagcattcagatggctaacgccaagttcaactacggatttgaataccttggagtgcaagataagctggtgcagacccccctcaccgatcgctgctatttaacaatgacccaggcactggaggccaggttaggcggatctccatttggcccagctggcactgggaagactgaaagcgtcaaagccttgggacaccagctcggccgttttgtcctcgtgtttaattgcgacgagaccttcgacttccaggcaatgggcagaatattcgttggactgtgccaagtgggtgcttgggggtgtttcgatgagttcaatcggctggaggagcgtatgctctccgctgtgtcccaacaagtccagtgtattcaggaggcactccgcgagcactctaatcctaactacgacaaaacctccgctcctatcacctgcgagttacttaataagcaggtcaaggttagtccagacatggctatattcataacaatgaacccagggtatgcaggtcggagtaatctgcccgataatctgaagaagctctttaggtctcttgccatgacaaagcccgataggcagctaatcgcacaagtgatgctgtactcccaggggttcagaaccgctgaagttctggctaataagatcgtcccattctttaagctttgcgacgagcagttgagctctcagagtcactacgacttcggcttgcgtgctctcaaatccgttctggtgtccgcagggaacgtgaagagagagcggatccagaaaataaagcgggagaaggaagaaagaggagaggccgtagacgagggcgagattgctgagaacctgccagaacaggaaattctcattcagagcgtgtgtgagacaatggtgccaaagctcgtagcagaagacatccccttactgttctccctgctgtcagatgtatttcccggagttcagtaccacagaggcgaaatgaccgcccttagagaagagctcaagaaggtgtgtcaggagatgtatcttacttatggggacggcgaggaggttggcggtatgtgggttgaaaaagttttgcagctgtatcaaattacccaaatcaaccatggcctgatgatggtagggccttctggctccggcaagtcaatggcgtggcgagtgctcctaaaggcgctagaacggcttgaaggggtcgaaggggttgctcatatcatagacccaaaagccatctcaaaggaccacctctatggaacactggatcccaataccagagaatggaccgacggtctcttcacccacgtgctgcgcaagatcattgatagcgtgaggggcgagctccaaaagaggcagtggatcgtgtttgatggcgatgttgatccagagtgggtggagaatcttaatagtgtcttggacgacaataagctgctgaccttacctaacggcgagagattatcgctcccaccaaatgttaggatcatgttcgaggtacaggacctcaaatatgccaccctcgcaacagtgtcgcgatgtggcatggtatggtttagtgaagacgtgctgtctactgacatgatcttcaataactttctcgcacgcctgcggtccattccactggacgagggggaagacgaggctcagcgcaggcgaaagggcaaggaagatgagggagaagaagccgcttcaccaatgctccagatacagagggacgctgctaccattatgcagccctactttacaagcaacgggctggtgaccaaggcgctcgagcatgcctttcagttggaacacattatggatttgacacggctgaggtgcctgggatccctcttcagtatgttacaccaggcctgccgaaacgtggcccaatacaatgccaaccacccggacttccctatgcagatcgaacagctcgaaaggtatatccagcgctacctggtttacgctatcctttggtccctgagcggcgacagtcggttgaaaatgagagccgagctgggtgagtatattcgacgaattaccacagttcccctgcccaccgcaccaaacataccaattatcgattatgaagtctccatctcgggcgagtggtccccctggcaggctaaggtaccccagattgaggtagagacacacaaagttgccgctcctgatgtggtggtgccaaccctggacactgtacgtcatgaagcgctgctatatacttggctggcagaacataagccactggtcctttgcggtccccctgggtccggtaaaaccatgactctgttcagcgctctgagggctctccccgatatggaagtggtcggcctgaacttcagcagcgctaccacacctgagctgttgctgaaaacttttgaccactattgtgagtataggcgcacgcccaatggcgtggtgctcgctccagtgcagttagggaagtggcttgtgctgttctgtgacgagattaatttgccagacatggacaaatacggcactcagagagtcatctcctttatccggcagatggttgaacatgggggtttctatcggacctctgaccagacttgggtgaagctcgagcgcatccagttcgtcggtgcatgtaaccccccaacagatcctgggaggaagcctttgagccaccggtttctcaggcacgtgcccgtggtatatgtagattatcccggacccgcatcattgactcaaatctacggcacattcaacagggccatgttgcggctgattccctctctgagaacttatgcagagccactgacggctgctatggtggagttttatacaatgtcccaggagcgcttcactcaggatactcagccacattacatttattcccccagggaaatgacacggtgggtcagaggtatttttgaagcactgaggcctctggagacattgcccgtggaaggcttgattcggatttgggctcatgaggctctacgcctgtttcaagacagactggttgaagatgaggagagaaggtggacggacgaaaacatcgacaccgtagctctcaagcatttccccaacatcgacagggaaaaagccatgtcacgccctattttgtactccaactggcttagcaaagactatatcccagtcgatcaggaggagctgcgcgactacgtgaaggctcgtttgaaggtcttctatgaagaagagcttgatgtccctcttgtgcttttcaatgaggtattagaccacgttttgcggatagaccggatttttaggcagccccagggacacctgctactaatcggggtcagcggtgctggaaaaactactctctctcgcttcgtagcctggatgaacggcctctcggtgtaccagattaaagttcatcgcaagtatacgggggaagatttcgatgaagacctgaggaccgtgctgcgcagaagcggctgcaagaatgaaaagatcgcgtttatcatggatgagtctaacgtgttagattcaggtttcctggaacgcatgaacacgctgctggctaacggtgaagtccccggattgtttgaaggtgatgaatacgcgacactgatgactcaatgtaaggagggggcacagaaagaaggcctgatgctcgattcacacgaggagttgtataaatggttcacaagtcaggtgatacgtaatctacacgtcgttttcaccatgaatccaagctctgagggactgaaagacagagcggcaacctcgcctgccttattcaaccggtgtgtactgaattggttcggcgactggtcaaccgaagccctgtatcaagttggaaaagaattcacttcaaaaatggatctcgagaagccgaactacatcgttcctgactatatgccggtagtgtacgacaagcttcctcaacccccaagccaccgagaagccatcgtcaatagttgcgtgtttgttcaccaaacactccaccaggccaacgcgaggctcgccaaaagaggcggacggactatggccattaccccaaggcattatctggactttatcaatcattatgctaacctcttccacgagaagaggagcgagctggaagaacaacagatgcacctgaacgtcgggctccgcaagattaaggaaaccgtggaccaagttgaagaactgaggcgggatctccggatcaagagtcaggaattggaggttaagaatgctgctgccaacgataagcttaagaaaatggtaaaagatcagcaggaggccgaaaaaaagaaggttatgagtcaggaaattcaggagcagttgcataagcagcaagaggtcattgctgataaacaaatgtcggttaaagaagacctggacaaggtggagccggctgtgatcgaggcccagaatgccgtcaaatccatcaagaagcagcatttagtcgaggtgagatctatggcaaaccccccagcagctgtgaaactggccctcgagtctatctgtctcttactgggtgagagtacgacagactggaagcagattcgttctattataatgcgggaaaatttcatcccaacaatagtaaatttctcagctgaagagatttccgacgccattcgcgagaaaatgaagaagaactacatgagcaatccatcatacaattacgaaatagtgaacagggcttccctggcctgcggccctatggtcaaatgggccatagctcaattgaattatgcagacatgctcaagagggtcgaaccacttaggaatgaactgcagaagctagaagacgacgccaaggacaaccagcagaaagccaatgaagtggagcagatgattcgcgacctggaggcctccatcgccaggtacaaggaagaatatgctgtgttgatctctgaagcacaggccatcaaggccgacctcgctgccgtcgaagcaaaggtaaatagaagcacagccctgctgaaatcgctgtccgcagagagggagcgctgggagaagacatctgagacgttcaaaaatcagatgtcaactatcgctggggactgccttttgtccgcagcattcattgcgtatgccggatactttgatcagcaaatgcgccaaaacttgttcactacctggtcacatcatcttcaacaggcaaacattcagtttagaacggatattgcgaggacagagtatctgtccaacgccgacgagcgcctaagatggcaggccagctctctgccggctgacgacctctgtaccgagaacgccatcatgctcaagaggtttaataggtaccctctcattattgacccatcaggccaggccacggagtttatcatgaacgagtataaagaccgcaagattacaagaactagtttcctagacgacgcgttccgaaaaaatctcgagagcgctctgcgctttggtaaccctttacttgtccaggatgtcgagtcttacgatccagtactgaaccctgtgctgaatcgcgaggtgagaaggacaggcggaagggtcttaatcaccctgggagaccaggatattgacttgagccccagctttgttattttcctaagcactcgagatccgacagtggagtttcctccggacctttgctctcgggttacatttgtgaattttaccgtgactaggtctagtctccagtcacagtgcctgaacgaggttttgaaggcggagcgacccgatgtcgatgagaagcgctccgacctgctgaagctacagggagagtttcagttgagactccggcagctcgagaaatccctcctgcaagctctgaacgaggtgaaggggagaatcctggacgacgacaccattattaccaccctggagaaccttaagcgagaggccgctgaggtaacacggaaagtagaagaaaccgacattgttatgcaggaggtggaaaccgtctcacagcagtatctgcccctttccactgcctgttccagcatttactttacaatggaatcactcaaacagatccattttctttaccagtactcccttcagttctttctggatatttaccacaacgtcctgtacgagaacccgaacctgaagggcgtcacagatcacactcaacggctgagcatcatcacaaaggacttgttccaggtggcttttaatcgagtcgcaaggggaatgttacaccaagatcacattacctttgccatgcttctcgcacggattaaactgaaagggacagttggtgaaccaacctacgacgctgagttccagcacttcctccggggaaatgagattgtgctttcggctggttctacaccgcgtatccaaggcctgaccgtggagcaagcggaggccgtggtgaggcttagttgtctaccagcgttcaaagacctgatcgctaaggttcaggccgacgagcaatttggtatttggctggactcctctagcccagaacagaccgttccgtatctttggagtgaggagaccccagcaacacccatagggcaagccatccatcgcctgctcctgatccaagcattcaggcccgaccgccttttggccatggcacatatgttcgtatccactaatctcggcgagagctttatgtctatcatggaacagccccttgatttgacacacatcgtagggaccgaagtgaaacctaatacccccgttttgatgtgttcggtccccggttacgacgcctcaggtcacgtggaagatctcgctgccgaacagaatactcagattacaagtatagcaataggaagcgccgaaggtttcaatcaggccgacaaagcgatcaatacagccgtgaaaagcgggaggtgggtgatgctgaagaatgttcacctggcccctgggtggttgatgcaactggagaaaaaactccactccctgcaaccccatgcctgcttcagactcttcctgaccatggagatcaatccaaaggtcccagtgaacctgttacgcgctgggagaatttttgtgttcgaacccccaccaggcgtgaaggccaacatgcttaggactttctcctctataccagtgtcaaggatatgcaaatcccccaacgagcgagcccgtctctacttcttgttggcctggtttcatgcaattatccaagagcgcctacgatatgctccgctgggatggtcaaaaaaatacgagttcggcgagtccgacctgcgttctgcgtgcgacaccgtggacacatggctagatgatacagccaaaggcagacagaacatctcaccagacaaaatcccatggagtgcactgaagacactcatggcacagtcgatctatggcggtcgcgtcgacaacgagtttgaccagagacttctcaacacatttctggaacgcttgtttacaacaaggtccttcgatagcgagtttaagctcgcgtgtaaagtagacggacacaaagacatccaaatgcccgatggtattagaagggaagagtttgtgcaatgggttgaactcttgcccgacacccagactccgtcttggctgggcctcccaaataacgcggaacgcgtccttctgacgacccagggggtggacatgatttccaagatgctgaaaatgcagatgctggaggacgaggacgatctggcttatgccgaaacagaaaaaaaaaccagaacagatagcactagcgatggaaggcctgcttggatgaggactctgcacacgaccgcctcaaattggctgcatctgattcctcagacattgtctcacctgaaacgcaccgttgagaatatcaaagatccactgtttcgattctttgaaagagaggtgaagatgggcgctaaattgctacaggatgtcagacaggacctggcagatgtcgttcaagtctgcgagggtaagaagaagcaaacgaactatctccggactctgatcaacgaactagtcaagggcatcctgcccaggagttggagtcattacacagttcccgctggcatgactgtcattcagtgggtatctgacttttctgagcgcatcaagcaactgcagaatatttctttagccgcagcctcaggcggtgctaaggagttgaagaatatccacgtgtgcctgggagggcttttcgtccccgaggcttacatcacagccacacgacagtacgtggctcaggcgaatagttggagcctagaggagctgtgtttagaagtgaatgtgaccactagccagggtgctactctggatgcctgttccttcggagtaactggactgaaactgcaaggtgccacatgcaacaacaataaattgagtttatctaacgcaatatctacagcgctccctctcacccagctgagatgggttaagcagacaaacactgagaaaaaagcatccgtagttacgctgcccgtgtacctgaattttactcgtgccgacctgattttcacggttgattttgagatcgccaccaaggaagaccccaggtccttctatgaaaggggtgtagccgtgttatgtactgaatag

SEQ ID NO: 221472 - DNA, 1899 bp, synthetic construct
  misc_feature 1..1899: note = Description of Artificial Sequence: Synthetic coding sequence
  source 1..1899: mol_type = other DNA
atgagcgacaagagcgaactgaaagcagaactggaacgcaaaaagcagcgtctggcacaaatccgagaggaaaagaaaaggaaagaggaggaacgaaaaaaaaaagaaactgaccagaaaaaggaggccgtggcacctgtgcaggaggagtccgacctggaaaagaagagacgggaggcagaagcccttctccagagtatgggactgacgccagaatcccctatagtgccacctccgatgtctccctcgtccaagtcagtgtcaacaccatctgaggctggatcccaggattctggcgacggtgctgtcgggtccagaacattgcactgggacactgatccctcagtcctccaattgcactcggactccgacctggggaggggtccaatcaagctgggcatggctaagatcactcaggtggactttccccctcgagaaattgttacctacaccaaagagacacaaactcctgtgatggcccaacccaaggaagatgaggaggaggatgacgacgtggtagcacccaaacccccaattgagcctgaggaagaaaagacgctcaaaaaggatgaggagaatgattctaaagccccaccgcacgaattaactgaagaggaaaaacagcagatcctgcacagtgaggagttcctcagtttctttgatcatagtacgcggattgtcgaaagagcccttagtgagcagatcaatatcttttttgactacagcggacgcgaccttgaagataaggaaggtgagatccaggccggagccaagctctccctaaataggcaattctttgacgagcggtggagtaagcatcgtgtggtatcctgtttagattggtcaagccaataccccgagctgctcgtggcaagctataacaacaatgaggatgcaccacatgaaccagatggagttgctctcgtttggaatatgaagtacaaaaagaccactccggaatatgtattccattgtcaaagcgcggttatgtccgccacgttcgctaaattccaccctaatctcgtggtgggagggacatacagcggtcagattgtgctttgggacaaccggtccaacaaaaggacccctgtccaaagaactccactgtcagcagccgctcacactcaccccgtgtactgcgtaaatgttgtgggtacgcagaacgcacacaatctcatctcaatctctacggatggtaagatttgctcttggtctctggacatgctctctcacccccaggactccatggaattggtacacaagcaatctaaggccgtggctgttacatcaatgtcctttccggtgggagatgtgaataactttgtcgttggctccgaagaagggtccgtatacaccgcttgtagacacggaagtaaggccggaatttctgagatgttcgaagggcaccaggggcctataacgggtatccactgccacgccgctgtgggagccgtggattttagccacctttttgtcacctcctcattcgattggaccgtgaagctctggactacaaagaacaacaaacctctgtattcgttcgaggataacgccgactatgtgtatgatgttatgtggagtcccactcacccagcattgtttgcatgtgtggatggaatgggccgactcgatctctggaatttgaataacgacaccgaggtaccgaccgcctccatctctgtggaaggaaacccggcacttaaccgagtgcggtggacacactcggggagagagatagccgtcggtgacagcgagggacagattgtcatatacgacgtaggtgagcaaatagctgttccacgaaacgacgagtgggctcggtttgggcgaacgcttgccgagattaatgcaaacagggccgacgctgaagaagaggcggctactagaattcctgcttag

SEQ ID NO: 221473 - DNA, 1839 bp, synthetic construct
  misc_feature 1..1839: note = Description of Artificial Sequence: Synthetic coding sequence
  source 1..1839: mol_type = other DNA
atgtcggacaagagcgagctgaaagccgagttggagcggaaaaaacagaggctggcacagatccgggaggagaagaagagaaaggaggaagagcggaagaaaaaagaaacagatcagaagaaagaggcagtggcccctgtgcaggaggagagcgacttagaaaagaagcggcgtgaggctgaggccctgctgcagtccatgggtctgacaccagaatcacccatcgtgccccctccaatgtcaccttccagcaagagtgtgagcacgcctagcgaggctggctctcaggattccggagatggtgccgtcggatctcgcagggggcctatcaaactgggtatggcgaaaattacgcaagttgattttccgcctcgcgagattgtgacttatacaaaggagacccagacacctgtgatggcccagcctaaggaagacgaagaagaagatgatgacgtagtcgcgccaaagccgccaatcgagccggaggaggaaaagactctcaagaaggacgaagaaaatgactcgaaagcccctccgcacgagcttacagaagaggaaaagcagcagatcctgcatagtgaggagttcctctcctttttcgaccattccacgaggatcgtcgaaagagccctctcagagcaaataaatatttttttcgattactctggacgcgatttagaagataaggagggggaaattcaagcaggggcaaaactgtcactgaacagacagttcttcgatgaacggtggagtaaacatagagttgtgtcctgtctggattggagctcacagtacccggaactgctcgtggctagttataacaataacgaggacgctcctcatgaacccgacggtgtggccctggtgtggaacatgaaatacaaaaaaacaacaccagagtatgtatttcattgccagtcagctgttatgagcgccacctttgcaaaatttcaccctaaccttgtggtcggcggtacttattctggacagatagtcctgtgggacaaccgaagcaacaagcgtacacctgtgcagagaacccctctttcggccgctgcccatacacaccctgtttactgcgtgaatgtcgtgggaacacagaatgcccacaatttgatctccattagtacagatggtaaaatctgtagctggagtctcgacatgttgtcgcaccctcaagattcaatggaattggtgcataagcagtccaaagccgtggcagtgaccagcatgagctttccggtgggagatgttaacaactttgtcgttgggtccgaagagggctctgtttatacggcttgtagacatggcagtaaagcaggaataagtgagatgtttgaaggacaccaagggcctatcacaggtattcattgccatgcggctgtgggcgcagtcgactttagccacctgttcgtaacatcctcttttgactggacagtaaaactatggaccactaaaaacaacaagcctctctactcctttgaagacaacgcggactacgtgtacgacgtaatgtggagcccgactcaccctgccctgtttgcctgcgtagatgggatgggcagactggatctctggaatctcaataacgataccgaagttccgactgcgtctatatccgtcgaagggaaccctgcgttgaatcgagtgcgttggacccatagcgggagagagatcgcagtgggggatagcgaagggcagatagtgatctatgatgtgggggagcagatagcagtccctcggaacgacgaatgggcgaggtttgggcgaacacttgccgagataaacgccaatagagcagacgcagaggaggaggccgcaactaggatccctgcctag

SEQ ID NO: 221474 - DNA, 1893 bp, synthetic construct
  misc_feature 1..1893: note = Description of Artificial Sequence: Synthetic coding sequence
  source 1..1893: mol_type = other DNA
atgtctgataaaagtgagctgaaggcagagctcgagagaaaaaagcagagactggctcagatccgcgaggagaagaaaagaaaggaagaggagaggaaaaaaaaggagacggaccagaagaaggaagcagtggctcctgttcaggaggagagcgacctcgaaaagaaaaggcgtgaagctgaggctttgcttcagagtatggggctcacacctgaatcgcctatagctgaacagccactacgggtggtgacagctgatacctgtctgtttcactatcttgtgccccctccgatgagcccgagctccaaatctgtgagcacaccctccgaagcgggttcacaggattctggagacggagccgtgggctcaaggagaggtccgattaaactgggtatggcaaagattactcaagtggacttcccaccacgggagatagtgacttatactaaagaaacacagactccggttatggcccagcctaaggaagatgaagaagaggatgacgacgtcgtcgcacccaaacctcccattgaacctgaagaggagaaaaccctcaagaaagatgaagagaatgacagtaaggccccaccgcatgaactgaccgaagaggaaaaacagcaaattctccactctgaggagttcctgagcttctttgaccacagcaccagaatcgttgagcgggcattgagcgagcagattaacatattttttgattatagcgggagagacctggaggataaagagggcgagatccaggctggggctaaactgtcattaaaccgccaattttttgacgagcgctggtccaagcatcgggttgtgtcttgccttgactggtccagccagtacccagagctgctcgtggcgagctataacaacaacgaggatgcacctcacgagcccgatggagtggcattagtgtggaatatgaagtacaaaaaaaccacccctgagtacgtgtttcattgtcaaagtgcggttatgagcgcgactttcgcgaagttccaccccaacctcgtagtcggtggtacttactcaggccaaatcgtattgtgggacaaccgatcgaacaagcgcacgcctgttcagcgaactcctctgagcgctgccgcacacacccaccctgtctattgtgtgaacgttgtggggactcagaacgctcacaacctcattagcatcagtactgacggtaagatttgcagctggtcgcttgacatgctgagccacccccaagattccatggaacttgtccacaagcagtcaaaggcagtcgccgtgacaagtatgtctttccctgtgggcgacgtcaacaatttcgtcgtcggttccgaggaagggagcgtatacacagcctgcaggcacggctccaaagcgggtatttcagaaatgttcgagggccatcagggcccaatcactggcatacactgccatgctgccgtgggggcagtggatttctcccacctgttcgttaccagctccttcgactggacagtcaagctgtggaccaccaaaaataataagcctttatattcatttgaagacaacgccgattacgtgtacgacgtaatgtggtcacccacacatccggctctcttcgcatgcgtggacggaatgggcagattggacctatggaacctgaacaacgatacggaagtgccgactgcatcaattagcgtagaaggaaatccagccctcaatcgcgtcagatggactcacagcggaagggagattgccgtgggtgacagtgaaggacaaattgttatctatgatgtaggagaacagattgctgtccccagaaacgatgagtgggccaggttcgggaggactcttgctgagataaacgccaatcgtgccgacgcagaagaggaggccgctactagaatacccgcatag

SEQ ID NO: 221475 - DNA, 1917 bp, synthetic construct
  misc_feature 1..1917: note = Description of Artificial Sequence: Synthetic coding sequence
  source 1..1917: mol_type = other DNA
atgtccgacaaatctgaactgaaagccgagctcgaaagaaaaaagcagcgacttgctcagatcagggaagagaagaagaggaaggaagaggaacggaaaaaaaaagagactgaccagaagaaggaggctgtggcaccagttcaggaagagtcggacctggagaagaaaagaagggaggcagaagcgctgctgcagtcaatgggcctgacacctgaatccccaattgtgtttagtgaatactgggtccccccaccaatgtccccttcctccaagagcgtttctacaccgtctgaagcaggctcgcaagatagtggtgatggagcggttggtagccgtactctccattgggacacggatccttctgtcttacagttacacagtgattccgatcttggcagaggaccaataaagctggggatggctaagattacccaggtggacttcccacccagagagatagtcacgtacactaaagaaactcagacacccgtcatggcacagcctaaagaggatgaagaggaagacgatgatgtcgtggcccctaagccccctatcgaacctgaggaagagaagactctgaaaaaagacgaagaaaatgatagcaaagctccacctcatgagctcactgaagaagagaaacaacagatactgcattctgaagagtttctctctttttttgatcattctactcgcattgtggagagggcactgagcgagcagatcaacattttcttcgattactccggacgcgacctcgaggataaagagggagaaattcaggccggtgccaagctcagtttgaacaggcagttttttgacgaacgctggtcaaagcaccgtgtcgtaagttgcttagattggtctagtcaatatcctgagctcctggtcgcatcatataataataacgaggatgcaccacacgaaccggacggggtcgccctggtgtggaatatgaagtacaagaagaccacacctgagtatgtgttccattgccagagcgcggtgatgtccgctacattcgccaaattccatcccaatctggttgtaggcggtacatacagcgggcagatcgtgctatgggataatcgatccaataagcgcaccccagtgcagcggacaccactttcggccgcagcccatacccaccctgtgtactgtgttaacgtggtagggacgcaaaacgcacacaatcttatatcaatatcgaccgacggcaaaatctgtagttggtcacttgacatgctgagtcacccgcaggacagcatggaactggtgcataagcaaagcaaagcagtagctgtcacctcgatgtccttccctgtaggcgatgtgaataattttgtggtaggcagcgaagagggcagtgtgtacaccgcctgtcgacacgggtcgaaggcgggtatatccgagatgtttgagggccaccagggcccaattactggcattcactgtcacgccgctgtgggagccgtagactttagtcacctgttcgtgacctcatcctttgactggaccgtcaagctgtggaccaccaagaataataagcccttgtattcctttgaagacaatgccgactacgtctatgatgtcatgtggagccctacccaccctgcactctttgcttgcgtggatgggatgggaagactagatttatggaacctaaacaatgacaccgaggtgccaacagccagtatctctgtggagggtaaccccgcactgaatagggtcagatggacgcatagcgggagagagattgccgtcggcgattcagagggccagattgtgatttatgacgtgggggaacagatcgctgttcccaggaacgatgagtgggcccgttttggcaggaccctggctgagatcaacgcaaaccgtgctgatgctgaggaggaagccgctacccgcatcccggcttag

SEQ ID NO: 221476 - DNA, 1839 bp, synthetic construct
  misc_feature 1..1839: note = Description of Artificial Sequence: Synthetic coding sequence
  source 1..1839: mol_type = other DNA
atgagcgacaaatccgagctgaaggccgagctagagcgcaagaagcaacgacttgcacagatcagagaagaaaaaaagcgcaaagaagaagagagaaaaaaaaaagagacagaccagaagaaggaagccgttgcaccagtccaggaagaaagcgatttggagaaaaagcgcagggaggcagaagccctcctccagagcatgggcttaactcccgaaagccccatcgttcctcctcctatgtctccgagcagcaagtctgtgagcacaccatctgaggctggctcccaggactcgggcgacggagcagtggggtcacgaagggggcctatcaaattgggaatggcgaaaatcacacaggtggatttcccacccagagagatcgtgacctacaccaaggagacccagacacctgtcatggctcagcccaaagaggacgaagaagaagacgatgatgtcgtggcccctaagcccccaattgaacctgaggaggagaagaccctcaaaaaagatgaggagaacgattcaaaagcacctcctcatgagctgactgaggaggagaagcagcagattctgcactccgaagagttccttagtttttttgatcactctactaggatcgtggagagggctctcagcgaacaaattaacatttttttcgattactccgggagggatctcgaagacaaggaaggtgaaattcaagccggagcgaagctgagcctgaaccgacagttctttgatgagcgatggagtaagcacagggttgtgagttgtctagactggtcgtcgcagtacccagagctattggtagccagctacaacaacaacgaggatgccccacacgagcctgatggtgttgctttagtttggaacatgaagtacaaaaagactacccccgaatacgtcttccattgtcagtccgccgtgatgtccgctactttcgccaagttccatccaaacctggtggtcggcggtacttattctggacaaatcgtgctgtgggacaatcgatctaacaagaggacccctgtgcagcgaactcctctgtcagccgctgcccatacccatcctgtctattgcgtgaatgtagtgggcacacaaaacgcccataatctgatctcaatcagcaccgacggtaaaatctgttcctggtcccttgatatgttgtcccacccccaagactcgatggagctcgtgcacaaacagagtaaagcagtcgctgttactagcatgagcttccctgtgggcgacgtcaataattttgtggtgggatctgaggagggcagcgtttacactgcttgtcggcacggcagtaaagccggaatcagcgaaatgttcgaaggtcaccaagggcctatcacaggcattcactgtcacgccgcagtcggcgcagtggacttttcacatctcttcgtgacctcgtccttcgactggacagtgaaactgtggacgactaaaaataacaaacctctgtattcctttgaagacaacgctgactacgtatacgatgtcatgtggtcgccaacccatcccgctctgttcgcctgtgtcgatggcatgggcaggctggatctgtggaaccttaacaatgacactgaagttcctactgccagtatttccgtcgagggtaatccagcactgaaccgagtaaggtggacccattcgggaagggagatcgccgtgggcgacagcgaggggcagattgttatatatgacgtcggcgagcagatcgccgtgcccaggaacgacgagtgggcacggttcggcagaacacttgctgagattaacgccaatagggctgacgctgaggaagaagcagccactcgtattccagcttag

SEQ ID NO: 221477 - DNA, 1899 bp, synthetic construct
  misc_feature 1..1899: note = Description of Artificial Sequence: Synthetic coding sequence
  source 1..1899: mol_type = other DNA
atgagcgacaagtctgagcttaaggcggagcttgagcggaagaaacaaagattggctcagataagagaggagaagaagcgaaaggaagaggaacggaaaaaaaaggagacagaccagaagaaggaggctgtggccccagtgcaagaggagtccgacctcgagaagaaacgcagggaggctgaagctctgctgcagagcatgggtctgactcctgagagccccatagtgcctcctcccatgtctccaagcagcaagtcggtctcaaccccctcagaagccggtagtcaggatagcggtgatggcgctgtggggtccaggaccctccattgggatacggacccttcagtcttgcagctccactcagattccgacctaggtcgaggccctatcaagctggggatggctaagatcacccaggttgatttcccccctagagagatcgtgacgtacactaaagagacccagacaccagtgatggcccagcccaaggaggatgaagaggaagacgacgacgtggttgcacccaaacccccaatagaacccgaagaagaaaaaactctcaaaaaggatgaagaaaacgatagcaaagccccacctcacgaactgacagaggaagaaaaacaacagatcttgcacagcgaggagtttctcagtttctttgaccatagcacaagaatcgttgagagagctctgtctgagcaaatcaacattttcttcgactattccggaagggatctcgaggataaagagggggagatccaggctggcgctaaattatcccttaacaggcaattcttcgacgagagatggtctaaacaccgagttgtgtcctgcctcgactggagctcgcaataccctgagctgctggtggccagctacaacaataatgaagacgctccccatgagcctgatggagtggcactggtgtggaatatgaagtacaaaaaaacgacacccgagtacgtcttccattgtcagtcggctgtcatgagcgctaccttcgcgaaatttcacccaaatctcgtcgtgggaggaacctattctggtcaaatcgttctctgggataaccgatcaaataaaaggaccccggtgcaaaggacccccctcagcgctgccgctcacactcaccctgtgtactgtgtaaatgtagtgggcacccagaacgctcacaacttaatctcaatcagcacagacggaaaaatctgttcctggagtctggatatgctgtctcatccacaagattccatggagctggttcataaacagtccaaggcagtggcagtgaccagtatgtcttttccagtgggggatgttaataactttgtggttggtagtgaagaagggtccgtgtacacggcatgtcggcacggaagtaaagccggaatttccgagatgtttgaggggcaccagggacccataacaggcatacattgccacgccgctgtcggtgcagttgacttttcccacctgttcgtgacatccagtttcgactggacagtcaagctgtggacaacgaagaataacaaaccactctactccttcgaggataatgctgattatgtgtacgacgttatgtggagcccaacacaccctgcactcttcgcgtgcgtggatggaatgggcagattagatctgtggaacctgaataatgataccgaagttccaaccgcctcaatctcggtagagggtaatcccgcactgaatagggtgcggtggacccatagcgggagagaaattgcggtcggggacagcgagggccagattgtcatttatgacgtgggtgaacagattgcagtcccacgtaatgacgaatgggcaagattcggaagaacattggcagagattaacgctaacagagcagacgctgaggaggaggcagcaactagaattcccgcatag

SEQ ID NO: 221478 - DNA, 1914 bp, synthetic construct
  misc_feature 1..1914: note = Description of Artificial Sequence: Synthetic coding sequence
  source 1..1914: mol_type = other DNA
atgtctgacaagagcgagctcaaggcggagcttgagcgaaagaaacagcgacttgcacagataagagaagaaaagaagcgcaaggaggaggagagaaaaaagaaagagacagaccagaaaaaggaagccgtcgcaccagtgcaggaggagtcagatctggaaaaaaagcgaagggaggcagaagccctgttacagagcatgggtctgactcctgagtcaccgatagttttctctgagtattgggtgcctccaccgatgagcccctcaagtaagtccgtgagcaccccaagcgaggctggatcccaggactccggggacggcgctgtgggctcaaggacgctgcattgggacactgacccctctgtcctgcagttgcatagcgattccgacttgggacggggtcccataaagttggggatggccaagattacccaagtggacttcccaccgcgtgagatcgtaacatacaccaaggagacccagacacccgttatggcacagcccaaggaggatgaggaggaggatgacgacgttgtagctcccaagcctccaatcgagccagaagaggagaagaccctgaagaaggatgaggaaaacgacagcaaggcacctccccatgagttgaccgaagaggagaagcagcaaatcctgcactctgaggaatttctgagcttcttcgaccactctacccggatcgttgagcgagcgctctctgaacagatcaacattttcttcgactattctggacgcgacctggaagacaaagaaggcgaaatccaggctggcgcaaaactttctttgaacaggcaattctttgacgagcggtggtcaaaacatcgggttgtgtcgtgtctggactggtctagtcagtaccccgaactcctcgtggcttcatacaacaacaacgaggacgcccctcacgaaccagatggcgtggctcttgtgtggaatatgaagtataagaaaactaccccagagtacgtttttcactgtcagagcgcagttatgagcgctacgtttgcaaagttccaccccaatctcgtggtggggggaacatatagcggtcagatcgtgctttgggacaatcgtagcaacaagaggacccctgtccagaggaccccgctcagtgcagcagcacatacacatcctgtgtactgcgtgaacgtggttggcacccagaatgcccataacctcatatccatcagtacagatggcaaaatatgttcttggtcgttagacatgctaagtcaccctcaggattctatggaactagtccacaagcagtccaaggctgtagccgtaacctccatgtcctttccggtcggcgacgtcaataacttcgtagttggttctgaggaaggctcagtgtacacagcctgccgccacggctctaaagcagggatcagcgagatgttcgaaggtcatcagggtccgatcacaggtatccattgtcatgccgcagtgggcgcagtagacttttcccacctgttcgtcacttccagtttcgactggactgtaaagctgtggacgaccaaaaacaacaagcccctgtattccttcgaggataacgcagactatgtgtatgacgtgatgtggagccctactcaccccgcactatttgcctgtgtggatggtatgggaaggctggacctttggaatctgaataatgacactgaggtgccgaccgctagcatctccgtggagggcaacccggctcttaatcgtgtcaggtggacccactctggtagagagatagctgtcggtgatagcgagggtcagatagtgatatacgacgtaggagaaatcgccgtgccacgaaacgatgagtgggcgcgtttcggccgtactctggcagagataaacgccaatcgcgcagacgcggaggaggaggcggcaacgagaatccctgcttag

SEQ ID NO: 221479 - DNA, 1917 bp, synthetic construct
  misc_feature 1..1917: note = Description of Artificial Sequence: Synthetic coding sequence
  source 1..1917: mol_type = other DNA
atgagcgataaatctgaactcaaggccgagttggagcgcaagaagcagagactagcacaaattagggaggagaagaaacgaaaagaggaggagcggaagaaaaaagaaactgaccagaaaaaagaggccgtggcccctgtgcaggaggagtcagacctagagaagaagagacgcgaagccgaagcccttctccagtcaatggggctcacccctgaaagtcctattgtgttttccgagtactgggtgccaccaccaatgagtccatcatctaagagcgtttccacacctagtgaggctgggtcacaggactcgggggacggcgcagtgggtagtagaacattacactgggacaccgatccctctgtgctacaattgcatagcgacagcgacctgggcagggggcctataaagttaggcatggccaaaatcactcaggttgattttcccccacgagagatagtgacatataccaaggagacgcaaacccccgtgatggctcagcctaaagaggacgaggaggaggacgatgacgtggtggcccctaagcccccaatcgagccggaagaggagaaaacactcaaaaaagacgaggagaatgattcaaaggcgccacctcatgagctcacggaagaagagaagcaacagattctacactcagaagagttcctgtcattctttgaccacagcactagaatcgtcgagagagcccttagcgaacaaattaatatttttttcgactattccggaagggacctggaagataaagagggtgaaatacaggcaggagcgaaattaagtttaaaccggcagttttttgatgaaaggtggagcaagcatagggtggtctcatgtctcgactggagtagtcaatatcccgagctccttgtcgcgtcatataataataacgaggatgcccctcatgaacctgacggagtggccctagtttggaatatgaagtataaaaaaactacaccggaatacgtgtttcattgccagtctgctgttatgtccgcgaccttcgctaagttccatcccaacttggtggtgggcggaacgtactctggccagattgtgctgtgggataaccggtctaacaagaggacacccgtacagaggacccccctgagcgcagctgctcacacacatccggtgtattgcgtgaacgttgtgggaactcagaacgcacataatcttatttcaataagcaccgacggcaagatctgctcatggagcctagacatgctctctcatccccaggacagcatggagttagtgcataaacaaagcaaagcggttgccgtcacatcaatgagcttcccagtgggtgatgtgaacaactttgtcgttggttccgaggagggtagcgtgtacaccgcatgcaggcatggctccaaggcaggcatctctgagatgtttgagggacaccaaggacccataaccggaattcactgccacgccgcagtgggtgcagtggacttttctcatctctttgtgacaagtagctttgattggaccgtcaagctgtggacaactaagaataacaaacccttgtatagcttcgaagataacgccgactatgtctatgacgttatgtggtcccccactcatcctgcactctttgcctgtgtcgatggaatgggacgcttagacctgtggaacctgaacaatgacaccgaagtgcccactgcgtctatttccgtggaaggcaacccagctttaaaccgcgtgaggtggacacattccggaagagagatagcagtaggtgattccgagggacagatcgtaatttatgacgtcggagagcagatcgctgttcccaggaacgatgagtgggccagatttgggcgaaccttagcagaaattaacgcgaatagggctgacgccgaggaagaagcagctactcggattcccgcatag

SEQ ID NO: 221480 - DNA, 1836 bp, synthetic construct
  misc_feature 1..1836: note = Description of Artificial Sequence: Synthetic coding sequence
  source 1..1836: mol_type = other DNA
atgtcagacaagagcgagctcaaagctgagttggagcggaaaaagcaaaggctggctcagatcagagaggagaagaagcggaaagaagaggaacggaagaaaaaggagactgaccaaaagaaagaggcggttgcaccagtgcaggaagagagcgacctcgaaaagaagagacgagaggcagaggctttgctgcagagcatgggtctgacaccagagtcccctatcgttccacccccaatgtcaccttcgtccaaatctgtatctacaccctccgaagctgggtcacaggacagcggggacggagccgtaggtagtcgcagagggccaatcaagctgggcatggccaagataactcaggtcgactttcctcccagagaaatcgtcacctatactaaggaaacccagacccctgtgatggcgcagccaaaagaagacgaagaggaagatgatgacgtcgtagcccctaagcctccgatagagcccgaagaggaaaaaacactgaaaaaagacgaagagaatgactccaaggcaccccctcacgaactcactgaggaggagaagcagcagatcctgcactctgaagagtttctgagcttttttgaccactctactcgtattgtcgagagggctttgagcgagcaaatcaacatcttctttgactactcgggcagagatctggaagacaaggagggggagatacaggccggtgcaaagctttcactgaatagacagtttttcgatgagagatggtcaaagcatagggtcgtctcctgcctggactggtccagccagtacccagaactgttggtggcctcctacaataataatgaggatgctcctcatgaaccagacggagtcgctctcgtttggaatatgaaatacaaaaaaacgactcctgaatacgtattccattgccaatcggctgtaatgtctgcaacatttgctaaatttcatcctaatctggtcgtaggcggaacttattctggtcagatcgtcctctgggacaatagaagcaataaacggacacctgtgcaaagaacccccttgagcgcagcagcccacacacatccagtctactgcgtaaatgttgtgggaactcaaaacgcccataatctcatcagcatatccacggacggcaagatctgttcttggtccctggacatgttgagtcatcctcaagattccatggagctggtgcacaagcaatcaaaagccgttgcagtcacatccatgtccttccccgtgggagatgtgaataatttcgtggtcggctcggaggaaggaagcgtttacactgcctgcagacacggttccaaggccggaatctcagaaatgttcgaaggacatcagggacccataactggcattcattgccatgccgctgtgggcgcagtggacttcagtcatctatttgttacgtccagcttcgactggacagtgaagctctggacaaccaagaacaataaacctctttatagtttcgaggacaacgccgattatgtatacgatgtcatgtggtcaccaacgcaccctgctctcttcgcttgtgtggacgggatggggagactggacctctggaacctgaataatgataccgaggtgcccaccgccagcataagtgtagaaggaaacccagcattgaatagggttcgctggacccatagcgggcgagagattgccgttggtgactctgaggggcagattgtgatctacgacgttggtgagattgccgtgcccagaaatgacgaatgggctcgcttcggcaggacgctcgccgaaattaatgctaaccgcgctgatgctgaggaagaagctgctacacgaatccctgcttag

SEQ ID NO: 221481 - DNA, 1917 bp, synthetic construct
  misc_feature 1..1917: note = Description of Artificial Sequence: Synthetic coding sequence
  source 1..1917: mol_type = other DNA
atgagcgataagtctgaactgaaggccgagcttgagcgcaagaagcagaggctggctcaaatcagggaggagaaaaagcgcaaggaggaagaacgcaagaagaaggaaactgatcagaagaaagaagccgtggcacctgttcaggaggagtccgatttagagaagaagcggagagaagccgaggcattgttgcagagtatggggctgacaccagaaagtccaatcgacatcgcagagtacttagttccacccccaatgagtccaagttcaaaatctgtgtcgactccatccgaagctggctcccaggattctggggacggggctgttggtagccggactctccattgggataccgacccctctgtgttacagctgcattcagactccgatctcggccgagggccaatcaagctcggcatggccaagatcactcaggttgatttcccgcctcgtgagatcgtgacttatacaaaggaaacccagacacctgtgatggctcagcccaaagaagatgaagaagaagacgacgatgtcgtggctccaaaacccccaatcgaacccgaggaagaaaagaccttaaaaaaggatgaagagaacgatagcaaggctcctccccacgagttaactgaagaggaaaagcagcagatcctccatagtgaggaatttctgtcgttcttcgaccactcgacacggatagtggagagagcactatccgagcagatcaacatatttttcgactacagcggccgagacctcgaggacaaagaaggggagatccaagccggagccaaattgtccctgaatagacagttctttgacgaacggtggagtaagcacagagttgtctcctgcctggattggtcaagccagtaccctgagctcctggttgctagctacaataataacgaagatgcccctcatgaaccagatggggtggccttagtctggaacatgaagtacaagaaaactacccctgaatacgtgttccactgccaaagcgccgttatgtcagccacctttgccaaattccacccaaacctggtagttggtggaacatattcaggccagatcgtcctttgggataatcggagtaataaaaggaccccagtacagcgcacacccctatccgctgctgctcacactcacccggtgtattgcgttaacgttgtcggtacacagaacgcccacaatttgatatccatttctactgatgggaaaatatgttcctggtctttagacatgctttctcacccccaagacagtatggaactggtacacaaacagagcaaagcagtcgccgtaaccagcatgtcattccccgtgggagatgtgaacaatttcgtggtgggaagtgaggagggtagcgtgtacaccgcctgcaggcacggctcaaaagctggaataagcgagatgttcgaggggcatcagggacctatcaccggcatacattgccatgcggctgtgggcgctgttgatttctctcatctctttgttacttcttcctttgattggaccgtgaaattatggactaccaagaataacaaaccactgtacagttttgaggataatgccgattacgtttacgacgtgatgtggtcccctacacacccggcactgtttgcctgtgtcgatgggatggggagactcgacctgtggaatcttaacaacgataccgaggtgcccaccgcttctattagcgttgaaggaaaccctgcgctgaatcgggttcgctggactcactcaggtagggaaatagccgtcggcgattctgaaggtcagatcgttatctacgatgtgggcgagcagatcgccgtgcccagaaacgacgagtgggctaggtttggccgaacattggctgagattaacgctaatagggccgacgctgaagaagaagcagccaccagaatccccgcatag

SEQ ID NO: 221482 - DNA, 2763 bp, synthetic construct
  misc_feature 1..2763: note = Description of Artificial Sequence: Synthetic coding sequence
  source 1..2763: mol_type = other DNA
atggccaacgggactgccgatgtgaggaaacttttcatctttacaacgacacaaaactattttggattgatgtcagagctgtgggaccagcctctgctatgtaactgcctagagattaacaacttcctggacgatggcaaccaaatgttactgcgcgttcagcgctctgatgcgggaattagtttttctaataccatcgaattcggtgatacaaaggacaaggttctggtgttcttcaagcttcgccctgaggtgattaccgacgagaatttacatgacaacatccttgtgagctctatgcttgagtctcctatctcatccctgtaccaggcagtcaggcaggtgttcgcccctatgctgctaaaggaccaggaatggtctagaaactttgaccctaagctccagaatctgttgagcgaattagaggccggacttgggatagttctgaggcgttccgacactaaccttacgaaactgaagttcaaagaagacgatacgaggggaattcttactccatctgatgagtttcagttttggattgaacaggcccaccggggaaacaagcagatcagcaaggagcgcgctaattacttcaaggagctgttcgaaaccattgcaagagaattttataaccttgactctttgagcctcctcgaagttgtggacctggtagagaccacccaagacgtggtagatgacgtttggcgtcagaccgaacacgaccactaccccgagtctaggatgttacatcttctcgacattataggtgggtctttcggaagattcgtgcaaaaaaagcttggaactctgaacctctgggaggacccctactacctggtaaaggaaagcctcaaagccggaatctcaatctgtgagcagtgggtgatagtgtgcaaccacttaaccggacaggtgtggcagagatacgtcccccatccctggaaaaatgagaaatacttccctgaaacgcttgataagctgggcaagaggctcgaagaggtcttggccatccgcacaattcatgaaaagtttttgtattttctgcccgcaagcgaggaaaaaattatttgcttgactagggtgtttgaacctttcaccgggttgaatcctgttcagtataacccatatacagagcctctgtggaaagcagctgtgtcacagtacgagaagataatcgctccagccgagcaaaaaatcgctgggaagttaaagaactatatctcagagatccaggacagcccacaacagttactgcaggcctttttaaaatataaggaactagttaaaagacccactatttccaaggagttgatgctagagcgagagaccctgcttgctaggctggtggatagtatcaaggactttagactggattttgaaaaccgctgcagagggattcccggtgatgcatcgggtcctctgagcggtaagaatctgtctgaggtggttaactcgattgtttgggtgcgacagctggagttgaaagtggatgataccatcaagatcgcagaggcactgctgtctgacctacccggattcaggtgtttccatcagagcgccaaagacctgctagaccagttgaagctgtacgagcaggagcagttcgacgattggagccgcgacatccagtccggactctcagattccagaagtggcctgtgtatcgaagcatcctcccgcattatggagttagactctaacgatggactgctgaaagtccattatagtgacaggctggtgattctacttcgagaagtccgacaactcagcgcactgggcttcgtgatccccgctaagatccagcaagtggcaaacatcgcgcagaagttctgcaagcaggctattattctgaagcaggtagctcatttttataatagcatcgaccagcagatgatccagagccagcggccaatgatgctgcaaagtgccctcgcttttgaacagatcataaaaaacagcaaggccggaagcggagggaagtctcaaataacttgggacaaccctaaggagctggagggatatattcagaagctgcagaacgcagccgagcggctcgccacagagaaccggaagctgcgcaagtggcacacgactttctgtgagaaagtcgtagtccttatgaacatcgatcttctgcgtcaacagcagcgctggaaggacggcctacaggaactgagaactgggctcgccacagtcgaagctcagtgccccctcgcctggcaaagcaagtgggagggtccggaggaccctctacagtacttacgcggattggtggcccgagccctggcgatccagaattgggtggacaaagctgagaaacaggctcttctatcggagaccctggacctgtctgaactgtttcatcctgacacttttttgaacgccttgaggcaagaaaccgccagagccgtggggagatccgtcgacagtctcaaattcgttgcttcctggaagggacgtctgcaggaggcaaaactacaaatcaagatttctgggctgctccttgaaggttgctcctttgacggaaatcagttaagtgagaatcagcttgatagtccaagcgtgtcctcagtgctgccctgtttcatggggtggatcccccaggatgcgtgcggaccatattcaccagacgagtgcatctcattgccagtttatacctccgcagaaagagaccgagtcgtgacaaatattgacgttccctgcggaggcaatcaagaccagtggatccagtgcggggctgccctgttcttaaaaaaccaatag

SEQ ID NO: 221483 - DNA, 12924 bp, synthetic construct
  misc_feature 1..12924: note = Description of Artificial Sequence: Synthetic coding sequence
  source 1..12924: mol_type = other DNA
atggctaacggcacagcggatgtaaggaaactgttcattttcaccaccactcagaattacttcgggctcatgagtgagttgtgggatcagcctctgctctgtaattgcctggaaataaacaattttctcgatgatggtaaccagatgcttctcagggttcagagaagcgatgcagggatcagttttagcaatacaattgagttcggtgatactaaagataaagttttggtctttttcaagctgaggcctgaggtgatcactgacgaaaatctccacgacaatatcctagtcagctctatgttggagtctccaatttcttctctgtaccaagcggtgcggcaggtattcgcccctatgcttctcaaggatcaggaatggtcacggaactttgatccgaagctgcagaatctgttgagcgaactggaggccggactgggaatcgtgcttaggagatctgataccaatctcaccaaactgaagttcaaagaagacgatacccggggaattctaaccccatctgacgagttccagttctggattgaacaggcgcatcgtggcaataaacagatttctaaagagagggctaattacttcaaggaattattcgaaactatcgctcgcgagttctacaacctcgactctctgagtctgctggaagtggtggaccttgtggaaactacccaagatgtggtcgacgacgtgtggagacagactgagcatgaccactacccagagtcaagaatgcttcaccttctggacattattgggggtagttttggcaggtttgtccaaaagaagctcgggacacttaacctgtgggaagacccttactacctagttaaagaatcactaaaggctggcatcagtatctgcgagcagtgggtgattgtctgtaaccacctgacaggacaggtgtggcagcgttacgtgcctcacccttggaagaatgaaaagtattttccagaaactcttgataagctgggaaagcgactggaagaggttcttgccatccgcaccattcatgagaaattcctgtacttccttcccgcatctgaggagaaaattatttgtctcactcgggttttcgaaccgttcaccggcttgaatccagtccagtacaacccctatactgagcccctgtggaaagccgcagtctcacagtatgagaaaatcatagcgcctgctgagcagaaaattgcaggtaaactcaaaaattacatcagtgagatccaggactctcctcagcagctgctgcaggccttcctcaagtacaaagaattagtcaagcgtccaaccatatcaaaggagttgatgctggagcgcgaaaccctgctggctcggctggtggattctatcaaagactttaggctcgatttcgagaatagatgtaggggaatccccggtgatgcctctggacccctgtcgggtaagaatttgtccgaagtggtgaactctatcgtgtgggttcgacaactcgaacttaaagtcgatgacacaatcaaaatcgctgaggccctactgagcgatctgccaggctttcggtgctttcaccagtcagctaaggacctgttggatcagctgaagctttatgagcaggaacaatttgacgactggagccgggatatccagagcggcctaagtgatagccgctcgggcttgtgtattgaggcctcaagtagaatcatggagctggattcaaacgatggattgctcaaggtgcattacagcgaccgactggtgatcttgcttagggaggtccggcaactttctgccttagggtttgtgattcccgcaaaaatccagcaagtggccaatattgctcagaaattctgcaagcaggcaattatactgaagcaggtggcacacttttataacagcattgaccaacagatgatccagtcccagcgtccaatgatgctccaatccgccttagcattcgagcagatcataaaaaactctaaagcagggtctggcggtaaatcacagatcacgtgggataatcccaaggaactagaaggctacatacagaagttacagaatgccgcagagcggcttgcgaccgagaacaggaagctaagaaagtggcatactactttctgcgagaaggtagttgtcctcatgaacattgatcttctccgccaacagcaacgctggaaagatgggctccaggaattgcggacggggctcgcaacagtggaagcacagggctttcaagcctccgacatgcacgcatggaaacaacactggaatcatcaactatacaaggctctggagcaccagtaccagatggggttggaggcgctcaatgagaacttaccagagattaacatcgatctaacttataagcagggcagactgcagtttcgtcccccattcgaggagattagagccaagtattatcgtgagatgaagagattcatcggcattccaaatcaattcaaaggagtgggcgaagcaggggacgagagcatttttagtattatgattgacaggaatgcctcaggctttctgacaatcttctccaaagctgaagatcttttcaggaggttatccgcagtgcttcaccagcataaagagtggatcgtcattggtcaggtagacatggaagcactagtggagaagcacctcttcaccgtccacgactgggagaagaatttcaaagcactaaagatcaaaggcaaggaggttgagcggttgcctagtgccgtcaaagtcgattgcctgaatatcaactgtaatcctgtgaaaaccgttattgatgatttgatccagaagcttttcgatttactggtactgtcgctgaagaaatcaatacaagcccatctccatgaaattgataccttcgtgaccgaagctatggaggtgctaacaattatgccccagtcagtggaggagattggagatgctaacttacaatacagcaaattgcaggagcgcaagcctgagatcctcccgctcttccaggaggcagaggacaagaacaggttgcttaggacagtcgctggaggaggtctggagacaatcagtaacctaaaagctaaatgggacaaatttgaactgatgatggaatcccaccagttgatgataaaagatcaaattgaggtgatgaaaggtaatgtgaaaagccggctccaaatatattaccaggagctcgaaaagtttaaagccagatgggaccagctcaagcccggtgatgatgtgatagaaacggggcagcacaatactctggataagtcagccaagttgatcaaggaaaagaagatagaattcgatgatctcgaagtgacccggaagaagctcgtcgacgactgtcaccacttccggttggaggagccaaacttctcattggcctcttccatcagtaaggatattgaatcctgtgcccagatttgggccttttacgaagaattccagcagggtttccaggaaatggccaacgaggactggatcactttccggaccaaaacatacctcttcgaggagtttctgatgaattggcatgaccgactgaggaaggtggaggaacattccgtcatgaccgttaagttgcaaagcgaggttgacaagtataaaatcgtgattcccattttgaagtatgtacggggagagcacctctcccctgatcactggctcgatttgtttcgccttttgggactccccaggggcacgtccttggagaagttgctgtttggagacctgcttcgggtggccgatactattgtcgcaaaggcagcagatttaaaggatctgaactcacgtgcacagggagaggtgacaatccgcgaagcactgcgagagttagatttatggggggtgggtgccgtgttcacattgatcgattacgaagacagccagtctcgtacaatgaagcttatcaaggactggaaagacattgtcaaccaggtgggagacaatcgatgtcttctgcagtccttaaaagattcgccctattacaagggattcgaggataaagtctcaatttgggagaggaagctggccgagctggatgagtatctccagaacctcaatcatattcaacgcaagtgggtgtatctcgagcccatctttggacgaggggctctgcccaaggaacagaccaggtttaatcgggtcgatgaagatttcaggtctattatgaccgacatcaaaaaagataatagagtgactactttgaccacacacgccggtatacgcaactccctcctgaccatcctggatcagttgcagcgttgccagaagagcctgaatgaattcctggaagaaaagcgctcagcatttccgaggttctactttatcggggacgatgaccttcttgaaattcttggccaatccaccaatccctccgtcattcagagccacctgaagaagctgtttgcaggtatcaatagcgtgtgcttcgatgaaaaatccaagcacataacagccatgaagagcttagagggagaggtggtcccattcaaaaacaaagtgccactgagcaacaatgtagaaacctggctgaatgatctcgcactggaaatgaagaaaacactcgaacagttgttaaaagagtgtgtcacaacgggcaggagctcacagggcgcagtggacccgtcactcttcccctcgcagattctgtgcctggccgaacaaataaaatttaccgaggatgtggaaaacgccatcaaagatcactccctgcatcagatagagacccagctggtcaataaacttgagcagtatacaaacatcgacacctcttctgaagaccctggcaacactgaatccgggatcttggagctgaaactgaaggccctgattctggacattatccataatattgacgtggtgaaacagctgaaccagatccaggtccatacaactgaagattgggcctggaagaagcagcttcgattttatatgaagtccgaccacacgtgctgcgtgcaaatggtagattcagaatttcagtacacctacgagtaccaaggaaatgcttcaaaacttgtgtatacaccgctgactgacaagtgctatctgactctgacccaggctatgaaaatggggctgggcggtaatccttatggcccagccggaacagggaagactgagagcgtgaaggcccttggaggcctcttaggtaggcaagtgctggtgttcaactgtgacgagggcatcgacgtcaagtccatggggaggatttttgttggactggtgaagtgtggtgcatggggatgctttgacgagtttaatagactggaagaatccgtactcagtgctgtctcgatgcagatacagacaatccaggacgctttaaaaaaccatcgaaccgtgtgcgaactcctgggaaaggaagtcgaggtgaactctaactctggcatctttatcacaatgaacccagctggtaaagggtacggtgggagacagaaacttcctgataatctgaaacaattgtttcgcccagtggcaatgagtcatcctgataacgaattgatagcagaggtgatcctctattcagagggcttcaaagacgcaaaggttctgtcccggaagctcgtcgccatctttaatttatcacgtgaactccttaccccgcaacagcactacgactggggcctgcgagctcttaagacagttctgcgaggatccgggaatcttcttcggcaactcaacaaatctggaactacccagaacgctaacgaatcccacatagtcgtgcaggcccttagactgaacactatgtctaagtttaccttcaccgattgcacccgttttgatgcattgatcaaggacgtgtttcccggaatagagcttaaggaagttgagtatgatgagctgagcgcagcattaaagcaggtgtttgaagaagctaattacgagatcatcccaaatcagatcaagaaggccttggaactgtatgaacagctgtgccagcgtatgggtgttgtgatcgtgggacctagcggagccggaaaatcaaccctgtggaggatgctgagggccgcactgtgcaagactggtaaagttgtgaaacaatacacaatgaatcctaaggcaatgccccgttaccaactcctagggcatatcgacatggatacaagggagtggagcgatggagtcctgacgaacagcgcaagacaggtggttagagagccacaagacgtgtcatcatggattatctgtgatggtgacatcgatccagagtggattgagagtctcaattcagtgctggatgacaaccgactgctcactatgccctccggggagaggattcagttcgggcctaacgtgaatttcgtgttcgagacccacgacctgagttgcgcctctcccgcaacaatcagtcgcatgggcatgatatttctttccgacgaggagaccgatttaaactcacttattaagtcctggctgaggaaccaacctgcggaataccggaataatctggagaattggattggagactatttcgaaaaggctctgcagtgggtgctgaagcagaacgattacgtggtcgagacgagtctggttggcaccgtcatgaacggcctgtcgcatctgcacgggtgcagggatcatgatgaatttattattaacttgattaggggactgggtggtaacttgaatatgaaatcacgtctggagttcactaaagaggtctttcactgggcaagagagagccctccagatttccataaacctatggatacctactacgactcaacacggggacggctggctacttacgtgctgaaaaagccagaagacctgacggccgacgacttcagtaacggcttgactttgcccgtgatccagacgcccgatatgcagcggggtctcgactatttcaagccctggctgtcgtctgacaccaagcaaccgtttattcttgtgggacctgagggatgtggcaaaggtatgctcctgcgctacgcatttagtcaactgaggtccacgcagatcgccaccgttcactgttccgctcagactacatcacgacacctgctgcagaaactgagccagacatgcatggtcatcagcactaacaccggaagagtgtatcgtcccaaggattgtgagcggctggtcctctatctgaaagatatcaacctgccaaagcttgataaatggggaacctctactctcgtggctttcctccagcaagtcctcacatatcaaggattctacgacgagaatttggagtgggttggtctggaaaacattcagatagtggctagtatgtcagctggagggcgacttggcaggcacaagctgactacccggttcacatccatcgtgagattatgctccattgattacccagagcgtgagcagctccaaaccatctacggtgcctacttggaaccagtcctgcacaagaatctaaagaatcatagcatttggggctcttcatccaaaatctatttattggccggatctatggtgcaagtgtacgagcaagtccgagccaagttcacggtcgatgattacagtcattatttcttcacgccctgcatccttacccaatgggtcctgggcctgttcaggtatgatctggagggcggatcaagtaaccatcccctggactacgtgctggagattgtggcttacgaggctcggagactgtttcgcgacaagattgtgggagcgaaggagttgcacttgttcgatattatcctcacctcggtctttcagggagattgggggtctgacattcttgataatatgtccgattccttttatgttacttggggggctagacacaattcaggggcacgagccgcacctggtcagccactacctcctcatggcaagcccctggggaagctgaactctaccgacttgaaggacgtcatcaaaaaaggcctcattcactacggaagggataatcagaatttagatatcctgttgtttcacgaggtgcttgagtatatgtccagaattgacagggtgctgtcttttcccggaggttccctgctgctcgcaggcagatcgggggttggacgacgaaccattacatccctggtgagtcacatgcacggcgctgtgctgttttcgcccaagataagtcgtgggtatgagttgaagcagtttaaaaacgatctgaaacacgttctgcagctggccggaattgaagctcagcaggtggtgcttttacttgaggattaccagttcgtccatcccacgttcttggaaatgattaattcccttctgagctctggcgaagttccgggactatatactcttgaggaattagagccgcttctgctgcctcttaaggaccaggccagccaggacggcttttttggccctgtgtttaattactttacctaccgaatacagcaaaacttgcatatcgtcctgataatggattctgcaaatagcaacttcatgatcaactgtgagagtaatcctgcgctgcacaaaaaatgccaagtgctgtggatggaaggctggtcaaatagcagtatgaaaaaaataccagaaatgctgttttctgagaccggagggggagagaagtacaatgataaaaagaggaaagaagagaaaaagaagaactctgtcgacccggattttctgaagagcttcctgttgattcatgagtcctgtaaagcgtacggcgctacacccagtaggtacatgacattcttgcatgtctattcagccatcagttcttccaagaagaaagagcttctcaagcgacagtctcacttacaggcaggggtttccaagctgaacgaggcgaaagcactcgtagatgaactcaacagaaaagccggagagcaaagcgtcctgctcaaaactaaacaggacgaggccgatgccgctcttcagatgattaccgtgtccatgcaggacgcaagcgagcagaaaaccgagctcgagaggctcaaacatcgaatcgcagaggaagtcgttaaaatcgaagagaggaaaaataaaattgacgacgagcttaaggaggttcagccccttgtgaatgaagctaaactggcagtgggaaacattaagccagaatcgttgtccgagattcgcagcctccgaatgcctccagacgtgattagagatatcctggaaggtgtcttacgacttatgggaatctttgacacttcatgggtgtcaatgaagagttttcttgccaaaaggggcgtccgggaggacattgccactttcgacgccaggaatatcagtaaggaaatcagagaatctgttgaagagctgctgttcaagaacaagggctcttttgaccccaagaatgccaagagagcgtccactgcggctgccccacttgcagcatgggttaaggcaaatatccagtactctcacgttcttgaaagaatccaccctctggaaaccgagcaggctggtttggagagcaacctcaaaaagaccgaagatcgtaagaggaagctcgaagagttactgaactccgtgggacaaaaggtttcagaactcaaagaaaagtttcagtcacgtacgtctgaggccgcaaagcttgaggccgaggtgtccaaagctcaggagacaatcaaggcggctgaggtgctgattaatcagttagaccgagaacataagcggtggaatgctcaagtggtggaaattaccgaagagctcgctacacttccaaaacgtgcccagctcgcagcagcttttataacatacctgtcagctgcgccagagagccttcgcaagacttgtctggaggaatggacgaagtcagcaggattggagaaattcgacctcagaagattcttgtgtaccgagagcgagcaactgatctggaaatctgaggggctaccgagcgatgacctctccatcgagaatgccctggtcattttacaatcccgggtgtgccccttcctgatagacccctcctcgcaagccacggagtggttgaagacccacctgaaggactcaagactggaggtgattaatcaacaggatagtaactttattaccgctctggaactggccgtcagatttggcaaaactctcataatacaggagatggatggggtggaacctgtgctctaccccctactgcggagagatctggtcgcccaaggacccagatatgtcgtgcagatcggagacaaaatcattgactataatgaggagtttcggctttttctgagcactcgaaaccccaatcctttcatacccccagatgctgcctccattgtcacagaggtgaacttcaccactacaaggtccggccttagaggccaactgctcgcgttgacaatacaacacgagaaacccgacctcgaggagcagaagaccaagctgctgcagcaggaggaggacaaaaagattcagttggccaagttggaagagagcctgctcgaaaccctggctacgtcccagggaaacatcctggagaacaaagaccttattgagtctctgaatcagacgaaagcatcctctgcactcattcaagaatccctaaaggagagctacaagcttcagattagtctggaccaggagagagatgcctacctcccacttgccgaatcagcaagcaaaatgtactttattatttccgacctctcaaaaattaacaacatgtatcggttcagcttggccgcttttctgagacttttccagagagcactgcagaacaaacaggatagtgaaaatactgaacagcgtatccagtccttgatcagttccctccagcacatggtttatgagtacatctgcaggtgcctgttcaaggccgatcagttgatgttcgccctgcattttgtgaggggcatgcacccagaactatttcaagagaatgagtgggacacattcacaggcgtcgttgtcggagacatgcttaggaaggctgatagtcaacaaaaaattcgagaccagctgccaagctggatcgatcaagaacgtagttgggctgtggcaacactcaagatcgctctgccctctctgtatcagaccctgtgtttcgaagatgccgcactgtggcgcacatactataataattccatgtgcgagcaggagtttccttctattttggctaagaaggttagtctttttcagcagatcctggtcgtgcaggcactcagacctgatcgtctgcagagtgccatggccctgtttgcatgtaagaccctcggattgaaggaggtgagccccctgcctctcaacctcaagaggctgtacaaggaaactctggaaatcgaacccatcctgatcatcataagccctggggctgacccaagccaggagctacaagagctggcaaacgctgaacggtcaggggaatgctatcatcaagtagcgatgggacagggccaagccgatttggctattcaaatgttgaaggagtgtgctagaaacggcgattggctgtgtctgaagaaccttcatctcgtggtatcctggctgccagttttggagaaagaactgaacaccctgcagccaaaagatacatttagactgtggctgaccgccgaggtccacccaaattttactcctattctgctgcagtcaagcctcaaaatcacttacgagtcacctcccggactcaaaaaaaatctgatgcggacatatgagtcatggacacccgaacagatttcaaaaaaggacaatactcaccgcgctcatgccctgttcagtttggcatggtttcatgcggcttgccaggagcgtcgcaactatatccctcaaggttggactaagttttacgagttcagcttgagcgacctacgcgcaggatacaatatcatagatcggctgtttgacggcgctaaagacgtgcagtgggaatttgtccacggtctcctggaaaacgctatatacggtggcagaatcgataactactttgacttaagagtcctgcagagctacctcaaacagttctttaacagtagtgtgatcgatgtgttcaatcaaagaaacaagaaatctatttttccgtattccgtgagcctgccccagtcctgtagcatcctcgactaccgtgccgtgatagagaagattccagaagatgataagccatccttctttggcctgcccgcaaatatagcacgctcctcccagcggatgatctcctcacaggtgatttcgcagttgcgaatcctgggccgatctatcactgccggttctaaatttgaccgcgagatttggtctaacgaactgtcacccgttctcaacctctggaagaagctgaatcaaaactccaacctcatccaccaaaaggtgccccctcccaacgatcgccaggggtcacccattctgagctttattattctcgagcaattcaatgcaatccgcctcgtgcagtccgttcaccagtccctagctgctctatctaaagttatccgtgggacaactctgctctcttcagaagtacagaaactggcatctgccttgctgaatcagaagtgtcccttagcctggcagagcaagtgggaaggcccagaagatcccctgcagtatctaaggggtctggtcgctcgggcattggccatccaaaactgggtcgataaggccgagaaacaagcactccttagtgagacactagatctgtcggaactttttcacccagatacttttctgaatgccctgagacaggagacagcgagggctgtaggaaggtcagtggacagccttaagtttgtggcatcctggaagggacgcctccaagaggctaaactgcaaataaaaattagcggtctgctgctcgaaggttgcagttttgacggcaatcagctgtcagaaaatcagctggactctccttctgtaagcagcgtgctgccctgttttatgggatggatcccccaggatgcatgcggtccttattccccggacgaatgcatttctctgccggtgtatacgtctgcagaaagagatagagtggtcaccaatatagacgtgccctgtggaggaaaccaagatcaatggatccagtgcggcgcagccctatttctaaagaaccagtat

SEQ ID NO: 221484 - DNA, 12945 bp, synthetic construct
  misc_feature 1..12945: note = Description of Artificial Sequence: Synthetic coding sequence
  source 1..12945: mol_type = other DNA
atggctaacggtactgccgacgtacgaaaacttttcattttcaccaccacacaaaattacttcggtctaatgtcagaactatgggatcagcccttactctgcaattgcctagagatcaataatttcctggatgacggaaatcaaatgctcctccgtgtccagaggtctgacgctgggatttcattttctaatactatcgagtttggagatactaaggataaagtgctagtttttttcaaactgagacctgaggtgattactgatgagaacttacacgacaacattttagtctccagtatgctcgagtctcccatcagcagcctatatcaggccgtgcgacaggtcttcgcccctatgcttcttaaagatcaggagtggtcccggaatttcgatccgaagctgcaaaacctattgagcgaactggaggctgggttggggatcgtcctacgccgatctgatactaatctgactaagttgaagtttaaggaagatgacacgcgagggatcctaacaccaagcgacgaatttcaattctggatcgagcaagcccaccgaggaaacaaacagatctctaaggagcgcgctaactattttaaagagttatttgaaacaatcgctcgggagttctacaacctggactcactgagccttctggaagtagttgacttggtggagacaacccaagacgtcgtggatgacgtctggaggcagactgaacacgaccactatcccgaatcccggatgctgcacctgctcgacattattggcggaagcttcggccgtttcgtgcaaaagaagctggggactttaaatctttgggaggatccttactatctggtcaaggagagcctgaaggccggtatctccatatgtgagcagtgggtgattgtatgcaaccacctgaccggacaagtgtggcagcgctatgtgcctcatccgtggaagaacgagaaatattttccagagactctcgataagctgggcaaaaggctggaggaagtgcttgcaatccgcaccatccacgaaaagttcctctatttcctgcccgcttcagaagagaagattatttgtctgacccgggtgtttgagccgtttactggcctgaaccctgtgcagtataacccctacaccgagcctctgtggaaggcagcagtctcacaatatgagaagattatcgcgcctgccgagcagaaaatcgcaggaaaactgaagaactacatcagtgagattcaagacagccctcagcagttacttcaggcctttctcaagtataaggagctcgtgaaaaggcccaccatcagcaaagaactcatgctcgaacgagagaccttactggctaggctggtggattccattaaggatttccgacttgactttgaaaatagatgtcggggtatacctggagatgcttctgggccactctctggcaaaaatctgagtgaggtggtgaattccatcgtgtgggttaggcagctggagctgaaggttgacgacacaatcaaaattgctgaagcactcctgtccgaccttcccggtttccggtgttttcaccagtcagccaaagacttgctggatcagttaaagctttatgaacaagagcagtttgacgactggagtcgtgatatccagagcggcctctccgattccaggagcggtctgtgtatcgaggcatctagtagaattatggagctggatagcaatgacggactgctgaaggtccactactccgaccgcttagtgatcctgctgcgggaggttcggcagctatcggctctaggctttgtcatcccagcgaaaattcaacaagtagctaacattgcccagaaattttgtaagcaggctattatcctcaaacaggtggctcacttctataacagtatcgaccaacagatgattcagagccagaggcctatgatgctgcagtctgcgctcgcgttcgaacagatcatcaaaaacagtaaagccggatccggagggaaatctcagatcacatgggataaccccaaggagctggagggatatatccagaaattacagaatgctgccgagcgactggccactgaaaaccggaagttgcgcaagtggcacacaacattctgcgagaaagttgttgtgctgatgaatatcgatttgctccggcagcaacaaaggtggaaggatgggcttcaggaactgagaactggtctggccactgtggaggcccagggatttcaagccagtgatatgcatgcatggaagcagcactggaatcatcagttatacaaagcactggaacatcaatatcagatgggcttggaagccctcaatgaaaaccttccagagatcaatattgacctgacctataagcaaggacggctccagttcagacccccatttgaggagattcgggctaaatattatcgggaaatgaagcgattcatcgggattcctaatcagttcaaaggtgtcggggaggccggagatgagtccatcttcagcatcatgatagacaggaacgccagtgggtttttgacaatcttctctaaggcagaggacctgttccgacgcctgagtgctgtcttacaccaacacaaagagtggattgtgattgggcaggtcgacatggaagctctggtcgagaagcatctgttcactgttcacgattgggaaaaaaacttcaaagctctcaagattaaggggaaggaggtggaaagactgccctccgccgtcaaggtagactgccttaacatcaattgtaatccagtgaaaaccgtgatcgacgatctcatccagaagttgtttgacctcctggtgctgtcattgaagaagagcattcaggcacacttgcacgagattgatacatttgtgacagaagccatggaggtgttgacgattatgcctcagagcgtggaagaaatcggcgatgcaaatctgcagtactccaaactccaggagagaaagcccgaaatcctcccattatttcaggaggcggaggacaagaatcgcctcctgcggacagtggcaggagggggactggagaccatcagcaacctcaaggcaaagtgggataaatttgaactgatgatggagagtcaccagctgatgatcaaggaccagatcgaggtcatgaaaggcaatgtgaagtctcggttgcaaatttattaccaggaattagaaaagtttaaagctcgatgggaccagctgaaaccaggcgatgacgtgattgagaccggacagcacaatactcttgacaagtccgcaaaacttatcaaggaaaaaaaaattgagtttgacgacttagaagtcacaagaaagaagctggtggatgattgtcatcactttagactcgaagaacctaacttctcactcgcctcgtcaatcagtaaagatattgaatcttgcgcccagatatgggccttttatgaagagtttcaacaggggttccaagaaatggctaatgaggattggattacgtttcgtaccaagacttacctttttgaggagtttttgatgaattggcatgatcgactccgaaaagtggaggagcattcggtgatgactgttaagctccagtcagaagtcgacaagtataagatcgtgattccgatcctgaaatatgttcggggtgagcatctgtctccagaccactggctggatcttttcaggctgctggggctgcctcgaggtaccagtttggagaagcttctgttcggagacctcctgcgcgtggcagacacgatcgtggcaaaggcagctgatctcaaagatctcaacagcagggcccaaggggaagtgacaatcagggaggcactgagggagctggacctgtggggggtgggagcagttttcacgctgatagattacgaagactcacagtcacgcaccatgaagctcatcaaggattggaaagacatagtgaatcaggtcggcgacaaccgttgtctcctccagtctctcaaggactcgccatactataaggggttcgaggataaggtgagcatctgggagagaaagctggccgagttggacgaatacctgcagaaccttaatcacattcagcgcaaatgggtatacttagaacctattttcggcagaggcgctctgcctaaagaacaaacacgatttaatagggtggatgaggactttcgatctatcatgactgacattaagaaggataaccgcgtgaccactctgaccacgcacgctgggattcgcaactcgctgctgaccatcttggaccagctgcagcgttgccagaagtccctcaacgaattcttagaagaaaagaggtcagccttccctagattttactttattggcgacgacgacctcctggaaatattaggacaaagcacaaatccatctgtcatccagtcccacctgaaaaagctattcgccggaattaacagcgtctgcttcgacgaaaagagcaagcatattacagcgatgaaatcactggaaggagaggtcgtacctttcaaaaacaaggttccgctgtcaaataacgtggagacctggctgaacgaccttgcattagaaatgaagaagactctggaacagctgctgaaggagtgtgtaaccaccggtcggagctcccagggcgctgttgaccccagtttatttccttctcagatcctctgcctcgcggagcagattaagtttactgaggacgtggagaatgctatcaaggaccatagcctgcatcagatcgagacacagctggtcaataagttggagcagtacacgaatatcgacacatcatctgaggaccccggtaatacagaatcaggcatcctggagctgaagctcaaggccttgattctcgatatcatccataacattgatgtcgtcaaacagttaaatcagatccaggtgcacaccactgaggattgggcttggaaaaagcagctcaggttctatatgaagtccgaccatacttgttgcgtgcaaatggttgactcagaattccaatacacatacgaataccaaggcaacgccagtaagctcgtctatacgcccctaacagataagtgctatctgaccctgacccaagctatgaagatggggctgggagggaacccctatggccctgccggtaccggtaagaccgagtcggtgaaagcactcggcggactgctgggacggcaggtgctagtcttcaattgcgacgaggggatcgacgtaaagagtatgggcaggatcttcgttggcctggttaaatgtggggcatggggctgttttgatgagtttaatagacttgaagaatctgtgttaagcgctgtaagcatgcaaatccaaacaattcaagatgctcttaaaaaccacaggactgtctgtgaactgctggggaaggaggtggaggtgaatagcaactcgggtatctttatcaccatgaaccctgcaggaaagggctacggcggaagacaaaagctccctgacaatttgaagcagctttttcgaccagtggcgatgagtcaccccgacaacgaactcatcgcagaggttattctgtactctgagggcttcaaagacgccaaagtgttatcgcgcaaattggtagccatctttaacttgagtcgtgaattgttgactccgcagcagcactacgattggggacttcgcgctctgaagacggttctgagaggttccgggaacctgctgcgacaattgaacaaatccggtactactcagaacgcaaacgagagtcacattgtcgtccaggccctgcggttaaacacgatgtctaaattcacattcaccgactgcacgagatttgatgccttgatcaaggatgtttttcccggtattgagctgaaggaggtggaatatgacgagctctccgccgctctgaagcaggtgtttgaggaggccaattacgagataatacccaatcagattaaaaaggccttggagctgtacgaacagctgtgccagaggatgggtgttgtgattgtgggacctagcggagcgggaaaaagtaccttatggaggatgctcagggcggctctgtgcaaaactgggaaggtggtgaaacagtacacaatgaatccaaaggccatgccgagataccagttgttgggccatattgacatggatactagggagtggagcgacggagtgttgactaactccgccaggcaggtagtcagggagcctcaggatgtgagttcctggatcatttgcgacggagatatagacccagaatggattgagagcctaaactcagtgctggacgacaatcgtctcttaacaatgcctagcggagaacggatccaatttggaccaaacgtgaatttcgtgtttgaaacccacgatctgtcttgcgcttcacccgctacaatttctcggatgggtatgatcttcttgagcgacgaagaaaccgacctgaatagtctgattaagagttggctgcggaatcagcccgctgaatatcggaataacctggaaaactggataggcgattattttgaaaaggccctacagtgggtactcaagcagaacgattacgttgttgaaacaagcctggttggaacagttatgaatggcctgtcacacctccacggttgtagggatcatgatgaattcatcatcaatttgatccgaggcttggggggtaacctcaacatgaaaagtagattggagttcacaaaagaagtctttcactgggccagggagagccccccagacttccataaacctatggacacatactacgattccacacgcggaaggctggcaacttatgtcttaaaaaaacctgaagatcttactgcagacgatttctccaatggccttacactgcccgtaatccagacacctgacatgcagaggggattggattatttcaagccttggttgtcttctgacactaagcagccctttatcttggttggcccagaaggatgcgggaaaggcatgctgcttaggtacgccttttctcagctgcgttcaacccaaattgccaccgtgcattgttcagcgcagacgaccagccgtcatcttcttcaaaagttatcccagacctgtatggtcatcagcaccaatactgggagggtctacaggccaaaagattgtgaaaggcttgttctgtatctcaaagatattaatctgccaaagctggacaagtggggcacaagtaccctagtggccttcctccaacaagtccttacctaccaggggttttacgatgaaaatctggagtgggtgggcctggagaatatacagatagtggcaagcatgtccgccggaggccgactaggacgccataagctaaccactagattcacttcaatcgtacggctctgcagcattgactatcccgagagagaacagctgcagactatctatggtgcttacttggagcctgtgctgcataaaaatctgaaaaatcacagcatctggggcagcagctctaagatctatctgctggccggatcgatggtccaggtgtacgagcaagtgcgggctaaattcaccgtggacgattactcacactactttttcacaccctgtatcctgacacagtgggtactcggcctgttccgctacgacttggagggcggaagtagtaaccacccgctggattacgtgttggaaattgtggcatacgaagcgcgacggctgttccgcgacaagatcgtgggggcaaaagagctgcatctctttgatatcatcctgaccagtgtctttcagggagattggggatccgacattttagacaatatgtcagacagcttttatgtcacttggggcgctaggcacaactcaggcgcaagagccgctcccggacagccccttccaccccatggcaagccactggggaaactcaattcaacagacctgaaggacgtcatcaagaaagggctgatacactacggcagggacaatcagaatctcgacatcttactattccatgaagtgctcgaatacatgtccagaattgatagggtgttgtcttttccgggtgggagcttgctgcttgcagggagatccggcgtagggaggcgaaccattaccagcctcgtaagccatatgcatggcgctgtcttgttctctcccaagattagccgcggttatgaactaaaacaatttaagaacgacctcaagcatgtgttgcagctggccggaatagaagcccagcaggtcgtgctcctcctcgaagactatcaattcgttcatccaacatttctcgagatgattaattctctgttaagttcaggagaggtgccaggcctctatacgttggaggaactagaaccgctgctccttcctttgaaggatcaggcctctcaggatggctttttcgggccagtgtttaactacttcacttatagaattcagcagaacctgcacattgtcctgatcatggatagcgctaactcgaatttcatgataaattgcgaaagtaatcctgccttgcacaaaaaatgtcaagtgctgtggatggaaggttggtccaattcctccatgaagaagatccctgagatgctcttttctgaaacaggcggaggtgagaaatacaacgataaaaagagaaaagaggaaaaaaagaaaaactccgtggatcccgacttcctgaaatcctttctgcttattcatgagagttgcaaggcttatggggcaaccccaagccggtacatgacctttctgcatgtgtactctgccattagcagttctaagaagaaggaactgctcaaaagacagagccacttgcaggctggcgtcagcaagctgaatgaagctaaagcactagttgacgagttgaaccgcaaggcgggtgagcagtctgtgcttttaaaaacaaagcaggatgaagccgatgccgcactgcagatgattacggtgagcatgcaagatgcgtctgaacagaagaccgaactcgaacgcctgaaacaccgaattgcagaagaagtggtgaaaattgaagagagaaagaacaaaattgatgacgaactgaaagaagttcagcctctcgtcaacgaggccaaacttgctgtgggcaatattaaacctgagtccctaagtgaaattcgcagtctacgtatgccacccgacgtcataagagatatcctggagggagttctccggctgatgggaatttttgacacctcttgggtgtccatgaagtcctttctggccaagcggggagtgagggaagacattgccaccttcgacgcaagaaacatcagcaaagaaatccgagaaagtgtggaagaactccttttcaaaaataaaggatcgttcgaccccaaaaacgccaaacgggcttctaccgctgcagctcccctcgcggcatgggtgaaagccaatatccaatattcgcatgttctggagcgcattcaccccctggaaacagaacaagcgggtctggagagtaatttaaaaaaaaccgaggaccgcaagcgcaagctcgaagaacttcttaatagcgtgggacagaaagttagcgagctaaaggagaaattccagtccaggacctctgaggccgctaagcttgaggccgaggtcagcaaagcccaggagaccatcaaagcagccgaggtgctgattaaccagttggaccgcgagcataaaaggtggaatgctcaagtggtcgaaattactgaggaactggccacgttacccaagcgcgctcagttagctgctgcgtttataacgtatcttagtgccgcacctgaaagccttcggaagacttgtctggaggagtggactaagagcgccggactagagaagtttgaccttcgtcgatttttgtgcacggaatctgagcaattgatttggaagagcgagggcttgccctccgacgatttatcgatcgaaaatgctcttgtaatattacagataataggacttaagagctggtcgcgtgtgtgtccgtttttgattgaccctagcagccaggccacggagtggctgaaaacccacttgaaagattcccgtttggaggtgattaaccagcaggactccaacttcatcaccgccctggaactggcagtacgttttgggaagacccttatcattcaggagatggacggcgtggaaccagtcttatatcccctgctgagacgggacttggtcgctcagggccctcgatatgtcgtacagattggcgacaaaatcatcgactacaacgaggaatttcggctgttcctgtctacccgtaaccctaatccgttcataccgccagatgcagccagcatcgtgactgaggtcaatttcacgaccacaaggtcggggctgcgtggacagctacttgctttaacgattcagcacgaaaagccagacctggaagaacagaaaactaaactgctgcagcaggaggaggataagaaaatccagcttgcgaaactggaagaatctctgctagagactctagccacttcccaggggaacatcctggagaacaaagatttgattgaaagtctgaatcagacaaaagcgagttccgcgctgatccaggagagtctaaaggaatcctacaagctccaaatttcgctggaccaggagcgcgacgcctatctgcctcttgcagaaagcgcctctaagatgtacttcatcatcagcgatctgtccaagatcaacaatatgtatcggtttagtctggccgcattcctgcggctcttccagcgggcactccagaacaaacaggactcagaaaatacggagcagcgtatccagtcactgatctcatcgctgcagcatatggtgtatgagtatatctgccgctgtctctttaaggctgatcagttgatgttcgccctgcactttgtgagaggcatgcatccagagttatttcaggagaacgaatgggatacctttactggagtcgtcgttggagacatgctgcggaaggcagactcccagcagaagattcgagatcagctcccaagctggatcgaccaggagaggtcatgggcagtggctactttgaagatcgccctccctagcctgtatcagaccctttgctttgaagatgccgctctctggcggacttattataataatagcatgtgtgaacaggagtttccttctattctcgcaaaaaaagtttctttgttccagcagatcctcgtggtgcaggccctgcggcctgaccggctgcaatctgccatggccctgttcgcctgcaagaccttgggcctgaaagaggtgtccccattgcctctgaacctgaagcgcctctacaaggaaacacttgagatcgagccgatcctcatcataatttctcctggggcagatccttcacaggagctacaggagctggcaaatgcagagcgcagtggtgaatgctatcaccaggtcgcaatgggccagggacaggccgatctcgctatacagatgctgaaagaatgtgcgagaaatggggattggctgtgtctgaagaacctgcatctggtggtatcgtggctgccagtgctagagaaggagctgaatacattgcagcctaaggatacgtttcggctgtggttaacagctgaggtgcatcctaactttacccccatcttgctccagtcttcactgaagatcacctatgagtcccctcctggtctcaagaaaaacttaatgagaacgtacgaaagttggaccccagagcagatatctaaaaaagacaatacacacagagctcacgctcttttctcacttgcatggttccacgcagcctgtcaggagaggaggaattatatcccacagggttggaccaagttttatgagttctcattgtccgacctcagggccggatataatatcatcgatagactatttgacggagccaaggatgttcagtgggaattcgttcacggcctgctcgagaacgctatatatggtggacgaatcgataactattttgacttacgagtgttgcagagttatctgaagcagtttttcaactcttcagtcattgatgtcttcaaccagcgaaacaaaaagagcatctttccctactcggttagtctccctcagtcctgttctattctggactacagagccgtgattgaaaagatacctgaggatgacaagccaagtttttttggactcccagcgaatattgccagatcctctcaaagaatgataagttctcaggttatttctcagttaaggattttaggtaggtcgattactgcaggctccaagtttgacagagaaatttggagtaacgaactctctcctgtgctaaatttatggaagaagctcaaccagaactcaaaccttatccaccagaaagtgccccctcccaatgatagacaagggtcccccatcctctctttcattatcctggaacagtttaatgctattaggctcgtccaatccgtgcatcaatctctggccgctttaagtaaagtgattcgcggaactacgctgctcagcagcgaggtccaaaaactggcatctgctcttttgaaccagaaatgcccgctggcatggcagtccaaatgggaaggccctgaagatccattacaatacttgcgcggactggtagccagggcacttgcaatccagaactgggtcgacaaagccgagaaacaggccctgctcagcgagaccctggatctgagcgaattgttccaccccgacacttttttaaatgcccttaggcaggagacggcgcgagcagtcggtaggtccgttgatagcttgaagtttgtggcttcttggaaaggcagactccaggaagccaaactgcaaattaagatttcaggacttctgcttgaaggatgctcctttgacggcaaccagcttagtgagaatcaattggattccccttccgtgtcatcggttctgccctgtttcatgggctggatcccccaagacgcttgcggaccttactcacccgacgaatgcatttctctgcctgtgtacacctccgccgagcgagatagggttgttaccaacatcgacgtcccctgtgggggaaaccaggaccagtggatccaatgtggggcagctctgtttcttaaaaatcagtaa

SEQ ID NO: 221485 - DNA, 1515 bp, synthetic construct
  misc_feature 1..1515: note = Description of Artificial Sequence: Synthetic coding sequence
  source 1..1515: mol_type = other DNA
atgggccagggccaagccgacctggccattcagatgttgaaggaatgtgccaggaatggtgactggttatgcctcaagaacctgcacctcgtcgtttcctggctgcctgtactggagaaagaattgaataccttgcagccaaaagacaccttccggttgtggcttaccgccgaagtgcacccaaatttcacaccaatcctactgcaatccagcctgaagattacttacgaaagccctcccggtctcaagaagaatctgatgcgtacctacgaaagctggacacctgaacagatttccaaaaaagacaatacccatagagcacatgctcttttcagtcttgcttggtttcacgctgcctgtcaagagcgcagaaactatatcccccagggctggactaaattctacgagttcagccttagtgacctgagagctggatacaatattatcgacagactgtttgacggcgctaaggatgttcagtgggagttcgtacacgggctgctggagaatgcgatttacgggggtcgtattgacaactatttcgatctgagggtcctgcagtcctatcttaagcagttttttaactctagtgtaatcgatgtattcaatcaaagaaataaaaaaagcatcttcccttatagtgtcagcctgccacagtcttgcagcattttggattaccgcgcagtcatagagaagatacctgaggatgataagcctagcttctttggcctgccagccaatatcgccagatcctcccagaggatgatcagcagtcaggttatttcgcaactgaggatactcggacgctccattactgccggtagcaagttcgacagggaaatctggtctaatgagttgtccccggttttgaatctctggaagaagcttaatcaaaacagcaatctcattcaccagaaggttccgcctcctaatgaccggcaggggagccctattctctcctttatcattttggagcaatttaatgctatcagactagtacaaagcgtgcatcagagcctcgccgcactgtcaaaggtaataagaggcacaacgttgctgagctcggaagtgcaaaaactggcctcagccctcctgaatcaaaaatgtcccttggcctggcagtcaaaatgggaaggtcccgaggacccactccagtacttacgcggattggtagccagggctctggcaatccagaactgggtggataaagccgaaaaacaggctctgctgtcagagacattagacctgagcgagctcttccatcctgataccttcctgaacgctctccgccaggaaacagcccgagcagtgggcaggtccgtggattcactcaaattcgtggcaagttggaagggccgattgcaagaggctaagctgcagatcaagatctctggactcctgctggaggggtgttcattcgacggaaatcagctttctgaaaaccagcttgatagcccctccgtgagcagcgtactcccgtgtttcatgggctggattccacaggacttgctatag

SEQ ID NO: 221486 - DNA, 270 bp, synthetic construct
  misc_feature 1..270: note = Description of Artificial Sequence: Synthetic coding sequence
  source 1..270: mol_type = other DNA
atgtgtgaccgcaaggccgtgattaagaatgcagacatgagcgaggagatgcagcaggactcagtcgagtgcgcaacgcaagctctcgagaagtataatatcgaaaaggacatcgcagcccatattaagaaggagtttgataagaagtacaatcctacttggcattgcatagttggtcgaaatttcggatcctacgtgacccatgagaccaaacatttcatctacttctatctggggcaggtggccatcctactcttcaaatctggctag

SEQ ID NO: 221487 - DNA, 270 bp, synthetic construct
  misc_feature 1..270: note = Description of Artificial Sequence: Synthetic coding sequence
  source 1..270: mol_type = other DNA
atgtgtgatcgcaaagcagttatcaagaacgctgatatgtcagaagaaatgcaacaggattccgtggagtgtgctacacaggcactagagaaatacaacatcgaaaaagacatcgctgcgcacatcaaaaaagagtttgataaaaagtacaacccaacatggcactgtatagtcggacgcaatttcggctcctacgtgactcacgagacaaaacattttatttatttttatttgggccaagtcgccatcctgctcttcaaaagcggatag

SEQ ID NO: 221488 - DNA, 270 bp, synthetic construct
  misc_feature 1..270: note = Description of Artificial Sequence: Synthetic coding sequence
  source 1..270: mol_type = other DNA
atgtgcgatcggaaagccgtcataaagaatgcggacatgagcgaggaaatgcagcaggatagcgtggaatgcgccacgcaggccttagagaagtataatatcgagaaggacatcgctgcgcacatcaagaaggaatttgataaaaagtataacccgacctggcattgcatcgttgggaggaactttggaagctacgtgactcacgaaactaagcactttatctacttctacctcggacaggtggcaatcctgctgttcaagtcaggatag

SEQ ID NO: 221489 - DNA, 270 bp, synthetic construct
  misc_feature 1..270: note = Description of Artificial Sequence: Synthetic coding sequence
  source 1..270: mol_type = other DNA
atgtgtgacaggaaggccgtgatcaagaatgcagacatgagcgaagagatgcagcaggacagcgtcgaatgcgccacacaagcactagaaaagtacaacatcgaaaaggacatcgccgcacacatcaaaaaggaattcgacaaaaagtataatcccacatggcattgtattgtggggagaaatttcggatcatacgtcacccacgaaactaagcatttcatatacttctatctgggacaagtggctatcctgctcttcaagagcggttag

SEQ ID NO: 221490 - DNA, 129 bp, synthetic construct
  misc_feature 1..129: note = Description of Artificial Sequence: Synthetic coding sequence
  source 1..129: mol_type = other DNA
atgtgcgaccgtaaggctgtgatcaaaaatgctgacatgtccgaggaaatgcaacaggactcggtggagtgcgctacgcaggccctggaaaaatacaacatcgagaaggatatcgccgcacacatctag

SEQ ID NO: 221491 - DNA, 270 bp, synthetic construct
  misc_feature 1..270: note = Description of Artificial Sequence: Synthetic coding sequence
  source 1..270: mol_type = other DNA
atgtgcgacagaaaggcagtgattaaaaatgctgatatgtcagaggaaatgcagcaggactctgtggaatgtgcaacccaagccctggagaaatacaacatcgagaaggatatcgccgcacatatcaagaaagaatttgacaaaaagtacaatcccacgtggcactgtattgtcgggcgaaatttcggaagctacgtgacccacgagaccaaacatttcatttacttctacctgggccaggtcgctattctgctctttaaaagcgggtag

SEQ ID NO: 221492 - DNA, 270 bp, synthetic construct
  misc_feature 1..270: note = Description of Artificial Sequence: Synthetic coding sequence
  source 1..270: mol_type = other DNA
atgtcggatcggaaagccgttatcaagaatgctgacatgagtgaggatatgcagcaggacgcagtggactgtgctacgcaggcgatggagaagtacaacattgaaaaggacattgcggcatatatcaagaaggagtttgacaaaaagtacaatcccacgtggcattgtatagttgggagaaatttcgggagttacgttacacatgaaacaaaacatttcatctacttctacctcggccaggttgccattctgctgttcaaatccggctag

SEQ ID NO: 221493 - DNA, 144 bp, synthetic construct
  misc_feature 1..144: note = Description of Artificial Sequence: Synthetic coding sequence
  source 1..144: mol_type = other DNA
atggctgaagtggaggagacattgaagcggctgcagagtcagaagggtgtgcaaggcatcatcgtcgtaaacacagaagggggatgggaaccactggggcattgcggagaccggtcccggcctcccgctcagggttgtccgtag

SEQ ID NO: 221494 - DNA, 291 bp, synthetic construct
  misc_feature 1..291: note = Description of Artificial Sequence: Synthetic coding sequence
  source 1..291: mol_type = other DNA
atggctgaggttgaagaaacattgaaacgcctgcagagccaaaaaggggtacaggggattatcgttgtgaacactgagggcatcccaatcaagtctaccatggacaatcctacaactacccagtatgcatcacttatgcactcatttattctcaaagcgaggtcaaccgttcgggatattgatccccaaaatgacctgacttttttgcgcatcaggtctaaaaagaacgagatcatggtggccccagacaaggactactttcttattgtcattcagaatccaacggagtag

SEQ ID NO: 221495 - DNA, 366 bp, synthetic construct
  misc_feature 1..366: note = Description of Artificial Sequence: Synthetic coding sequence
  source 1..366: mol_type = other DNA
atggcagaggttgaggaaacgctgaagaggttacagtcacagaagggggtacagggaatcattgtggtgaacactgaggggatcccgatcaaatccactatggataatccaacgacaacgcagtacgctagccttatgcattcgtttatattgaaagctcgctctaccgtccgggacatagacccgcaaaatgatctgaccttcctgcgaattcgtagtaaaaagaatgaaatcatggtggcacccggtaaggggtcctctacttcaccatgcagaaaccggccacatggaacattttcagtcgcccatcaggaaagctggcacagtggtgtgtcccgaggctccaagcagggtccacgctcttag

SEQ ID NO: 221496 - DNA, 291 bp, synthetic construct
  misc_feature 1..291: note = Description of Artificial Sequence: Synthetic coding sequence
  source 1..291: mol_type = other DNA
atggccgaggtggaggagacattgaaacgtattcagtctcacaaaggtgtgatagggactatggtggtgaacgcggagggtatccccatcagaaccaccctggataattccaccactgttcaatacgctggcctgctgcatcacctgaccatgaaagcaaagtcgacagtgagagatatagacccacagaatgacctgactttcctcaggatccgaagtaaaaagcatgaaatcatggtggcccctgataaagagtacttgctcatcgttattcagaacccttgcgaatag

SEQ ID NO: 221497 - DNA, 165 bp, synthetic construct
  misc_feature 1..165: note = Description of Artificial Sequence: Synthetic coding sequence
  source 1..165: mol_type = other DNA
atggccgaggtcgaagaaactctgaagaggattcaaagtcataagggcgtaatcggcacaatggtggtcaacgccgaagacccgaggttcgttacgttcaagtatgctagacagctaaccgccttccagcgtaaaagcggccaacagatcacaatcaaggactag

SEQ ID NO: 221498 - DNA, 486 bp, synthetic construct
  misc_feature 1..486: note = Description of Artificial Sequence: Synthetic coding sequence
  source 1..486: mol_type = other DNA
atggatcccaaccctcgcgcagccttggagcgccagcagctgcgactcagggaacgacagaaatttttcgaagacattctgcaaccagagaccgaatttgtctttcccctcagccacctgcatctggagagccagagacccccaataggcagcatctctagtatggaggtgaatgtggacacgctagagcaggtggaactgatcgacttaggtgaccctgacgcagctgacgtgtttctgccgtgtgaagatcctcctcccacaccacaatcatccggcatggacaatcatctggaagaactgtctctgccggttcctacttcggaccgtacaacgtctcgcaccagctcttccagcagttccgacagctccactaacctacactcacctaacccctctgatgacggtgctgatacgcccctggcccagtccgacgaggaggaagagcgcggagacggcggagcagaacccggagcctgttcctag

SEQ ID NO: 221499 - DNA, 486 bp, synthetic construct
  misc_feature 1..486: note = Description of Artificial Sequence: Synthetic coding sequence
  source 1..486: mol_type = other DNA
atggatcctaacccgagagcagcactggaacgtcagcagctacggctcagagagagacaaaagttctttgaggacattctccagcccgaaaccgaattcgtgttccctttgagccatttgcaccttgagagccagcgtccacctattggatcaatctctagcatggaagtaaatgtggataccttggaacaagtcgagctgatagatttgggcgaccctgatgctgccgatgttttcctaccatgtgaagaccccccacctacacctcagtcatcagggatggacaaccacctcgaggagttgtctttacccgtgcccacatcagacagaaccacgtcaagaacctcgtcctcaagttcaagcgacagcagtacaaatcttcatagccccaacccctccgacgatggcgcagacacacccttagcgcagtctgatgaggaggaagagcgaggggatggcggagcagagccgggtgcctgcagttag

SEQ ID NO: 221500 - DNA, 792 bp, synthetic construct
  misc_feature 1..792: note = Description of Artificial Sequence: Synthetic coding sequence
  source 1..792: mol_type = other DNA
atggagagttgggccttggcagttttccctgagtaccgcgttagtctattatggtgcctggaactggcaagtcctctgtggtccctgggccaggcgccaccactgcatgagacctggttcgtgggtcacacgtggttccagggtaggggaaaaagatcccctcgcgcagaggtgtcaagacccgaacccggtgcaccactcctgggatgctggctgcaatggggagcaccctcgcccggtccactgtgcttactctttcgtctttgctcttgtacatgctttgctcctttacccgctggggctgacatggaccccaaccctagagccgctctggaaagacagcagctgcgcctgcgcgagcgtcagaagttcttcgaggatatcctccagcctgagacagaattcgtctttccactgagtcatctgcacctggagagccagcggccaccaatcggatcaatttcttcaatggaggtgaatgtggacacattggagcaggtggagctgattgatctgggagatcccgacgccgcagatgtctttctaccatgcgaagatcctcctcctacccctcagtcgtccgggatggacaaccaccttgaggaactctcattgccagtcccaacctctgaccggactacctcccgcaccagctcttctagcagctccgactctagtaccaatctccatagtcctaacccttctgatgatggggcagatacacccttagctcagtccgacgaggaggaagagaggggagacggtggcgctgaacctggggcttgtagttag

SEQ ID NO: 221501 - DNA, 486 bp, synthetic construct
  misc_feature 1..486: note = Description of Artificial Sequence: Synthetic coding sequence
  source 1..486: mol_type = other DNA
atggatccaaaccccagagccgctctagagcggcaacagcttcgcttgagagagcggcagaaatttttcgaggatattctccaaccggagactgaatttgtgttccccctaagccacctccatctggaatcacaacgacccccaatcggctccatctcgtccatggaggtcaacgtggataccctggagcaggttgagctgattgaccttggtgacccagacgcggcagatgtttttctgccatgcgaagatccacctccgacaccacagtcaagtggcatggataatcacctggaggaattgtcacttcccgtcccaaccagcgaccggactacctcaagaacatcaagcagttccagctcggactccagtaccaacctgcacagcccaaacccttccgacgatggcgcagatacgcctctcgctcaatccgatgaggaggaagagaggggcgatggaggtgctgagcccggagcttgttcttag

SEQ ID NO: 221502 - DNA, 339 bp, synthetic construct
  misc_feature 1..339: note = Description of Artificial Sequence: Synthetic coding sequence
  source 1..339: mol_type = other DNA
atggacccaaatcctagggcagcactcgagagacagcaacttagattacgagaacgccaaaaatttttcgaggatatcctacagccagagaccgagtttgtgttcccactatcacacttgcatttagaaagccaacggccacctatcggctctataagcagcatggaggttaacgtggacacactggagcaagtggagcttatcgatttgggagatccggatgccgcagatgtctttttgccttgtgaggatcctcctcccacgcctcagagctcagggatgcctctctgcttcggggattttagcgcgagtcagcctgaacctgacgtaagactgtag

SEQ ID NO: 221503 - DNA, 780 bp, synthetic construct
  misc_feature 1..780: note = Description of Artificial Sequence: Synthetic coding sequence
  source 1..780: mol_type = other DNA
atgggggcagggaacttcctgacagctctggaggtacctgtggccgcactggccggtgctgcatccgacagaagggcctcatgcgagagggtgtccccccctccccctcttccacacttcaggctgcccccactgcctcgaagtcgcctgcctggacctgtcagccggcctgaaccaggcgctccactgctagggtgttggctgcagtggggagcacctagtcccggacccctgtgccttctgtttcgactctgcagttgtacatgttttgcccctcttccggcaggcgcagatatggatccgaatcccagagcagcactcgagaggcagcagctccgcctccgagagagacagaagttctttgaggacatcttgcagcccgagaccgagttcgtcttcccactctcgcacttacatctggaatctcagcgccctcctataggctcaattagttcgatggaggtcaacgtggacacccttgagcaggttgaactaatcgacctgggggatccggatgccgctgatgtcttcctcccgtgtgaagatccccctccgactcctcagagctccggcatggataatcatctggaggaactatcactgcctgtcccaacaagtgatagaaccactagccgcacgtcaagttcaagcagcagcgacagttctaccaacctgcattcgcctaatcccagcgacgacggagccgatacaccactggcccagagcgatgaggaggaagagcgcggagacgggggagccgaacccggtgcctgctcgtag

SEQ ID NO: 221504 - DNA, 339 bp, synthetic construct
  misc_feature 1..339: note = Description of Artificial Sequence: Synthetic coding sequence
  source 1..339: mol_type = other DNA
atggatcctaacccacgtgccgcattagaacgccaacagctgcgactccgagaaagacaaaagttttttgaggacattctccagcctgagactgagtttgtgttccctctcagtcacctacacctagagagccagaggcctcctattggctctattagttccatggaagtcaacgtggataccctcgagcaggtggagctgattgatcttggagacccagacgccgctgacgtgtttctgccgtgtgaggaccctcctcccactcctcaatcaagcggtatgcccctctgcttcggggacttctctgcttcacagccagaaccagatgttagactctag

SEQ ID NO: 221505 - DNA, 486 bp, synthetic construct
  misc_feature 1..486: note = Description of Artificial Sequence: Synthetic coding sequence
  source 1..486: mol_type = other DNA
atggaccctaatccacgtgcagctctggagagacagcagctgaggctgcgcgaacgccagaagttttttgaagacatcttgcagcctgaaacagaatttgtgtttcctctgagtcatttgcacctcgagagtcagcgcccaccaatcgggagcatctccagcatggaagtaaacgtggacaccttagaacaagtggaactgatcgacctcggggatccagatgctgccgatgtatttctgccatgcgaggatcctccgcctacccctcagtctagtgggatggacaaccatctggaagaactatccctgcctgtgccaactagtgacagaacgacctcaagaacctctagttcatcgtcaagtgatagcagtaccaatctgcattcccctaacccttccgacgatggcgcagatacgcctctggcccagtcggatgaggaagaggagagaggagatggcggagctgagccgggagcatgcagttag

SEQ ID NO: 221506 - DNA, 519 bp, synthetic construct
  misc_feature 1..519: note = Description of Artificial Sequence: Synthetic coding sequence
  source 1..519: mol_type = other DNA
taaacctggtttcagggacggggaaagcgatctcccagagctgaagtgagcaggccggagcccggtgctcccttgcttggatgctggttgcagtggggcgcaccaagccccggtcccttgtgtctcctcttccgcctgtgctcgtgtacctgcttcgcacccttgcccgcaggtgcagacatggatcccaacccaagggctgctcttgagagacagcagctccggctccgggagcggcagaagtttttcgaggatatcttgcagcctgagaccgagtttgtgttccccctatcacaccttcacctggaatcccaacggccaccaatcggctctatctcatcaatggaagtaaatgtggataccctcgagcaggtggagctgattgatcttggcgaccccgatgctgcggatgttttcttgccttgcgaggaccccccaccaactccccagtcttccggcatgccactgtgctttggcgattttagcgcctcacagcccgaaccagacgtacgattgtag

SEQ ID NO: 221507 - DNA, 15516 bp, synthetic construct
  misc_feature 1..15516: note = Description of Artificial Sequence: Synthetic coding sequence
  source 1..15516: mol_type = other DNA
atgcactccagctcctactcctaccggtcttcagattccgtttttagcaacactacatccacgagaacctccttggactctaacgagaacttgctgcttgttcactgtggaccaactctcattaactcctgcatctccttcggctcggaatcctttgacggccaccgcctggagatgcttcagcaaatagctaatcgggtgcaaagagacagcgtgatctgcgaagacaaactgatactggccggaaatgcactgcagtccgattctaaacgccttgaaagcggggtgcagtttcagaatgaagctgaaattgccggatacattctggaatgtgaaaacttgcttcgccagcacgtcatcgacgtgcagatactgattgacggaaagtactaccaggcagaccagctagtgcagcgcgtcgccaaactgcgagacgaaattatggcactgaggaacgagtgttcaagtgtgtactccaaggggcgtattctgaccacagagcagaccaagttaatgatcagcggcatcacgcaaagccttaatagcggttttgcgcagactctgcatcctagtctaacctcaggtcttacccagtctctcacaccctccctgactagctcttcaatgacctccggcctgagttctgggatgacttctaggcttacaccctcagtgacccccgcttacaccccgggttttcccagcggcctggttcctaacttctcgagtggggtagagccgaacagccttcagacccttaagctgatgcagattaggaagcccctgcttaagtcgagccttctcgaccagaaccttaccgaggaggaaatcaatatgaagtttgtccaggatctcttgaactgggtggatgaaatgcaggtccagttggaccgtacggagtgggggagtgatttgcctagcgttgaaagccacctggaaaatcacaagaatgtacatcgtgcaattgaagaatttgagtcctccctaaaagaggccaaaatatctgagattcaaatgacagccccattaaaattgacctacgctgaaaagctgcacaggttggagtcccagtatgctaagctccttaatacttccagaaaccaggagaggcacttggacactctgcacaactttgtctcacgggcaaccaatgagctgatatggctcaatgaaaaggaagaggaggaggtggcctatgattggagtgaaagaaataccaacattgccaggaaaaaggactaccacgccgagctcatgcgggagttggaccagaaagaggaaaatatcaagagcgttcaggaaattgccgagcagctgctcttggagaatcacccagcacgtctcactattgaagcttaccgagctgctatgcaaacccagtggagctggattctccaattatgtcaatgcgtggaacagcatatcaaggagaataccgcatatttcgaattctttaacgatgctaaagaggctacagattacctcagaaaccttaaggacgccatacagcggaagtactcttgtgatagatcctctagtattcacaagctggaggatctggttcaagagtccatggaggaaaaggaggagcttctccagtataagagcaccatcgccaacctgatggggaaggccaagaccattatccagcttaaacctcgtaattctgattgtccactaaagacctcaatcccgattaaggccatctgcgactaccggcagattgagattacaatttataaagacgatgaatgtgtcctggcaaacaacagccaccgcgcaaagtggaaggtgattagtcctactggaaatgaggctatggtgccctccgtatgttttaccgtacctcctccaaataaagaggcagtggatctggcaaaccggatcgagcagcagtatcaaaatgtcctcaccctctggcatgagagccatatcaacatgaaatctgttgtgtcgtggcactacctcattaatgaaatcgataggatccgagcaagtaatgttgcgtctattaagactatgcttccaggcgagcatcagcaggtccttagcaatctacagtcccggtttgaggactttctcgaggacagtcaggaaagtcaggtgttctccggcagcgacattacgcaactggagaaagaagttaacgtctgcaaacagtactaccaggaattgctgaaaagcgctgagcgggaggaacaggaggaatcagtctataatctgtacatctccgaggttcggaatattagactccggctggagaattgtgaagaccggcttatacggcagatccgtactccactggagagagacgatcttcacgagagtgtgttccggatcacagaacaggaaaaactgaaaaaggagctcgagcgtctcaaagacgacttaggtaccatcaccaataagtgtgaagagtttttcagccaggccgcagcgagcagctccgttccaaccctgaggagcgagctgaatgtggtgctccagaacatgaaccaggtctacagtatgtcctctacttacatagacaagctgaagaccgtcaatctggtgctgaagaatacgcaggccgctgaggccctcgtgaagctttacgagaccaagctctgtgaggaggaggctgtgatcgctgacaagaacaacatcgaaaatctgatttccacattaaagcaatggcgatcagaggtcgacgagaaacggcaagtgttccatgcactagaggacgaactgcagaaggccaaagcgatcagtgacgagatgttcaaaacatacaaggagcgggatcttgactttgattggcataaggaaaaggccgatcaactggtcgaaaggtggcagaacgtgcacgtccagatcgataatcgattgcgtgacctggagggcatcggaaaatcactaaaatattacagagacacctaccatcccctcgatgactggattcagcaggttgaaacaacccagcgtaagatccaagagaatcagcccgaaaactctaagaccctggccacccagttaaaccagcaaaaaatgctcgtgagcgagatcgagatgaagcagtccaagatggatgagtgtcagaaatacgctgagcagtatagcgctaccgtgaaagattacgaactgcagacgatgacctatagggccatggtggacagtcagcaaaaatctccagttaaacgcagacgcatgcagtccagcgcagacctgattatccaggagtttatggatctgcggacaaggtatactgcactggtgaccctgatgacacagtacataaagttcgcaggagactctctaaagagattggaggaagaggaaaagagcctcgaggaggagaagaaggagcacgtcgaaaaggcgaaagaattacagaagtgggtgtctaatatctcaaagactttaaaagacgcagaaaaagccggaaagccccctttcagtaaacagaagatttccagtgaggaaatcagcaccaaaaaggagcagctaagtgaggctttgcagaccatccagctcttcctggctaagcacggagataaaatgaccgacgaagagaggaacgaacttgagaaacaagtcaagacccttcaggagtcttacaacttattgttcagcgagagcttgaaacagctccaggaaagccagacttcaggagatgtcaaggtagaagagaaaatcgtcgcagaacggcagcaagagtacaaagagaagctgcaaggaatatgcgatctcctgacacagactgaaaatcggttgattggccatcaggaagcttttatgattggggacgggacagtggagctcaaaaaataccagagcaagcaagaggagcttcaaaaggatatgcaagggtccgcccaggccctggccgaggtcgtgaagaatacggagaattttctgaaagagaacggcgaaaagctgtcacaggaagataaagccttgattgaacagaagctcaatgaagcaaaaatcaaatgcgagcaactgaacctgaaagctgagcaaagcaagaaggagcttgataaggtcgttacaacggcaatcaaggaggaaaccgaaaaggtggctgccgtgaaacagctggaagaaagtaaaaccaaaatcgagaatctattagattggctatctaatgttgataaagatagcgagagggcgggaactaaacacaagcaggtgattgagcaaaacggcacccacttccaggagggggacggcaagagcgctataggggaggaagacgaagtaaacggaaatctcctggaaacagatgtggatggccaagtaggcactacccaggagaatctgaatcaacagtaccagaaagtgaaagctcaacatgaaaaaataattagccagcatcaggcagtgatcattgcgacccaaagtgcccaggtgcttttagaaaagcagggtcagtacttaagccccgaagaaaaagaaaagctgcagaagaatatgaaagagttgaaagtccattacgagacagccctggcagagtcagagaaaaagatgaaactgacgcactctctgcaggaggaactcgaaaaattcgatgcagactataccgagtttgaacactggctgcaacagagcgagcaggaactggaaaacctggaggccggagcggatgatatcaacggactgatgacaaagctgaaacgacaaaagagtttctctgaggacgtgattagtcacaaaggcgacttacgttatattacaattagcggcaaccgggtcctggaagccgcaaaatcttgctctaagagggatgggggaaaggtggacacatctgccacacaccgggaggttcagaggaaacttgatcacgccacagaccgattccggagtctttattccaagtgtaatgtcctaggcaataatctgaaggacctggtggacaaataccagcactacgaggacgcctcttgcggcctcctggcaggtcttcaagcatgtgaggctaccgcttcaaagcacctgagcgaacctatcgcagtcgatcccaaaaacttgcagcgccagctcgaggagactaaggccctgcagggtcagatcagtagccagcaggtagctgttgagaagctgaagaaaacagccgaggtgctgctggatgcccgagggagtctactcccagctaagaacgacattcagaaaaccctggacgacatcgtgggacgctatgaagacctgtctaagagcgtcaatgagcggaacgaaaagctccagatcaccttgacgaggtctctgtccgttcaagatggcctcgacgaaatgctcgattggatgggcaacgttgaatccagccttaaagaacaggggcaggtacccctgaacagcactgcgctgcaagacatcatctctaaaaacattatgctcgagcaggatatcgcagggaggcaatcatctatcaatgccatgaacgagaaggtaaagaagttcatggagaccacagatcccagcacggcctctagtttgcaagctaaaatgaaagacctgagtgctagattcagcgaagccagccataagcacaaggagacgctcgccaagatggaagagcttaagactaaggtcgagctgtttgaaaacctcagcgagaaactccagacatttctcgagacaaaaacccaggcccttacagaggtggatgtgcccggaaaggatgttaccgagttaagtcaatacatgcaggagtccaccagtgaattcctggagcacaaaaagcaccttgaagtcctgcacagcctgctgaaagagatcagcagccacggtctgccctccgataaggctctggtcctagagaaaacaaataatctgtcgaaaaagtttaaggagatggaggacactatcaaggaaaagaaagaagcagtaacaagctgtcaggagcagctcgatgcttttcaagttctggtgaaaagcctaaagagttggattaaggagacaactaaaaaggttccaatcgtacagccgagctttggcgcagaggaccttggtaaatctttagaggatacaaagaagttgcaggaaaagtggtcattaaagactcccgaaatccaaaaggtgaataactccggaatatctttgtgcaaccttattagtgcggtcactacacccgctaaggcaattgctgctgtgaaaagtggtggagcagtgctgaatggcgaagggacagcaaccaataccgaagaattttgggccaataaaggactaactagtattaagaaggacatgaccgatatttcacacggctacgaggaccttggtctcttgctgaaggacaagattgccgagttgaataccaaactgagtaaactccaaaaggcccaggaagaatcttccgccatgatgcagtggctgcagaaaatgaacaaaacagccacgaaatggcagcagacccccgctcctaccgataccgaggccgtgaagacccaggtggagcaaaataagagttttgaggcagaactgaagcagaacgtcaacaaggtgcaggagctcaaagacaaactgacggagctgctcgaggagaaccccgacactcccgaagcacctcgctggaagcagatgctgacggaaatagacagcaagtggcaggagctgaatcagctcaccatcgacaggcaacagaagcttgaggagtcttctaacaatctgacccagttccagacagttgaggcacagttaaagcaatggcttgtggaaaaggaacttatggtgtccgtcctgggccctctgtccattgatcccaacatgttaaacacccagagacagcaggtccagattctgctgcaggagttcgctactaggaaacctcagtacgaacagctgaccgccgctggccagggaatcctctcacgccctggagaagacccctcactccgcggtatcgtgaaggaacaattggctgccgttacccagaagtgggatagcctgacaggacagctgtcagaccgatgcgattggattgaccaagcaatagtgaagtcaacgcaataccagagcctgttgcggagcctgtctgataaactgagcgatctggacaataagctgtccagctccttggccgtttccacccacccggacgctatgaatcaacaactcgagacagcacagaaaatgaaacaagaaatacaacaggaaaagaagcagattaaggtggcccaggccttgtgtgaggacttaagcgcactcgtcaaggaggagtatctgaaagccgagctgagtagacaactcgaggggatactgaagtctttcaaagatgttgaacagaaggctgaaaatcacgttcagcacctccagagtgcctgcgccagttctcaccagttccaacagatgagccgtgactttcaggcatggttagacaccaagaaagaggaacagaacaagagtcatccaatatcagctaaactggatgtgctggagtccttaattaaggaccacaaggatttttcaaagactctgaccgcccaaagccacatgtatgaaaagaccatcgcagagggagagaaccttttgttgaaaactcaaggatccgagaaagccgctctccagctacagctcaacaccatcaagaccaattgggacacattcaacaaacaggtcaaagagagagagaataagttaaaagagtcactggaaaaggcattgaaatacaaggagcaggtcgaaacattatggccttggatagacaagtgtcagaataacctggaggaaatcaagttctgcttggaccccgctgagggagaaaattcaatagctaagttaaagtccctacagaaagagatggaccagcacttcggtatggtggagctgctgaacaacacagctaactccttgctgagtgtgtgcgaaatcgataaggaagttgtgactgacgagaacaaatccctcatccaaaaggtcgatatggttaccgaacagctccactccaaaaagttctgccttgagaatatgacccaaaagttcaaggagttccaggaggtcagcaaggagtcaaaacgtcagctgcagtgtgcaaaagaacagctcgacatacacgacagtttgggttctcaggcttattctaataagtatcttactatgctgcagacacagcagaagtctctgcaggctctgaagcaccaagtcgacctggcaaagcgactggcacaagatctcgttgtggaggcatcggactctaaggggacctccgacgtgctgctgcaggtggagaccatcgcccaagagcattcaacactgtcccaacaagtggacgagaaatgcagctttttggagactaagcttcagggcataggacactttcagaacacaattcgggaaatgttttctcagttcgccgagttcgatgatgagctggactctatggcacccgtaggtcgggacgccgaaacccttcagaaacagaaggagaccattaaagcgtttctaaaaaaattagaagctctgatggcctcgaatgataacgcaaataagacatgtaagatgatgttagccaccgaggagacctcccctgatctggtggggataaagagagacctggaggctctcagcaagcagtgcaacaagttgctggatagagctcaggctagggaggaacaggtggaggggaccattaagcgtctggaggagttttatagcaagctaaaagagttcagcatcctcctacaaaaggcagaggagcacgaagagagtcaaggcccagtcggcatggagaccgagaccatcaaccagcaactcaacatgttcaaagttttccagaaggaagaaatcgagccactccaaggtaaacagcaggacgtcaactggctcgggcagggattgatccagtctgcagctaaatctacttctacccaaggacttgagcacgatttggacgatgtgaacgcccgttggaaaaccctgaataaaaaagtggcccagcgggcagcacagttgcaggaagctttactgcattgtggaaggtttcaggatgcacttgagtcactactttcttggatggtggataccgaggagctggtggcaaaccagaagcctccatctgcagagttcaaagttgtgaaagcccagattcaggaacaaaaactgctccagcggctgctcgacgaccgaaaatcaacagtggaggttatcaaaagggaaggtgagaaaatcgcaacgaccgccgaacctgccgataaggtgaagattctcaaacaactgagcctgctggactctcggtgggaagccctgttgaataaggccgaaacacggaacaggcaactcgagggaatttccgtggtggcgcagcagtttcatgagacactggagcccttgaatgaatggctgactaccatcgagaagaggctcgttaactgtgaacctatcgggacacaggcctctaagctggaagagcagatcgcgcagcacaaagccttagaggatgacattattaaccacaacaaacaccttcaccaagctgtgagcataggtcagagcctcaaggttctcagctccagggaagacaaagatatggtgcagtctaaactagactttagtcaggtatggtacatcgaaatccaagaaaaaagtcactcccgaagcgaattgttacagcaggccctgtgtaacgcgaagatttttggagaagacgaagtggaactaatgaactggttgaacgaggtgcatgacaagctgtctaaactgagcgttcaggactactctaccgagggcctatggaaacaacagtcagagctccgggtgctccaggaggacattctccttcgcaagcagaacgttgatcaggccctgctaaatggactggagttgctgaagcaaacaaccggtgacgaagtgctgataattcaggacaagttggaggccatcaaggccagatacaaagacataacgaagctgagcacagacgtcgcaaaaacattggaacaagccctccagctggctcgaaggcttcatagcactcacgaggagttgtgcacatggctggacaaggtggaagtcgagcttctgtcttacgaaacacaagtgctgaagggcgaggaagcgagccaagctcaaatgcgcccaaaggagctcaagaaggaagcaaaaaacaacaaagccctgcttgattccctcaatgaggtttcatccgccctactcgaattagtcccatggagagccagggagggactggagaagatggtcgcagaagacaatgagcggtatcgcctggtgagcgacacaatcacgcagaaagtggaagagatcgacgctgcgatactcagaagccaacaatttgatcaggctgcagatgccgaattgtcctggatcacagaaactgagaaaaaactgatgtctctgggcgatatccgactggaacaggatcagaccagcgcgcagctccaggtgcagaagacctttacaatggagatcctacggcacaaggacataatcgacgacctggtgaaaagtggtcacaagattatgaccgcctgcagtgaagaggagaagcagtccatgaagaagaagttggacaaggtgttaaagaattacgacaccatctgccagatcaatagcgagcgctacttgcagctggaacgggcacagagccttgtgaatcagttctgggaaacttacgaggagctctggccttggctcacagagacacagagcataataagccagctgccagcaccagcccttgagtatgaaactctgaggcagcagcaggaggagcacagacaattgagagagctgatcgcggaacacaagccacacattgacaaaatgaataagacaggaccgcagttgcttgaacttagccctggcgaaggtttctccattcaggaaaaatatgtggccgcagatacactctactcacagataaaggaagatgtgaaaaaaagggccgttgcccttgatgaggctatatcacaatctactcagttccatgataaaatcgaccagatccttgaatctctggaacggatcgtcgagagactgcgtcagcctcctagtatcagcgccgaggtagaaaaaataaaagagcagatctctgaaaacaagaatgtcagcgtggacatggagaagctgcagccactgtatgagacactcaagcagcgaggtgaggagatgatcgccagatctggtgggacggacaaggacatttctgcaaaagctgtgcaggataaactcgaccaaatggtgttcatttgggagaatattcacaccctggtcgaagagagagaagcaaaactcctcgacgtaatggaactggcggaaaagttttggtgcgatcatatgtctctgatcgtgaccatcaaagacacccaggacttcatacgagaccttgaagaccctgggatcgacccatccgtggtgaagcagcagcaggaagccgcagaaacgattcgcgaagagatcgatggactccaagaggaactcgatattgtcatcaatctggggagcgaattaattgcggcatgtggagagccagataaacctatcgtgaagaagtcaattgatgagctgaatagcgcatgggattccctgaataaagcatggaaagaccgaatcgacaaactcgaagaggccatgcaagccgctgtccagtatcaggatggtttgcaggccgtgtttgattgggtggatattgctgggggaaaactggcatcaatgagcccaatcgggaccgacctggagaccgtgaaacagcagatcgaagagctgaagcagttcaaatccgaagcctatcagcaacaaatagaaatggaaagactgaaccatcaggctgagctgctcttaaagaaggtcaccgaagagtctgacaaacacaccgtgcaggacccactgatggaactcaagctcatctgggactctctcgaagagagaatcattaataggcagcacaaactcgaaggagcactactggccctgggccagtttcagcatgcactggacgagctcttggcctggctcactcatactgaggggctcctgtcagagcagaagccagtcggtggggatcccaaagccatcgaaatcgagctggcaaaacatcatgttctccagaatgacgtactggcccaccagagcaccgttgaggccgtcaataaagccggaaacgacttgattgagtccagtgctggtgaggaagcatccaacctgcagaacaagttagaggtgcttaaccagagatggcagaacgtgcttgaaaagacggaacagaggaagcaacaactcgacggcgcattgaggcaggctaaaggattccatggtgagatcgaggatttacagcagtggttgaccgataccgaacgccatctgctggcttctaagccgctcggtggcttacccgagactgccaaggaacaacttaacgtccacatggaggtctgcgccgcattcgaagccaaggaagaaacttacaagtccctcatgcaaaagggccagcagatgctggcgagatgtcctaagtcagccgagacgaacattgatcaagatataaataaccttaaggagaagtgggagagtgtggaaaccaaactgaacgaacgcaagacaaagctggaggaagctctcaacctggcaatggagtttcataattctctccaggatttcatcaattggctgacacaagccgagcagaccctcaatgttgcttcacgcccatccctgattctggacacggtgctcttccagattgatgaacataaggtctttgccaatgaggtcaattcacatcgcgagcagatcatcgagcttgataagactggcacccacctgaaatacttttctcagaagcaggacgtcgtgttaatcaagaatctcctgattagcgttcaatcccggtgggaaaaagtcgttcagcgacttgtggaacggggtcggtccttggatgacgccaggaagagagcaaagcagttccatgaagcgtggagcaagctaatggaatggctcgaggagtcagagaagtcgctggacagcgaactggagattgcaaacgaccccgataagattaagactcaactggcgcagcataaagagttccagaagtcacttggggctaagcacagtgtgtacgatacaaccaaccggacgggcagatctttaaaggagaagacgagcctggccgatgacaacctgaaactggacgatatgctgtccgagctgagggataagtgggataccatttgcggtaaaagcgttgaacgccagaacaagctggaagaggcactgttgtttagtggtcagtttaccgatgcactgcaggctcttatcgactggttatacagggtggagcctcaattggccgaagatcagcctgtgcacggtgacattgacctagtcatgaacctgattgacaatcacaaggcatttcagaaggagctgggaaaaagaacgagcagcgtgcaagccctgaagagaagcgccagagagcttattgaaggctctagagatgattccagttgggtcaaggtgcagatgcaggagctttctacccggtgggaaactgtgtgtgcgttatccatctccaagcagactcggttggaggcggctctccgtcaagctgaagaatttcattctgttgtgcacgcactgttggagtggttagccgaagccgaacagactctaaggtttcacggagtcctaccggatgacgaggacgcattgagaacactgattgaccaacacaaggagttcatgaaaaaattggaggaaaagcgggctgagctaaataaagccactactatgggcgacacagtcctggctatctgtcaccctgactctataaccaccattaagcactggattaccattatcagggctcgtttcgaagaggtattagcctgggcgaagcagcatcaacagaggctggctagcgcacttgctggattaattgctaagcaggagctcctggaagccttacttgcctggctgcagtgggccgagaccactctcacagataaagacaaggaggtgatccctcaggaaatcgaggaagtcaaggccctgattgccgagcaccagactttcatggaagaaatgacccgcaagcaacctgatgtggacaaagttaccaaaacttacaagaggcgcgctgccgaccctagttcacttcaaagtcatatccctgtcctggataagggccgagccggaagaaagagatttccagcaagctccctctaccccagcggctcccaaactcagatcgagacaaagaaccctagggtgaatctgctggtatcgaagtggcagcaggtgtggctcctggctctggagcggaggcggaagctcaatgatgcactggataggctggaggagctacgggaatttgcgaacttcgactttgacatttggagaaagaagtatatgaggtggatgaatcacaaaaagtcccgtgttatggacttcttcagaaggatagacaaagatcaagatgggaaaatcacacgccaggagtttattgacggtatcctcagttccaaatttccgacaagcaggttggagatgagcgccgtggcagatatttttgaccgcgacggagacgggtatatcgactattacgaatttgtcgccgcattacaccctaataaagatgcgtacaaaccaatcacggacgctgacaagattgaggacgaggtcacccgccaggtcgccaaatgtaaatgtgcgaagaggttccaagtggaacaaattggtgataacaaatacagattttttcttgggaaccaatttggggattctcagcagcttcggttggtccggatcctgcgtagtacagtgatggtccgtgtcgggggaggctggatggccctggacgagtttttagtgaaaaatgacccttgtagggctaagggacggaccaacatggagctgcgcgaaaaatttatcctggccgacggagcatctcaagggatggcagcttttcggccacggggaaggaggagtcgacccagttcaagaggtgcttctccaaaccgctcaacctcagtcagctcacaggccgcacaggcagcctcgccacaggtccccgctaccactactcctaagatactccacccactgacccggaactacggtaaaccttggcttaccaacagcaagatgtcaaccccttgtaaagcagcagagtgcagcgacttccctgtcccatccgctgaaggcacccccatccagggttccaagctgagactgcctgggtacctcagcggcaagggatttcactccggtgaggactccgggctcatcacaactgcagctgccagggtgaggacacaatttgccgattcgaaaaaaacacccagccgccctgggagtagggccggatccaaagctggctcccgggcttcatcaaggagaggcagcgatgcttctgatttcgatatctcggagattcagagtgtgtgctctgatgttgagacggtgccgcagacacaccgcccaaccccacgagctggctcacgcccatctacagctaagccaagcaagatccctacaccccagcgaaaatctcccgctagcaagcttgataaaagctctaagagatag

SEQ ID NO: 221508 - DNA, 12603 bp, synthetic construct
  misc_feature 1..12603: note = Description of Artificial Sequence: Synthetic coding sequence
  source 1..12603: mol_type = other DNA
atggctggctacttgtcacccgcagcatatctgtatgtggaggagcaggagtatctgcaggcttacgaggacgtcctggagaggtataaggatgaacgcgacaaagtgcaaaaaaagacgttcaccaaatggatcaaccagcatctcatgaaagtgaggaaacatgtgaacgacctgtatgaagaccttcgagacggtcataatctgattagcttgctggaagtcctctctggggacacactccctcgggaaaagggcagaatgcggttccataggcttcagaacgttcaaatcgctctcgactatctgaaacgcagacaggtgaaactggtaaacattagaaatgacgacatcactgacggaaacccgaagttaaccctgggtctcatctggaccatcatccttcactttcagatttcagatatccacgttactggagaatcagaagatatgagtgcgaaggagcgcctgctactctggacccaacaggccacagaaggttacgctgggatccggtgcgaaaatttcactacgtgctggagagatggcaagctttttaatgctataatccacaaatatcgtcctgacctgattgatatgaacactgtggcggtgcagtctaacctggccaatttggagcacgcgttctacgtcgcagaaaagattggtgtgatccgacttctggatcccgaggatgtggatgtgagttccccagacgagaaaagcgtgattacatatgtcagtagcctctacgacgcttttcccaaggtgccagaaggcggagaaggcattggggctaacgatgtagaggttaagtggattgaataccaaaacatggtgaattatctgatccagtggattaggcaccacgtcaccaccatgtccgaaaggacctttccaaacaacccagtcgagctgaaggcgctgtataatcaatacctccagttcaaagagacggagatccccccaaaagagaccgaaaagtcaaagatcaaacggctgtataaattgctggagatctggatcgaattcgggaggatcaagctgctgcagggttaccatccaaatgatatcgagaaggagtggggcaaactgatcatcgctatgctagagcgcgaaaaagcactgaggcccgaggtggaaagacttgaaatgctgcaacagattgctaatcgcgttcaacgcgactccgtaatttgcgaagataagttgatactcgcgggtaacgctctgcagagcgacagtaaacgactggagagcggggtccagttccaaaatgaggctgagatcgcaggctacatcctggagtgcgagaacctcctgaggcagcacgtcatcgacgtgcaaatattgatcgacggcaaatactatcaggccgaccagcttgttcagagagtggcaaaactgagggatgagatcatggcacttcgcaatgagtgttcatctgtgtactctaaggggcgtatcttgacaaccgagcagaccaagttgatgatcagtggcatcacacagtctctgaatagcggattcgcgcagactctccatccttcactgaccagcggcttgacacaaagccttactccttcattaacctcctccagtatgacttccggattatcctccggaatgaccagccgcttgacaccttcggtgacccccgcttacaccccaggttttccctctggcctggtacccaacttctcttccggggttgaacctaatagcctgcagacactcaaactcatgcagatacggaagcccttactgaagagctcccttcttgaccaaaatcttaccgaggaggaaatcaacatgaagtttgtacaggatctgctgaattgggttgacgagatgcaagtacagctggaccggaccgagtgggggagtgatctgccgtcagtagaatcccacctggagaaccataagaatgtgcatcgggcaatcgaagaatttgagagctcattgaaggaggccaagattagtgagattcagatgacagcaccactgaagctgacctacgccgaaaaactccatagattggaaagtcagtatgcgaagcttcttaatacatcacgtaatcaggagcggcacctggacacccttcataattttgtcagccgagctacgaatgagctgatctggctcaacgagaaagaggaggaggaggtggcgtatgattggagtgagcggaatacaaacatagctcgtaagaaagactaccatgccgagctgatgagagaacttgaccaaaaggaggaaaatatcaaatccgtgcaggagatcgctgaacagttgctgttggagaaccaccctgcgagactcaccattgaggcataccgcgcagccatgcagacacaatggagttggatacttcagctctgccagtgcgtggaacagcacattaaggaaaatacagcctactttgagttctttaatgatgccaaagaagctaccgattatttgaggaacctgaaggatgcaatccagagaaagtactcatgtgatagaagctcaagcatacacaaactcgaggatttagtgcaggagtctatggaagaaaaggaagagctgctgcagtataagagtaccatcgctaatctaatgggcaaggcaaagacaattattcagcttaaaccacggaattccgattgtcctttgaaaacaagcatccccattaaggccatttgtgattaccgtcagatagagataaccatctataaggacgatgagtgtgtgctagccaacaacagccacagggctaaatggaaggtgatctctcctactggaaatgaggcgatggtgccttcagtctgttttaccgtgccaccacctaataaggaagccgtcgacctggccaatcggattgagcagcagtaccaaaatgtcctaaccttgtggcacgaatcacacataaacatgaaatccgttgtgtcttggcactacttgataaacgagatagaccggatccgggctagcaatgtcgcctcaattaagaccatgcttccaggagagcatcagcaggtgctgtctaacctacaatcgcgctttgaggatttcctcgaggatagccaggagtcccaggtgttctctggatccgatatcactcaactggaaaaggaagtgaacgtttgcaagcaatattaccaggaactgcttaagtctgctgaacgggaggaacaagaagagagtgtctacaacctgtatatctctgaagtaagaaacattaggctcagactcgaaaactgcgaagaccggctcatacggcaaatcagaaccccgctggagcgcgatgatctccacgagagcgtgttcaggatcactgagcaggaaaagcttaagaaggaactggagcggctgaaggacgatctggggacaattacaaacaaatgcgaagaatttttttcacaggctgctgcttcatcctcagttcctaccttgagatctgaacttaatgtggtgctccagaacatgaaccaggtttactcaatgagctctacttatatcgacaaattgaagactgttaatctggtgttaaagaatacccaggccgcagaggcccttgtgaagctatacgaaaccaagttgtgtgaggaggaggcagttatcgccgacaagaataacatcgagaatctgatttctaccctaaagcagtggcgctccgaggtggatgaaaagcggcaggtcttccacgcactggaagatgagctccagaaggctaaagccatctccgatgagatgtttaagacgtacaaagaacgcgatctggacttcgattggcataaggagaaggcagaccagttagtggaaagatggcaaaatgtccacgtacaaatcgataaccgtctgcgcgacctggaaggcatcggaaagagcctcaagtactaccgcgatacataccatccactggatgattggattcagcaggttgaaacgacccagcggaagatccaggaaaatcagcccgagaatagcaagactctggccactcagttgaatcaacaaaagatgttggttagcgagatcgagatgaaacagtctaaaatggacgagtgccagaaatatgcagaacagtacagtgccactgtgaaggattatgagctgcagaccatgacctatcgcgctatggtggattcgcagcagaaaagcccggttaaaaggagacgaatgcaaagcagtgccgatttgatcatccaagaattcatggacttacgtacccgatacacagcacttgtgaccttgatgacgcagtatatcaaattcgccggagactcattgaagagattggaggaggaagaaaaaagccttgaagaggagaagaaagagcatgtggaaaaggccaaggagttgcagaagtgggtgagcaatataagcaagacactcaaggatgccgagaaggctggcaagcccccattttctaagcagaaaatttctagcgaggagatttccacgaaaaaagaacagttgtcagaggcactccagaccattcagcttttcttggctaagcacggcgacaaaatgaccgacgaagagcgcaatgagctggaaaaacaggtgaaaaccctccaggaaagctacaatttgttattctccgagtccttgaaacagttgcaggagagtcagacatccggagatgtaaaggtggaggagaaattggacaaagtcatagccggaactattgaccagaccacaggggaggtgctatccgtgttccaggctgtcctgcggggtctcatcgactatgataccggcatcagacttctagagacccagctgatgatttcggggctgatttctcccgaactcagaaagtgcttcgacctaaaggatgctaagtcacatgggctcattgacgagcagatcctgtgccagttgaaagagctgagtaaggctaaggaaattatctccgctgcctcgcctacgactattccagtcctggacgctctggctcagtctatgatcacagaatccatggcaattaaggtcctggagatcttactgtcaaccggaagcttggttatacccgctaccggtgaacaactgaccctgcagaaggccttccagcagaacctagtgagtagtgccctgttttcgaaggtcctcgagcggcagaacatgtgcaaagatctgattgacccttgtactagcgagaaagttagcctgattgatatggtgcagagatcgacactgcaagagaataccggcatgtggctcctgcccgtacgacctcaggaggggggtaggatcaccctgaagtgcggccgtaatatttctattctgcgtgctgcccacgagggattaatcgaccgcgagacaatgtttagactccttagcgcccagctcctgagcggagggcttattaacagcaactccggtcagcggatgaccgtggaggaggcagtgcgggagggcgtcattgaccgcgacacagcctcctccatcctcacctaccaggtccagacaggcggaattatccagtcaaacccagcaaaacgccttactgtggatgaagctgtgcagtgtgatttgattacgtcgtcttcggctcttttggtccttgaggcccagagggggtacgtgggtctgatctggcctcacagtggcgagatctttccaacctcttcctccctgcagcaagagctcattacaaacgagctcgcttataagatcctgaacggcagacagaagattgccgctttgtacattccagaaagtagtcaagtgatagggcttgacgccgcaaaacagctcgggattattgataacaatacggcctcgatcctgaagaatattacattgccggacaaaatgcctgacctgggtgatctggaggcttgcaagaacgctcgccgatggctcagcttttgcaaattccaacccagtacagtgcatgattacagacaggaggaagacgtatttgacggggaggaaccagtgaccactcagactagcgaggagactaagaaactgttccttagctatctgatgattaacagctatatggatgctaatactggccagaggcttcttctttacgacggcgacctggatgaagctgtcggcatgctcctggaaggttgtcacgccgaattcgacggaaacactgctattaaggaatgtttggacgtgctgagtagctctggagtgtttctgaacaatgcctctgggcgtgagaaagacgaatgtacagcaaccccaagcagtttcaacaagtgtcactgtggcgagcccgaacatgaggagactccagagaataggaagtgcgcgattgacgaggaattcaatgagatgcgaaataccgttatcaactcagagttctcccaatccggaaaattggctagcactatctcaatcgaccccaaggtgaatagttccccgtccgtctgcgtgcctagcttgatttcctacctgacccagacagaactggctgacattagcatgctcaggtccgatagcgaaaacatcttaactaactatgagaatcagtccagggtcgaaaccaatgagcgcgctaacgagtgcagtcactccaaaaatatccagaatttcccttctgatttaatcgagaatcccataatgaagtcaaagatgtcgaagttctgcggtgttaacgagactgaaaatgaagataataccaatagagactccccaatctttgactatagccctaggctgtccgctctgctgtcccatgataaactgatgcacagccagggctccttcaacgacacccatacccctgagtccaacggaaataaatgtgaggctccagcgctgagtttcagtgataaaactatgctttccggccagcgaatcggagagaagttccaggaccaattcctgggcatagcagccatcaacatctcactgccaggagagcagtacgggcagaagagtttgaatatgatatcctccaaccctcaagtgcagtatcataacgataagtacatatccaacaccagcggagaggatgagaagacccatcccggattccagcaaatgccagaggataaggaggatgagagtgagattgaggaatatagctgcgctgtaaccccaggcggtgatactgacaacgcaatcgttagcttaacgtgtgctacgcctctcctggacgagaccatctctgcaagtgattatgagacatccctactaaacgatcaacagaataacaccggtaccgacactgattccgatgatgacttctatgatacccccctctttgaggatgacgatcatgatagtctcctgctggatggtgatgatagggactgtcttcaccctgaggattacgatacactgcaggaagagaatgacgagactgcgtctcctgcagacgtcttctacgatgtctccaaagaaaatgagaatagtatggtgccgcagggagcacctgtggggagcctatctgtcaagaacaaggcccactgtttacaggacttcctgatggacgtggagaaagatgaacttgactctggggaaaagattcatctgaacccagtcggcagcgacaaagtaaatggacagtcccttgaaactggcagcgaaagggagtgcaccaatatcctcgaaggcgatgagagcgactctctcacggattatgacatcgtggggggaaaggagagtttcaccgctagccttaagtttgacgatagcggctcttggcggggaagaaaagaggagtatgttacaggtcaagagttccattctgatactgaccacctggattcaatgcagagcgaggagtcctacggtgactatatatatgactccaatgatcaggacgacgatgacgacgatggaatcgacgaggagggcggaggcatacgggatgagaacggaaaacccagatgccagaacgttgccgaagacatggatatccagctgtgtgcttcaatccttaatgaaaactccgacgaaaatgagaatatcaacacaatgatactgctcgacaaaatgcactcatgctcatctttggagaaacagcaacgagtgaatgtggttcagctcgctagcccctccgaaaataacctcgtaactgagaaatccaatctgcccgaatacacaactgaaattgcgggaaagtctaaagagaatttgctgaatcacgaaatggtcctcaaggatgtgctgccacctatcataaaggacaccgaatccgaaaagacctttgggccagcaagtatcagccacgacaataataatatttctagcacaagtgaactaggcaccgaccttgcaaacactaaagtaaaactcatccagggctcagagcttcccgagctgaccgatagtgtcaagggaaaggacgaatatttcaagaacatgacgcctaaagtagattctagtctcgaccatattatctgtacagaacctgacttaattggcaagccagctgaggagtctcatctgtcccttatcgcttctgtcactgataaagaccctcagggaaatggcagcgacctgatcaaaggcagagacggaaaaagcgacatactaatcgaggacgaaacctccattcagaagatgtatctgggggagggtgaggtactcgtggaggggcttgtggaagaagagaatagacatctgaaactactcccgggaaaaaatactcgggacagcttcaagctcataaactcgcagtttcccttccctcagattacaaacaacgaggaattaaaccagaaaggcagcctgaaaaaggccacagtcactctgaaggacgagccaaacaacctgcagatcatcgtgagcaaatcgcctgttcagttcgaaaatttggaagagattttcgataccagcgtaagtaaggaaattagtgacgacatcaccagtgatattacatcgtgggagggcaacacccactttgaggaatctttcacggacgggcctgagaaggagctcgacctctttacttatttgaaacactgtgcaaaaaatattaaggccaaagacgttgccaagcccaacgaggacgtaccttctcacgtcctaattactgctcccccaatgaaggagcacctgcaactcggggtgaataacactaaggagaagagcacgtctacacagaaagattcacccctgaacgacatgattcagtctaatgatttgtgttctaaagagtctatctcaggaggaggcaccgagatcagccagttcacccctgagagtatcgaggcgacactgtccatcctgtcgcgcaagcacgtggaggatgtgggcaagaatgattttctacagtcagaacgatgcgctaacggtctgggcaatgacaacagctctaacacactaaatacagactattctttccttgagattaataataagaaagaacgaatagagcagcagctcccaaaggagcaggctctcagccccaggagtcaggagaaggaggttcagatccccgaactgagtcaagtgttcgttgaggacgtgaaagacattctgaagagccgcctgaaggaaggccacatgaatcctcaggaagtggaggaaccttccgcttgtgcagatacaaagattctgatccagaacctcattaaacggatcactacatcccagcttgtcaatgaggcgagcacggtgcccagtgactctcagatgtccgatagtagcggggtctctcccatgacgaactcgtctgaattaaagcccgagtctcgggacgatcccttttgcatcggaaacctcaaaagcgaattgctcctgaatatcctgaagcaggatcagcacagtcagaagattacaggggtgttcgagctgatgagagagttgactcacatggagtacgacctggaaaaacgcggaataacatcgaaagtcctgcccttgcagttggagaatatcttctacaaactgctggctgacggctacagcgagaagattgagcatgtgggggactttaaccagaaagcgtgttccacaagcgaaatgatggaggagaagccacacatcctgggtgacattaagagcaaggaggggaactactatagtcccaatctggagaccgttaaggaaattggcctggaatcatcaacggtgtgggcctctacactgcctcgcgacgagaaactcaaggacctctgcaatgattttccctctcacctggagtgcacaagcggtagcaaggagatggcgtccggtgattcatctacagagcagttctctagcgagctgcagcagtgcctgcagcacactgagaaaatgcacgagtatttaacccttttgcaggatatgaagcccccactggacaatcaggaatccttggataacaatctggaggccctgaagaatcagctgagacagctggagacatttgaactgggactagcacccatcgctgtgatccttagaaaggatatgaaactggctgaagaattcctgaaatctcttccttcagacttcccccgtggccatgtggaagaactgtctatctcccatcagagcctgaaaacagctttcagctcactgtctaatgtgtcatccgagaggacaaagcagatcatgttagcaatcgactctgagatgtccaagttggccgtgtcccacgaagaattcctgcataaactcaaatccttctccgactgggtctctgagaaatccaagagcgtcaaggatatagaaatcgtgaatgtccaagacagcgaatacgtaaaaaagcgtttggaattcctcaagaatgtattgaaagacttgggacacaccaagatgcagctggagaccacagcgttcgacgtgcagttttttatctccgaatacgctcaggacttgtccccaaaccagtccaaacagttgctgcgtcttctgaatactactcagaagtgcttcctggatgtccaggagagcgtgaccactcaggtcgaacgcctggagactcagctgcaccttgaacaagatctggacgaccagaagatcgtcgcagagcggcaacaagaatacaaagaaaaactgcaggggatatgcgatctgctgacccagaccgagaaccgtttgatcgggcatcaggaggcctttatgattggggacggtaccgtggaactgaagaagtaccaatccaaacaggaggagctgcaaaaggacatgcagggcagcgcacaggccctggccgaagtcgtgaagaacacagagaacttcctcaaggaaaacggggaaaaactttcccaggaagataaagccttaattgagcaaaaactaaacgaggccaaaattaagtgcgagcagctgaatctgaaagctgaacagagcaaaaaagagctagacaaggttgtcacgacagctatcaaagaagaaactgagaaggtggcagctgttaaacaactcgaggagagtaagactaaaatcgaaaacctgcttgattggctttcaaacgtagataaagacagcgagcgtgctggcaccaaacataaacaggttattgaacagaacgggacacacttccaagaaggggatggtaagagcgcgattggcgaggaggacgaagtgaatgggaatctgctggagacagatgtggacggtcaagtgggaacgacccaagagaaccttaaccagcagtaccaaaaggtcaaagcccaacatgagaaaatcatttcacagcaccaggccgtgattatcgccactcagagcgctcaggtcctgctggagaaacaggggcagtacttgtctccagaagagaaggaaaaactgcagaagaatatgaaggaacttaaggtgcattacgagacggctcttgctgaaagcgaaaagaaaatgaaattaacgcattccctgcaagaagaactagagaagtttgacgctgattataccgagtttgaacactggttacagcaatccgaacaggagctggagaacctcgaggccggagctgatgacatcaatggtctcatgaccaaactaaagagacagaagagttttagcgaggatgtgatcagccacaaaggcgatctccggtatatcaccatatctgggaatagggtcctcgaagccgctaagagctgtagtaaaagagatgggggaaaggtggacacatcagcaacccatcgagaggtccaaagaaaactggaccacgccaccgaccgcttcaggagcttgtactctaagtgcaatgtgcttggtaataatctgaaagatttggtggacaagtaccagcattatgaggacgccagctgcggactgctagctggcctgcaggcatgtgaagccactgctagcaagcatctgtctgaaccgatcgccgttgatcccaaaaatctgcagagacagctggaagagactaaggcgttgcagggtcagatttccagccagcaggttgctgtcgaaaagctgaagaaaaccgcagaagttctattggatgctcgagggtctctgcttccagccaagaacgacattcagaaaacccttgacgacattgttggcagatacgaagacctgtcaaagagtgtgaacgagaggaatgagaagctgcagataactttaacgaggtccctgagtgtgcaggatggactcgatgagatgctagattggatgggcaacgtggaatctagccttaaggaacaagacgtgggtactggctactgtcgcagcagcgaacagtataaatgccacgaatac

SEQ ID NO: 221509 - DNA, 22386 bp, synthetic construct
  misc_feature 1..22386: note = Description of Artificial Sequence: Synthetic coding sequence
  source 1..22386: mol_type = other DNA
atggccggttatctatcccctgctgcttacctgtatgtagaggagcaggaatatctgcaggcgtacgaagatgttttagagcgctacaaagatgaacgcgataaggtacagaaaaagacgtttactaaatggatcaatcaacatctgatgaaagtccgaaagcatgtgaatgacctttatgaggatctgcgggatgggcataacctgatcagcctgctggaagtcctaagtggcgatacgctccccagagaaaagggacggatgcggtttcacaggctgcaaaacgtccaaatcgcactggactacttaaagaggcgccaggtaaaactcgtaaacattcggaatgacgacattacagacggaaatcctaagctgacactcggccttatctggaccatcattctgcacttccagatttctgatattcatgtcactggtgaaagcgaagacatgtctgcaaaggagcgactgctgctctggactcagcaggctactgagggatacgcaggcattagatgtgaaaatttcaccacatgttggcgggacggcaagctgtttaacgccataatccataagtatagacccgatctaatcgatatgaacaccgtggctgtgcaatctaacctggcaaatctcgaacacgcgttttatgttgccgagaagatcggcgtgatccgattattggaccctgaggacgtggatgtaagtagtccggacgagaagagcgtcattacttatgtgagcagcctgtatgatgcattccccaaggtccccgagggcggagagggcattggcgctaacgatgttgaggtgaagtggattgaataccaaaatatggtgaactacttaattcagtggattcgccatcacgtgacaaccatgtcagagcggacctttccgaataatccggtggagctgaaagctctgtataatcagtacctccagtttaaagagacagagattccacctaaagagacagagaaatcgaaaataaagagactctacaagctcctcgagatttggatcgagttcgggagaatcaagttgctgcagggctatcaccctaacgacatcgagaaggagtggggcaagctgattattgccatgctggagagagaaaaagccctgagacccgaggtcgaaagactagagatgctgcaacagatcgcgaatcgggttcagagggacagtgtgatctgtgaagacaagctgattcttgctgggaatgctctgcagtctgatagcaagaggctcgaaagcggcgtgcagtttcagaacgaggccgaaatcgctggttacattttggagtgcgagaacctgctacgacagcatgtgatcgatgtgcagatcctcatcgatggcaaatactatcaggccgatcaactggtgcagagagttgctaagttgcgcgacgagatcatggccctgagaaatgagtgctctagcgtatacagcaaggggagaattcttactacggagcagacaaagctcatgatcagtggtatcacacagtctctcaattcgggtttcgcgcagactctgcatcctagtctaacatcaggtcttacccagagtctgaccccatcccttacatcaagctccatgacctcgggtctcagttcgggcatgacgagcaggctcaccccaagtgtcaccccggcttatactccaggattcccctcgggacttgtgcctaacttcagttcaggagttgaacctaattcgcttcagaccttaaaacttatgcaaattaggaaacccctgctcaaaagctcactcctcgatcagaacctcaccgaggaagagattaacatgaagttcgtgcaagacctgttgaattgggtggacgagatgcaggtacaactagaccgcactgaatggggctccgatctgcctagcgtcgaatcccatttagaaaaccacaagaacgtgcatcgggctattgaagaatttgagtcctcactgaaggaggccaaaattagcgagattcagatgacggctccacttaaactgacctacgccgagaaactgcataggctggagagccagtatgctaaactgctcaataccagccggaaccaagagaggcacttggacacacttcacaattttgtctcccgggcaacaaacgagctgatttggctgaacgaaaaagaagaggaggaggtggcctacgattggtctgagcggaatactaatatcgccagaaagaaagattatcatgctgagttgatgagggagttggaccagaaagaggagaacatcaaatcagtccaggaaatcgccgaacaactcctgcttgagaaccatcccgcaaggcttactatcgaagcctaccgcgctgcaatgcaaactcagtggtcctggattctccagctatgccagtgcgtcgaacagcacatcaaagagaataccgcgtactttgaattttttaatgacgctaaggaggctactgattacctgcggaatctcaaagacgcaattcaacgaaaatacagttgtgaccggtccagcagtatccataagttagaagacttggtgcaggaatctatggaagaaaaggaggagctactgcaatataagtctaccattgcaaacctcatggggaaggccaagactatcattcagcttaagcccagaaattcagactgccctctgaagaccagcatccctattaaggccatatgcgattacaggcagatagagattacgatttataaagatgatgaatgcgtccttgctaacaacagtcaccgagcaaagtggaaggtaatttcaccaaccggtaatgaggcaatggtcccctccgtgtgcttcacggttccccctccgaacaaggaggccgttgatctcgcaaatcgaatagagcaacagtaccagaacgtcctgacactgtggcatgagtctcacatcaatatgaagtcagtggtcagttggcattacctgatcaacgagatcgatcgtattcgcgcaagtaacgtggcgtccattaaaacgatgcttcctggcgaacatcagcaggtattatccaacttacagagtcgcttcgaagactttctggaggattcacaagagtcacaagttttctcgggctcagacatcactcaactagagaaggaggtcaacgtctgcaagcagtactatcaggagctgctgaaaagtgccgagcgcgaagagcaggaagaaagtgtatacaatctctatatctccgaggtgagaaatattcggctgcggctggagaattgcgaggacaggctcatacgccagatcagaacccccctggaacgtgatgatttgcatgagtccgtgtttagaatcactgaacaggagaaactaaaaaaagagctggagagattgaaggacgacctcgggaccatcactaataagtgtgaggaattcttttcccaggcagccgcatcttcgtccgtcccaactcttagaagtgaactcaacgtggttctgcaaaacatgaatcaggtgtactctatgtcgtctacctatattgacaagcttaaaaccgtgaacctcgttctgaaaaacacacaggctgctgaagccctggttaagctctatgagacgaaactgtgtgaagaggaggctgtaattgccgataaaaataatatcgaaaatttgatcagcaccctgaagcagtggcgaagtgaggttgacgagaaaaggcaagtcttccacgcattagaggacgagcttcagaaggccaaggcaatttctgacgaaatgttcaaaacctataaggaaagggatctggacttcgattggcacaaggaaaaagcagatcagctggtggagcggtggcagaacgtccacgtgcagatcgataataggctcagagatctagagggcatagggaaatcactaaaatactacagggatacttaccacccactggacgattggatacagcaggtggagacaacacagcgcaagatccaggagaatcaacccgagaattcaaagactctggctactcagttgaatcagcagaaaatgttagtgagtgaaatagagatgaaacagagcaaaatggatgaatgccaaaagtacgcagagcagtactctgccaccgtaaaagactacgagttgcagactatgacctacagggcaatggtcgacagccaacagaaatcaccggtgaaacgacggagaatgcagtcctccgccgacctgatcatccaggagttcatggatctaaggacccggtacacagcattagtaactctgatgactcagtatattaaattcgccggtgactcccttaaacgactcgaagaagaagagaagagtctggaagaagaaaagaaggaacacgtcgagaaggcgaaggagttacaaaagtgggtgtccaatatttccaagacactcaaggacgcggaaaaagccggtaagccaccattcagcaaacaaaaaattagcagtgaggaaatcagcaccaaaaaggagcagctctctgaagcactacagactatacaactgtttctggccaagcatggggataaaatgactgatgaggagaggaacgaacttgagaagcaggtgaagacactgcaggagtcgtataatctcctgttcagtgaaagtctgaagcagctacaggagtcccagaccagtggcgacgtcaaggtggaagagaaactggacaaagtgatcgccggtacgatcgatcaaaccactggcgaagttctgagcgtgtttcaggccgttcttagagggctgatcgactatgacactgggattcgcctgctcgaaacccagttaatgatctccggcttgatctccccagagctgaggaaatgctttgatttgaaagacgcgaagagtcatggtctcatcgatgaacaaatactgtgtcagctgaaagaattgagcaaggcaaaggaaattataagcgctgcaagtccaacgacgattcccgtgcttgacgctctcgcccagagcatgattacggaaagcatggcgattaaggtgctcgaaatactcctttctacgggctcattagtgatacccgcaacgggcgagcaactcactttgcagaaggcattccaacagaatctcgtgtcgtcagcgctcttttctaaggttctggagcgccaaaacatgtgcaaagacctcattgatccctgcacatctgaaaaggtctccctgattgacatggtacaaaggtccacactgcaagagaatacgggcatgtggctgctgcctgttcgacctcaggaggggggaagaattacactgaagtgcggacggaacatatcgatcttgagagcggcacacgaaggtctgatagaccgtgagaccatgtttagactcctgtccgcacagctgttatccggaggactgataaatagcaatagcggccagcgcatgaccgtggaggaagctgtgcgggagggggtcattgatagagacaccgcgtcatctattctgacctaccaagtacagactggtggcattattcagtccaaccccgcaaaacgcttgactgttgacgaggcagtacagtgcgacttgattacatcttctagcgccctgctggtcctggaggctcagcgcggatacgtagggctgatttggccgcattccggtgaaatcttccccacatcttcctccctccagcaggaactgataaccaacgagttggcatacaagatcctgaacggcaggcagaagatagccgcactgtatattccagaatcctctcaggtaatcgggctagacgctgccaagcagttaggaatcattgacaacaatactgccagtatcttaaagaacatcacactgcccgacaagatgcccgacttaggtgatctggaggcctgcaagaacgcaaggcggtggctgtctttctgcaagtttcagccctctacggttcacgattaccgccaagaggaggacgtgtttgacggggaggagcccgtcacaacccaaacatctgaggagaccaaaaagctgttcctatcctacctgatgataaactcttatatggatgccaataccgggcaacgtctgctgctgtacgacggggaccttgatgaggctgttggaatgctcttagaggggtgccatgcggagtttgacggcaataccgccatcaaagagtgcctggatgtgctaagtagttccggggttttcctgaataacgcctctggacgggagaaagacgagtgcacagctaccccaagctctttcaacaaatgtcactgcggggaacccgaacatgaggaaaccccagaaaaccgcaaatgcgccattgatgaagaatttaacgagatgaggaatactgtgatcaactcagagttcagccaatcaggcaaattggcaagcaccatctcaattgatcctaaggtgaactctagtccatctgtatgcgtcccctccctgatctcataccttacacagaccgaactggcagacatctccatgctgcgatctgatagtgaaaatatactcacaaattacgaaaatcagagccgggttgagacaaatgaaagggcaaatgagtgcagccatagtaagaacatccaaaatttcccctcagacctgattgagaaccccatcatgaagtcgaagatgtctaaattttgcggggtgaacgagactgagaatgaggacaatactaatcgtgattccccgatctttgactattccccacggctttccgcattactaagccacgacaagctgatgcacagccagggctccttcaacgacacccacacgcctgaaagtaacggtaacaagtgcgaagcccctgcattgtcatttagcgataagactatgctgtcagggcaacgcattggtgagaagttccaagatcagtttctcggtatcgcggctattaacatcagtctgcctggggagcagtatggacagaagtcgctgaatatgatttcgtccaatccacaggttcagtaccataacgataagtacatcagcaatacctctggggaggacgagaaaacgcacccaggtttccagcaaatgcccgaggacaaagaggacgaatcagagatcgaggagtatagctgtgccgtgactcctggtggcgatacggataacgcgatcgtcagcctcacctgtgcaactcctctcttggacgagacaatctccgcatccgattatgaaacctcactgctaaacgaccaacagaacaatactggcacagatacagatagtgatgatgatttctacgacaccccactgttcgaagatgatgaccatgacagtctgcttctggacggggatgatcgcgactgcttacaccctgaggattatgataccctgcaggaggaaaatgatgaaactgcatcgcccgctgatgtcttttacgatgtgagtaaggagaacgagaacagcatggtcccacagggtgcccctgtcggcagtctgtccgttaaaaataaggcgcattgcctccaggacttcctgatggacgtcgagaaagatgaattggattctggggaaaagattcatctcaatcccgtgggttccgataaagtgaatgggcaatccttggaaaccgggagcgagcgggagtgcaccaacatactcgagggagacgaatccgactccctgaccgactatgacattgtgggtggaaaggaaagctttactgcgagtctcaaatttgacgactcggggagttggagaggacgaaaggaggagtatgttaccgggcaggaatttcacagtgacaccgaccacctcgactcaatgcagtcagaggagtcatatggagattatatctacgactcgaacgaccaagacgacgacgacgatgacggcattgatgaagagggtgggggtattagggacgagaatggaaagcccagatgtcagaatgtcgccgaggatatggatattcagctctgtgcctctatcctgaacgagaattcagatgagaacgagaatatcaacacaatgatcctcctggataaaatgcacagttgttcttctctagagaagcagcagagagtaaacgtggtgcagttggctagcccgtctgagaacaacctagtcaccgaaaagtccaatctccctgaatatacaacagagatcgcgggtaaaagtaaagagaatttgctcaatcacgaaatggtgctcaaggatgtactccctccgattattaaggatactgagtctgagaagacctttgggccagccagtatctcccacgacaacaacaatatatcaagtacttccgaactgggaaccgatctcgcaaataccaaagttaagcttattcagggcagtgaactgcctgaactgacagactccgttaagggcaaagacgagtacttcaaaaatatgacccctaaggtcgactcttccctcgaccacatcatttgcaccgaacctgacctgatcgggaagccagctgaggaatctcacctatctttaattgcgtctgttaccgataaggacccacagggcaacggcagtgatctgatcaagggtcgggacgggaaatcagacattcttatcgaagatgagaccagcatccagaagatgtatctgggagagggcgaagtcctcgttgaaggcttagtggaagaggagaacaggcacctcaaattgctgcccggaaaaaatacccgtgacagtttcaaactcattaacagccagttccctttcccccagataactaacaacgaagaactgaaccaaaagggttcacttaagaaagcaactgttaccctgaaagatgaaccaaacaatctgcagatcattgtgtcgaagagtcccgttcagtttgaaaatctggaagaaatatttgacacttcggtctccaaggagattagtgacgacatcactagcgatatcacgtcctgggaagggaacacgcattttgaggagtctttcaccgatggcccagagaaggaactggacctgttcacctacctgaaacattgtgcaaaaaacattaaagcaaaagatgtggccaagcccaacgaagatgtcccaagccatgttttgatcaccgcgcctcctatgaaggagcatctgcagctgggcgtcaacaacacaaaagaaaagtccacaagcacacagaaggattctcctctgaatgacatgattcagtccaacgatctttgttccaaggaatcgattagcggcggtgggaccgaaataagccaatttacaccagagtccatcgaggcgactctgtcaattctgtcccgcaaacatgtcgaagacgtgggaaaaaacgacttcctccaatccgaaaggtgcgcgaatggccttggcaacgataactcatccaatacgcttaatacagactatagcttcctcgagatcaacaacaagaaggagcgcattgaacagcagctgccgaaagaacaggctttgagcccaaggagccaagaaaaggaagttcaaatcccggaactaagccaagtttttgtcgaggatgtcaaggacattcttaaatccaggctgaaagagggccacatgaacccccaagaagttgaggagcccagtgcctgtgcagacaccaagattcttatccagaatctaatcaagagaataacaacgtctcagctggtgaacgaggcaagcaccgtgccgtcggattctcagatgagtgactcatcaggagttagtccaatgaccaattctagtgaattaaaacctgaatcaagagatgatcccttttgtatcggaaacctgaagagtgagcttctgctgaacattctgaagcaggatcagcactctcagaaaataacaggcgttttcgagctgatgcgcgagttgacccatatggagtacgacctggagaagcgcggaatcacttccaaggtattgccgctccagttggaaaatattttttacaagttactcgcagatgggtactccgagaagattgaacatgttggggatttcaaccaaaaggcttgcagcacttcagaaatgatggaggaaaaacctcacattttgggggatatcaaaagtaaggaagggaactactattctcctaatcttgagactgtaaaagaaattggactcgagtcttccaccgtctgggcgagcactctgcctcgcgacgagaaattgaaggatctttgcaacgattttccatcacacttagagtgtacctctggctccaaggagatggcaagcggggactcatcaaccgaacagttctcctcagaattgcaacagtgtctgcagcacaccgagaaaatgcatgagtacttgactctgttgcaggacatgaagccccctctagacaaccaggaatcacttgacaacaaccttgaggctcttaaaaatcagcttcgacaactcgagacctttgagctaggcctggcccctatcgccgtaatcctgaggaaggacatgaagctggcagaggaattccttaaaagcctgccttccgatttcccaagggggcatgtggaggaactgtccatttctcatcagtctcttaagaccgcctttagtagtctttctaatgtgagtagtgaacgtacaaagcagatcatgctagcaatcgactctgagatgtccaaattagctgtgagccatgaagaatttctgcacaagctcaagtcattcagtgactgggtgtcagagaaatcaaagagcgtgaaggatattgagatcgtcaacgtgcaggattccgagtatgtcaagaaacgattggaattcctgaagaacgtgctgaaagacttgggtcacacaaagatgcagctagagacaacagcattcgatgtgcaatttttcatcagcgagtacgcccaggacctcagtcccaatcaaagcaaacagctgcttcgcctcttgaacacaactcaaaagtgctttctagatgttcaggagtcagtgacaacccaggtagagcggctggaaacacagcttcacttggaacaagacctcgatgatcagaaaattgtggctgagcgccagcaagaatataaggagaaactgcagggcatctgcgaccttttgacccagacggagaaccgtctgattgggcaccaggaggccttcatgatcggcgacgggacagtggaactgaagaagtatcagtcaaagcaagaggagctacaaaaggacatgcagggctccgctcaagcgctggcggaggtggtgaaaaacactgagaactttctgaaagagaatggggaaaagctgagtcaggaggacaaggcactcatcgagcagaagctcaatgaggcgaaaattaaatgcgagcaattgaatctgaaggcagagcagtccaaaaaagagctggacaaagtagtcacaactgccatcaaggaggagaccgagaaggtggcggctgttaagcagctggaggaatccaagactaagatcgaaaacctgttggactggctctccaacgtggataaggactctgagcgcgcaggcacaaagcacaagcaggtgatcgagcagaacggaacccactttcaggagggtgatggcaaatcagccatcggggaagaggatgaggtgaatggaaatttgctggagaccgatgttgacgggcaggtggggacaactcaggaaaacctcaaccagcaataccaaaaggtgaaggcccagcacgagaaaattatctcccagcatcaggccgtgattatcgccacgcaatcagcccaagtccttctggagaagcagggccagtacttaagccctgaagaaaaagagaagttgcaaaaaaacatgaaagaacttaaagtgcactacgaaaccgcgttagctgaatcagaaaagaaaatgaaattgacgcactcccttcaggaggagctggaaaagttcgatgcggactatacagagtttgaacactggctgcagcagagcgagcaagaactggaaaaccttgaggccggagctgacgatatcaacgggctcatgactaaattgaagcgtcaaaagagctttagcgaagacgtgatctcacataagggggacttacgctacatcactatctccggtaaccgggtgttggaagccgcaaaaagctgcagtaaaagggacggtggcaaagtagacacatccgcgactcatagagaagtgcagcgaaaactcgaccacgcgaccgatagattccgctcgctgtactctaaatgtaacgttctgggaaacaacctgaaggatctggttgacaaatatcagcactacgaagacgccagctgtggattgctcgcaggcctacaggcttgtgaagcgacagccagcaaacatctctcggaacccatcgccgttgaccctaaaaacctgcagcgacagctcgaagaaacaaaggccctgcagggccagatatcctctcagcaagttgctgtggagaaactgaaaaaaactgccgaggtgctgcttgacgcaaggggctcactgctgccagctaagaacgatattcagaagacgctagacgacattgtcggtcgttacgaggatctgtcaaagtctgtcaatgagcggaacgagaagctgcagataaccctgacccggtcactgagcgtgcaggatgggcttgatgagatgctcgactggatggggaacgtcgagtcttccttgaaggagcaagggcaagtgccgcttaacagtacagccctgcaagacattatcagcaaaaatattatgcttgagcaagacatcgctggtaggcaatcatcgatcaatgcaatgaatgagaaggtgaagaaattcatggagacaactgaccctagcacagcctcctcgctacaggctaaaatgaaagacttaagtgccaggttttctgaggccagtcacaaacacaaggagaccctggctaagatggaggaactcaagacaaaggtggagctgtttgagaacctgagcgaaaaactccagacctttttagagacaaagactcaggccctcaccgaagtggacgtgcctgggaaagatgtcacagaattatctcagtacatgcaggaaagtacctccgagttcctggagcacaagaagcacctggaggtgctgcattcattgctgaaagagatatcctcacacggcctgcctagcgacaaagcccttgtcctggagaaaacgaataatctcagcaagaagttcaaggaaatggaagacaccataaaagagaagaaggaggctgtcacatcatgccaagaacagctcgacgcattccaggtccttgtcaaatctctgaaatcatggatcaaggaaaccacgaagaaggtgcccatcgtccagcccagttttggggctgaggacttaggaaaaagccttgaggacaccaaaaagctccaggagaagtggagcctgaaaactcccgagatccagaaggtgaacaattcagggatcagtctgtgtaatctcatatccgcggtcaccactcctgctaaagccatcgcagcagtaaagtcggggggagcagtcttgaatggcgaaggaaccgccacaaacaccgaagagttctgggccaataaagggttgacatcgattaaaaaggacatgactgatatctctcatggctacgaggacctgggcttactcctgaaagacaagatcgctgaactgaacaccaagctgagcaagctgcagaaggcccaggaggagagcagcgcaatgatgcagtggttgcagaagatgaataagacagccaccaagtggcagcaaacaccggcaccaactgacactgaggccgtgaaaacacaggttgagcagaacaaatcttttgaggcagagcttaagcagaacgttaataaggtccaggagctgaaggataagttgaccgagcttctggaggaaaatcctgataccccagaggctcccagatggaagcagatgctcaccgagatcgactccaagtggcaagagctgaaccagcttacgatcgatagacagcaaaaacttgaagagtcctccaataatctgacccagtttcaaactgtagaggcacagctcaaacaatggctggtcgagaaggagctcatggtttcagtgttaggcccactctctattgacccaaacatgctgaacactcagcggcagcaggtccagatcctgctgcaggaatttgccacacgcaaaccgcaatacgagcagcttacagctgcaggacagggtattttaagcagacctggtgaagatccttcacttcggggaatcgttaaggagcagctggccgctgtcacgcagaagtgggactccctcaccggtcaactgtcagatagatgtgactggatagatcaggccatcgttaaaagcacccagtatcaaagtttactcagatcactgagcgacaagcttagcgacctagacaacaagctgagttccagtctggcggtttcgacccaccctgatgctatgaaccagcagctcgaaactgctcaaaagatgaagcaggaaatccagcaagaaaaaaagcaaatcaaagtagcacaggccctctgcgaggatctgagcgccctcgtgaaggaggagtatctgaaggcggaattatcccgacagttagagggcatcctcaagtccttcaaagatgttgagcaaaaggctgagaatcacgtgcagcacctgcagtccgcttgcgcatcctcacaccagtttcagcagatgagtcgagacttccaagcatggctggacacgaagaaagaggagcagaacaagtctcaccctatttctgccaaacttgatgtgctggaatcactgattaaggaccataaggatttctctaaaactctgaccgcccagtctcacatgtatgaaaaaaccatcgccgagggcgagaatctcttgctcaagactcagggatcagagaaagccgcactgcagctccaattgaacaccattaaaacgaattgggatactttcaacaaacaggtaaaagaaagggaaaataagctcaaggagtcactggagaaggcactcaagtataaggaacaggtcgagactctttggccctggattgacaagtgccagaataaccttgaagagatcaagttctgtctcgatccggctgaaggagaaaatagcatcgcaaaactgaaaagcctgcagaaagaaatggatcagcactttggcatggtggaacttcttaataacacggcgaactctctgctcagtgtctgtgagatcgacaaggaggtcgtcacagacgaaaataaaagccttatccagaaagtggacatggtgacggagcagctgcatagcaagaaattttgtctggagaatatgacccagaaatttaaggagttccaggaggtcagcaaggaaagcaagaggcaactgcagtgcgccaaggaacagctcgacatacacgattctctggggtctcaagcttattcaaataaatacctgacaatgttgcaaacccagcagaagtctttacaggcgttaaagcaccaagtggaccttgctaagagactggcccaggacttagtggtggaggcaagcgattcaaaaggaacgagcgacgtcctgcttcaagtcgaaaccattgctcaggaacacagcacactcagccagcaggtggacgagaagtgcagcttcttggagaccaaattgcaaggaataggtcacttccagaacaccatccgagagatgttcagccaatttgctgagtttgacgatgaactggatagtatggcacctgttggaagggatgccgagacactacagaaacagaaggagaccattaaggcctttttaaagaaactcgaagcactgatggcatctaacgacaatgctaacaaaacatgcaaaatgatgctcgcaacggaggagacttctcctgatttggtgggcattaaacgcgatctggaggccttgtccaaacagtgtaacaaactcctagatcgggcacaggccagagaagaacaagtagagggcacaattaagaggctggaagagttttactccaagctgaaggagttcagtatccttctccaaaaggctgaagaacacgaagagtcccagggccctgtagggatggagacggagactatcaaccaacagcttaacatgtttaaggtctttcagaaagaggaaatcgagccactgcagggcaaacagcaggacgtgaactggcttggccagggcctcattcagagcgcagccaagtccacaagtacccagggtctagagcacgacttggacgatgtaaacgcccgttggaagacattaaataagaaggtggctcagcgtgccgcacaactgcaggaggccctgctacactgcgggcgttttcaagatgctttggagtcactcttatcttggatggtagacaccgaggagctggtggctaaccagaaacctcctagtgctgaatttaaagtcgtgaaggcccaaatccaggagcagaagctcttacagcgactactcgacgatcgaaaatccacagtggaagtcattaaacgagagggcgagaagatcgccaccaccgctgaacccgcagataaggtgaagatcctgaaacagctctccctgctcgactcaagatgggaggcattgttgaacaaggctgagacacgaaaccgccaactcgaagggattagcgttgtcgcccagcaatttcacgaaactctggagcctttgaacgagtggctaacaacaatcgaaaaacgcctggtgaattgcgaacctattggaacacaggcttccaagctggaagagcagatagcccagcacaaggttctccaggaggatattctgctccgcaaacagaatgtggatcaggctctgcttaacggactcgaattgctgaaacaaaccacgggagacgaggtgctgataatacaggataagttagaagccattaaagctcgctacaaggatattactaagctgagcaccgatgtcgccaagaccctcgagcaggcccttcaactggccagacgactgcactcgacacacgaagaactctgtacatggctcgataaagttgaggtggaattgctgtcctatgaaacacaggtactgaagggcgaagaagcctctcaggcccagatgcgacctaaagagctcaaaaaggaggccaagaacaacaaagccctcctggattccctcaacgaggtgtcatcggcactgttggaactggtcccctggagggccagagagggacttgagaagatggtggctgaagacaatgagaggtaccggcttgtctcagataccatcacccaaaaagtggaagaaatcgatgcagccattctacgcagtcagcagttcgaccaggcagcagatgcagagctgtcatggatcactgagaccgagaaaaaattaatgtctctgggggatatacgcttagaacaggaccagacctcagcacaactccaggtacagaaaaccttcacaatggaaattctcagacataaggatatcattgatgaccttgtcaagtcaggacataaaattatgacagcttgtagcgaagaagagaagcaatctatgaagaaaaagctagacaaggtcttgaagaactatgacactatctgccagataaattctgagagatacctgcaactggagcgcgctcaaagcttggtgaatcagttctgggagacatacgaagaactgtggccctggctgacagaaacccagtcaattatcagccagctgccggcaccggcactggagtatgaaacactgagacagcagcaagaagaacatcgacaactccgcgagttgattgccgaacataaaccccatattgataagatgaataagacaggccctcagctgctcgagctttccccaggcgaaggattttcgatccaggaaaaatacgtggcggctgatactctgtactcccagattaaggaggacgttaagaaaagagccgtggctctggatgaggcaatttcccagtctacccagttccatgacaagatcgatcagattctggagtcactggaacgaattgtggagcggctaaggcagcccccaagcatttctgcagaggtcgaaaaaatcaaagagcagatctccgagaacaaaaatgtgtctgtcgatatggagaaacttcaaccactgtacgagacattaaaacagcgcggagaagagatgatcgcaagatcaggcggtaccgacaaagatatctcggcaaaggcggttcaggataagttggatcaaatggtgttcatctgggagaatatccacacgctggtggaagagagggaggccaagctgctggacgtcatggagctagccgagaaattttggtgcgatcatatgagtctgattgtaaccatcaaagacacacaggactttattagggacttggaggatcccggtatagatccctcagtggttaagcaacagcaagaggcagcggagactatcagggaagaaatagacgggctgcaggaagagctggatattgttattaacctgggctctgaactgattgctgcttgcggcgagcctgataagcccatcgtcaagaaaagtattgatgaactcaattctgcctgggactccctgaacaaagcttggaaggacaggattgataagctcgaagaggcaatgcaggccgctgttcagtatcaggatggcttgcaggccgtcttcgactgggtcgacatcgcgggaggcaaattggccagcatgtctccgatcggcactgatctggagacagtaaagcagcaaattgaggaactcaagcagtttaaatctgaggcttaccagcagcagattgagatggagcgtttgaaccaccaagccgagctcttgctgaaaaaagtgacagaagagagtgataagcataccgtccaggatcccctgatggagttgaagctaatctgggattcattggaagagaggatcatcaatcggcagcacaagctggaaggtgctttgttagcactgggccaattccagcatgccctggacgaactgcttgcctggctgactcacaccgaaggtctactcagcgagcagaagcctgttggaggcgatcccaaagctatagagatcgagctagctaaacatcacgtgctccaaaatgacgtattagctcaccaatcaacagtggaggctgtcaataaggcagggaacgatctcatcgaaagcagcgcaggagaggaagcgagcaatctccagaataagctggaggtccttaaccagagatggcaaaatgtcctggaaaaaacagaacagaggaaacagcagctggacggtgccttgcgccaagccaagggttttcacggagaaatcgaagatcttcagcagtggcttaccgataccgagcgacatctcctcgcttctaagccgctgggcggattaccggaaacagcaaaggagcagctgaatgttcacatggaagtgtgcgccgcattcgaagccaaggaagagacctataagtcactgatgcagaagggtcaacagatgcttgccaggtgtccaaagtctgcagaaaccaatatcgatcaagatataaacaatctgaaagagaagtgggagtccgtggagaccaagctgaacgagcggaaaactaaattggaagaggccctcaatttggctatggaatttcataatagtctacaggacttcataaattggctgacacaggcagaacagaccctcaatgttgcaagtagaccctctctgattctggacactgttctcttccagatcgatgaacacaaagtgtttgcgaacgaagtgaattctcacagggaacagataatcgagctcgacaaaaccgggacgcacctcaagtatttctcccagaaacaggacgtcgtattaatcaaaaatttactgatcagcgtgcagtctcgctgggagaaggtggttcagcgactggtggagcgcggtcgatccctggacgatgccaggaagcgcgcaaaacaattccatgaggcctggagcaaactgatggagtggctggaagaaagcgaaaaatcgctggactcagaactggagatcgccaacgaccccgataaaatcaaaacacagctggcgcaacacaaagagtttcagaagtctcttggggcaaagcatagtgtgtacgatactaccaacagaaccggcagaagcctgaaggagaaaacgagccttgccgacgacaatctcaagctggacgatatgttatccgaactcagagataagtgggacacaatctgtggcaaatccgtagaacggcagaataagctggaggaagcgctgctgttctctggacagttcacagatgctctgcaggccctgatcgattggctatatcgggttgagccccaactcgctgaggaccagcccgtgcacggggacatcgacctggtgatgaatcttatagataatcacaaagcttttcaaaaagagctggggaagcgaacatcttctgtccaagcccttaaaaggtctgctcgcgagcttatcgaaggcagccgggatgactctagttgggtcaaagtgcaaatgcaggagctctccacgcgctgggaaactgtgtgtgcactatccatctccaagcaaacacgcttagaggctgccctgcgtcaggcagaggagtttcactcagtggttcacgcgttgcttgaatggttggcagaggcggagcaaacactgcggttccatggggtgcttccggatgatgaggacgccctgcggaccctgattgaccagcataaagaatttatgaagaaactggaggaaaagagggctgagctgaataaagcaactaccatgggggacaccgtcctagcgatctgtcacccggactccattacgactattaaacattggatcacaataattagggccaggttcgaggaggtcctcgcgtgggccaagcaacatcagcaaaggcttgcctctgcactggccggtctgatcgcaaagcaggaactgctcgaagccctgctggcctggctgcagtgggccgaaaccacgctgacagacaaagataaggaggttatcccacaagaaatagaagaggttaaagccctgatcgccgagcatcaaactttcatggaggagatgacgagaaagcagcccgatgtggataaagtaacaaaaacttataagcgacgtgctgcagacccatcgagtcttcaaagccacattcccgtcttggataaggggagggctggcagaaagcgctttcccgcttcctcactgtatcctagtggatctcagactcaaatagaaactaagaacccccgagttaacctgctggtgtcgaaatggcagcaggtttggcttcttgccctcgaacgtagacgaaagctaaatgacgcacttgaccgtctcgaagagctgcgcgagttcgccaactttgacttcgacatctggcgaaaaaagtatatgaggtggatgaatcacaaaaaaagccgggtcatggactttttcaggcggatagacaaggaccaggacgggaaaattacgagacaggaattcattgacggcatcctgtcatcaaagttccccacatcacgcctcgagatgtcggctgtggctgatatctttgaccgcgacggggatggatatatagactactatgagttcgtggccgcactccatcctaataaggatgcgtataagcctataacagacgccgataaaattgaagatgaggttacgcggcaagtcgcgaagtgcaaatgcgcaaagcgttttcaggtggagcagatcggtgataataagtacagattcttcttaggaaaccagttcggcgattcgcagcagctgagactggttcgcatcctgagaagcacggtgatggtccgcgtcggcggaggatggatggcacttgatgaattcctagtaaagaatgatccttgccgcgtccaccaccatggaagcaagatgttacgttctgagtccaacagtagtattacaacaacccagccaaccatcgctaaaggccgtaccaacatggagctgcgcgagaaatttatattggctgatggtgcttcgcagggcatggccgctttccgcccacggggaaggcgcagccgaccttccagtaggggggcatctccaaataggtccacaagcgtgagcagccaggcagcccaggcggcttccccgcaggtcccagccaccactactcctaaaggaacccccattcagggtagtaagttgcggctgcccggttatttgagcgggaaagggttccactctggagaagattctggactcatcactaccgcagcggctagagtacgcacacagttcgccgattccaaaaaaacgccaagccggccaggctcccgagccggaagcaaagcaggaagccgtgcctcttcacgtagaggttctgacgccagcgactttgatataagcgagattcagtcggtgtgctcagacgtggaaacagtccctcagacccaccgaccaactcccagggcaggctctcgcccttctaccgcaaagccaagcaaaattcctacgcctcagcgtaaaagccctgcatccaaactcgataaaagttctaagaggtat

SEQ ID NO: 221510 - DNA, 23253 bp, synthetic construct
  misc_feature 1..23253: note = Description of Artificial Sequence: Synthetic coding sequence
  source 1..23253: mol_type = other DNA
atgattgccgctgctttcttagtgcttctgaggccctacagtatccagtgtgcactgttccttctcctgctcctgttaggcacgatagctactatcgtttttttttgctgctggcaccggaaactacagaaggggcgacacccaatgaaaagcgtgttcagtggacggtcgagatcacgtgacgctgtgttgcgctctcaccatttcagatccgagggcttcagggcaagtcccagacatcttcgtagaagagtggcagccgcagccgctgccagactggaagaagtgaaacctgtggtggaggtccaccaccagtccgaacaggaaacaagcgtcagaaagaggaggattaagaagagcagcagagtacagcccgaattttaccactctgtgcaaggcgcttcaattcggaggcccagctccggtaacgcgagttataggtgcagcatgtcgtcctctgctgattttagcgacgaggacgatttttcccagaagagtggcagcgcctccccagcaccaggcgacaccctgccctggaacctgcccaagcacgagcggtctaagcgcaaaatccagggcggttctgtgttggatcctgctgaacgagccgttttgaggattgccgatgaacgcgacaaagttcagaaaaagaccttcacaaaatggattaatcagcacctgatgaaagtgcgcaagcacgtgaacgatctctatgaagacctgagagacggtcacaacctaatctcacttctggaagtcctgtctggagacaccttgccgcgtgaaaaagggagaatgaggttccaccggctccagaacgtgcaaatcgctctagattacctgaaaaggagacaagtgaaacttgtgaatattcgcaatgacgatattacggacggcaatccaaagctgactttggggctgatctggacaattattcttcactttcagatcagcgatatccatgtcaccggggaatctgaggacatgagcgccaaggagcgcctgttgttgtggacacagcaggcaaccgaaggatatgccggtatccgatgtgagaacttcacaacatgttggagagatggaaagctttttaatgcgattattcacaaatataggcccgacttgatagacatgaacaccgttgccgtgcagagcaacctggctaatctcgagcacgccttttatgtcgctgaaaagatcggtgttatacgactgctggaccctgaagacgttgacgtgtcaagccccgatgagaaaagcgtgataacttatgtgtcaagcctgtatgatgctttccccaaggtccccgagggcggagagggtataggagctaacgacgtggaggtaaaatggatagaatatcagaatatggtaaattatctcattcaatggatccggcaccacgtgactactatgtctgagagaacttttccgaacaaccctgtggagttgaaggctctgtataaccaatacttacaattcaaagagacagagatccccccaaaagagaccgagaagagtaaaatcaaaagattgtacaaattactggagatatggatcgagtttggacggataaaactccttcaggggtaccacccaaatgacattgaaaaagaatgggggaagcttattattgcgatgttggaaagggagaaagctttacggcctgaagttgagcggctggaaatgctccaacaaattgcaaacagagtgcagcgcgacagtgtgatctgtgaggacaaactaattttagccggtaatgctctgcagagtgattcaaagcggctggagagcggggttcagttccagaacgaggccgagatcgccggttacatcctggagtgtgaaaacctgctgagacaacacgtcattgatgtacaaatactgatcgacggaaagtactaccaggccgaccagctagtccagagggttgccaagttacgtgacgagatcatggcacttagaaacgagtgctcgagcgtgtactccaagggacggattctgacgacggaacagacgaaattgatgataagtggcattacgcagagtcttaactcgggattcgcgcagacactgcacccaagtctaacaagtggactgacccagtcattgacaccgtcactgacttcctccagtatgacttcagggctgtctagtggcatgacctctcggctgactccctctgtgactcccgcttacacacctggcttcccaagcgggctggtgcctaacttttcgtctggggtggagcccaatagcctgcagacactgaaactgatgcaaattcggaagcccttgctgaaatcttctctgttggatcagaacctgacagaggaggagattaatatgaaatttgttcaggaccttttgaactgggtggacgaaatgcaggttcagttggaccgtacagagtggggatctgatctgccatcagtcgaatctcatcttgaaaaccacaagaacgtccatagagctattgaagagttcgagtcatccttgaaggaggcaaaaataagtgaaatccagatgaccgcccctctgaaactgacgtatgcggaaaaattgcaccggctggagtcacagtatgccaagctactgaatacctcacgaaaccaggagcgtcatttggacaccctgcacaacttcgtttctcgcgcaactaacgaacttatttggctgaatgaaaaagaggaggaggaagtggcctatgactggtccgaaaggaacactaacattgctcgaaaaaaggactatcacgctgagctcatgagagaactggaccaaaaggaagagaacatcaagtctgtgcaagagatcgcagaacagcttctgctcgagaatcacccagccagactgacaatagaggcctacagagctgccatgcaaacacagtggtcttggatacttcagctgtgccagtgcgtggagcagcacatcaaggagaataccgcatactttgagttcttcaatgacgctaaagaggcaaccgattacctgcgaaacctcaaggatgccatccagagaaaatactcctgtgatcgctcctcaagtatccacaagttagaggatctggtccaggagagcatggaggagaaggaagagttactgcagtacaagtccactatcgctaaccttatggggaaggctaaaacgatcatccagctgaaacccagaaattcagattgccctctgaagacgtccatcccaatcaaggccatatgcgattacaggcagatagagatcactatctacaaagatgatgaatgcgtgttggccaataactcccaccgtgccaagtggaaggtgattagcccaacgggtaatgaggccatggtcccaagcgtgtgtttcacggtgccacccccaaacaaggaggccgttgacctagccaaccgcattgaacaacagtaccagaatgtgttgaccctatggcacgagagccacatcaacatgaagtctgtagtgagctggcactaccttatcaacgagatcgatagaatccgggcttctaatgtggcttctattaagaccatgttgcccggagagcaccagcaggtgctgtctaacctgcagagccggtttgaagactttctggaagactctcaggagtcccaagtcttctccggatccgatattactcagctggagaaagaggtaaatgtgtgtaagcaatactaccaggaattgctcaaaagtgctgaacgagaggagcaggaagagtccgtttataacctttatataagtgaggtcaggaacatccgcctacgcctcgagaactgcgaagacaggctgatcaggcagataagaacaccactcgagagagatgatctgcacgagtcagtctttaggataacagagcaagagaagttgaaaaaagaactcgagagactcaaggacgacctaggaaccataactaacaaatgcgaggaattcttcagccaggcagccgcatcatctagcgtcccgaccctgaggtctgaactaaatgtcgtgctgcagaatatgaatcaagtgtactccatgtcctcgacctacattgacaagctcaagaccgtcaacctggtgctcaagaacacacaagccgcagaggcgctcgtcaagctgtacgaaactaaactgtgtgaagaggaggctgtgatcgccgacaagaacaacattgaaaacctgatctctaccctgaaacagtggcggagtgaagtagacgagaagcgccaagtcttccatgctctggaggacgaattgcagaaagcaaaggccatcagtgatgaaatgtttaagacttacaaagaaagggatctggacttcgattggcacaaggagaaagctgatcagctggtggagcgctggcagaacgtgcacgtccaaatcgacaaccggcttcgggatctggagggaatcggtaaaagcttaaagtattatagggatacctatcacccgttagatgattggatccagcaggtggaaaccacccagcgcaagatccaggaaaaccagccagagaactccaaaactctggccacccagctcaaccagcaaaagatgctggtgtcagagatcgagatgaagcagtcgaagatggatgaatgccagaagtatgccgagcagtattcggctactgtaaaagattacgaacttcagaccatgacttaccgagccatggtcgattcccagcagaaatctcccgtcaagaggcgtaggatgcaaagctcggctgatctgattatccaggagttcatggacctgcgcacacggtacactgcactggttaccttgatgactcagtacatcaagttcgccggagacagccttaagcgactggaggaggaggagaagtcgctggaggaagagaaaaaagaacacgttgagaaggcaaaagaactgcaaaagtgggtctccaatataagcaaaactctgaaggacgccgaaaaggctggaaagcccccattcagcaagcagaaaatctcatctgaagagataagcacgaagaaggaacagctgagtgaagcactgcagacgatccaactgtttctggctaaacatggcgacaagatgaccgatgaggaaaggaatgagctggaaaaacaagtcaaaaccttgcaggagtcctataatctgctgttcagcgagtccctgaaacagctgcaagagagccagacaagtggggatgtgaaggtggaggagaagctggataaagtgattgctgggaccatagaccagactaccggggaggtcctttctgtctttcaggctgtacttcgcggtctgatagactatgacacggggatccgactgctggagacacagctgatgatttcaggcctaattagccctgagcttcgcaaatgcttcgacctgaaggacgcgaagagccacggactgatagatgagcaaatcctgtgtcagctcaaggagctatctaaggccaaggaaattattagcgcagcctcccccaccactattcccgttttggacgccctcgcgcagagcatgatcacggagagtatggcaattaaagttttagagatattactgtccaccggatcactcgttatccccgctactggcgagcagctgactttgcagaaggcattccagcagaatctggtcagtagtgccctgttttctaaggtcttggaacggcaaaatatgtgtaaggatctgatcgatccctgtacctctgaaaaagtatcacttatagatatggtgcagcgctcaacgctgcaggaaaacactggcatgtggttgcttccagtgcggcctcaggaggggggtaggatcactctgaagtgtgggaggaacatctctattctcagagcagcccacgagggacttattgaccgggaaactatgtttcggctgttgtcagctcagctgctgtctggcggactgatcaattctaacagcggacaacgcatgaccgtggaagaggcggttcgagagggcgtcatcgacagggatactgccagctcaatccttacttatcaagtccagactggaggcataatacagagcaacccagccaagcgcctcaccgtggacgaagctgtccagtgcgatctaatcaccagttcgtccgctctgctggttttagaggcgcagcgcggttatgtcggccttatttggccccatagcggtgagatctttccaacatcctcctccctgcaacaagagcttattacaaatgagctagcctacaagatactgaacgggcgtcaaaaaatcgccgctctctatattccagagagctcccaggttattggactggatgcagcaaagcagctgggcataatcgacaataacactgcttctatcttgaagaacattaccctgcctgacaagatgccggacctcggcgaccttgaggcctgcaagaatgcccgacgctggttaagcttctgcaagttccaaccttcaacggtgcatgactaccgccaagaggaagatgtgttcgatggggaggaaccggtgacaacgcagacctcagaagaaacgaaaaagctgtttctctcctatctcatgatcaattcctacatggacgctaacactggacaaaggctgctgctctacgacggggatctggatgaggctgtaggtatgcttttagagggctgtcatgcagagttcgacggcaatactgctattaaggagtgtctggacgtcctgagcagcagtggggtgtttcttaacaacgcttcagggagagaaaaggacgagtgcactgcaacacctagttctttcaacaaatgtcattgcggcgagcctgagcatgaggaaaccccagaaaatagaaaatgtgctattgacgaagagttcaacgaaatgcggaacacggtaataaacagcgagttttcacagtctggtaagctcgccagtacaatcagcatcgacccgaaagtgaatagctcacccagtgtctgtgttccgtccctgatttcctatctgactcaaaccgagctggcggacatctcaatgctaaggtcggattctgagaatattctgacaaattacgagaaccaaagcagagtggagactaacgaaagagcaaacgaatgttcacactcaaagaatatccaaaattttcccagcgatctcatagaaaaccctatcatgaagtccaaaatgagcaagttctgcggagtaaatgaaaccgaaaacgaagataatactaatagggactcgcccatttttgactactcacctcgccttagtgctctgttatcccatgataaactgatgcactctcaaggaagcttcaacgatacccatactccagaatctaacggaaacaaatgtgaggcccctgccctgtctttttcagataaaaccatgctctccggacaacgtataggcgaaaagtttcaggaccaattcctgggcattgctgcaatcaacatttccctgccgggagagcagtatggccagaaaagtctgaacatgatctcgagtaatccacaggttcagtaccataatgataaatatatctcaaacacatctggcgaggacgaaaagacacacccaggtttccagcagatgccagaagataaggaggacgagtccgagatagaggagtacagctgtgccgtaaccccaggcggagatacagacaacgcaattgtgtctctgacctgcgcaactccacttctggacgaaactatctcagcaagcgactatgaaacctccctgttgaacgatcagcagaataataccggcaccgacacagattcagacgacgacttctacgatacaccactgttcgaagatgatgaccacgattccctgttactggacggagacgaccgagactgcttacatccggaggactacgacaccctgcaggaggaaaatgacgagacagcatccccagccgatgtgttttacgacgtgtcgaaagagaatgagaacagcatggtgcctcagggcgctccagtaggatcactgagcgtcaaaaataaagcccattgccttcaggacttccttatggacgtggagaaagatgagttggatagtggcgagaaaatccacctgaacccggtcggctccgataaggtgaatggtcagtcgctcgagaccggatctgaacgcgagtgcacaaatatattagaaggggatgagagcgattcactcacagattatgacattgtcggagggaaagaatcattcactgcgtccctcaaattcgacgactcaggaagctggagggggcgtaaggaggagtacgtcaccggccaggaatttcattccgatactgaccacctagactcaatgcagtcagaagaatcttacggggactatatttatgatagcaacgatcaggatgacgatgacgacgacggtattgatgaggagggtggcggtatccgcgacgaaaatggtaagcccaggtgtcagaatgtggcggaggatatggatattcaactgtgtgcaagcatcctaaatgagaactcagacgaaaacgaaaacatcaacaccatgatcctgttggataaaatgcattcctgctctagcttggagaagcagcaacgggtgaacgtagtccagctcgcctccccaagcgagaataatctcgtgacagagaaatccaacctccccgaatataccacagaaatcgcaggaaagagtaaggaaaatctgctaaaccacgaaatggttctgaaggacgtacttcccccaatcatcaaggacacagaaagtgaaaagaccttcggacctgccagtatcagccatgacaataacaacatcagtagtacaagtgagttgggcacagatctcgccaatacgaaggttaaactgatacaaggaagcgaactcccagaactgaccgactctgtcaagggtaaagatgaatacttcaaaaatatgacaccaaaagtggatagttcccttgatcatataatttgtacggagcccgatcttattggtaagccggctgaggaatcgcatctgtcactcatcgcctcagtcacagataaggacccccaggggaatggcagcgacctgattaaaggccgtgatggcaaatctgatatcctcatcgaggatgaaacaagcatccagaagatgtatctgggtgaaggcgaggtcttagtggagggcctagtggaagaggagaatcgacatttgaagctgctgcctggaaagaatacacgagactcctttaagctcatcaactcccagtttcctttcccgcagattactaacaacgaggagttgaaccagaaaggatctctgaagaaagctaccgtgaccctcaaagacgaacccaacaatcttcaaatcatagtgtccaagagtccggtccagtttgagaatctcgaagagatcttcgacacgagcgtttctaaggaaatttctgacgacatcacttctgatatcactagttgggaggggaacacacatttcgaagaatcctttactgatggacctgaaaaagagctggacctgttcacgtaccttaagcattgtgccaaaaacattaaggctaaggatgttgcaaaacctaatgaagacgtcccgagccatgtcctcattacggcgccacctatgaaggagcaccttcagctcggagtaaacaacaccaaggagaagagtaccagtactcagaaggacagccccctgaacgatatgattcaaagcaatgatctgtgtagtaaggaaagtataagcggaggtggtaccgagattagtcagtttacacccgagtctatcgaggcgacgctctccattctgtcaagaaaacacgttgaggacgtggggaagaatgattttcttcaatctgagcggtgcgcgaatggccttggaaatgataatagttcaaacacactgaacactgattacagcttcttagaaataaacaacaagaaagagcgcattgaacagcagctcccgaaagaacaggcattaagtccaaggtcgcaggagaaagaagtacaaattccagaattaagtcaggtgtttgtcgaggatgtaaaagacattcttaaatcacgtctgaaagagggccacatgaacccgcaggaggtggaagagccttccgcgtgtgccgatacaaaaattttgatccagaaccttattaagaggatcactacttcccaactggttaatgaggccagcactgtgccaagcgacagtcagatgtcggatagctcaggtgttagccctatgaccaatagctccgagttgaaacctgagtctcgtgatgatcctttctgcataggaaacctcaagagtgagcttctgcttaacatactaaagcaagaccagcacagtcagaaaataactggggttttcgaactcatgagggaattgacgcacatggaatatgatctagagaaacgcggaataaccagcaaggtgttgccactgcaactggagaacattttttataaactgctggctgacggctacagtgagaagatcgaacacgtaggcgattttaatcagaaggcatgtagcacatcagaaatgatggaagaaaagccacatatcttgggcgacattaagagtaaggaaggtaactactatagcccgaaccttgaaaccgtgaaggaaatcggactggaatctagtacagtttgggcctccaccttacccagggacgagaaattaaaagatctgtgcaatgactttcctagccaccttgaatgcacaagtggctccaaggaaatggcctctggagacagttctactgagcagtttagttccgagcttcaacagtgccttcagcacacagagaagatgcacgagtacttaacccttctgcaggatatgaaacccccactcgacaatcaggaatccctagacaacaatctcgaggcgctcaagaatcaactcaggcagctggagacctttgagttgggactcgctcccattgcagttatcctgcggaaagacatgaagctagccgaggaattcctcaagagtctgcccagtgattttcctagagggcacgtagaagaactgagcatatctcaccagtcactgaagacagccttttcctccttgtctaacgtttcctccgaaaggaccaagcagattatgctggccatagattcggaaatgtctaaactggccgttagccacgaggaattccttcacaaactgaaatctttctccgattgggtcagcgaaaagtcaaagagtgtgaaagacatcgagattgtaaatgtgcaggattcagagtatgtgaaaaaaagactggagttccttaaggcgaacaatgtcttaaaagacctcggacacaccaagatgcagttggagaccactgcttttgacgttcaattctttatttccgaatatgcccaagatctgtccccaaatcagtcaaagcagctgcttcgattgctaaacactactcagaaatgtttcctcgatgtgcaggaatcagtcacaactcaggttgagcgtctggagacccagctgcaccttgagcaggatctcgacgaccagaaaatcgttgcagagagacagcaggagtacaaggagaagctgcagggtatctgcgacttgctgacacaaacagagaaccgcttaatcggccaccaggaagcctttatgatcggggacggcacggtggaactcaaaaagtaccagtctaagcaggaggagctgcagaaagatatgcagggttctgcacaggctctcgcggaggtggttaagaacactgaaaactttctgaaggaaaacggagaaaagctgtctcaagaggacaaggccttaatcgaacagaaactgaacgaagcgaagattaaatgtgagcagttaaatctgaaagccgagcagagcaagaaagaattggataaggtggtgactactgctatcaaagaagaaaccgagaaagtggccgcagttaagcaactcgaggagagcaagaccaaaatcgagaacctcctcgactggctgtcaaacgttgacaaagatagcgagagagccggaactaaacacaagcaggtgatagagcagaatgggacccattttcaggaaggtgacggcaaatccgccatcggcgaagaggatgaggtgaatggaaacctgctggagacagatgtagatggtcaggtcggaacgactcaggagaacctcaatcagcagtatcagaaagtaaaagcccagcacgaaaaaattatttcccagcatcaggcggtgattatcgcaactcagtctgcccaggtactgctcgagaagcagggccagtatttgagccccgaagagaaagaaaagctccagaagaatatgaaggagctgaaagtgcactacgaaacggccctggctgaaagcgaaaagaaaatgaagctgacccacagcctgcaggaggaactggagaagttcgacgcggactatacagagtttgagcattggctgcaacagtccgagcaggagctggaaaacctggaggccggagcagatgatatcaatggactcatgactaagttaaagcgtcagaaatcattctcagaagatgtcatttcccacaagggggacctgcgatatattaccatttcaggaaatcgtgtgctggaggctgccaaatcttgttcaaagcgggacggcggaaaagtggataccagcgcaacccatagagaggtgcaacgaaagctggaccatgccaccgacagatttcgcagtctttactctaaatgtaatgtcctcgggaacaatctgaaggatctagtcgataaatatcagcactatgaggacgcgtcttgcggccttctggccggactgcaggcctgtgaagctacagccagcaaacacctcagtgaaccaatcgccgtcgatccaaaaaatctccagagacaactggaggaaaccaaggctcttcagggtcagatatccagtcagcaagtggccgtcgaaaagctcaaaaagacagccgaggtcctcctggatgccagaggtagcctgttacctgcaaaaaatgatatacaaaaaaccctggacgacatagttgggagatatgaggatctgtccaaatccgtgaatgagcgaaatgaaaagctacagattactttaactcggtctctatccgtacaagatggcctcgacgagatgctggactggatgggtaacgtcgagtcctctctcaaagaacaggggcaagtgcctctgaattccaccgctctccaggatattataagcaagaacattatgctggaacaagacatagcgggtcgtcaatcatcgattaatgcgatgaacgaaaaagtaaagaagttcatggagacaacagatccctccaccgcttcgtcacttcaagcaaagatgaaggacctctccgcccgttttagtgaagcttcccacaaacataaagagacacttgcgaagatggaggagctgaagaccaaggttgagcttttcgaaaacctgtccgaaaaattgcagaccttcctcgaaacaaaaacccaagctcttacggaggtggacgtgcctggcaaagacgtgaccgaattgtctcaatacatgcaagaatccaccagcgaatttttagaacataagaagcatctcgaggtcctgcactccctcttgaaagagatatcatcacacgggctgccatccgacaaggctctggtactggagaagaccaataatctcagtaaaaagtttaaggaaatggaggacactattaaggaaaaaaaagaggccgtcacctcatgccaagaacagctggatgcattccaggtcctggtcaaatcgcttaaatcgtggattaaggagactaccaagaaagtccccatagtgcagccaagctttggagccgaggaccttggcaagtccctcgaggacaccaaaaagcttcaagaaaagtggagtttgaagactccagagatccagaaggtgaacaactctggcatttctctgtgcaatctgatatctgcggtcacaacccctgctaaggcaattgctgcagtgaagagtggcggagccgtgctgaacggggaaggcaccgctacaaacacggaagaattctgggccaataagggacttacctccattaaaaaagatatgactgatataagccatggatacgaggacctgggtctgctactcaaggacaagatcgcagagttaaatacaaagctttccaagctgcagaaggcccaggaggagagtagtgccatgatgcagtggttgcagaagatgaacaagactgcgacgaaatggcagcagactcccgcacctactgataccgaagccgtgaaaacacaggtcgaacagaataagagttttgaagcagaactgaagcagaacgtgaacaaggttcaggagctgaaagataagctgacggaactgctggaagagaatcccgatacacctgaggcaccaaggtggaagcaaatgttgacggagattgatagtaagtggcaggaacttaaccagctgactattgatagacagcagaaattggaggaaagctccaataatctcacccagttccaaacagtcgaagcccagctgaaacagtggcttgttgagaaggagttgatggtgtctgtgttgggtccattatctatcgaccctaatatgctgaacactcaaaggcaacaggtacagattcttcttcaggaattcgctacacggaaaccacaatacgagcagctcacggcagcagggcaagggattctgagtaggccaggggaggacccctccctgagaggtatagtaaaggaacagcttgcagccgtgacacaaaaatgggactccctcactggccagctatccgatcggtgtgattggatcgaccaggcaatcgttaagtctactcagtatcaatcccttctgcgaagtctgtccgataaacttagcgatctcgacaacaagctcagttcgtccctcgcagtgagcacacaccccgatgccatgaaccaacaattagagacagcccagaaaatgaagcaagaaatacagcaggagaaaaagcagatcaaggtggctcaggccctctgcgaggacctgagcgcgctggtgaaggaggaatacctgaaggcagagctctccaggcaacttgaagggattttgaaaagcttcaaagacgtagagcaaaaggccgaaaatcatgttcagcacctgcagtcagcctgtgcttccagccatcagtttcagcagatgagtcgcgacttccaggcctggctcgacactaaaaaggaggagcaaaataaatctcatccgatcagcgccaaactcgatgtgttggagtccctcatcaaggatcacaaagatttttccaaaaccttgactgctcagagccatatgtacgaaaagaccatcgcggagggtgaaaacttgctcctgaagacgcagggcagtgagaaagccgcattgcagctgcagctgaatactatcaaaacaaactgggacaccttcaacaaacaggttaaagagcgcgagaacaagctcaaggagtccttagaaaaagcactaaagtacaaagaacaggtggaaaccctgtggccatggatcgacaaatgtcagaataatctggaagaaatcaaattctgccttgatcccgctgaaggggaaaacagcatcgcaaagcttaagtcgctgcaaaaggagatggaccagcatttcgggatggtcgaactactcaataataccgctaactccctgttgagtgtgtgcgaaatagataaggaagtagtaacagatgaaaacaagtctctgattcagaaggtggatatggtaacagagcaattacattccaagaaattctgtcttgaaaatatgactcaaaaatttaaggagttccaagaagtgagtaaggagtcgaagcgccaactgcagtgtgctaaggagcagctggacattcatgacagtctgggcagtcaagcctacagcaacaagtatctcaccatgctccaaacacagcagaaaagcctccaggctctgaaacaccaggtcgatctcgcgaagagactcgcacaggacttggtcgtcgaagcgagcgacagtaaagggacctcagatgtgctcttgcaggtcgagaccatcgcacaggagcattctacgctgtcccagcaggttgatgagaaatgttcgtttctggaaactaaattgcagggaataggccacttccagaacactatacgcgaaatgttttcccaatttgccgaatttgacgatgaactggacagcatggcaccagtaggacgcgacgccgagacactccagaagcaaaaggagaccattaaagcattcctgaaaaagttagaagcacttatggcctccaatgataatgccaataaaacctgtaaaatgatgcttgccacagaagaaaccagtcctgatctggtggggattaaacgcgatttagaagcactgtcgaagcagtgcaacaagctcctcgacagggcccaggctagggaggaacaggtagaaggtacaatcaagaggcttgaggagttttactccaagctgaaggagttctccatcctcctccagaaggcggaggaacatgaggagagtcagggccctgttggtatggagacagagactatcaaccaacaattgaacatgtttaaagtgttccaaaaagaagaaatcgagcctctacaaggaaagcagcaggacgttaactggcttggccaaggcctgatacaatccgcagcaaaatctaccagcactcaggggctggagcacgatctcgatgacgtaaacgctcgatggaaaaccttaaacaagaaggtagctcagcgcgctgctcagctgcaggaagcgcttcttcactgcggacgattccaggatgccttagaatcactcttatcgtggatggttgacacagaggagctggtggccaatcagaaaccccctagtgcagagtttaaagttgtcaaagcacagattcaggaacagaaactgctgcagagacttctggatgaccggaagtctaccgtcgaagtgataaaacgcgagggggaaaaaatcgctacaaccgcagagccggctgataaagtcaagatcctcaagcaactttctcttctcgattccagatgggaggctctactgaacaaagctgaaactcgcaacaggcagttagaaggaatcagcgtcgtcgcccagcagttccatgaaaccctggagcctttgaatgagtggttgaccacgatcgagaagcgcctagtaaactgtgagcccattggcacacaggcttctaagctggaggagcagattgcacaacacaaagccttagaggatgacatcataaaccacaacaagcacttacatcaggccgtctcaataggacagtcacttaaggtactctcttctagggaagacaaagatatggtgcagagcaagctggatttttctcaagtctggtacattgagattcaggagaagagccatagcagatccgagctcctccaacaggcactgtgcaacgctaagatattcggtgaggatgaagtagagctgatgaattggttgaatgaggtccacgataagctctcaaagctcagtgttcaggactacagtacagaaggcttgtggaagcagcaatccgaattacgtgttctccaagaggacatcctgttgcgcaagcaaaacgtggaccaggctttgctcaacgggctggagttattgaaacagaccactggagacgaggtactcataattcaggacaagctcgaggccattaaggccagatacaaggatattaccaagctcagcactgatgtagccaaaaccctggaacaggccctgcagcttgctcggagactccattccacacacgaggagttgtgcacatggcttgataaggtggaggtggaactcctctcctatgaaactcaggtcctgaaaggggaagaagcgagtcaagctcaaatgaggcccaaagagctgaagaaggaggccaagaacaacaaggcactacttgatagtctcaacgaagtcagttccgcgcttctcgagttggtgccttggcgtgcccgagaagggctcgaaaagatggtggcggaggacaatgaaaggtatcgtcttgtgtctgatactattactcagaaggtggaagagatcgatgcagcaatcctccgctcacaacagttcgaccaggctgctgacgcagagctcagctggataactgagaccgaaaaaaaacttatgagcctgggagatattagactagagcaggatcaaacatcggcccagttgcaagtgcagaagacattcacaatggaaattctcagacacaaagacattatcgatgatctggtgaaatcaggtcataagatcatgacagcctgctctgaagaagagaaacagtccatgaaaaagaagctagacaaggtactcaaaaactatgataccatctgtcagattaacagcgagagatatcttcaacttgaaagggcacaatctttggtaaaccagttttgggagacatacgaggagttatggccttggctcactgaaactcagagcatcattagccagctccctgcaccagccctcgaatatgaaacgctgagacagcagcaggaagagcacagacagctccgagaactaattgcagaacataaaccacacattgataaaatgaacaagacgggacctcaactgctagagctgagtccaggcgagggattttccatccaagagaaatatgtcgctgccgatacactctactcccaaatcaaagaggatgtaaagaagcgagcggtcgcacttgacgaagctatctcccaaagtacacagttccatgacaaaatagatcagatactcgaaagcttagaacgaatcgtagagcgtttgcgacagcccccatccatcagtgctgaggtagaaaagatcaaggagcaaatctccgagaataagaatgttagtgtggacatggagaaactgcaaccgctgtatgaaacattaaaacaacggggtgaagagatgattgctcggagtggaggaacagacaaagatatcagcgctaaagcagtgcaagataaacttgatcaaatggtgtttatctgggagaatattcacactctggtggaggagcgcgaggccaaactactggacgtcatggagctagctgagaaattttggtgcgaccacatgagtcttattgtaaccatcaaagatactcaggacttcatcagagacttggaggaccccggaatagaccctagtgtggtaaaacagcagcaggaggccgctgaaacgattagggaggagatcgatgggctgcaggaggagctcgatatcgtaatcaatcttggtagtgaactgattgctgcttgcggtgagcccgacaagcctatagtcaagaaatcaattgacgagctcaacagtgcctgggattctcttaataaggcatggaaggacaggatagataagctggaggaggccatgcaagctgctgtgcaataccaggatgggctgcaggccgtcttcgactgggtggacattgcgggtggcaaattggcgagtatgtccccgattggaacagatcttgagactgtgaagcagcagatagaagaactcaaacaattcaagtccgaggcctaccagcaacagatcgaaatggagaggttaaatcaccaggccgagttgctcttaaagaaggtgaccgaagaaagcgataagcacactgtgcaggacccgctgatggagctaaaactcatttgggacagcctggaggagcgcatcatcaaccggcaacataagctggagggggcactgctcgctttggggcagtttcagcacgcgttggatgaactgctagcatggctgactcacactgaaggtctcctctctgaacagaagcccgtggggggagaccctaaggccattgaaatcgaactcgccaagcaccacgtgcttcaaaacgacgtcctcgcccatcaatctacagtcgaagctgtgaataaagctgggaacgatctgatcgaaagcagcgctggagaagaagcaagtaatctgcagaataagttggaggtcctaaatcaacgctggcagaatgtgttggagaaaacggagcagagaaaacagcagctggacggcgctttgcgccaggctaaaggcttccacggggagattgaggacctgcaacagtggttgacagatactgagcggcatctcttagcaagtaagcccctcggtggtctgcccgagaccgctaaagagcagctgaacgtccatatggaagtgtgcgcagccttcgaggccaaggaagagacctataagagtctgatgcagaaggggcaacaaatgcttgctcgttgccctaagtccgccgagactaacatcgaccaagatatcaacaatctcaaagagaaatgggagagcgtggagacgaagttgaacgagcgcaaaacgaaattggaggaggctttgaaccttgcaatggagttccacaattccttgcaggactttatcaattggctgactcaagccgagcaaacccttaacgttgcgagtcggccttccctgatacttgatacagttctgtttcagattgacgaacacaaagttttcgctaacgaggtgaatagccatagagaacaaatcattgagctcgataaaaccggaacacaccttaagtattttagtcagaagcaggacgtggtccttataaaaaaccttctgatctcagtgcaaagtcggtgggaaaaagtggtgcaacgcctggtggaaaggggaagatctctggacgacgccaggaaacgggctaaacaatttcacgaagcctggtcgaaattaatggagtggctggaagagagcgagaagagcttagattcggaattggagattgcaaacgatccggataaaatcaaaactcagctggcccagcacaaggagtttcagaaaagcttgggcgctaagcattctgtgtacgacaccaccaatcgcactgggaggagcctgaaggagaagacatctttagcggacgataatttaaaactcgatgacatgctctccgagttgagggacaaatgggacaccatatgtgggaaatctgtggaacggcagaataagttggaggaggccttgctgttttctggacaattcacagatgcactgcaagccctgattgactggctataccgtgttgaacctcagctagcggaggaccaacccgtccacggcgacatcgatctggtgatgaatctgatcgataaccacaaggcctttcagaaagaattgggcaaaaggacatcctccgtgcaggctctcaagcgctcggctcgcgaactgatcgaaggctccagggatgactcgagttgggtgaaggtgcagatgcaagaactgtcaacaaggtgggagactgtgtgtgccctttctatctctaaacagacccgcctggaggcagccctccggcaggccgaggagtttcacagtgtcgtgcacgctctgctggagtggctcgctgaggccgaacagacattacgatttcatggcgtgcttcccgacgacgaagatgccttacgcactctcatcgaccagcacaaggagttcatgaagaagcttgaggagaaacgtgccgagctaaacaaggccaccacgatgggtgatactgttctggcaatttgtcaccccgatagtatcaccactatcaagcactggattactatcattcgagcgcgatttgaagaggtgttagcttgggcaaagcagcaccagcagcgcctcgcctctgcccttgcgggtttaatcgccaagcaggaattgctggaggcgctgctggcctggcttcagtgggcagagactacactaactgataaggacaaagaagtcatcccacaggagatcgaggaggtgaaagcattgatagctgaacatcaaacattcatggaagagatgactcggaagcagccagacgtcgacaaagtgaccaaaacatataaacgacgggcagctgaccccagttcacttcagtcccatatacctgttcttgacaaagggagggccggacgtaagcggtttccagccagttcattgtaccccagcggtagccagacacagatcgaaaccaaaaatcccagagtgaatctgctggtgtctaaatggcagcaggtgtggcttctggcgctcgaaaggcggcgaaagctgaatgatgccctggaccgcctggaagagctgagggaattcgccaattttgatttcgatatctggaggaagaaatacatgcgatggatgaaccacaaaaagagtcgcgtgatggactttttcagaaggatagataaggatcaagatggaaagattacccggcaggagtttatcgacgggatcttgtccagcaagtttccaactagcagactcgaaatgtccgctgtcgctgatatcttcgatagggacggcgacggctacattgattattatgaatttgtcgctgcgctgcaccctaataaggacgcttacaaacccattaccgatgccgacaaaattgaggacgaggtgaccaggcaggtagccaagtgcaagtgcgccaagagattccaagtcgagcagattggagataataagtatcgtgtatctttccagtccaactttggcgactctcaacagctgcgcttggtccgcattctaaggtcaactgtgatggtgagagtgggaggcggatggatggccctggacgaatttctggtcaagaatgacccctgtcgtgtgcaccatcatgggagcaagatgctgagaagtgagtccaattccagcatcacaacaacacagccaacaattgcaaaaggcagaaccaatatggagctgcgcgagaagttcatactggcggatggggctagccagggcatggctgccttccgacctcggggacgcaggtcacggccatcctcccggggagcaagccccaatcgttccacatccgttagctctcaggcagcacaggccgcatcgccgcaggtgcccgctactaccaccccaaaggggactcccatacagggctccaagctgcgcctgcccggttatctcagtggtaaaggctttcactcaggcgaggattcaggcctcattacaactgcggcagcgagggtgagaacccagtttgccgactccaaaaagactccatcaaggcctggcagtagagcaggtagcaaggctggctcaagagcttcttctaggcggggttccgacgcgtcggatttcgatatcagcgagatacagtccgtctgtagtgacgtcgagacggtgccacagacccacaggcctacaccacgagcgggttcaaggccttctaccgccaaaccctctaaaatccccactcctcagaggaagagccctgcgagcaaattggacaagagcagcaaaaggtag

SEQ ID NO: 221511 - DNA, 7949 bp, synthetic construct
  misc_feature 1..7949: note = Description of Artificial Sequence: Synthetic coding sequence
  source 1..7949: mol_type = other DNA
atgcattcctctagttactcgtatagaagctccgactccgtgtttagcaataccaccagcactcggaccagtcttgattctaacgaaaacctgcttctggttcactgcggacctaccctaatcaacagctgtatctcatttggcagcgaatcttttgatggccacaggctggagatgcttcagcagatagctaaccgggtgcagcgggatagtgtgatctgcgaagacaagttgatcctcgctggaaacgccttacagtcagatagtaaaaggctggaatctggcgtgcagttccagaacgaggcagagattgcgggatatatcctggaatgcgagaatttactgagacagcatgtcattgatgtgcagatactcattgatggcaaatattatcaggccgaccaactggtccagcgagtggccaagctgcgagatgagattatggctctgaggaatgagtgttcttctgtctacagcaagggccgaattctgaccaccgagcaaaccaagctcatgattagcggtatcacccagtccctgaactcagggttcgcccagactctgcatccatccctaactagcggattgacccaatcattgaccccatccttgacaagcagtagcatgacctcgggcctgtcctcgggaatgacgtcccgtctgaccccgtctgtcacacctgcttacacaccaggattcccatccggtctcgtacctaatttcagctccggcgtggagcccaactcgctgcagacactgaagctcatgcagatacgtaagccactgttaaagtctagcttgttagaccagaacttgactgaggaagaaattaacatgaaatttgtccaggatctattaaactgggtcgacgagatgcaggttcaattggaccgaaccgagtgggggagcgatctgccctccgtggaaagtcacctggagaaccataaaaatgtccatcgcgcaatcgaggaatttgagtcatcactgaaggaagccaagatttccgaaattcaaatgacagctcccctcaaattaacgtacgccgagaagttacatcggctggaaagccagtatgctaaattacttaacacctccaggaatcaagaaaggcacctggacacactgcataacttcgtctcacgggcaactaatgagctgatatggttaaatgaaaaggaagaggaagaggtagcttacgactggagtgagagaaacaccaacattgctcgtaagaaggactaccacgcggaactcatgagggagcttgaccagaaggaggagaacatcaagtctgtgcaggaaatcgcggaacagctgctcttagagaatcaccctgctcggctgaccattgaagcatacagggctgccatgcagacccagtggtcatggatacttcagttgtgccagtgcgtggaacaacatatcaaagaaaacacagcctactttgagttcttcaatgatgccaaggaggctacggactacttgcgaaatctgaaagatgccatccagaggaagtacagctgcgataggagttcaagcatccacaagctggaagacttggtgcaggagagcatggaagagaaagaggaattgttgcagtataaatctacaattgccaacctcatgggcaaagcaaagactattatacagttaaaaccccgaaactctgactgccccctaaaaactagtattcccatcaaggccatctgtgactataggcagattgaaatcactatttacaaggacgacgaatgcgttttagcgaataattcacaccgagccaagtggaaggtaatcagtcctaccggcaacgaagccatggttccttctgtttgcttcaccgtgccacccccaaacaaggaagcggtggacctcgcaaacagaattgaacagcagtatcagaacgtcttgacgctttggcacgaatcccacatcaatatgaagtccgtagtcagttggcactatcttatcaatgaaatcgacaggataagggcctcgaatgtggcctccattaaaaccatgctcccaggagagcaccaacaagtgttgtctaatctgcagtcgcggtttgaggattttctcgaagactcccaggagtctcaagtgttttccgggagcgatatcacccagctggagaaggaggtgaatgtttgcaagcaatactatcaggagctgctgaaaagtgccgagcgggaagaacaggaagagtccgtctacaatctgtatatcagtgaagttcggaacattcgcctgagactggaaaactgtgaggacagactaattcgccagatccggactccactggagcgcgatgatttgcacgagtcagtgttcaggataacggagcaggaaaaactgaagaaggaactggagcgactgaaggatgatctcggcacgattacaaataagtgcgaggaattcttctcccaggccgcagcaagcagttccgtgccgaccctaagaagcgagctgaatgtggtgttgcagaatatgaaccaggtctacagcatgtcatcaacttacatagacaagctaaaaacagttaacctcgtgctcaagaatactcaggcggctgaagcgctcgttaagttgtacgagacaaagctctgtgaggaggaagccgttatcgctgataaaaacaatatcgagaatctgatcagtactttgaagcagtggcggtcagaggtggacgaaaaacgtcaggtcttccacgccttggaggacgagcttcagaaggccaaggccatcagtgacgaaatgtttaaaacctacaaagagcgagacctggatttcgattggcataaagagaaggctgatcaactcgtggagaggtggcagaacgttcatgttcagatcgacaatcggcttagagatctcgagggaattggcaagagcctgaagtattatagagacacatatcatcccctggatgactggattcagcaggtggagactactcaacgcaaaatccaagaaaatcaacccgagaattcaaagacacttgccacacagctcaaccagcagaaaatgctcgtcagcgagatcgagatgaagcaaagcaagatggacgagtgtcagaaatatgccgaacagtacagtgccacagttaaggattacgagcttcagactatgacctacagagctatggtcgacagccagcaaaaaagtccagtgaagagacggcgaatgcaatcgtccgcggatttgattatccaggagtttatggacctccggaccagatatactgccctcgtgactctaatgacacagtacatcaagtttgcgggagattcgttaaaacgtcttgaggaggaagaaatcaaaagatgtaaggagaccagcgagcacggtgcctatagcgacctcctccagcgccagaaggctactgtactggagaactccaaacttactggtaaaatcagtgaactcgagcggatggtggccgaacttaaaaaacagaagtcccgggtggaagaagagttgcctaaggtgagagaagcggcagagaatgagcttcgaaagcagcagaggaacgtggaggacatctcgctgcagaagataagggcagagtccgaagccaagcagtacaggcgggagttagagaccatcgtgcgggaaaaggaggctgccgagcgggagcttgagagggtgaggcaactgactattgaagctgaagctaagcgcgctgctgtcgaggaaaacttacttaatttcagaaaccaattggaggagaacactttcacccggcgtactttagaagatcatttaaaacggaaagacttatcattgaatgacttagagcagcagaaaaataaattgatggaagaactgcgcaggaagagagacaacgaagaagaactcctgaagctcattaaacagatggaaaaagaccttgctttccaaaagcaagtggcagagaagcagctgaaggaaaaacagaagattgagctcgaggcgagaaggaaaataactgaaattcagtatacctgcagagaaaatgctttacctgtgtgccccattacacaggctacgagctgcagggctgtaacaggccttcaacaggagcacgataaacagaaggccgaggagctgaagcaacaagtggacgagttgaccgcagcaaatagaaaggccgaacaggatatgcgcgagctgacctatgagttaaacgcactacagctggagaaaaccagttcggaagagaaggccagactgcttaaggataaactggatgagactaataacactctgcggtgcttaaagctggaactagagcgcaaagaccaggcggagaaaggttattcacaacagctgcgcgagcttggtcgccaacttaatcagacaacgggaaaagcagaagaggcgatgcaagaagcaagcgacctaaagaagatcaaaaggaattaccaactggaactggagtcactcaaccatgaaaagggcaaactgcagagggaagtagataggataaccagagcacatgcggtcgcagaaaaaaacatccagcatctgaacagtcagatccactccttcagggacgagaaggaattggagcgacttcagatatgtcagcgaaaaagcgaccatttgaaagaacaattcgaaaaatctcacgagcagctactgcagaatatcaaggctgagaaagagaacaacgataagatccagaggcttaatgaggagcttgaaaaaagtaacgagtgcgccgaaatgttgaaacagaaagtggaggaactaacacgccagaataacgagacaaaactgatgatgcagcgcattcaggcggagagtgagaatatcgttctggagaaacagacaatccagcaacgttgtgaagctctcaagatacaggctgacgggtttaaggatcagctgaggtctaccaatgaacatctgcacaaacaaactaaaactgagcaggattttcagcgtaagattaagtgcctggaagaagacttagctaaaagtcaaaatttggttagcgaattcaaacagaagtgcgatcaacagaacatcattattcagaacacgaaaaaggaggtgagaaatctgaacgcggaactgaacgcttccaaggaagaaaaacgacgaggcgagcagaaggtgcagcttcagcaagcacaggtgcaggagctgaataaccggctgaagaaagtgcaggacgagctgcatctaaaaactatagaggagcagatgacgcatagaaaaatggtgctgttccaggaagagagcggtaaattcaagcagtcggctgaagagtttcgcaagaaaatggagaaactcatggagtctaaagtaataaccgagaatgatatctcggggattcgcctggattttgtgagcttacaacaggagaattcgcgcgctcaagagaacgccaagctatgcgaaaccaacattaaggagctggaacgccaactgcagcaataccgcgaacagatgcaacaggggcagcacatggaggctaaccattatcagaagtgccaaaagttggaagacgagctcatagcacagaaacgcgaggttgagaacttgaaacagaagatggaccaacagattaaagaacacgagcaccaactggtcctactgcaatgtgaaatccagaagaaaagcaccgccaaagactgtacttttaagcccgattttgagatgaccgtgaaagagtgtcagcacagcggggagctctctagccgaaatactggccaccttcacccaacccccaggtctcctctcttacgctggacccaggagcctcagccactcgaagaaaagtggcaacatagagtggttgaacagattccaaaagaggtgcagttccagccgccaggcgctccactggagaaggagaaatcgcaacagtgctacagtgaatactttagtcaaacatcgacggagctgcagatcaccttcgatgagacaaatcctattaccagactgtccgagatagagaagatccgggatcaggcattgaataactctaggcccccagtgcgctatcaggataacgcttgtgaaatggagctggtaaaagtattgaccccgctggagatagccaagaacaagcagtatgatatgcatactgaggtcacaaccctaaagcaagaaaaaaaccccgtgccaagcgcagaggagtggatgttagaaggctgcagagcctctggcggactcaaaaagggcgactttctaaaaaaaggactagagcccgaaacctttcaaaattttgacggagaccacgcttgcagcgtgagggacgacgagtttaagttccagggtctccggcatactgtgactgcgcgacaacttgttgaagcgaagttgctggatatgcgcactattgagcagctgcgattggggctgaagacagtcgaggaggtccaaaagacgctgaataagttcctcaccaaagcaacaagcattgcgggtctatacctggagagcacgaaagaaaaaatttccttcgcaagtgccgctgagaggatcataatcgataaaatggtagctcttgctttcttggaagctcaggctgccacaggattcatcatcgatccaatctctggacagacatatagcgtggaagacgccgttttaaagggtgtggttgaccccgaattcagaattcggctcttggaggctgagaaagccgctgtcgggtattcatactcatctaagaccctatcagtctttcaagctatggagaaccggatgctggacaggcagaaaggtaaacacatcttagaggcccagatcgcctcaggaggggtgatagatccagtgcgaggcattagagtgccccctgagatcgccttgcagcaaggtctgttgaataatgctatcctccaattcctgcatgaaccaagctctaatactagggtatttcccaaccctaataacaaacaagcattgtactattcagaactcctccgaatgtgtgtcttcgacgtggagagccaatgttttctatttcctttcggcgaacgtaatatctccaacctcaatgttaagaagacccaccgtatttcggtcgtggataccaagaccggatcagagctcactgtgtatgaggcctttcagcgcaaccttattgagaaatctatttacctcgaactgtctgggcaacagtatcagtggaaggaagccatgttctttgagtcttatggccatagcagccacatgctgacggacacaaaaacgggtttgcactttaacataaacgaagcaatcgaacagggaacgatcgacaaggcactggtgaagaagtatcaggaaggccttatcacgctgaccgaattggccgacagcctgctgtctaggctcgttcccaagaaggatctgcattccccagtggcgggatattggttgacagcttcaggtgagaggatcagcgttctgaaggcctccagacgcaaccttgttgacagaatcacagcgcttcggtgcctggaggcccaggtgtccacgggcggtattattgatcctcttactggcaagaaataccgagtagctgaggcactgcataggggactagttgatgagggcttcgcacaacagctgaggcagtgcgagcttgtaattaccggtattggccacccgatcactaataagatgatgagcgtagttgaggcagttaatgcaaacatcatcaacaaagaaatggggatcagatgtctggagttccagtatttaaccggtggtcttatcgagcctcaggtgcattcaaggctgtccatagaggaggcacttcaggtgggtatcattgatgtcctgatcgcaactaagctcaaagaccaaaagtcatatgtacggaatattatttgtccccagaccaagcggaaactgacgtacaaagaggctctggagaaagctgacttcgatttccacacgggcctcaagttattggaggtaagcgaaccactgatgaccggcataagttcactctattactcctctta

SEQ ID NO: 221512 - DNA, 22719 bp, synthetic construct
  misc_feature 1..22719: note = Description of Artificial Sequence: Synthetic coding sequence
  source 1..22719: mol_type = other DNA
atggccggatatctttcaccagcggcatacctgtacgtcgaggaacaggagtacctccaagcatacgaggacgtgcttgagagatataaggatgagagagacaaagtgcagaagaaaactttcacgaaatggatcaaccaacacctgatgaaggtaagaaaacatgtgaatgatctgtacgaggatctcagggatggacacaatttaatcagcctgctggaagtgctgtcaggagataccctgccccgagagaagggtaggatgcgcttccatcgcctgcaaaacgtgcagattgccttagactacttgaagaggaggcaggtcaaactggtgaatatcagaaatgacgatattaccgatgggaacccgaagctcaccctaggactgatttggaccatcatcctgcactttcagattagtgatatacacgtgacaggcgagtccgaagatatgtcggctaaggagcgactgctgctgtggacccagcaggcaacagagggatacgccggaatacgatgcgagaatttcactacatgttggagagacggtaaactctttaacgcgattatccataagtaccggccagatctcatcgatatgaacactgtcgcagtgcaatcaaacctcgcgaatctcgaacatgcattttatgttgccgaaaagataggagttatccgattgctggatcctgaagacgtggacgtcagctctcccgacgagaagtcagtgataacatatgtatcatccctgtacgatgcttttccaaaggtgcccgaagggggtgagggcataggcgctaatgatgtcgaggtgaagtggatcgagtaccagaatatggtgaactatctgatccagtggatccgccaccacgtgacaacaatgtcagagcggacattccctaataaccccgtcgaacttaaagccctgtacaaccaatatctccagttcaaggagactgagatccccccaaaagagacagagaaatcaaaaatcaagcgactgtataaactgctggaaatatggatagagttcggtagaatcaaattactgcagggctaccaccccaatgatattgaaaaggagtgggggaaactgattattgctatgctagaacgggagaaggccctcaggcccgaagtggaacgccttgagatgctgcaacagattgcaaaccgtgtccagagagactcagtcatctgcgaagataagctcatcctggctgggaatgctctccagtccgattcaaagcggctagagtccggagtacagttccagaacgaagccgagatcgccggatatatcctggaatgtgagaatctgcttagacagcacgtcattgatgtccaaatcctgattgatggaaaatactaccaagctgatcaactagtacaacgcgtcgccaaactgcgcgacgaaataatggcgctccgaaacgagtgttcctcagtttacagtaagggacggattctaactaccgagcagactaagcttatgatcagcggaattactcagtctctgaactccggcttcgcccaaaccctgcacccgagcctgacttccggcctgacacagagcctgacaccaagcctgacctccagctctatgacgtccggattaagtagcggaatgacatctcgccttactccctccgtcaccccagcttacacacccggttttccctctggtctggtgcccaacttttctagtggggttgaaccgaatagcctacagacattaaaattaatgcagattcgcaagcccctgctgaaaagttctctgctggaccagaatctgacggaggaagagattaacatgaaattcgtgcaggacttgttgaattgggtcgacgaaatgcaggttcagctcgatagaacagaatgggggtcagacctcccctcagtggagtcccatctcgaaaatcacaagaacgtgcaccgcgctatagaagaattcgaaagcagcctcaaagaagccaagattagcgagatacagatgaccgcccctctgaagctcacttatgcagagaagctgcatagacttgaatcccagtacgccaaactgctcaataccagtagaaatcaggaacggcatctcgacactctgcacaacttcgtgagtcgcgcaacgaatgaattaatctggctcaatgaaaaggaagaggaggaggtagcatacgattggtctgagaggaacacgaacatcgctcgcaaaaaagactatcacgcggaactgatgagggagctggatcagaaagaagaaaatataaaaagtgtgcaggagatcgccgagcagctcttattggaaaatcacccagccagactgacaattgaggcctacagggctgccatgcagacccagtggtcttggattctgcagttatgtcaatgcgttgagcagcacatcaaagaaaacaccgcctatttcgagttcttcaatgatgctaaggaggccacggattaccttagaaacctgaaggacgccatccagcgcaagtactcatgtgataggtcaagcagtatccacaaactggaggacctggtgcaggaatctatggaggagaaggaggagctgctgcaatacaaaagcacgattgccaatctgatgggcaaggcgaaaaccataattcagctgaagcctagaaactccgattgccctttgaaaacctccatacccatcaaagctatttgtgattacagacagatcgagataacgatttacaaggacgacgagtgtgttcttgccaacaacagtcaccgtgccaagtggaaagtgataagccccaccgggaacgaagctatggttccttcagtctgctttaccgtccccccacccaataaagaggctgtcgacctcgcgaaccgaatcgaacagcagtatcagaatgtgttaaccctgtggcacgagtcccatatcaatatgaaaagcgtcgttagctggcactaccttattaacgagatagaccgaattcgcgcaagtaatgttgcctctattaagaccatgttgccaggggagcatcagcaagtgctcagcaatcttcagagcagattcgaagattttttggaagacagccaggagtctcaggttttttcaggcagtgacattactcagctcgagaaggaagttaatgtgtgcaaacaatactatcaggaacttttaaaaagtgcagaaagagaggagcaggaagagagcgtgtacaacttgtatatttctgaagttcggaatatccgcctgaggctggagaactgcgaggatagactgataagacagattcgtacccccctcgagagggatgatttgcatgagagcgtcttccggatcaccgaacaggagaaactgaaaaaggaactcgaaagattgaaggatgatcttggaactataacaaataagtgcgaagaattcttctcgcaagctgcggcatcctcctctgtacccaccctaagatccgagcttaatgtggtgcttcagaacatgaatcaggtgtacagcatgtccagcacctacatagataaactgaaaaccgtcaacctggttctcaagaacacccaggctgcagaagccctggtaaagctatatgagactaagctgtgcgaggaggaggctgtaatcgccgataagaacaatatcgaaaatttgattagcaccttaaaacagtggcggtccgaagtcgatgagaagcggcaggtgtttcacgcattggaggatgagttacaaaaggctaaggcaattagtgatgaaatgtttaagacttacaaagagagagaccttgattttgactggcacaaagagaaagccgatcagctcgttgaacgatggcagaatgtgcatgtccagattgacaacaggcttagagatctcgaagggatcgggaagtctttgaagtattacagggatacataccaccctctggatgattggattcagcaggtggagacgacccagcgcaagattcaggaaaatcagcctgagaactctaagacgctggccacccaactgaaccagcaaaaaatgcttgtcagcgaaattgagatgaaacagtccaagatggatgagtgtcagaagtatgctgagcagtacagtgccactgtgaaggactacgaacttcagacaatgacctaccgcgctatggtagactcacagcagaagagtccggtgaagcgtaggcggatgcagtcaagcgcagatttgattattcaggaatttatggacctgcggactcgatacaccgccttagtgacgctgatgactcagtacatcaagttcgccggagacagccttaaaaggctggaggaagaagagaagagcttagaagaggagaagaaagagcacgtggaaaaagccaaggaactgcagaaatgggtctcaaacatctccaaaactctgaaagacgccgagaaagcgggaaagccgccatttagtaagcagaagattagcagcgaggagatcagtaccaagaaggagcagctctccgaggcacttcagacaatacaactgttcctggctaagcacggagacaaaatgaccgacgaggagcggaacgagttagagaagcaggttaaaactctccaggagtcatataatctgcttttctcagaatccttgaaacagcttcaggagtctcaaactagcggcgacgtgaaagtcgaagaaaaactcgacaaggtcattgctggcacgattgaccagactacgggcgaggtgctatccgtgttccaggccgttctgaggggcctgattgattacgatacagggattagactgcttgagacacaattaatgatctctggcctcatttctccagagctgcgcaaatgttttgatttgaaggatgcaaaatctcatggtctgatcgatgagcagattctctgtcaactgaaggagctcagcaaagccaaagaaatcataagcgccgcttcacccactacaatacccgtcctggacgccctagctcagagcatgatcaccgaatcaatggctattaaggtgctcgaaatcctcctgtcaacaggcagcttggtgatcccagcgactggggagcagctgaccctccagaaagcctttcagcagaacctcgtcagctccgcactcttcagtaaggtgctggagaggcagaatatgtgcaaagatttaatagacccgtgcacgtccgaaaaggttagcttaatagatatggtgcagaggtccacactccaagaaaatactggaatgtggctgctcccagtccgtccccaagagggcggtaggattaccctcaaatgtggtcggaatataagcattctgagagctgcccacgaggggctcatcgaccgggagaccatgtttcggctgctttctgctcaactgctttcaggaggtctaataaactcaaacagcggccagaggatgactgtggaggaggctgtgagagaaggagttatcgatagggataccgcttcttccatactcacttaccaggtacaaacaggtggaataattcagagtaatcccgctaaacgcctgaccgttgatgaggccgtgcagtgcgatttaatcacttcctcttctgcattgcttgttctggaagcccagagagggtacgtgggcctgatctggcctcactcaggcgaaattttccctacaagttccagtttacaacaagagcttataacgaacgagctggcgtacaagattttaaatggcagacagaagattgcggcactgtatatacctgagtccagccaggtgatcggcctggacgccgcaaaacagctcggaattattgacaataatactgcgagcatcctcaaaaatattaccctcccggataagatgccagaccttggcgatctcgaggcttgtaaaaatgcgcgtcggtggcttagcttctgtaagtttcagcctagtacggtccacgattaccggcaggaggaagatgttttcgatggcgaggagcctgtgaccacccagacctccgaagaaactaaaaagttattcctgtcataccttatgattaatagctacatggacgccaacacaggccagcgtctcttattgtacgatggagacctcgatgaggctgtggggatgctcctggagggatgccatgcagagttcgatggtaacacagcgatcaaagagtgtctagatgtgctaagttcttcgggggtttttctaaataacgcttcgggcagagagaaggacgagtgtactgctacacctagcagcttcaacaagtgtcactgtggcgagcccgaacacgaggaaacacccgagaatcgaaagtgcgccatcgacgaggagttcaacgagatgcgcaacacggtcatcaattctgaattttctcaatcgggaaagctggcaagtacaattagtatcgaccctaaagttaactctagtccttccgtctgtgtgccgtctctgatttcctacctgacacagactgagctggccgatatatccatgttgcggtccgatagcgaaaatattctgacaaattacgaaaaccagtcacgggttgaaactaacgaacgggctaatgagtgctctcattcaaaaaacatacagaatttcccttctgacctcatcgaaaacccgattatgaaaagtaaaatgtcaaagttttgcggcgttaatgagaccgagaacgaggacaataccaatcgggacagcccaatatttgactattcacccaggctgtccgcgcttctaagccacgataagctgatgcactcacaaggaagctttaacgacactcacacacccgaatctaatggaaacaaatgcgaggcaccggcactatcgtttagcgataaaacaatgctgtctgggcaaagaattggcgaaaagttccaggatcaatttctggggattgccgctataaacatcagtcttcccggtgagcaatatgggcagaagagtctgaatatgattagtagcaatcctcaggtccagtatcacaacgataaatacatcagtaatacatccggagaagatgaaaaaacccatccaggtttccaacagatgcccgaagacaaggaggatgagtccgagatcgaagaatacagctgcgctgtgacacctggcggagataccgataacgccattgtatccttaacttgtgctactcccctcctagacgaaacgatctcagcaagtgactacgagacaagccttctcaatgatcaacagaacaacaccggtacagacaccgactcagacgacgatttctacgatacgccactgtttgaagacgatgatcatgatagtctattactcgatggtgacgatagagactgcctgcaccccgaggactacgacaccctgcaggaggaaaatgatgagacagcctcgccagccgacgtattctacgatgtgagtaaagaaaacgagaacagtatggtacctcagggtgccccagtgggctcattgagtgtgaagaacaaagcgcactgcttgcaggactttttaatggacgttgaaaaggacgagctcgatagcggagagaagatacatttaaaccctgtcggcagcgacaaagtgaatggacagagtctcgagaccgggtctgaaagggaatgcaccaacattctggagggggacgagtctgattccctgactgactacgatatagtgggtggcaaagaaagcttcaccgcatcactgaagtttgatgatagcggcagctggcggggacgcaaagaggagtatgttacggggcaggaattccattctgatacggatcaccttgattcaatgcagagcgaagagtcctatggcgactacatctacgactccaatgatcaagacgatgatgatgacgatgggatcgacgaggaaggaggtggcattcgcgacgagaatggaaaacctagatgccagaatgtagcagaggatatggatatccagttgtgtgcctccatactgaacgagaacagcgatgagaacgaaaacatcaataccatgatcctgttggataagatgcactcctgttcctccctcgaaaagcagcaaagggttaatgtggtacagctcgcttcgccatccgagaacaacctcgtcactgaaaagtcaaacctgcccgaatacaccacagagatcgcgggtaagagtaaggaaaatctgctgaatcacgagatggtgttgaaagacgtcttgcctccaattattaaagatacagagtcagaaaaaaccttcggaccagcctcaatcagccacgacaacaacaacattagcagcacatccgaactgggtaccgaccttgctaacactaaagtaaagttgattcaggggtctgaactgcccgagttgactgacagcgttaagggcaaggatgaatacttcaagaacatgactcctaaggtggattcttccttggatcatattatctgcacggagccagacctgattggaaagccagcggaagagtcacacttatccttgatagcttccgttactgataaggacccacaaggtaatggttccgacctgatcaaaggcagagatggcaaatccgacatcctcatcgaagatgagacctcaattcaaaaaatgtacttaggagagggggaagtgctggtcgaggggttggtggaggaggagaatcgtcacctcaaactgctacccggaaagaacacaagggactcatttaaactgattaattcccagttcccttttcctcagatcaccaataatgaggagctgaaccagaaagggtctctcaagaaggccaccgtgacactgaaagacgagcctaataatctacagattattgtctcaaagtcccctgtgcagtttgagaatcttgaggagatttttgacacgagcgtcagcaaagaaatttctgatgacattacttcagacattaccagctgggaaggcaacacccattttgaagaatctttcaccgacggaccagagaaagaactggatctcttcacctacctcaagcactgtgctaaaaacatcaaagccaaagatgtggccaaacctaatgaggacgtgccatcacatgtattaatcacagcccctcctatgaaagaacatctgcagttaggagtcaacaatacaaaggaaaaaagtacgtctacccagaaggacagccccttaaacgacatgattcagtcaaatgacttatgcagtaaagagagcatcagcggcggagggacagagattagtcaatttactccggagtccatagaagcaacactgagcattttgtccagaaaacatgtggaggacgtaggtaagaacgatttcctacagtctgagcgctgcgcgaacgggctggggaacgacaactcgtcaaacactctaaatactgattactcctttctagagataaataacaagaaggagagaatcgagcagcagctgccaaaggaacaggctctgtctccaaggtcacaggagaaggaggtgcaaatccctgagctgtcccaggtgtttgtggaagatgtaaaggatatcctgaagagtcggctgaaagaaggccacatgaacccacaggaggtcgaagagccatcagcatgtgcggacacgaaaattctcattcaaaatctcattaaaaggataaccacctctcagcttgtgaatgaggcttccaccgtgccatccgatagtcagatgtccgattcaagtggggtttcacccatgaccaactcctctgagctcaagcccgagagtagggatgatccattttgcatcggcaacctgaagagcgagctcctcctaaatatcctgaagcaagaccaacactctcagaagatcacaggggtctttgaactgatgcgtgagctgacacacatggaatatgatctcgaaaagcggggaatcacctctaaggtgctgccactgcagttggagaacattttctacaagcttttagccgacggatattcagaaaaaatcgaacacgtgggcgatttcaaccagaaggcatgttcaacgagcgaaatgatggaggagaagccccatatccttggcgatataaagtctaaggagggaaactattattcacccaacctcgaaacagtgaaagaaattggcctggagagttctactgtgtgggcctccactctccccagggatgagaaattgaaggatttgtgcaatgacttcccctcccatctggaatgtacttctgggagcaaggagatggcatcaggcgatagctccacagagcaattctcatctgaactccagcaatgtctgcagcatactgagaaaatgcatgagtatctgactctgctgcaggatatgaaacctccactggataatcaagaatccctggataataatctggaagcccttaagaaccaattacggcaactcgagacttttgagctggggttagcccctatcgccgtgatccttaggaaagacatgaagctggccgaggaatttctcaagagcctgcctagcgacttccctaggggccacgtggaggaactcagcatatcccatcaatccttaaagacagcattcagtagccttagtaacgtgagttcagaaaggactaaacagattatgctagccatcgattctgaaatgagcaagctggctgtgagccacgaggagtttctacataagctgaagagcttcagtgactgggtgagcgagaaaagcaagtccgtgaaggacatcgagatcgtcaacgtgcaggattccgagtacgtgaaaaagcgactagagtttttaaaagccaacaatgtgctcaaagatctgggacacaccaaaatgcaacttgaaaccaccgccttcgatgtccagttctttatatccgaatacgcccaggatctctctccaaatcagagcaagcagctcctgaggctgttgaacaccactcagaagtgttttctggatgtgcaagagtcagtcactacccaggttgagaggctcgagacccagctccacttggagcaggatctggacgatcagaagattgtcgccgagcgccaacaggagtataaggaaaaattacagggcatctgcgaccttttgacgcagacagagaaccggttaatcgggcaccaggaagcatttatgattggagatggcactgtagagttgaaaaagtaccagtccaagcaggaggagctccaaaaagacatgcaaggctcggcacaggccctggctgaagtagtgaagaataccgagaattttctgaaggaaaatggggagaaactgtcacaggaggacaaagccctaatcgagcagaagctcaatgaggctaaaatcaagtgtgagcaactgaacttgaaggccgaacagtcaaaaaaggagctcgacaaagtggtgaccactgctatcaaggaggagaccgaaaaggtggcagccgtcaagcagcttgaggagagtaagacgaaaattgagaatttactggattggctctctaatgtggataaggatagtgaaagagcgggaaccaagcataaacaggtcatcgagcagaacggtactcactttcaggaaggtgatgggaagtccgcgatcggcgaggaggatgaggtgaacgggaatctgcttgagacagacgttgatggtcaagtcgggacaacccaagagaatctgaatcagcaataccagaaggtaaaggcccagcacgaaaagattatatcccagcatcaggcggtgattatcgctacccagtctgcgcaggtcctccttgagaagcagggccagtacttaagccctgaggaaaaagagaaacttcagaaaaacatgaaggagttgaaagttcactatgagaccgcgttggcggagtcggaaaagaagatgaagctgacgcactctctacaagaggaactggaaaagttcgacgcggactacacagagttcgagcactggctgcagcagagcgaacaggagcttgagaatttagaggctggagccgacgatatcaacggtctcatgaccaagctcaaaaggcagaagtccttcagcgaagacgtcatctctcacaagggcgatctgcgctatattaccatttctggaaatagggtgctcgaggccgctaagtcgtgttcaaaacgcgatggaggtaaagtagacactagcgcaacacacagggaggtccagaggaagctggatcacgcaacggacaggtttagaagtctatacagcaaatgtaatgtgctcggaaataacctgaaggatctcgtagacaaataccaacattacgaggatgcgagttgcgggttgttggccggtctacaagcgtgcgaagcgactgcatccaagcatctgagcgaacctatagcagtggatcccaaaaacctgcaacggcaattagaagaaactaaggccttgcagggacaaatctcgagccagcaagtagcagttgaaaaattaaaaaaaacagccgaggtcctgctcgacgccaggggtagcctgttaccagccaaaaacgatatccaaaagactttggatgacattgtcggtcggtacgaagatctgtctaagagtgttaatgaacgcaacgagaaacttcagataaccctcacgaggagcctcagcgtccaggacggcctcgatgagatgcttgattggatgggcaacgtggaatctagtctcaaggagcagggacaggtgccactcaactccacagccttgcaggatatcatatcgaagaacatcatgcttgaacaggacatagccggtaggcaatccagtatcaatgcaatgaacgagaaagtcaaaaagttcatggagactacagacccatctacagcctccagccttcaggcaaagatgaaggatttgtccgctaggttttcagaggcttctcacaagcataaagaaacgttggcgaagatggaggaattaaaaacaaaagttgaactctttgaaaacctgtctgaaaagttgcagacatttctggaaacaaaaacccaggcgctgaccgaagtagatgtgcccggaaaggacgtaacagagctctctcagtacatgcaggagagcacttcagagttcttagagcacaagaaacacctggaagttctgcacagcctgctcaaggagataagcagtcacggcttacccagcgacaaggccttggttctagagaagaccaacaaccttagtaaaaagtttaaggagatggaagacactatcaaggagaagaaggaagctgtcacaagttgtcaggaacaacttgacgcgttccaggtgctagtcaagtcgctcaaaagttggatcaaggagacgacgaagaaggtgccaattgtccagcccagcttcggcgctgaggatctgggcaaatccctggaggacacaaagaaactgcaggaaaagtggtcactgaagacacccgaaatacagaaggtgaacaactccggaatctccctctgtaacttgattagtgccgtcaccaccccagcaaaggccatcgcggctgtgaagagcggaggagccgtcttgaacggcgaggggacagcaaccaacactgaagagttttgggcaaacaagggccttacctctatcaagaaagatatgactgatatttcccatggctatgaggatctcgggctgctgctcaaagataagattgctgaacttaacacaaagctgtccaaactgcagaaggcccaagaggagtcctccgccatgatgcagtggctgcagaaaatgaacaaaacagccactaagtggcaacagacccctgcacctacggacaccgaagccgtgaagacacaggtggagcagaacaagagcttcgaggcagagctgaaacagaatgtgaacaaggtgcaggaactcaaagacaagttgacagaactattagaagagaaccccgatacccccgaggccccacggtggaaacagatgttgaccgaaattgattcaaagtggcaggagttgaaccaattgaccatcgatcgacagcaaaagttggaggagagttctaacaacctcactcaatttcagacggtcgaggcacagctgaaacagtggttagtcgagaaagagctaatggtcagcgtgcttggccctctaagtattgaccctaatatgcttaacacccaacggcagcaggtgcagattctgcttcaagagtttgccacaaggaagccccagtacgaacaattgactgcagccggacagggcatattatcaagaccgggtgaggatcctagtctgcggggaatcgtgaaagagcagcttgccgctgttacgcagaagtgggattccctgaccggacagttgtcagacagatgtgactggattgatcaagctatcgtcaaaagcacccagtaccagtcactgctccgttcactgtccgataagctaagtgacctggataataagctttccagcagcctggccgtgtccactcacccagacgctatgaatcagcagcttgaaaccgcacagaaaatgaagcaggaaattcaacaggagaaaaagcagattaaagtggcccaagccctctgtgaagatctgtccgcacttgtgaaagaggagtacttgaaggcagaactgtcacggcagctggaggggatactgaagagttttaaggatgtggagcagaaggcagaaaatcacgtgcaacacttacaaagtgcatgtgccagctcacaccaattccaacagatgtctcgtgattttcaggcatggctagatacaaaaaaagaggagcagaacaaatctcatccaatatcagccaagttagacgttctagagagtctcataaaagatcataaggacttctctaagactcttaccgcccagtcacacatgtacgagaagaccatagctgagggagagaacctgctgctcaaaacgcaaggaagcgagaaagcagcactccaactccagctgaatactatcaaaaccaactgggatacgtttaacaaacaggtgaaggagcgggagaacaagctcaaggagtcgctggagaaagcgctcaaatacaaagaacaggtagaaaccctctggccctggattgacaagtgccaaaataatctcgaggaaatcaagttttgtctggacccagccgagggggaaaactccatagcaaaactgaaatctctgcagaaggaaatggaccagcattttggcatggtggagcttctgaacaataccgcaaacagcctgttgtcagtttgcgagattgacaaagaggttgtgacggacgaaaacaagtctcttatccagaaggtggatatggtgaccgaacagctgcacagcaaaaagttttgtttagaaaatatgacccagaaattcaaggaatttcaggaggtatcaaaagaatccaagcggcagttgcagtgcgcaaaggagcagttggatatccacgattctctaggatcacaggcgtattctaataaatatttaaccatgctccagacccagcagaaatctctccaagcattaaagcaccaggtggacctggcaaagagactggctcaggaccttgtggtagaagccagcgacagcaaagggaccagtgacgtcctgctccaagtggagacaattgcccaggagcatagcacactttcccagcaggtagatgaaaagtgctcgttcctggaaactaagctgcaggggatagggcatttccagaacacaatcagggaaatgttctcacaatttgccgagtttgacgatgagctggactcgatggctcctgtcggcagggatgctgaaacactccagaagcagaaggagactatcaaggccttcttaaaaaaattggaggcgctcatggcctctaacgataacgcgaataaaacctgtaagatgatgctggctaccgaagaaacttctcccgacctggtgggcatcaagcgtgaccttgaagcactgagcaaacagtgtaataaactcctggatcgcgcacaggccagagaggagcaggtggaagggacaataaagaggctagaggagttttactccaagctgaaagaattttctattctgctgcaaaaggctgaggaacatgaggaatcccagggccctgtgggcatggaaaccgaaactatcaaccaacagttaaatatgtttaaggtttttcagaaggaagagatcgaacccctgcaggggaagcaacaggatgtcaactggttgggccagggccttatccagagcgctgcgaaatctacatctacccaagggctggaacatgacctagatgacgtcaatgctaggtggaaaacacttaacaaaaaagtggcacagcgggctgcccagctgcaggaggcacttctgcactgcggtcggttccaggatgccttggagtcgttactcagctggatggtggatacagaggagctagtggcaaatcagaagccacccagcgctgaatttaaggtcgtcaaggcccaaatccaggagcaaaagcttctccagagactcttggacgaccggaaatctactgttgaggtgataaagagggaaggtgagaagatcgccacaactgccgaaccggcagacaaggtgaagatactgaagcaactgtctctgctcgattcccgttgggaagctttgctgaacaaagctgagactagaaaccggcagctcgagggcatttccgtggtggcccagcaatttcacgagacactcgaaccattgaacgagtggctgacaactattgaaaagcggttggttaactgtgaacccattgggacccaggcatctaagctggaagagcagatagcccagcataaagcgctggaagacgacattatcaatcataacaagcaccttcatcaggccgtgagtatcggacaatcgctcaaggtgctgtcgtctagagaggacaaggacatggttcagtccaaactggactttagtcaggtctggtatatcgaaatccaggagaagagccattcgcgcagtgagctgttgcagcaggcactgtgtaacgccaagatttttggagaggacgaggtggaactaatgaactggttgaatgaagttcatgacaaactgtctaaattatcagtgcaagattacagcactgaaggcctttggaaacagcagtcggaactgcgcgtgttgcaggaagatatactgttaagaaagcagaacgtggaccaagccctgctcaacggtctggagctgctcaagcagacaactggcgacgaggtgttgatcatccaagataagttggaggccatcaaggcccgttataaggatataaccaaactgtctaccgatgtcgccaagacgcttgagcaggccttgcagctagccagacgcctacatagcacacatgaggaactgtgcacttggctagataaggtggaggtagaacttctgagttacgaaactcaggtgctgaagggagaggaagcttcgcaagctcagatgagacccaaggagctgaaaaaagaagctaagaacaacaaggccttacttgacagcttgaatgaggtgtcaagcgcattgctcgagctggtgccctggcgggcacgcgaaggactggagaaaatggtggcggaggataacgaacggtaccgactcgtttcagatacgattacacagaaggtagaggaaatcgacgccgcaattttacggtcacaacagtttgaccaagcagccgacgccgagttaagttggattacggaaaccgagaaaaagttgatgtccttgggggatatccgcctggaacaggatcagactagcgcacagctccaggtgcaaaagacctttacaatggagatactccggcacaaagatataatcgatgatctcgtgaagagcggccataaaataatgacagcatgctctgaagaggagaaacagtctatgaaaaagaagctggacaaggtgctcaaaaactacgacaccatctgccagatcaatagcgaacggtacctgcagcttgagcgcgctcagtctcttgtgaatcaattctgggaaacctatgaagagctgtggccctggcttaccgagacccagtctataatctcccagctcccagccccagccctggagtacgagacactgaggcagcagcaagaggagcatcgccaactacgtgagctcattgccgagcataaaccccacattgacaagatgaataagactggaccacagcttcttgaactcagtccaggcgagggattctcaatccaagaaaaatacgttgccgcagacacactgtactcgcaaatcaaagaagacgtgaagaagagggcggtagctctcgatgaagcgatctcacagtcaacccagttccacgataagattgatcaaattctcgagtctctggaaagaatcgtggaaagactcagacagccaccttccatttcggctgaagtggaaaagattaaggagcagatcagtgaaaacaagaatgtgtccgtcgacatggaaaagctgcagccattgtacgaaaccctcaagcagcggggtgaggagatgattgcaaggtcgggaggcacagacaaggatatcagcgccaaagccgtccaggacaagctcgatcaaatggtgttcatctgggagaatattcacaccctggtggaggaacgagaagctaagttactggacgttatggaactggccgagaagttctggtgcgaccatatgtcattaattgtgacaatcaaggacacccaggactttattcgtgacctggaggaccccggaatcgacccctccgtggttaaacagcagcaagaagcagcagagacgatccgcgaggaaattgatgggctgcaggaagaactggacattgtaatcaatctgggaagtgaactcattgctgcatgtggagagcctgataaacccatagtgaaaaagtccattgatgagttgaattctgcatgggacagtctcaataaagcctggaaagatcgcattgataagctcgaagaggcaatgcaggctgcagtgcagtaccaggacgggttgcaagccgtgttcgattgggtggatatcgctggaggtaagttagccagcatgtccccgatcggcacagatctcgaaaccgtaaagcagcagattgaggagctcaagcaatttaaaagcgaggcctaccaacagcagatcgagatggaacgcctcaaccaccaggccgaactgttactcaagaaagtcacagaggagtctgacaaacacaccgtccaagatcccctaatggaactgaaattgatctgggatagtctggaggagaggataatcaatcgccagcacaaattggagggagcactcctcgctctcgggcaattccagcacgccctggatgagctactagcctggctgacacacacagaaggtttgcttagtgaacagaagcccgtgggtggggaccctaaggccatcgagatcgaattggctaaacaccatgtgctgcagaatgacgtgctcgctcatcagagcacagtcgaggctgtgaacaaagcaggtaacgatttgatcgaatcctcggcgggtgaggaggctagtaacctccagaataaactcgaggtcttgaaccaacgctggcagaacgttctggagaagacagagcagcggaaacaacagctggatggtgccctgcgccaagctaagggttttcacggcgaaatagaagatctgcagcagtggctgacggatacagaacggcacctcttggcatcaaagcctctaggaggccttccagagacagccaaagaacagttgaatgtgcatatggaggtgtgcgccgcatttgaagccaaggaagaaacctacaagagcttgatgcagaaaggacagcaaatgttggcaaggtgccctaagagcgccgagacgaatattgaccaggacatcaacaatcttaaggaaaaatgggaaagcgtcgagacaaagctgaatgagcggaaaacaaagttggaggaggcactaaacttagctatggagttccacaattcactgcaagactttatcaattggttaactcaggccgagcaaacccttaacgtggcctccaggccttctctgatcctggatacagtgcttttccaaatcgacgaacacaaagtgtttgcaaacgaggtcaacagccatcgcgaacagatcatcgaactggacaagactgggacccatctcaagtatttctcacaaaagcaggatgtggtcctaatcaaaaacttgctgatttcagtccagtccagatgggaaaaggtggtgcagagactggtcgaacgaggacgctcgctcgacgatgcgcgtaagcgggctaaacaatttcacgaggcctggtccaaactcatggaatggctcgaagagtcagagaaatctctggacagcgaactggaaatcgcaaatgatcccgacaagattaagacacagctggcccagcacaaggagttccagaaaagcctgggggctaaacactctgtttatgacacaacaaacagaacgggcagatcgctcaaggagaagacaagcttggctgacgataacttaaagctcgacgacatgctgagtgagcttagagataaatgggataccatatgtggtaagagcgtggaacggcagaacaagcttgaggaagctctgctgttcagcgggcagtttaccgatgctttgcaagctctgatagattggctctacagggttgagccacaactcgctgaggatcagccagtgcacggggacatagatctggtgatgaaccttattgataaccacaaggctttccaaaaggaattgggcaaacgtacctcttccgtgcaggcgctcaaaaggagcgctcgagaactgatagaggggtctcgtgatgactccagttgggtgaaggtgcaaatgcaggaactgtccactagatgggagacagtatgtgctttgagtatcagtaaacagactaggcttgaagccgcactgcgtcaggctgaagagttccacagcgtagtgcacgccctgttggaatggctggctgaggccgagcagaccctacgatttcacggggtgctgccagacgacgaggacgccctacgaacacttatcgaccagcacaaagaattcatgaagaagctcgaggaaaaacgggcagaactgaataaggcaaccaccatgggggacacagtgctggctatatgtcaccctgattctattaccaccataaaacattggatcactatcattagagctaggttcgaagaggtgctggcttgggcaaagcagcaccagcagcgattggccagcgccctcgccggactgattgctaagcaggagctccttgaagccctgctggcctggctgcaatgggcagaaactacactgactgataaggataaagaggtcatccctcaggagatcgaggaagtaaaggccctaatcgctgagcaccagacatttatggaggaaatgacaagaaagcagcccgatgtggacaaggttactaaaacctataagcgccgagcagccgacccttctagcttgcagtcccatatacctgtgttagataaaggcagagccggacgcaagcggttccccgcatcaagcctgtacccatcgggcagccagacccagatagagaccaagaatcccagggtaaacctgctggtttccaaatggcagcaggtgtggctactcgctctggagcgcaggaggaagctgaatgacgcgctggaccggttggaggaacttagagaatttgccaattttgacttcgacatctggcgcaagaagtatatgagatggatgaaccacaagaagtctagagtgatggacttcttccggaggatagacaaggatcaggacggaaagattacgagacaagaattcatcgacggaatccttagctcgaagttccccacatcacgccttgaaatgtccgccgtggccgacatctttgaccgcgatggagatggatatattgattattacgagttcgtggccgctcttcatccaaataaagacgcttacaagccaatcacagatgccgataagattgaggatgaagtgacgaggcaggtagcaaaatgcaagtgtgccaagcgattccaagtggaacaaatcggggacaataaatatcgggtgtcttttcagagtaattttggcgattctcagcagttgaggcttgtccgcatcctgaggagtactgtcatggtacgagttggtggcggatggatggcccttgatgagtttttggtcaagaacgatccttgtagagtgcatcaccatgggtcgaagatgcttcgctccgagagcaatagcagtataactactacccagccaacgatcgccaagggaagaacaaatatggagttgagagaaaagttcatactcgcggacggcgcttcacagggcatggccgcatttcggcctagaggccgaagatctaggccaagttctagaggggcatctcctaaccgttctacatcagtgtcttcccaagctgcccaagctgcatccccgcaagtgcccgctacaacgactcccaaggggacacccatccagggtagcaagcttaggctcccaggatatctgtctggaaagggttttcactccggtgaagactctgggctgattacaactgccgctgccagagtgcggacacaattcgcggacagcaaaaagactccgtctcggcctggctcccgggctgggtccaaagctggatcacgcgcatccagccggagggggtcagacgcctcagacttcgacattagtgagatccaaagtgtttgtagcgacgtcgaaactgtgccgcaaacccatcgacctaccccacgggcaggatctcgtcccagcacagcgaagcctagcaagatccctaccccacagcggaaatctccagcctcaaagctcgacaaatctagtaagagatat

SEQ ID NO: 221513 - DNA, 16374 bp, synthetic construct
  misc_feature 1..16374: note = Description of Artificial Sequence: Synthetic coding sequence
  source 1..16374: mol_type = other DNA
atggcagggtacttgtcaccagcagcctatctgtatgtggaagagcaggagtatctgcaggcatatgaagacgtgctggagaggtacaaggacgagagggataaggtccaaaagaagaccttcactaagtggattaaccagcacctaatgaaagtgcggaagcatgttaatgacctttacgaagatctgcgggacggtcacaacttgatcagtttgctggaggtgcttagtggagacacactccctcgagaaaagggaaggatgaggttccaccgtctccaaaatgtgcaaatcgccttggactatctgaaacggaggcaggtcaagctggtaaatatacggaatgacgacattactgacgggaatcccaagctgaccctagggctgatctggacaattatcttacactttcagattagtgacattcacgttactggcgagtccgaggacatgtctgctaaggaaagactcttgctttggacacagcaagcaactgagggttatgcgggaatcaggtgcgagaatttcacgacatgttggcgcgacggaaaactattcaacgccataatccacaaatatcggccagacctaatagacatgaataccgttgctgttcagtccaatcttgcaaatcttgaacacgccttttatgtcgcagagaaaatcggcgtgataagactgctggatcccgaggacgtggatgtgtcttcaccagatgagaagagcgtgataacctacgtaagctccctgtatgacgcttttccgaaggtgccagaggggggagaaggcattggcgcaaatgatgtggaggtgaagtggatcgagtaccagaacatggtgaactacctgatacagtggatcagacaccatgtcactacaatgagcgaacgcacattcccgaacaatccagtggagctgaaagccctctataatcagtacttacagttcaaggaaactgagataccccctaaggagacagaaaaaagcaaaataaaaagactgtacaaattgctggaaatatggatagaatttggaagaatcaagctgcttcagggttaccatcctaatgacattgagaaggagtgggggaaacttatcatagctatgttagaaagagagaaggccctcaggccagaggtggaacggttggagatgttgcagcagatcgcgaaccgggttcagagagactccgttatctgcgaagacaagttgatactcgccggtaacgcccttcagtctgactcaaaacgcttagaatccggcgtgcagttccaaaacgaagcggagatcgccggttacatcctcgagtgtgaaaatctgcttcggcagcatgtgattgacgtgcaaattctcatcgacggtaaatattatcaggcagatcagttggtacaaagggtcgcaaaacttagggacgagatcatggcattaagaaatgaatgctctagcgtgtacagtaaaggccgtattttaacgaccgaacagacgaaactgatgatcagcggcattactcaaagcttgaatagcgggttcgcccaaacactgcatcccagtctgacaagtggcctgacccagagcctgacccctagcctcacttctagcagcatgactagcgggctgtcttcaggaatgacaagtagactcaccccttccgtcacccctgcctatacccctggatttccatcaggactagttcctaacttttcttctggtgtggagccaaatagccttcaaaccctgaagctaatgcaaataagaaagccactgctcaaatcaagcctcctggaccagaaccttacagaggaggagattaatatgaaatttgtgcaggatttgttgaactgggtggatgaaatgcaggtccagctggatcgaaccgagtggggctcagatttacctagtgtcgagtcccatctagaaaaccacaagaatgtgcatagggccatcgaagagtttgagtcttcccttaaagaagccaaaatcagcgaaatccagatgacggctcccttgaagctgacatatgccgagaaactgcatcgcttagaatctcaatacgcaaagctactgaacactagtcggaaccaggagcgccacctggacacactccacaactttgtttcccgagctacaaacgagttgatctggctcaacgagaaagaggaagaagaagtagcatacgattggagcgagaggaatacaaatatagccaggaaaaaggattatcatgccgaactcatgagggaactcgatcaaaaagaagagaatattaaatctgtgcaagagatcgcagaacagctcctgctcgaaaatcatcccgctcggctgacaatcgaggcttaccgggcagctatgcagacacaatggtcatggatcttgcaactttgtcagtgtgtcgagcaacatattaaggagaacacagcctattttgagttttttaacgacgcaaaggaagctaccgattacctgcgaaatctcaaggacgcaatccagaggaaatactcctgtgatcgctccagctctattcacaaacttgaagacttggtgcaggagagcatggaggagaaggaggagttgctccaatataaaagcacaattgccaacctgatgggtaaagcgaagactataattcagttgaagcccagaaactcagactgtcctctaaagacaagtattcctatcaaggctatctgtgattataggcagatagaaataacaatctataaagatgacgagtgtgtccttgctaataattcgcatcgagccaagtggaaggtgatctcccccactggtaacgaagccatggtgcccagcgtttgcttcaccgtcccaccacctaataaggaagccgtggacctcgctaaccgcatcgagcaacagtaccagaacgtgctcaccctgtggcatgagtcccacattaacatgaagtcagtggtatcctggcattacctcatcaacgaaatcgatcgcatccgtgcttctaacgtggcatctatcaagactatgcttccaggcgagcaccagcaggttctgtccaatttgcagagccgctttgaggactttctcgaggattcacaagaatcccaggttttttctgggtccgacatcactcagctcgagaaagaagtcaatgtgtgcaaacaatattatcaggaattactaaaatcagccgaacgcgaagaacaggaggagtccgtctacaacctgtacatctcagaagttagaaacatccggctccgcttggagaattgtgaggacagactgattcggcagatccgcacccccctggagcgagacgatctgcacgagtccgtgtttcgtattacagagcaggagaagctgaaaaaagaacttgagcggttaaaagacgatttggggacgatcacaaataagtgcgaggagttcttctcccaagccgctgcctcttcgagcgtccccactttacgctctgagctaaatgtggtgctgcaaaatatgaaccaggtttactcaatgagctcaacctatatagataaacttaagacagtgaacctcgtcctcaaaaatacccaggccgcagaggctttggtgaaactgtacgagaccaaactgtgcgaggaagaggctgtgatcgctgacaagaataacattgaaaatttaatctcaaccctcaaacagtggcggtcagaagtcgacgagaagaggcaggtatttcatgctctggaggatgagctgcagaaggccaaagccattagtgatgagatgttcaagacatataaggagcgtgaccttgactttgactggcacaaggagaaggctgaccagctagtggagagatggcaaaatgtgcacgtacaaatagataaccgactaagagatcttgaggggatcggaaagtcccttaagtactaccgcgacacctaccatcccctggatgattggattcagcaggtggagaccacacagcggaaaatacaagaaaaccagcctgagaattccaaaacacttgcgacccagctcaatcagcaaaagatgctggtgtctgaaattgaaatgaaacagtccaaaatggatgaatgccagaaatacgcagagcagtattctgcaaccgtcaaagactatgagttgcagactatgacatatcgggcaatggtggacagccaacagaaatctcccgtcaaacggagacgcatgcaaagttctgcagatttgattatccaggagtttatggatctacggacgagatataccgccctggtgaccttgatgacgcagtacataaaatttgccggtgacagcctgaagagattagaagaggaggaaaagagcctggaagaagagaaaaaagaacacgtggagaaagccaaggagctgcaaaagtgggtctccaacatctccaaaacactcaaagacgctgaaaaggcgggtaagccccctttttctaagcagaagatctcgtcagaggagatcagcactaaaaaggagcagctttcagaagctttgcaaacaattcagttgttcctcgcaaaacacggagataaaatgaccgatgaagagcggaatgagctcgaaaagcaggttaaaaccctccaggagagctacaatctgctgttctctgagtcacttaagcaactccaagaaagtcagacatctggagatgtcaaagtggaggaaaaaattgtggctgagaggcaacaggaatacaaggagaagctgcaagggatttgcgatttgctcactcaaacagagaacaggctcatcggacatcaggaggcctttatgattggggatggaacagtggagctgaaaaagtatcagagcaaacaagaggagctacagaaagatatgcagggctccgcccaggctctggccgaggtcgtgaaaaatactgaaaatttcctgaaagaaaatggcgaaaagctgagccaggaagacaaggcgctgatcgaacagaagttgaacgaagccaaaatcaaatgtgagcaactcaacctgaaggccgaacagtctaaaaaggaactggacaaggtcgtaaccaccgctatcaaggaggagaccgaaaaggtggctgccgtgaagcagttggaggagtctaagaccaagattgaaaatctgttggattggctgtctaatgtagacaaggactccgagagggcgggtacaaaacataagcaagttattgagcaaaatggtactcactttcaggaaggggatggtaaatcggctataggagaggaggacgaagttaacggaaatctgcttgaaaccgatgtagacggacaagtggggactacacaggagaatctgaatcagcagtaccagaaagtcaaagcccagcacgagaagattatcagccaacatcaggctgtgatcattgccactcaatcggcccaagtcctactagaaaaacagggccagtatttgtcaccagaggagaaagagaagctacagaagaatatgaaagagctaaaggtacattacgagaccgctttagctgagtcagagaaaaagatgaaattaacgcattcattgcaggaggaactagaaaagttcgacgccgattatacagaattcgaacactggctccagcagagcgaacaggagcttgagaatctggaggccggagccgacgatataaatggcttgatgactaagctaaagcgtcagaagagcttcagcgaagacgtgatctcacacaagggcgaccttcgttacattaccatctcggggaaccgcgtcctcgaagccgctaagtcctgctcaaagcgggacggcggaaaagttgatacctccgcgacccatcgtgaggttcaaagaaaactggaccatgctacagataggttccggagcctgtactccaagtgcaacgtgctgggtaataacttgaaagacctggtggacaagtaccaacactacgaggatgcatcttgcgggctactggcaggccttcaagcttgtgaagccaccgcatccaagcacctgagcgaacccatagccgtggacccgaagaatcttcagcgccagttggaagagactaaagctctgcagggccagatttcatcacagcaagtggcggtcgagaagcttaagaagacagctgaagtgctcttagacgccagggggagccttcttccagcaaaaaacgacatccagaaaacgctggatgatatcgtaggcaggtatgaggacctgagcaagagtgtgaacgagagaaacgaaaagctgcagatcactctgacccggagtctgagcgtccaggacggacttgacgagatgcttgattggatggggaatgtggaatcttccctgaaagagcagggccaggtgcccttaaattccaccgcgctgcaggatatcatcagtaaaaacattatgcttgagcaggatatcgcgggaagacagagcagcattaacgctatgaatgaaaaggtgaagaagttcatggagaccacagatccatccacagcttccagcctgcaggctaagatgaaagacctctcagcaaggttctcggaggctagccataagcataaggagaccctcgccaagatggaagaattaaaaaccaaagtggagctgttcgagaatttgtctgagaaactgcagacttttctggaaacaaaaacacaggcactcaccgaagtcgacgtgcccggtaaggacgtcacagagctgagtcagtatatgcaggagagtacaagtgaattcctggaacataagaaacatcttgaggttctccattcactccttaaagaaatcagctcacatggcctcccgtccgataaggctctggtgctggagaagacgaacaatctgtccaaaaaattcaaggaaatggaggatacaatcaaggaaaagaaagaagctgtcacgagttgccaggaacagctcgacgcgtttcaagtgctcgtaaaatccctcaagtcctggattaaggaaacgaccaagaaagtgcctatagtgcaacctagcttcggggctgaggaccttggaaaatccctggaagatactaagaaactacaggagaagtggagcctgaagactccagagatccaaaaggtaaacaactccggtatatccttgtgtaatctaatttccgccgttaccacaccagccaaagctatcgctgccgtcaaatccggcggagctgtcctgaatggcgaagggaccgccaccaataccgaagagttctgggctaacaaagggctaacctcaatcaagaaagacatgacagacatttcccatggctacgaggacctgggtctgttgctgaaggataagatcgctgaacttaatactaaattatccaagttgcagaaagcccaagaggagagctcagccatgatgcaatggcttcagaagatgaacaagactgccacaaagtggcaacaaactcccgctccaaccgatactgaggcagtaaagacccaagtggagcaaaacaaatccttcgaagcagaactgaagcaaaatgtcaataaggtgcaggaactgaaagacaagcttacggagctcctggaggagaacccggatacgccggaagccccaaggtggaaacagatgctgactgaaatcgactctaaatggcaggagctcaaccagctcactattgaccgccagcagaagcttgaggaatcttccaataacctgacccagtttcaaacagtggaagcccagctgaaacagtggttggtagagaaagagctaatggtctcagtgcttgggcctttaagtattgatccaaatatgctcaacacccagcgtcagcaagttcagattcttcttcaggaattcgccacaaggaaaccacagtacgagcagttaactgccgctggacaaggtatcctctctcgcccaggcgaagatccatctttacggggaatcgtcaaggagcagctggctgctgtgactcagaagtgggacagtctgactggacagctgagcgacagatgtgactggattgatcaggccattgtgaaaagcacacagtatcaatccctgttgagatctttatcagacaaactgtctgatctggataataagctgtcgtccagtttggcagtaagcacccatcccgacgcgatgaaccagcagctggagacggcccaaaaaatgaagcaagagatacagcaggagaaaaaacagatcaaggtagctcaggctctgtgcgaggatttatccgcactggtcaaggaggaatatttgaaagcagagctgtcacggcagctagaggggattttgaaatccttcaaagacgtcgaacaaaaggccgaaaaccacgtacagcatcttcagagcgcgtgcgcaagctcccatcagttccagcagatgtcccgtgatttccaggcttggttggatacaaaaaaggaagagcagaacaagagtcatcccattagcgctaagctggatgtgctcgagtctttgataaaagaccacaaggactttagcaaaaccctcacagcgcaaagccatatgtatgagaagaccatcgccgagggcgaaaatttgctcctgaagactcaaggctctgagaaggccgctctgcagctccagctgaataccatcaaaacaaactgggatacctttaataagcaagtgaaggagcgggaaaacaagcttaaagagagcttggaaaaggcactgaaatacaaggagcaggtggagacactctggccttggatagataaatgccaaaacaatttagaagagataaagttttgtttggatccagctgagggcgaaaactccatagccaaactgaaatccctacagaaggaaatggaccaacattttggcatggttgaacttttaaacaatactgccaacagtcttctatctgtgtgtgagatcgataaggaagtggtcaccgatgaaaacaaatctcttattcaaaaagtagatatggtcacggaacagctacattcaaaaaagttttgtttagagaatatgacgcagaaatttaaggaatttcaggaggtgtccaaggagagcaagcggcagctgcagtgtgctaaggaacagctcgacatccatgactcattgggtagtcaggcttactccaataaatacctaacgatgctgcagacccagcaaaaatccctgcaggcactgaaacaccaagtggacctcgctaagagactagcccaagacctagtagttgaagcaagtgatagcaagggtacaagtgacgtactgcttcaggtggaaaccatcgcacaggaacactcaacactgtcccagcaagtggatgaaaagtgctccttcctggaaaccaaattgcaaggcatcggacattttcagaacacaatacgggagatgtttagccaattcgctgagttcgacgacgaactagatagtatggcacctgttggcagggacgcagagacactccagaagcagaaggaaacaattaaagcctttcttaagaaactagaggcccttatggcaagcaatgataatgcaaacaagacgtgcaagatgatgctggccaccgaggaaaccagccccgacctggtcggaatcaaacgcgatcttgaggcactctctaagcaatgtaacaaacttctcgaccgcgctcaggccagggaagagcaagtggagggtaccattaagcgccttgaggaattctactccaagctcaaggaatttagtatacttctccagaaagcagaggagcacgaagagtcccagggtcctgtgggaatggagactgaaacgatcaaccagcaactgaacatgttcaaagttttccagaaagaggaaattgaacctttacaggggaaacagcaggatgtcaactggctgggacaaggcctaatacagagtgcagccaagagcacctcaacacagggacttgagcatgacctggatgatgtcaatgcgcgttggaagacactgaacaagaaggtagcacaacgcgcagcacagctgcaggaggctctgctccattgcgggaggtttcaggacgccctggaaagccttctctcctggatggtcgacaccgaggaactggttgccaatcagaaaccaccttcagcagaatttaaggtggtgaaggcacaaattcaggagcagaaacttttgcagaggctgctggatgataggaaatcaaccgtggaggtgatcaaacgagagggagaaaaaatcgccacaacagctgaacctgctgataaggtgaaaatcctcaaacagttgtccctgctggattcgagatgggaggctttgcttaataaggcggagacaaggaaccgccagttagaggggatctctgtggtggcccaacagtttcacgaaaccctagaacctcttaatgagtggctgacaaccatcgaaaagcgattggtgaattgtgagcccatcggcacacaggcttccaagctcgaggaacagatagcccagcataaggcactggaagatgatattattaaccataataaacacctgcatcaggcagttagcataggccaaagtttaaaggtcctatcctcaagagaggacaaagatatggtccagtcgaagctcgacttcagtcaagtgtggtatatagaaatccaggaaaagagccactctagatcagagttgcttcagcaggcgttatgcaatgccaagatctttggcgaggacgaggtagagctcatgaattggctgaatgaggtgcatgacaagctttcgaagttgtcagttcaggactacagtaccgaaggactgtggaagcagcaatcggaactcagggttctccaggaagacattctgctgagaaaacagaacgtggatcaggcgcttctcaatgggctggagctgctgaaacagactactggagatgaggtactgatcattcaggataagttagaagctatcaaggccaggtacaaagacatcacaaagctttccactgacgtggcaaaaacccttgaacaggcattacagctggctcgcaggctgcactctacccacgaagaactgtgcacatggctggacaaggtcgaggtggagcttttgtcttatgagacccaggtattgaaaggggaggaggccagccaggcacagatgaggcccaaggagctgaaaaaggaggctaagaacaataaggcgcttctggactctctgaatgaggtctcctcagcattactcgagcttgttccctggagggccagggagggtctggaaaagatggttgccgaagacaacgagagatataggctagtctcggacaccatcacacagaaggtcgaggagatcgacgcagcaattctccgatcacagcagtttgaccaagctgcagatgctgagctgagctggatcaccgaaacagagaaaaaactgatgagtttgggagacatcagactggaacaggaccagacctccgcccagctccaggtgcagaagacatttaccatggaaatattacggcataaagatattatcgacgatctcgtgaagtctggacacaagatcatgaccgcctgcagcgaggaggagaagcagtcaatgaagaaaaagctggataaagtcctaaagaattatgacactatctgtcagataaactcggagcgctatctccagcttgagcgcgctcaatctttggtgaaccaattttgggagacctacgaagagctttggccctggctcactgagacacagagcataattagtcagctgccagctcccgctttggagtatgagactctgaggcagcaacaggaggaacatcggcagctcagggagttgatagctgaacataagccacacatcgacaaaatgaacaagaccggaccccagttgctcgagctgagtccgggagaaggatttagcattcaggagaagtatgtcgccgcagacaccttatatagtcagatcaaagaggatgtgaaaaagcgggcagttgcgctggacgaggctatttctcagagcacacagttccacgataaaatcgatcagatcctcgaatcactggaacggatcgttgagcgtctgcgccagcccccaagcatttccgctgaggtggagaaaatcaaggagcagattagcgaaaataagaatgtatccgtggacatggaaaaactacagccactctacgagacactgaaacagcgaggcgaggagatgattgcacgcagcggaggaaccgataaggacatcagcgccaaggccgtccaggacaaactagatcagatggttttcatctgggaaaatatacacacactggtggaggaaagggaagctaaacttctagacgttatggaacttgcagagaaattttggtgtgaccatatgagcttgatcgttacaattaaagatacccaagactttatacgtgacttggaagatccaggcatagacccctccgtggtgaaacagcagcaagaagcagccgaaaccattcgggaggaaatcgatgggctacaggaagagctagacattgtgatcaacttgggatctgaattgattgcggcatgtggcgagcccgataagccaatagtaaagaagtctatcgacgagctgaattctgcatgggactccctcaataaagcgtggaaagatcgtatcgacaagctggaagaggcgatgcaggccgcagtgcagtaccaagacggactgcaggccgtcttcgactgggttgacatcgctggtggaaaacttgcctcaatgagccctatcggcaccgatcttgaaacagtcaagcagcagattgaagagttgaaacagtttaagtctgaggcatatcagcagcagatcgaaatggagagactaaaccaccaggccgagttactccttaaaaaagtcaccgaggaaagtgacaaacacaccgtgcaggatccactgatggagttgaagctgatttgggacagcctcgaagagcgcataattaataggcagcacaagctggagggagctctgctcgctctggggcagttccagcatgccctggatgagctgctagcatggttgacgcacactgagggactcctgtctgaacagaaaccagtcgggggtgatccaaaggctatcgagattgagttggccaagcatcatgtcctgcagaacgatgtgctggcccatcagagcacagtcgaagccgtgaataaggccggaaacgatctgattgaatcttctgccggagaggaggcaagtaatttgcagaacaagctggaggtcctcaatcagcgatggcagaatgtgctcgaaaagacagagcagcggaagcaacagcttgatggagccctgagacaggctaagggttttcacggagagatcgaggacctacagcagtggctgacggacactgagcggcatttgttggcgagcaagcccctgggtgggctgcctgagacagcaaaggagcaactgaacgttcatatggaggtgtgcgctgcttttgaagcaaaagaagaaacctataagagcctgatgcagaaagggcagcagatgctggctcgatgcccaaaatccgccgagaccaacattgatcaagatataaataacctgaaagagaagtgggagtcagtcgagacaaagctcaatgaaaggaagacgaaactcgaagaggctctgaaccttgccatggagtttcataacagcctccaggattttatcaattggctgactcaggcagaacagaccctgaacgtggcctccaggccgtctctcatccttgataccgttctgttccagattgacgagcacaaagtgtttgctaacgaagtcaacagccacagggaacaaatcattgaacttgacaaaactggcacccatctgaagtacttcagccagaaacaggatgtcgtcctgatcaaaaatctgctgatcagcgtccagagtaggtgggagaaagtagtgcagcgattggttgagcgtgggcgttccctggatgatgcgaggaaaagggctaagcagtttcacgaggcttggagtaagctcatggagtggttggaggagtcggagaagtctctggactccgaactcgaaatcgccaatgacccagacaaaattaagacccagctggcccagcataaggagtttcagaagtctctgggtgccaagcattcagtgtacgacactaccaaccggacgggaaggtccttgaaagaaaagacatcactagccgatgacaacctcaagcttgatgacatgttgtcggaacttcgagataagtgggacacgatctgtggtaaatccgtcgagcgccagaataaactggaggaggcgttgttattcagcggccagtttacagatgcactgcaggctctcattgactggctgtatcgggtggagccacaattagctgaagatcagccggtgcatggtgatatagatctggtgatgaatttaattgacaaccataaagccttccaaaaggaactgggtaagaggaccagcagcgttcaagctttaaaaaggtctgcgagggaactgattgagggttctcgggacgacagtagctgggttaaggtgcagatgcaggagttgagcaccaggtgggagacagtgtgcgccttgtcgatctccaaacagacccgcctcgaagcagctcttcgccaggccgaagagttccacagtgttgtccatgcgctgctggagtggctggcagaggccgaacagacgctgcgcttccacggcgtcctcccagacgatgaagatgccctaagaacccttattgaccaacataaggagttcatgaagaaactggaggagaaacgtgcggaactgaataaggcaactaccatgggagacaccgtgctggccatctgccatccagattctatcactaccatcaagcattggattactatcatcagggcccgattcgaagaagtactggcttgggcaaaacagcatcagcaacgtcttgccagcgccctggccggactaatcgccaaacaagagcttcttgaagccctgctggcttggttacagtgggcagaaaccacgctgaccgacaaagataaggaggtgatcccacaggagatcgaagaggtcaaggctttgatagctgagcaccagaccttcatggaggagatgacacgcaaacagcccgatgttgataaggtcacgaaaacgtacaagcggagagctgctgatcccagtagcctccagtcacacatccccgtactggacaagggcagagccggtaggaaacgattccccgcttccagtttgtatccctcaggatcccagactcagatcgagaccaaaaatccacgagtgaatttgttgcttcgtgagtttgccaactttgacttcgatatctggcggaagaaatatatgcgttggatgaatcataagaaaagcagggtgatggacttcttccggagaatcgacaaagaccaagacggcaaaatcacaagacaagagttcatcgatggcatcctgagcagcaaatttccgacttctcgcctggagatgagcgctgtcgccgacattttcgatcgtgacggcgatggttatatcgactattacgagttcgtggctgctctccaccctaacaaggatgcatacaagcccatcaccgatgcggataaaatcgaagacgaagtgacccggcaggttgccaagtgcaagtgcgctaaacgattccaggttgagcagatcggcgacaataagtaccgggtatcctttcaaagcaactttggcgattcccaacagctgcgtcttgtacgcatcctgcggtcgacggtaatggtgcgcgtggggggaggctggatggccctcgacgagttcctagttaaaaacgatccctgtcgggtgcatcatcatggctctaaaatgctgcgttctgagtcaaattcctccattactaccactcaacccaccattgctaaagggagaacaaatatggagctgagggaaaaattcatcttggcggatggtgcctcgcagggaatggcggcattcaggcccagagggagacgcagcagaccctcctctaggggcgctagcccgaatagaagcacctccgtgtcaagccaggctgcccaggctgctagcccacaagtccccgctacaaccactcctaaaggaacccctattcagggctccaagcttcgcctgccgggttacctctcagggaagggctttcatagtggtgaagatagcggtctgataacaactgcagcagcccgtgtgagaactcaatttgccgattcaaaaaagactccctctcggccaggatcgcgggctggtagcaaggcaggtagccgcgcaagtagcaggaggggttctgatgcatctgattttgatatcagtgaaatacagtccgtctgttcagatgttgagacggtccctcagacacacaggccaacacccagggctggcagcagacctagcacagccaagccaagcaaaataccgactccacagcggaagtctcctgcatccaagctggacaagagcagcaaaagatac

SEQ ID NO: 221514 - DNA, 9182 bp, synthetic construct
  misc_feature 1..9182: note = Description of Artificial Sequence: Synthetic coding sequence
  source 1..9182: mol_type = other DNA
atgcactcctcatcttattcttatcggtcatctgattcggtcttctctaacaccactagcactagaacgagcctggactctaatgagaacctcttactggtgcactgcggaccaaccctgatcaattcctgtatcagctttggctccgaatcctttgatggccacagactggagatgctgcagcagatagccaatcgcgtccaaagagattctgtaatctgcgaggacaaattaatcctcgctggcaatgctcttcagtcagacagtaagcgcttggagagcggagtccagttccagaatgaggccgagattgctggatatatcctggagtgtgaaaacctgttgcggcagcacgtgatcgacgtccaaatcctcatcgatggaaagtactatcaggccgatcaactggtccagcgagtcgctaagctccgtgacgagatcatggcacttcgaaacgagtgttcaagcgtctactctaaagggcgtatattgactacggaacagacgaaactgatgatttctggcataacccaatccctcaattccgggttcgcccagacactccacccgagtctgaccagtgggcttacccaaagcctgacccccagcctgaccagctcatctatgacatcaggactgtcctccggaatgacaagtcgccttaccccgtctgtgacccctgcttacactcctggcttcccctccggactagtccctaacttttcctctggcgtggagccaaattccctgcaaaccctgaagctaatgcaaatcagaaagccactgctgaagagtagtttactggatcagaatctgacagaggaggagatcaatatgaaatttgtgcaagatctcctcaattgggtcgacgaaatgcaggtgcagctggacaggaccgaatgggggtcagatctgccctcggtcgaaagccaccttgaaaatcataagaatgtgcatcgtgcgattgaagagttcgaaagtagcctgaaagaagccaagatctcagagattcagatgaccgcacccctgaaacttacctacgccgagaaattgcataggttggaatcccagtacgctaagctgttgaacacatcgcggaatcaggagcggcatctggataccctgcacaactttgtctccagagctaccaacgagctgatctggttgaacgaaaaagaggaagaggaagtcgcttacgactggtcagagcggaatacaaatattgctcgtaagaaagactatcacgccgaattaatgagagagctggaccaaaaagaggagaacatcaaatcggttcaggagatcgcggaacaattgctgctagaaaaccaccccgctagactgacgatagaagcgtacagagctgctatgcaaacccagtggagctggatcctgcagttgtgccagtgcgtggaacaacatatcaaggagaacaccgcatatttcgagttttttaatgatgcaaaggaggctaccgattatcttcggaacctgaaggatgcgatacagcgaaaatactcttgtgatcgcagctcctcaatccataagcttgaggatctggtgcaagagagcatggaagagaaggaggagctcctccaatacaagagcacaatagctaacctaatgggcaaagcaaaaacgatcatccagctgaagccacgtaactctgattgcccactgaaaaccagcatccccatcaaggcgatctgtgactacaggcaaatcgagataactatctataaggatgatgagtgcgtcctggctaacaactctcatagggccaaatggaaggtgatttctcctacagggaacgaagcaatggtgccgtcagtatgtttcaccgttcccccacccaacaaggaggcggtcgatctggctaatcgcatagagcagcagtatcagaatgtgttaactttatggcacgagtcccacattaatatgaagtcagtggtaagttggcactatctgattaatgagatcgatcggatccgtgcttctaacgttgcgtccataaagacaatgttgccaggggaacaccaacaggtgttgtcaaatctgcagagtagatttgaggactttctcgaggactctcaggagtcccaggttttcagcggtagtgacataactcaattggagaaggaagtcaatgtgtgcaaacagtactatcaggagctcctgaagtcagccgaaagagaagaacaagaagagtccgtgtacaacctttatatatccgaggtccgcaacatccggcttagactggaaaattgtgaggaccggctgatcaggcagattcgaacccctttggagcgagatgacctacacgaatccgtattccgcatcacggagcaggagaagcttaaaaaagagctggagagactgaaagatgatctcgggacgattacaaataaatgcgaggaatttttttcacaggcggctgccagttcctccgtaccgaccctgaggagtgagttaaatgttgttttgcaaaacatgaaccaggtgtactcaatgagcagtacttatattgataagctgaagaccgtgaatcttgtacttaagaacacccaggcggctgaggcgctggtgaagctctatgaaaccaaactctgtgaggaggaagctgtcatcgccgataaaaacaatatcgagaatctgatctcaactctgaagcaatggcgttcagaggtggatgagaagagacaggtgtttcacgcactggaggacgagcttcaaaaagcgaaggccatttcggatgagatgttcaagacatacaaagaaagggacctcgattttgactggcacaaggagaaggccgaccagctggtagagcgttggcagaatgtacatgttcagatcgataatcggttaagggatctggagggtattggaaagtcacttaagtattatagagacacataccaccccttggacgactggattcagcaggtcgaaaccactcaacggaaaattcaggagaaccagccagagaactcaaaaacacttgcaacacagctcaaccagcaaaagatgctggtcagcgagattgaaatgaagcagtctaagatggacgagtgtcagaaatacgcagagcagtactctgccaccgtgaaggattacgaactacagactatgacttacagggcgatggtggactctcagcagaagagcccggtcaaaagaagaaggatgcagagctccgccgacctgatcatccaggagttcatggatcttcgaacccgttatactgctctggtgactctcatgactcagtatatcaagttcgcaggcgattctctcaagaggctggaggaggaagaaaaaagcctggaagaggaaaagaaggaacacgtggagaaggcaaaggaactccagaaatgggtgtctaatataagtaagacactgaaagatgccgagaaggcaggcaaaccacccttcagcaagcagaagatcagcagcgaagaaatttccactaaaaaagaacagctaagcgaagccttacagactatacaactcttccttgctaagcacggcgacaaaatgacggatgaagagcgtaatgagctggagaaacaagtgaaaacactccaggagagttacaacctgctgttctccgagtcccttaaacagttacaagaatcccagaccagcggagatgtgaaggtggaagagaagctggataaagttatcgccggaactatcgaccagacgacaggggaagtgctcagcgtctttcaggccgtgttgagggggcttatcgattatgatactgggatcaggctactcgagacacaactcatgatcagtggactgatctcccctgaactgaggaaatgtttcgatctgaaggacgccaagagtcatgggttgattgatgagcagatcctgtgtcagttgaaagaacttagcaaggctaaagaaatcatctcagcggcatcacctactacaatccccgttctggacgcactggcacagagcatgatcactgagtccatggctatcaaggtcttagagattctcctgagcacggggtctctagtgattcccgcaacgggtgagcagctaactctacagaaggccttccagcaaaatctggtatcatccgctctcttctcgaaagttctggaaaggcagaatatgtgcaaggatctgattgacccatgcaccagcgaaaaagtgtctttgatagacatggtgcagcgttcaaccctccaggagaacacgggcatgtggttactgcccgttcgcccacaggaagggggacgaatcacgttgaagtgcggcaggaacatcagcatcctgcgcgctgcgcatgagggactcattgatcgagagaccatgtttcggctgttaagcgctcagcttttgagcggcggtctgataaactccaattctggccagcgcatgaccgtggaggaggcagtcagggagggagtaatcgaccgcgataccgccagttccatactgacctatcaggttcagaccggagggataattcagagcaatcccgcaaagaggttaactgtcgacgaggccgtacagtgcgacctgattactagttccagtgccctgttggttctggaggctcagaggggttacgttggactgatatggccccactcgggagaaatctttccaactagcagcagtttacagcaggaacttatcacaaacgagttggcatacaagatcctgaatggaaggcagaaaattgccgcactctatattcccgagagttctcaagtaatcggactggatgccgctaagcaactcggaatcatagacaataacaccgcctcaatactgaagaacattaccctgccggataaaatgcccgatctcggcgacctggaagcctgtaaaaacgctcgtcgatggctgtccttctgcaaattccagccatccaccgtacatgattacagacaggaggaggacgtgtttgatggggaggagcccgttacgacacagacatccgaggagaccaaaaaacttttcttaagttacctgatgattaatagctacatggacgcgaatacaggacagagactgttgctgtatgatggtgatcttgacgaggcagtcggcatgctattggagggttgtcacgccgagtttgatggcaacaccgccatcaaggagtgtctggatgtactttcttcatcaggggtgtttctgaataatgcaagcggacgggaaaaggacgagtgtacagccactccctcgtcctttaacaagtgtcattgcggagagcccgaacatgaagaaacccctgagaatcgcaagtgcgccatcgatgaggaatttaatgagatgaggaacacagttatcaacagtgaatttagccagtctggcaagctggcgagtactatatctatcgatccaaaggttaacagcagcccctcggtatgtgtaccttctctgattagctatctgacacaaaccgaacttgctgatatctctatgctgaggtcagactccgagaatatcttgacgaactacgaaaaccagagtagagtcgaaaccaacgagcgcgcaaatgagtgctcgcattctaagaatatccagaacttcccctccgacttaatagagaaccctataatgaagtctaagatgagcaagttctgtggggtaaatgagaccgaaaacgaagacaacacaaatagagactcacctatctttgattatagcccccgtctctctgccctgctatcacatgacaaactcatgcatagtcagggctcgttcaacgatacacatacacctgagagcaacgggaacaaatgtgaagctccagccctttcattctctgacaagacgatgctgtccggtcagcgaatcggagagaaatttcaagatcagtttttgggaatcgctgcgataaatatttccctgccaggcgagcaatacggtcaaaagtccttgaacatgattagttccaacccacaggtgcagtaccataatgacaaatatatttctaatacttccggggaagatgagaaaacccacccaggatttcagcagatgcccgaggacaaggaggacgaatctgagattgaagagtattcttgcgccgttactcctggcggagacactgataacgccatagtgagcctgacatgtgcaacaccgcttttagacgaaaccatctctgcaagtgactatgaaacttcattactaaatgaccagcagaataacaccggcacagataccgacagcgatgatgacttctatgatactccactttttgaagatgatgatcatgacagcctcttgttggatggggatgaccgggattgtctccatcccgaggactacgacacattgcaggaggagaatgatgagactgcaagccctgcagatgtgttttacgatgtcagcaaggaaaatgagaacagcatggtcccccagggcgcaccggttgggtccctttctgtgaagaataaagcccactgtcttcaggattttctgatggatgtggaaaaggatgagctggattctggggagaagattcacctgaacccagtgggcagcgataaggtgaacggtcagagtctggaaactggatcagaaagagaatgcacaaacatcctcgaaggtgacgagagtgattccctcaccgattacgacatagtcggcggaaaggagagctttaccgcctctttaaagtttgacgacagtggaagttggaggggcagaaaagaggagtatgtaaccggacaagaatttcattcggacacagaccatctggactcaatgcagtcagaagaatcatatggggactacatctacgattccaacgaccaggacgatgatgacgatgatggtatcgatgaggaaggaggcggaatacgtgatgaaaacgggaagcctcggtgtcagaacgtggccgaggatatggacatccaactgtgcgcatccattctgaatgaaaattccgacgagaacgagaacatcaacacgatgattcttctggacaaaatgcatagctgttctagccttgaaaagcaacagcgcgttaacgtcgtccaactggcttccccaagtgagaacaacctggtgacagaaaagagcaatctccctgaatataccacagaaattgccggaaaaagtaaggagaatctgctgaatcatgaaatggtcctgaaggatgttcttcctccaataattaaggataccgagtcggagaagaccttcggacctgccagtatcagccatgacaacaacaatataagctctacttctgagctgggaaccgacctcgccaatacaaaagtaaaattgattcagggatcagaactgccagaactgaccgatagtgttaaaggcaaagacgaatatttcaagaacatgacacctaaggtcgactcatctctggaccacatcatctgcaccgaacccgatctcatcggaaagccggctgaagagtcgcaccttagcctgattgcatccgtgacagacaaggatccgcagggtaacggttcagacctgattaaaggccgtgacggcaaatctgatatcctgatcgaggatgagacatccatccagaagatgtatcttggggagggagaagtattagtggaaggcttggttgaagaggaaaatcggcacctgaagctcctgcctggaaagaatacacgcgatagcttcaagttaattaactctcaattcccatttccacagatcacgaataatgaggagctcaaccagaagggtagcttaaaaaaggccactgtcacgttaaaggacgagccaaacaatctacaaattattgtgagcaaatcccctgtgcagtttgagaacctggaggagattttcgacactagcgtgtcaaaggagattagcgatgatattactagcgacatcaccagttgggaaggtaatacccattttgaagagtcttttactgatggccctgagaaagaactggacctgttcacctaccttaaacactgtgcaaagaacatcaaagctaaggatgtcgcaaaacctaacgaagatgtgccgtcccatgtgctaattacagctccccctatgaaggagcatctgcaattgggagtgaataataccaaggagaaatctacaagtactcagaaggattcccctttgaatgacatgatacaatccaacgatctgtgttcaaaggagtccatttcggggggtggaacggaaatatcccagtttacaccggaatccattgaagctactctgtccattctgtctcggaaacatgttgaagatgtcggcaagaatgactttctgcaaagcgagcggtgcgcgaacggcctcggcaatgacaacagctccaacaccctgaacaccgattattccttcctcgagatcaataacaagaaagagagaatcgaacagcagctgcccaaggagcaggctttgagcccaagatcccaagaaaaagaggtccagatacccgagttatcgcaggtttttgtggaagatgtgaaagatattctgaagtccaggctaaaagagggtcacatgaacccccaggaagtggaggagccgtccgcgtgcgcagatacaaaaattttgattcagaatctcattaaacggatcacaacatcacagcttgtgaatgaggcgtctacagtccccagcgactcccagatgagcgactcctccggtgtgtccccaatgaccaattctagcgagctgaagccagaatctagagacgatcccttctgtattggtaatttgaagagcgagctactgctcaacatcttgaagcaggaccagcacagccagaaaatcactggggtcttcgagctgatgagagagctcactcatatggagtatgacttagagaagcgcggtattacttccaaggtgctgcccctgcagttggaaaacatcttctacaaactgctggccgatgggtattctgaaaaaatcgagcacgtcggagatttcaatcaaaaggcgtgcagtacatcagagatgatggaggaaaaaccacacatcctgggggatataaaatccaaagaaggcaactactacagtcccaatctcgagactgttaaggagattggtctggaatccagtactgtttgggcaagcacactccccagagatgagaaactgaaggacttgtgtaacgattttccatcacatttagagtgcacaagtgggtccaaggagatggcctcaggggacagcagcacagaacagta

SEQ ID NO: 221515 - DNA, 21741 bp, synthetic construct
  misc_feature 1..21741: note = Description of Artificial Sequence: Synthetic coding sequence
  source 1..21741: mol_type = other DNA
atgcattcttcttcttactcttaccgcagttctgattccgtgttcagcaatacgaccagtacgcggacttcactggactctaacgaaaatctattgctggtgcactgcggccctactctgattaatagctgtatttcttttggttcagagtcattcgacggccacagactggagatgctccagcagatagccaatcgcgtccaacgcgatagtgtgatttgtgaagacaagctgattctagccggaaacgccttgcaatcagacagcaaaagactggagtccggcgtgcaattccagaatgaggcggagattgctgggtacatccttgagtgcgaaaacctgctccgacaacatgtaattgacgtgcagatcctaattgatggcaagtattatcaggccgaccaactagttcagagagtagctaagcttagggatgaaattatggctctgaggaatgagtgtagttccgtgtatagcaaaggcaggatactgaccacagagcagaccaaactcatgatctccggtattacccagagcctgaactctggatttgcccaaacacttcatccctccttaacgagcgggctcacccagtcactgactccatcactaacaagctcgtctatgacgtccggactgagtagcggtatgacttcaaggctgacgccttccgtcacccccgcttataccccgggattcccgagcggtctcgtgcctaactttagcagcggtgtcgaacctaacagtctccagactctaaaactgatgcaaatcaggaagccgctgctgaagtctagcctcctggaccagaacctaaccgaagaggagatcaacatgaaatttgttcaggacttgcttaattgggtagatgagatgcaggtgcagctggaccggacagagtgggggtcggatctgccctctgtggaatcccatctcgaaaaccataagaatgttcatcgtgctatcgaggaattcgagagttctcttaaagaggcaaagatatccgaaattcagatgaccgctccactaaaactgacatacgccgagaagctccaccgactggagtcacagtatgccaaactgctcaacacgagtagaaatcaggagaggcatctcgataccctgcataactttgtgagtagagcgacaaatgagctgatctggctgaacgagaaggaagaagaggaagttgcttatgactggtctgagaggaacacaaatatcgcccgaaaaaaagattaccatgctgagctgatgcgcgagttagatcagaaggaggaaaacattaaatcggtgcaggaaattgccgagcaactgctgttggaaaatcatccagcacgccttacaattgaagcctaccgggctgcgatgcagactcagtggagctggatattgcagctgtgtcagtgtgtggaacagcatatcaaggagaacacagcttatttcgagttcttcaatgatgcgaaggaagctaccgactacctacggaaccttaaggatgccatacagcgtaagtattcatgtgaccgaagcagcagtatccataaactcgaagacttggtgcaggagtctatggaagagaaggaagaactcttgcagtataaaagcaccatcgccaatctgatgggcaaggctaagactattatccaactgaaacctcggaacagtgattgccccctgaagaccagcattcctatcaaggcaatttgcgattatagacagattgagatcacaatttataaagatgacgagtgcgtcctggccaataatagccaccgagccaaatggaaagtgatctcccccactggcaatgaggctatggttccaagcgtctgttttaccgtgccaccacctaataaggaagcagtggacctggcgaaccgtattgaacagcagtaccagaacgtcttgaccttgtggcatgagagtcacattaacatgaagtccgtcgtgagctggcactacttgatcaatgaaatcgaccgaataagggcctctaacgtggctagtatcaagacgatgcttcctggtgagcaccaacaggtcttaagcaacctgcagtcaagattcgaagatttcttggaagacagtcaggagagtcaggtcttctcgggcagtgacatcacgcagttggagaaagaagtgaacgtgtgcaagcagtattaccaagagctgctcaagtccgccgagagggaggagcaggaggaatctgtctacaatctttacatttcggaggttcgaaacatacgactgagactcgaaaattgtgaagatagacttatcagacagattcgtacacctctcgaacgggacgacctgcatgaatccgtgttcagaataacagaacaagaaaagctcaagaaggaactggaacgattaaaagacgatcttggcacaataacaaacaaatgtgaagagttttttagtcaggccgctgctagcagttcagtccctacattacggtcagagctgaacgttgtcctccagaacatgaaccaggtgtatagtatgagttccacgtatatcgataagctgaagaccgtgaacttggttctgaagaacacacaggcggctgaggccctcgtaaaattatatgagaccaaactgtgtgaggaggaagctgttatagcagacaaaaacaatattgagaacttaatttcaacattgaagcagtggcgttcagaggtggacgagaagcgccaggtttttcatgccctcgaggacgagttgcagaaggctaaggccatctcggatgagatgtttaagacttacaaggagagagatctggacttcgattggcataaagaaaaggctgatcagcttgtggaaagatggcagaatgttcacgtacagatcgacaaccgtctgcgggatttagaggggattggaaaatctctgaaatattatcgagatacctatcatccattggatgattggatccaacaggtcgagactacccaacgcaagatccaggagaaccagcctgagaactctaaaactctcgctacgcagcttaatcagcaaaaaatgctggtatccgaaattgagatgaagcagagtaagatggatgaatgtcagaagtacgctgaacaatattccgcaaccgtaaaagactacgagcttcagacaatgacctatcgagcgatggttgattcacagcaaaaatctccggtgaaaaggcggagaatgcagtcttccgccgacctgataatccaggaattcatggacctgaggacaagatacacagctctcgtgacattgatgacacagtacatcaagttcgccggagactctctgaaacgtctggaggaagaggagaaatcattggaggaagagaaaaaggagcatgtggaaaaagctaaagagctgcaaaaatgggtgtccaatatctctaagacgctcaaggacgccgaaaaggctggaaaacctccctttagtaagcagaaaatctccagtgaggaaatttctacgaagaaggaacagctttccgaagccctgcaaactatccaactattcctcgccaaacatggggacaagatgaccgatgaggagagaaatgagctcgagaaacaggttaaaactctgcaggagtcctacaacctgttgttttcagaaagcctcaagcagctccaagagtcacaaactagcggtgatgtgaaagtggaggaaaagctggacaaggttatcgcaggcaccattgatcagaccacaggagaggtgctgagcgtctttcaggcagtgctgcggggactcatcgactatgacacaggcatccgacttttagagactcagctgatgatatcagggctgatttctcccgagcttagaaaatgctttgatttaaaagacgcaaagagtcatggcctgatcgacgagcagattctatgccaactcaaagagctctcaaaagcaaaagaaataatctctgccgcttctcccacgaccattccagtgttggatgccctggctcagtccatgattactgagagcatggctatcaaagtgctggagatacttcttagcaccggctcactggtgatcccggctacgggtgaacagttaaccttgcagaaagccttccagcaaaatctggtttcatctgcgctgttcagtaaggtgctagagcgccagaatatgtgtaaggaccttattgatccttgcacatctgaaaaggtcagcctaattgacatggtacagcgcagcaccttgcaggaaaacaccggcatgtggcttcttcccgtgaggccgcaggaagggggacgcataacgttgaagtgcggcagaaacataagtattttgcgagcggctcacgagggccttattgaccgtgaaacgatgtttcgtctgctctctgcccagctgctgtctggtggcctcatcaattcaaattcaggacagagaatgaccgtagaggaggctgtgcgtgagggagtgatagatagagataccgcctctagtatcctcacataccaggtccaaacaggaggcattatccagagcaacccagcgaagaggctaactgtcgacgaggcagttcaatgtgacctgattacaagctcctccgctttattggtgctcgaggcacagcgcggttatgtaggcctgatctggccacattctggtgagatctttccaacctcgtcctcattgcagcaggaattgataacgaacgagttggcttacaaaattctcaacggtcgccagaaaattgctgccctctatatcccggagagcagccaggtgattgggctagacgccgctaagcagctaggtattatcgataataatactgcgtcaattttgaaaaatatcaccttgcctgacaagatgccagatctcggggatcttgaggcctgcaaaaatgcccgtcggtggctgagtttctgtaaattccagcccagcactgtgcacgactaccgccaagaagaagacgtgtttgacggtgaggagccggttaccactcagacatccgaagaaacgaaaaagctgttcctgtcctacctcatgattaattcatacatggacgcaaacaccgggcaaaggctcttgctgtacgatggagacctggacgaagccgtgggcatgctccttgaaggctgccacgccgagttcgatggcaatactgctattaaggagtgtttagacgttctatcctcctcaggcgtgttccttaacaacgcctctggaagggagaaggatgagtgcacggccacaccttcaagttttaataagtgccattgtggtgaaccagagcatgaggagactcctgaaaaccgcaagtgtgcaatcgacgaggagtttaacgagatgcgaaatacagtgataaattccgaattttcccagtcagggaagctcgcaagcacgatttcaattgacccgaaggtcaacagtagcccttcagtgtgcgtccccagcctgatctcttatctgacccaaactgagctggcagatatctcaatgctcagatcagattcagagaatatcctcactaactacgagaatcagtcaagggtggagacaaatgaaagagcgaatgaatgctctcactccaagaatattcagaacttcccctctgatttgattgagaaccctatcatgaagagtaaaatgtctaaattttgtggagttaacgaaaccgagaacgaagataatactaatcgcgactcaccaatcttcgactactcaccgaggctgtctgctctgctgtcccatgacaagctgatgcactctcagggctcctttaatgacacgcacactccggaaagcaacggtaataagtgcgaagcccctgctttatcttttagtgacaaaactatgctcagtggacagcgcattggcgagaagtttcaagaccagttcttagggattgccgctatcaacatatccctccctggcgagcagtacggccagaaatctctcaacatgatcagttccaaccctcaagttcagtatcacaatgacaagtatatttccaatacttcgggggaggatgagaagacccaccctggtttccaacagatgccagaagacaaggaagacgagtcagaaatcgaagagtacagttgtgctgtcacacctggcggagatacggataatgctatagtcagcctaacctgtgccacccccctcctggacgaaactatctccgcgtcagactacgagacctccctccttaatgaccagcagaacaataccggaacagatactgactccgacgatgatttctatgatactcccctgtttgaggacgacgatcacgattccctgctcctggatggagatgatcgagactgtctgcacccagaagattacgacacactgcaagaagagaacgatgagacagcctctcctgctgacgtgttttatgatgtgtccaaggaaaacgagaactccatggtccctcaaggcgctcccgtagggtccctgtctgtcaagaacaaggcccactgtctgcaggacttcctgatggacgtggaaaaagacgagctggatagcggggaaaaaatccatctgaatccggtgggcagcgataaggtcaatggtcagagtctggagacgggatctgaacgagaatgcacaaacatactggaaggcgatgaaagcgacagtctgacggattacgatattgtgggtggaaaagagtcctttacggctagtctgaagttcgatgactccggcagttggcggggaaggaaggaagaatacgtaacaggccaagagttccactctgacaccgatcaccttgactccatgcaaagtgaagaaagctacggcgattatatttatgactcaaatgaccaggacgacgatgacgatgacgggatagatgaagagggagggggtattcgagatgagaatggaaagccccgatgccagaatgtggccgaggacatggacatacagctctgtgcatctatattgaacgaaaacagcgatgagaacgagaacatcaacaccatgatccttctggacaagatgcactcctgcagcagcctcgaaaaacagcagcgcgtgaatgtagtgcagctcgcctcacccagtgagaacaatctcgtgactgaaaagagcaatttgccagaatacacaacggaaattgctggtaaatcaaaggaaaatctgctgaaccacgaaatggtgctgaaagacgttctgccgcctatcattaaagacactgagtcagaaaaaaccttcggtccagcgagtattagccatgataataacaacattagttccacatctgaactgggcacagacctggccaacaccaaggtcaaattgattcaaggaagtgagctgccagaattaactgacagtgtcaaggggaaggacgaatactttaaaaacatgactccaaaagtggacagtagtttagatcacatcatttgcaccgaaccagatctaattggcaagcccgcagaggagagtcacctctcactcatcgcttccgtgactgacaaggatccccagggcaacggctctgacctgataaagggcagagacgggaagagtgacattctgatagaggacgaaacttcaatacagaaaatgtatctcggcgagggtgaggtgctggtcgaggggctcgtggaggaggagaatcgtcacctgaaacttttaccgggaaaaaatacccgggactcgttcaaacttatcaacagccagttccccttccctcaaatcaccaacaacgaggaactaaaccagaaagggtctctaaagaaggccacagtcacattaaaagacgagcctaataacctgcagattattgtatctaaatccccagtacaatttgagaacctggaggagatttttgatacatcagtaagcaaggagatctctgacgacatcacatcagacatcacttcttgggaggggaacacccactttgaggaatcattcacagatgggccagagaaggagctcgacttatttacatacctgaaacactgtgccaaaaatattaaggctaaggacgttgcgaagccaaatgaggacgtgccatctcatgtactgataacagctcctcctatgaaggagcatctccagcttggcgtgaacaataccaaggaaaagagtacaagtacacagaaagattcccctctgaatgacatgatccagtctaacgacctgtgttcaaaagagagcatctcaggaggtgggacagagatctctcaattcaccccagaatcaatcgaggccacgctatccatcctgagtcgcaaacacgtagaggatgtgggcaaaaatgatttcttacagagtgaaaggtgtgcgaacggtctcgggaacgacaattcgtctaacacattgaatacagactatagcttccttgaaattaataataaaaaggagcgcatcgaacagcagctcccaaaggagcaggccctgagtccgagaagccaggagaaagaggtccagatcccagagctgtcacaggtgtttgtggaggacgtcaaggatatcctaaaatctcggttaaaggagggacacatgaaccctcaggaggtggaggagcctagtgcttgtgcagatactaaaatcttgatccagaatcttataaaacgaatcaccacctctcagcttgtcaatgaagcctctacagtcccatcagattcccagatgtctgactcctcaggggtctctcccatgactaattcatccgagctcaagcctgagagccgggacgatcctttttgcattgggaacctcaagagcgagctgctgctgaatatcctgaaacaggatcaacatagccaaaaaattaccggggtgttcgagctgatgcgtgaattgacacacatggagtacgatctcgaaaagcgcggaatcacctccaaggtgctcccactccagctggagaacatattctataagctcttggcagatggttactctgaaaaaattgagcacgttggagacttcaaccagaaggcttgctccacctccgagatgatggaggaaaagccgcacattttgggcgatattaaatcaaaggaggggaattattatagccctaatctcgagacggttaaggaaatcgggctggagtcctctactgtctgggcttcaaccttacctagggatgaaaagttgaaagatctgtgtaatgactttccttcccaccttgaatgtacatccggctccaaggagatggccagcggtgactccagtactgaacagtttagctcagaattgcaacagtgccttcagcacaccgagaagatgcatgagtatctgactctgctccaagacatgaagccccctctggacaatcaggaatcgttagataacaatctggaggcactgaagaatcagctgagacaactggaaacctttgagctgggtctagcccctattgcggttatcctgaggaaagatatgaagctagctgaggagttcctgaaatccctgcccagtgactttccgcgagggcatgtggaagaattgagtatcagccatcagagcctgaagacagcttttagttccttatccaatgtttcctctgaacggaccaaacagataatgctggccatcgattctgaaatgtccaagctcgcagtgtctcacgaggagtttctccacaaactgaagtctttctcggattgggttagcgagaagtccaagtctgtgaaggacattgagattgtcaatgtccaagactccgagtatgtaaaaaagcggcttgagtttctcaaggcgaataacgtgctcaaggacctgggacataccaagatgcagcttgaaaccactgctttcgacgttcagtttttcatatcagagtatgcccaggatctgtcccccaaccagagcaagcaactgcttagattgctcaatacaactcagaagtgcttcttggatgtccaggagtcggtaaccactcaagtggaacgactcgagacccagctgcatctagaacaagacctggatgaccaaaagattgtggccgagaggcagcaagagtacaaggagaaactccaagggatctgcgatctcctaacccagactgaaaacagattaattggtcaccaagaggccttcatgatcggtgacggaactgttgagctcaaaaagtaccagtcaaagcaagaggaattacaaaaagacatgcagggcagtgcgcaggcacttgcagaggtggttaaaaatacagagaactttctgaaagagaacggggaaaagctttctcaggaggacaaggccctgatagagcaaaagctgaatgaggcgaagatcaaatgtgagcagctgaaccttaaagccgaacagagtaagaaagaattggataaggtcgtgacaaccgccatcaaagaggaaacagaaaaggtcgctgctgtgaagcagctggaagaaagcaagaccaagatcgaaaatcttttagactggttgtcaaatgtggataaggatagtgagcgggcaggtaccaagcataagcaggtcatcgagcagaatggtactcactttcaggagggtgacggtaaaagtgctattggagaagaggacgaggttaatggaaatctgctggagactgatgtagatggccaggtgggtactacacaggagaacctcaatcagcagtaccagaaggtgaaagcgcagcacgagaagatcattagccaacaccaagccgttattattgctactcagtccgcgcaggtcctgttagagaagcaagggcaatatctgagccccgaggaaaaggagaagctgcagaagaacatgaaggagttgaaagtccattacgagaccgcactggccgaaagcgaaaaaaagatgaagttaactcacagcctgcaggaggaactggaaaagtttgacgctgattataccgagttcgaacactggcttcagcagagtgaacaggagctcgagaacttggaggccggagcagatgacattaatggactcatgacaaagttaaagcgtcagaaaagcttctcggaggacgtgatttcccacaaaggcgatctgcggtatatcacgatatcgggtaatcgcgtcctcgaagccgctaaaagttgttccaagagagatggagggaaggtggatacatcagccacccacagagaggtgcagagaaagctggatcacgctactgaccgcttcaggtccctttattcaaaatgcaatgtcctcgggaataatctcaaagatttggtagacaagtatcagcattacgaggatgcaagttgtggactcctcgccggattacaggcctgcgaggccactgcttctaaacacctttccgaacctatagccgtggaccccaagaacctccagcgacagctcgaggagacaaaggccctgcagggacagatatcctctcaacaggtggccgtcgaaaagttgaagaagacggcagaggtcctgctggatgcccgaggatcattgctccccgcaaagaacgacattcagaaaacactcgacgacattgtggggcgatacgaagatctgagtaaaagtgtcaatgagagaaacgaaaaactacaaattacactcacgcgctctctgagcgtgcaggatggcctggacgagatgctggattggatgggcaatgttgagtcaagtctgaaggagcagggacaagtacctttgaatagcacggccctccaggatatcatctcgaagaacataatgctcgagcaggacattgcgggaagacaatcctccataaatgccatgaacgagaaggttaaaaagttcatggaaacaaccgaccccagtacagcaagctctctgcaggccaaaatgaaagatctttctgcacgtttctcggaggctagccataagcacaaggaaacgctggcaaaaatggaggaactgaaaacaaaagtggaactattcgagaatctgagcgaaaagctccagacgttcttagaaactaaaacgcaagcactgaccgaggtggacgtccccggtaaggacgtcaccgaactctcccagtacatgcaggagtcgacctctgaatttctggagcacaaaaaacatctcgaggttctccactctctgttaaaagagatctcatcacatggtcttccaagtgacaaagccctggtgttggaaaagaccaacaacctctccaaaaagttcaaagagatggaggacaccatcaaggaaaaaaaggaggctgttacgagctgccaagaacagctcgacgcatttcaagtgctcgtgaaaagcctcaagagctggatcaaggagaccactaaaaaggttcctattgtgcagccatcctttggggcagaggacctggggaaatcactggaggacactaaaaagttgcaagagaagtggagcctgaaaacaccagaaattcagaaggtaaacaactccggaatatccctctgtaacctaatctcagcggtgactacacctgcaaaagctattgcggcagtgaaatccggtggcgctgtgctaaatggcgagggcacggccaccaacactgaggaattctgggcaaacaaaggtctgacatccatcaagaaggatatgacagacatttctcatggatacgaggacttgggcctgcttttgaaagataaaatcgcagaactgaacactaaacttagcaaattgcagaaggcccaggaggaatctagcgccatgatgcagtggctgcaaaaaatgaacaagaccgccaccaaatggcagcaaacacccgctccaacggacaccgaggctgtcaagacgcaggtggaacagaataaatctttcgaggcagaacttaaacagaacgttaataaagtacaggagttgaaggacaagcttactgaattactggaagaaaacccagacacacctgaagcgccacgctggaaacagatgctgactgaaattgactctaaatggcaagaactcaaccagctgacgatcgaccgacagcagaaactggaggagagttccaataatcttacacagtttcagaccgtcgaagcccagttaaagcagtggctcgtggaaaaagaacttatggtaagtgtgctgggccctttaagcattgatcctaatatgctcaatacacagcgtcagcaggttcagatccttctccaggagttcgctacgaggaagccgcagtacgagcaattaactgcagccggtcagggcatactctctcgtccaggcgaggatccctcgctgcggggaatcgtgaaagagcaactggctgcggtcacccagaaatgggacagcctgaccggccagctctcagaccgatgcgattggatagaccaggcaatagtgaagagcacacaatatcagagcttactgcggagcctctccgacaagctcagtgacttggacaacaagctgagtagctcactagctgtgtccacacaccctgacgccatgaatcagcaactagagacagcacagaagatgaaacaggagatccagcaagaaaagaagcaaatcaaagtcgcacaggccctctgcgaagaccttagcgccctcgtaaaagaggaatacctcaaggcagagctgtctcgacaactggagggtattctaaagagctttaaggacgtcgagcagaaagctgaaaaccacgtccagcacctccagagtgcctgtgcatcttcacaccaatttcaacagatgtcccgggactttcaagcttggctggataccaagaaggaggagcagaacaaaagccaccccatcagtgccaagctggatgtcttagagagtctcattaaagatcataaagacttttcaaaaacactcactgcccagagccatatgtacgagaaaacaatagcggaaggagaaaatctgctgctgaagactcagggatcagaaaaggcagctctccagctgcagctcaatacaatcaaaaccaattgggacacatttaataagcaagtgaaagaacgggaaaacaaactcaaggagtcgctggagaaggctcttaagtacaaagaacaggtggagactctgtggccttggatagacaagtgtcagaacaatctggaggagattaaattctgtctggatcctgcggagggcgaaaatagtatcgccaaacttaaaagtctgcagaaggagatggatcaacactttgggatggtggaacttttgaataataccgccaactctctcctgagcgtctgtgagatcgataaggaagtggtcaccgacgagaacaagagtctgatccagaaggtggacatggtaaccgagcagttgcacagcaaaaagttctgtctggagaatatgacccagaaatttaaggagtttcaggaggtgtctaaggaatcaaaaagacagctgcagtgtgccaaggagcagcttgacatacacgacagcttgggcagccaggcctattctaacaaatacctcactatgctgcagacccaacagaaaagtctgcaagcactgaaacaccaggtggatctggccaaacgcttagctcaggacctggtcgtggaggcaagtgattccaaaggtacatccgacgtgcttctccaggtggaaacaattgcacaggagcactcgacattgtcccaacaggttgatgagaaatgtagttttctggagacaaagctccaggggatcgggcattttcaaaacacaatcagagagatgttttcccagttcgcagaattcgatgacgaacttgattctatggcacctgttggaagggatgcagaaacactgcaaaagcagaaagagaccatcaaagccttcttgaagaagctggaggcattaatggccagcaatgataatgctaataagacctgcaagatgatgcttgctaccgaggagactagccccgaccttgtaggcattaagcgtgatctggaagctttatcaaaacagtgcaataaattgctggacagagcccaggccagggaagagcaggtagagggcaccatcaagcggctcgaagagttttactcaaagttgaaggagttcagcatcctcttgcagaaggccgaggagcacgaagagtctcagggccctgtgggaatggaaactgagacaatcaaccagcagcttaacatgttcaaagtgtttcagaaagaagaaattgaacccctgcaggggaagcaacaggacgttaattggctgggccagggacttatccagtcagcagcaaagtctacatctacacagggtttggagcatgacctggacgacgtgaatgcacggtggaagactttgaacaagaaggtggcccaacgggcagctcagttacaggaggccctgctccactgtggtcggttccaagacgccctggaaagcctgctgagctggatggtcgacacagaagagctcgtggctaaccagaagcctcccagcgcggaatttaaggtggtcaaggctcagattcaggagcagaagttgctgcagcgcctgctagacgaccgaaagtccactgtggaagtcatcaagcgtgaaggcgagaaaattgctaccacagccgaacccgctgacaaagttaagatccttaaacaactgtctttgctggactcgcgttgggaggctctactaaataaagcagagacgagaaaccgccaactggagggcatatctgtggtggcacagcagttccacgaaactctggagccactcaacgaatggctgaccaccattgagaagcggcttgttaattgtgaacccattggaacccaggctagtaagctggaagagcaaatagcccaacacaaggcgctcgaagatgacatcattaatcacaacaagcatctgcaccaggcagtttcaatcggacagagtttaaaagtgctctctagcagggaggataaggatatggtacaatctaaattggatttcagtcaggtctggtatatcgaaattcaggagaagagtcactcaaggagcgaactcctccagcaggcgctctgcaacgctaagatcttcggagaagacgaagtggagttgatgaactggctgaatgaagtgcacgacaagctgtcaaaactgtccgtccaagattacagcacagagggcctgtggaaacagcagtccgagctgcgggttctgcaggaggatatccttctccggaagcaaaatgtagatcaggcactcttgaatgggctggagctcctcaagcagaccaccggggatgaggttctgatcattcaggataaactcgaagccataaaagcaaggtataaagatatcactaagctgtcgacggatgtcgccaaaactctggaacaggcattgcagctagcgagacgccttcattcaacccatgaggaactctgtacatggctcgacaaagtggaggttgaactgttaagctacgaaacccaggtactcaagggagaggaagcctctcaggcgcagatgcgacctaaggagctaaagaaagaagccaagaacaacaaagcccttctcgactctcttaatgaagtatccagcgccttgctggagcttgtcccgtggcgggctagagaggggctggaaaagatggtggctgaggacaatgagaggtacaggctggtgtcagacacaatcacacagaaggtggaggagatcgacgcagccatcctcaggtctcagcagttcgaccaggccgctgatgccgaactcagctggatcaccgagaccgagaagaaactcatgtcgctgggcgatatcagactggaacaagatcagacgtcagcgcaactccaggtccaaaaaacctttacaatggagatactgaggcacaaggacattattgacgacctggtcaaatccggccacaaaattatgacagcttgttcagaagaagaaaaacagtccatgaagaagaagctggataaggttctgaagaactatgacaccatctgccagataaactcagagaggtacttgcagctggaacgcgctcagagcctggtgaaccagttctgggaaacatacgaagaactgtggccctggttgacagagacccagagtatcataagccagctgcccgctccggctctcgagtacgagacactgcggcaacagcaggaggaacatcggcagctcagagaactcatagctgagcataagccacacatcgacaagatgaacaagacgggtccacagttgttggaactgtcacccggagagggcttcagtatacaggaaaaatacgttgctgccgacaccctttattcccagatcaaagaggatgttaaaaaacgcgcagtcgcacttgatgaagccatctcccaaagtacacaattccatgataagatcgaccagatcctggaaagtctggaaaggattgtggagcggctccgccagcctccctcaatttccgctgaggtggagaaaatcaaggagcagataagcgagaataaaaacgtgtctgttgacatggagaagcttcaacccttgtacgaaacattaaaacagcgcggtgaagagatgattgctagatctggagggacagataaagatatctccgccaaggcggttcaggacaaactagaccagatggtatttatctgggaaaacatccacaccctcgttgaagaacgggaggccaagctccttgatgtgatggagttagcggagaagttctggtgcgatcatatgagcttgattgtaacaatcaaggacacccaagacttcatcagagacctggaggaccctgggattgacccttccgtggtcaagcaacagcaggaagccgcagagaccatcagagaggaaatcgatgggctccaggaagagttagacatcgtaattaacctcggaagcgagctgatcgccgcttgcggagaacccgataaacctatcgttaagaagtctattgatgaattgaattcagcctgggattcactaaataaagcgtggaaagaccggattgacaaacttgaagaagcaatgcaagcagccgtgcagtaccaggatggccttcaggctgtgttcgactgggtagatattgctggtggaaaattagcgtccatgtcgcccatcggcaccgatctagagactgttaaacaacagattgaggaactgaagcaattcaagagcgaggcttaccagcagcagatcgagatggagcggctaaatcaccaggcggagcttctattgaagaaagtgacagaagaatctgacaaacacacagtgcaggaccccctgatggaattgaagctcatctgggattctctcgaagaaaggatcatcaatcgccaacataagcttgaaggcgctctcctggctctgggccagttccagcatgcattggatgaattactcgcctggctcactcatacggagggactgctgagtgagcagaaaccagtgggaggcgaccctaaggcaatcgaaatcgaactcgcaaagcaccatgttctgcagaatgacgtgctcgcccatcagagcacagtcgaggctgttaataaggccggtaacgatctcatcgagtcgtccgcgggagaggaggcgtccaatttgcagaataagctggaagtgctgaatcagcggtggcagaatgtactggagaagaccgaacaacggaagcagcagctggacggagccctgagacaggctaagggctttcacggcgagattgaggacctccagcagtggttgaccgacactgaaagacacttgctggcctccaagccactcggcggattgcccgagaccgctaaagagcaactgaacgtccatatggaagtgtgtgctgccttcgaggctaaagaagagacctacaaaagccttatgcagaaaggccaacaaatgctggcacggtgcccaaagagcgccgagactaatatcgatcaggacatcaacaatctgaaagagaagtgggagagtgtcgaaaccaagcttaatgagcggaagacgaagctggaggaagccttgaacttagccatggagttccataattcccttcaggatttcataaactggctgacccaagccgagcaaaccctgaatgtcgccagccgcccttccctgatactggacaccgtgttgtttcagattgatgaacacaaagtgttcgcaaatgaggtgaacagccatagggagcagatcattgagttggacaagacgggcactcacctgaagtacttttcccagaagcaggatgttgtccttattaagaatcttctgatatccgtgcagtcacgctgggagaaagtggtacagagactcgtagagcggggaaggtccctggacgacgcaagaaagcgagccaaacagtttcacgaggcatggtcgaaattgatggagtggctggaggagtccgaaaagtccctggattcagagctggaaatagcaaatgacccagataaaattaaaacccagctcgcccagcacaaggagtttcagaaaagccttggtgccaagcatagcgtttacgacacgactaatcgcactggccgaagtctgaaggagaagacatccctggcggacgataacctaaagctggacgacatgctgtctgaattgagagacaagtgggacacaatttgtggcaaatccgtggagcggcagaacaaactggaagaggctctgctcttctccgggcaattcaccgacgccctgcaggcccttatagactggctctacagggtggagccccagcttgccgaggaccagcccgttcatggggacatcgatttggtcatgaacctcatagataatcacaaggcctttcagaaagaactgggcaaaaggacatctagtgtgcaggcactaaagcgctccgcccgtgagcttatagagggctcgagagatgacagctcttgggtgaaagttcagatgcaggagctctctaccagatgggaaacagtatgcgcattaagcattagtaaacagacccggctggaggccgctctgagacaggcggaagaatttcattctgtcgtgcatgccctgctagagtggctggctgaagccgaacagactttgagatttcatggcgtgttacccgacgacgaggacgctcttcggacacttatcgatcaacataaggagttcatgaagaaactcgaagagaagagggccgagctcaacaaggcgactactatgggcgatacagtactggctatctgccaccccgattcaatcacaacaatcaaacattggatcaccattatcagagcccgtttcgaagaggtgttggcctgggccaagcagcaccagcaaaggcttgcgagtgcccttgccggactgatagctaagcaggagttgctggaggcacttttggcctggctccagtgggctgaaacaacactgacagataaggacaaggaggtgatcccccaggagatcgaggaggtgaaagccctcattgccgaacaccagacatttatggaagagatgactcgcaagcagcccgatgtggataaggtaaccaagacatacaaaaggcgggctgccgacccttctagtcttcaaagccatatacccgtgcttgataaggggcgagccggaaggaagagattcccagccagcagcctgtaccctagcggcagtcaaactcagattgagactaaaaaccccagagtcaacctgctcgtcagtaaatggcaacaggtttggctcctagctcttgagagacggcgaaaactgaatgacgctctcgaccggctggaagagctgagggagttcgccaatttcgacttcgatatttggcgcaagaaatatatgagatggatgaaccataagaagagtagagtaatggactttttccgcaggatcgacaaagatcaggacggcaagataacgagacaagagttcatcgatggcattctgtcgagtaagttccctacaagtagactggaaatgagcgcggtcgcagacatatttgatcgcgacggggacggatacatcgactactacgagtttgttgctgctctgcaccccaacaaggatgcgtataagcccattactgatgccgacaagattgaagacgaagtgacgagacaggtggctaagtgtaagtgcgctaagagatttcaggtggagcaaattggggataacaagtatagagtgtcgttccagagcaatttcggcgactctcaacagttgcgcctggttcgtattctgagatcaaccgtcatggtccgcgtgggagggggttggatggcgttagacgaattcctggtcaaaaacgatccttgccgtgtgcaccatcacggctctaagatgctgcgttctgagtcaaactcaagcataaccactactcagcccacaatcgccaaaggccgaactaacatggagttgcgagaaaagttcatattggctgatggtgcctctcaaggcatggcagccttccgtccacgcggtaggcggtcacggccatcctcccggggagcctcaccaaatagaagcacttccgtgagcagtcaagcggctcaggccgctagtccacaagtacccgctacaaccaccccaaagggcacaccaatccagggtagcaaactgcggctgcccggttatctgagcggcaagggtttccacagtggggaagactctggcctcataaccaccgccgctgccagagttaggacacagtttgcggattccaaaaagaccccttcgaggcctggcagcagggctgggtccaaggctgggtcaagggcctcatcccggagaggcagtgatgctagtgacttcgatattagcgaaatccagagtgtgtgttctgatgtagagactgtgcctcagactcacagaccaacacctcgtgccggtagccgacccagtacagcaaaacctagtaagatcccaactccacagagaaagtcacccgcttctaagctggataaatcttcaaagcgctac

SEQ ID NO: 221516 - DNA, 768 bp, synthetic construct
  misc_feature 1..768: note = Description of Artificial Sequence: Synthetic coding sequence
  source 1..768: mol_type = other DNA
atgaataaaaccggacctcagttgcttgagttgagcccaggcgaggggttctcaatacaagagaagtacgttgcagccgatacactatactcccagattaaggaggatgtaaaaaagcgtgccgtggctctggatgaagctatttcacagagcacccaattccacgataaaatcgatcagatactggagtccctcgaacgaatcgtggagcggttgcgacaaccgccatccatttctgcagaggtggaaaagattaaggagcagatcagtgaaaataagaacgttagtgtggacatggagaagcttcagcctttgtatgagaccctgaagcagaggggcgaagagatgatcgctagaagcgggggaactgacaaagacattagcgcaaaggcagtgcaggataagcttgatcagatggtcttcatatgggaaaacatccatactctggttgaagagagagaggccaagttgctggacgttatggaactggcagaaaaattttggtgtgaccacatgagtctcatagtcacgattaaggacacacaggatttcatcagggatctcgaggacccagggatcgatccatcagtggttaaacaacagcaagaagcggctgaaacaatccgtgaagaaattgatggattgcaagaagaactggatatagtaataaacctgggatccgagctgattgctgcttgtggggaacccgacaaacctatagtgaaaaaaagcattgatgagctgaactctatgggcttcagtaagtag

SEQ ID NO: 221517 - DNA, 1359 bp, synthetic construct
  misc_feature 1..1359: note = Description of Artificial Sequence: Synthetic coding sequence
  source 1..1359: mol_type = other DNA
atgtttccagatcagcccgaaaagcccctgaatttggctcatattgtgcctccaagacccgttaccagcatgaatgacaccctgttcagtcacagtgtaccatcaagtgggtccccatttattactcgtcgactaccagagggtatatccgcttcatcacctgtggcggaagagcattctctcataaagctttacgtgaatcaactggaccatggtgccaggtctccacccaaggactcggaggtggagcagaacaaactgttggccagagccgctcctgcttttctaaagggtaaaggaatccagtattccctaaatgtcgctgatcgcctggccgacgagcacgtcctcatcggcctgtacgttaatatgctgagaaacaatcctagttgtatgctggagagttcaaacaggcttgatgaagagcacagactgatcgccaggtacgccgcaagattagccgcagagagttcaagctcacaacctccacagcagcgcagcgcgccagatattagtttcacaatcgacgctaataagcaacagcggcagcttatcgctgaactagaaaacaaaaatagggaaattctccaggagattcagcgattgcgtctggagcacgaacaggcgtcacagccgacccccgagaaagcccagcagaatcctactctactggctgagctgagattgctacgccaaagaaaagacgaactggagcaaagaatgagcgcgctgcaagaatctagacgagaacttatggttcagttagaaggccttatgaagcttctgaaaacgcagggggcaggcagtcccaggtcatcacccagccacacaattagtaggccgattcctatgccaataaggtctgcaagtgcttgttccactcctacccacaccccacaggattctctcactggcgtgggaggggacgtgcaggaggccttcgctcagagttcacgacgcaatttgaggaatgacctgctagttgctgccgactctattacaaacaccatgtcatcactggtgaaagaacttaattccgaggtgggcagcgagactgagtccaacgtagacagcgagttcgctaggactcagttcgaagatttggtgccttcaccgacctcagagaaggcgttcttggctcaaatccacgcgagaaagcccggttatattcactctggcgcaaccacgtccactatgaggggggacatggtcaccgaggatgcggacccgtacgtgcagccggaggacgagaattacgagaatgacagcgtacggcagctggaaaacgagctccagatggaagaatatctaaagcagaagctccaggatgaggcctatcaagtatcactgcaggggtag

SEQ ID NO: 221518 - DNA, 1116 bp, synthetic construct
  misc_feature 1..1116: note = Description of Artificial Sequence: Synthetic coding sequence
  source 1..1116: mol_type = other DNA
atgatcgaggacagtgggaagaggggcaacaccatggctgagagacgccagctgttcgctgagatgcgggctcaagatcttgacaggatcagattatccacctatagaaccgcctgcaaactccgattcgtgcaaaaaaaatgcaatctgcacctggtagatatttggaacgtgatcgaggcccttcgcgaaaacgctctgaataatcttgatcctaacacagagctcaacgttagcaggctggaggccgtgttatccaccatcttttatcagcttaataaacggatgccaactacccaccagatccacgtagagcagagcatcagcctgctcctgaacttcttactagctgccttcgacccagagggacatggcaaaatttccgtgttcgctgtgaaaatggcgctcgcgacactgtgtggtgggaagattatggataaactccgttacattttcagcatgatatcagactcctcaggcgtgatggtctatggtagatatgaccaattcctgagggaagtcctgaaacttcccactgcggtattcgagggtccgagcttcggatacaccgagcagtccgcgcgaagctgcttcagccagcagaagaaggttaccctgaatgggttcttagacacactcatgagcgatccccctccacaatgtctcgtctggcttccacttctacaccggttagcaaatgtggagaacgtcttccatccagtggaatgcagctactgtcacagcgaatctatgatgggtttcaggtatcggtgtcagcaatgccacaactaccagctgtgtcaagactgcttctggcgtggccatgccggaggttcccattcaaatcagcaccagatgaaagaatatacaagttggaagtcccccgcaaaaaaattaaccaacgcgctctccaaatcgcttagctgcgcatccagcagagagccactccatccaatgttccctgaccaacccgaaaaacccctgaatctggctcacatcgttccgcctcgcccagtgacatccatgaacgataccttgtttagtcactccgtgccgtcatccggctcaccatttatcaccagaagcagcgacggggcatttggcggatgcgtgtag

SEQ ID NO: 221519 - DNA, 1188 bp, synthetic construct
  misc_feature 1..1188: note = Description of Artificial Sequence: Synthetic coding sequence
  source 1..1188: mol_type = other DNA
atgttccccgaccagccagaaaagcccctgaacctggcacatattgtcccacccagaccagtgacttctatgaatgatacactctttagtcacagcgttccctcctcagggtctccttttattacacggaggctgcctgaaggtatatcagcttcatcacctgtagcagaggaacatagtttgatcaagctttatgtaaatcaactggatcatggggctagaatgctggagagctccaatcgactggacgaggaacaccggctcatcgcacggtatgcagcaagactagcggcagagtcatcctcatcacagccccctcagcaaagaagcgccccagacatcagctttacaatagacgccaacaagcaacagaggcaactcatcgccgagcttgagaacaagaatcgcgagattttgcaggagattcagcggctaagactcgaacacgagcaggcctcacagcctaccccggagaaggcccagcagaatccaactctgcttgcagaactgcggctgctccggcaaaggaaagacgagttggaacaacgcatgtccgcactacaggagtccaggagagaactgatggtccagctggaaggtctcatgaagctgttaaagacccagggagctgggagtccaaggagcagcccttcccacaccatctccagaccaattcctatgcccattaggtcagcatctgcatgtagcacccccacacatactcctcaggattcactcaccggcgtggggggtgacgtgcaggaggcattcgctcagagttctcgtcgcaacctgagaaacgatcttctcgtggcagcagatagcataacgaacaccatgagctcactcgttaaggagctgaattccgaagtcggctctgaaacggagagcaacgtcgattccgagtttgcgaggacacagttcgaagatcttgtgccttctccaacaagcgaaaaagcattcctcgcacagatccacgctcgaaagcctggctacattcactctggagctacaaccagcaccatgcggggtgatatggtaaccgaggatgccgatccctatgtccagcccgaggacgaaaactatgagaatgactccgtgagacagctggagaacgaactccagatggaagagtatctgaagcagaagttacaggacgaggcatatcaagtatccttacagggttag

SEQ ID NO: 221520 - DNA, 2175 bp, synthetic construct
  misc_feature 1..2175: note = Description of Artificial Sequence: Synthetic coding sequence
  source 1..2175: mol_type = other DNA
atgatcgaagatagcggcaagagagggaatacgatggctgagcgcaggcagttgttcgcggaaatgcgagcacaggatctagaccggatccggctgtctacctacagaacagcatgtaagctgagattcgtccagaagaaatgtaatctgcacctggtagatatttggaatgtcatcgaggccctgcgtgaaaatgcactcaataatctggatcctaataccgagctaaatgtgagccgcctagaagccgtcctttccaccattttctatcaactcaataagcgcatgcccaccacacaccaaatccacgtggagcagtctatcagcctgcttctcaatttcctgcttgccgcatttgatccagagggccacggtaagatctctgttttcgccgttaaaatggctctggctactctctgtgggggaaagattatggacaaactccgttatatcttcagtatgatcagcgattccagtggcgtgatggtgtacggcaggtatgaccaatttcttcgcgaggtgttaaaactgcctactgccgtgtttgagggtccttctttcggatatacagagcagagcgcaaggagctgtttctctcagcagaagaaagtaactttgaacggattcctcgataccctcatgtccgatccaccaccacaatgtctggtatggcttccactgctgcatcgtcttgccaatgtagagaacgtgtttcaccccgtcgagtgctcctattgtcactcagaatcaatgatgggctttcgttacaggtgccaacagtgtcacaattaccagctgtgtcaagactgtttctggaggggacatgccggtgggtctcattctaatcagcatcagatgaaggaatacacgagttggaaaagtccagcaaagaaactgacgaacgccttgtcaaaaagcttgagttgtgctagctcacgggagccccttcatccaatgttcccagatcagccagagaaacctctgaatttagcgcacatcgtcccccctcggccagtcaccagcatgaatgacaccttgttttcacactccgtgccctcaagtgggtcccccttcatcaccaggagcatgctcgaatcaagcaacaggttagatgaagagcatcggctcatagcaagatatgccgcaagactggcagcagaaagttcctcgtctcaaccacctcagcagcgcagcgcacctgacattagttttaccattgacgctaacaagcagcagcggcagctcattgccgagctagagaataaaaaccgtgagattctgcaggagatccagcgcctcagactggagcacgaacaagcaagtcagcccacacccgagaaggcccagcaaaatcccaccctcctggccgagctgcgactacttcgacagagaaaggatgaattggaacagcgaatgagcgccctgcaagagtcacggcgtgagctgatggtgcagctcgaaggcttgatgaagcttctgaagacccagggagccggatctcctagatctagtccgtcgcacactatctccagacccattcctatgccaatccgttcagcatcagcctgttctacgccaacccatacacctcaggattctcttaccggagttgggggagacgtacaggaggcctttgctcagtcttctagacgcaacttgagaaatgatctcctggtggccgctgactcgatcactaataccatgtccagcctcgtaaaggaattgaactctgaagtcggcagcgaaaccgaaagcaatgtggactccgaatttgccaggactcagtttgaggatttagtgccgtcacctacatcagagaaagcctttctcgcccaaattcacgcgaggaagcctgggtacatccacagcggcgctaccacgtccactatgaggggggatatggtgactgaagacgcggatccatatgtccaacccgaggacgagaactacgaaaatgactctgtgaggcagcttgagaacgaactccagatggaagaatacttgaagcagaaacttcaggatgaggcctatcagctgcacgtctctaccgagactaggttggagcacccctgtcccgtctcggaaaccaagtggcgggtcctgttttggggtttcgtattctttggaggtttcctgagcctggcactccagatctacttctggggcctgttctag

SEQ ID NO: 221521 - DNA, 912 bp, synthetic construct
  misc_feature 1..912: note = Description of Artificial Sequence: Synthetic coding sequence
  source 1..912: mol_type = other DNA
atgctggaaacacttcgcgagaggctgctgtctgtccagcaggacttcacgtctggccttaaaactttatccgataaaagtagagaggcaaaagtcaaaagcaagccgagaactgtgccctttctccccaagtattcggcgggattggaattattaagtagatatgaagacacctgggctgccctccaccggcgtgcgaaggattgtgcttcagctggagagctggtcgatagtgaggttgtcatgctctctgcacattgggagaagaagaagacatcgctggtcgagctacaagagcagctccagcaactcccagcccttattgcagatttagagtccatgaccgctaatctgacacaccttgaggccagcttcgaggaggtggagaacaacttgctgcatctggaggatttgtgtgggcagtgcgagctggagcggtgcaagcatatgcaatcacaacagctggagaattacaagaagaacaagcgcaaagagctcgagacctttaaggctgagttagatgccgagcacgcccagaaggttctcgagatggaacacacccagcagatgaagttaaaggaacggcagaagttttttgaggaggcctttcaacaagacatggaacagtatctgtctactggataccttcagatagccgaacgcagggaacctataggctctatgagcagcatggaggttaatgtcgatatgctagagcagatggaccttatggatattagtgatcaggaggcgctggacgtatttctgaacagtggcggagaggaaaatacagtgttgagccctgccttgggacgggtcgacaaattagctctggccgagcccggtcagtaccgttgtcatagcccgccaaaagttagaagagagaaccatctgcccgtgacctatgcttag

SEQ ID NO: 221522 - DNA, 1056 bp, synthetic construct
  misc_feature 1..1056: note = Description of Artificial Sequence: Synthetic coding sequence
  source 1..1056: mol_type = other DNA
atgctcgaaaccttacgcgagcgactgctttcagtgcagcaggactttacaagcggcctgaagactctgtccgataaatctcgtgaggctaaggtgaagtctaaacctagaaccgtccctttcctccccaagtacagcgccggtctggaactacttagccgctatgaagatacctgggccgcactccaccggagagcaaaagactgtgctagtgcgggagagctggttgattccgaagtggtgatgttatcagcacattgggaaaagaagaagacctctttagtggaacttcaagagcagttacagcagttacctgccctcatcgctgacctcgaatcaatgacggcaaacttgactcacctcgaagcttcctttgaagaagtcgaaaacaatttacttcatctcgaagatctgtgtgggcagtgtgagcttgaaaggtgcaagcacatgcagtcacaacagttggagaattacaaaaaaaacaagagaaaagaactggaaaccttcaaagccgagctggacgccgagcacgctcagaaagttctggagatggagcacactcagcaaatgaagctgaaagaacggcagaagttcttcgaagaggcctttcaacaggacatggagcagtatttaagcaccggttatttacaaatagccgaacggagggaacccatcggaagcatgtcatcgatggaggtgaatgtggatatgctggaacaaatggatctgatggatatttctgaccaggaggcacttgatgtgttcctgaattcaggtggagaggaaaatacagtgctgagccctgccctggggccagaaagctcaacttgccagaatgagataaccctgcaagttccaaaccccagcgaattgcgcgctaagccacccagtagcagctccacatgcaccgacagtgctacccgggacataagcgagggtggtgaaagcccagtggttcagtcagacgaggaggaggtgcaggtggataccgcccttgctactagccataccgatagggaagccacgcctgacggcggagaagattcagactcatag

SEQ ID NO: 221523 - DNA, 1059 bp, synthetic construct
  misc_feature 1..1059: note = Description of Artificial Sequence: Synthetic coding sequence
  source 1..1059: mol_type = other DNA
atgttagaaacgcttagagagcgactgctgtctgtacaacaggactttacctcgggcctaaaaacactcagtgataaaagccgcgaagctaaggtaaaaagcaaacctagaacagtaccctttctgcccaaatactcggctggactggaactcctttcaagatatgaagacacgtgggcggctctccacagacgggctaaagactgcgcctccgcaggtgagctggtggactcagaggtcgtgatgctgtctgcacactgggagaaaaaaaagacgtccctggtggagctacaggagcagcttcagcagctgcccgctttaatcgccgacctcgagagcatgactgccaacctcactcatctggaggcttcgttcgaagaagtagagaacaatctccttcacttagaggatctgtgtggccaatgtgagttagaaagatgcaagcacatgcagagtcagcagctggagaattataaaaaaaacaagcgcaaggaactcgaggtgacattccggtccgaactggatgcagaacacgcccaaaaggtcttggagatggaacacacacagcagatgaagctaaaagagcgtcagaagtttttcgaggaagccttccaacaggacatggaacagtaccttagcaccggctacctacagatcgccgaaagacgggaaccgattggtagcatgtcgtctatggaggttaatgtcgacatgcttgaacaaatggacctgatggatatatccgatcaggaagctttggacgttttcctcaattctggtggcgaggagaataccgtcttatcaccggctctgggtcccgaatcttcaacttgccagaatgaaatcactctgcaggtgccgaacccaagcgagctgagagccaaacctccttctagttctagcacgtgtactgatagcgcaacaagggacatctccgaaggaggcgagtccccagtggtgcagtcagacgaagaggaagtccaagtggatactgcgctggctactagccacactgatcgggaagctactcccgatgggggtgaagactcagatagttag

SEQ ID NO: 221524 - DNA, 813 bp, synthetic construct
  misc_feature 1..813: note = Description of Artificial Sequence: Synthetic coding sequence
  source 1..813: mol_type = other DNA
atgctcagcgcgcactgggagaagaagaaaacctcactggtcgagctgcaggagcagctgcaacaattaccagccttgatcgctgacctggagtctatgaccgctaatcttacacatctggaagccagtttcgaagaagttgagaacaatctgcttcatttggaggacttgtgcgggcagtgtgagttggaacgctgtaaacacatgcagtcccagcagttagaaaattacaagaaaaacaagcgacggagattgaggaccttcaagactgaactcgacgctgaacacgcacagaaggtcctggaaatggagcacacacagcaaatgaagctgaaggagcggcagaagttcttcgaggaggcgtttcagcaggatatggagcagtatctgtccacgggctacttgcagatcgcggagagacgagagccaatcggtagtatgagctcgatggaggtgaatgtggacatgcttgaacagatggacctgatggacattagcgaccaagaagccctggacgtttttttgaacagcgggggtgaggaaaacactgtgctatcacctgcactgggacctgaaagcagtacgtgccaaaacgaaataacactgcaagttcctaatccctcagagctgcgggctaagcccccatccagctcctctacttgcacggactctgcaactcgcgatattagcgaagggggtgagtctccagtcgtccagtctgacgaagaggaagttcaagtggacacggccctggctacgtcgcacaccgatagagaggctactcctgatggcggagaggatagcgacagctag

SEQ ID NO: 221525 - DNA, 912 bp, synthetic construct
  misc_feature 1..912: note = Description of Artificial Sequence: Synthetic coding sequence
  source 1..912: mol_type = other DNA
atgctcgaaaccctgcgagagaggttattaagcgtacagcaggactttacaagcggcctgaagaccttgtccgacaagagccgggaggctaaggttaaatccaaaccgaggactgtccctttcctgccaaagtactcagccggtctcgagcttcttagtcgctacgaggacacttgggcagccctgcaccggcgagccaaagactgcgcttctgcgggagaactggtggactctgaagtggtaatgctgagcgcccattgggagaagaaaaagacgtccttagttgagctgcaagagcagttacagcagctgcccgctctcatcgccgatttagagtcaatgactgcgaacctgacccatttagaggcctccttcgaggaggtggagaataatctattacacctcgaagatctatgcggacaatgcgagctcgaaagatgcaaacacatgcagtcgcagcagttggagaattataagaagaataaaagcaaggaactgggtaccggcaaggcggagctcgatgccgagcacgcccagaaagtactcgagatggaacacactcagcaaatgaagctcaaggaacgccagaagtttttcgaggaggcattccagcaagatatggaacagtacctgagcacaggctacctgcagatcgctgagcgacgagagccaatcggaagcatgtcatctatggaggtgaatgtagatatgctggagcagatggacttaatggacatctctgatcaggaggctctggatgtcttcctgaattcggggggagaggagaatacggtcctgtctccagcactgggccgagtggataaactcgcactggctgagccaggacagtataggtgtcattctccacccaaggtgaggcgagagaaccaccttcctgtaacctacgcatag

SEQ ID NO: 221526 - DNA, 135 bp, synthetic construct
  misc_feature 1..135: note = Description of Artificial Sequence: Synthetic coding sequence
  source 1..135: mol_type = other DNA
atgttggagacattgagggagagactcctgtccgtgcagcaggacttcacctccggtctgaagaccttgtctgacaagtcccgcgaagccaaggtcaagagcaagcctagctggttgaaccaagaacaattttag

SEQ ID NO: 221527 - DNA, 627 bp, synthetic construct
  misc_feature 1..627: note = Description of Artificial Sequence: Synthetic coding sequence
  source 1..627: mol_type = other DNA
atgctggagacactccgtgagagactgctgtctgtgcagcaggacttcacgtctggacttaaaactctttccgataagtcccgtgaggctaaggtgaaaagtaagccacgttatgaagatacatgggctgccctgcaccggagagctaaagactgcgcctcggccggagagttggtcgatagcgaggtcgtgatgctcagcgcacattgggaaaagaagaagacatcattagtggagctgcaggaacagctgcagcagcttccggcactgatcgcagacttggagagcatgaccgccaacctcacccatctggaggctagtttcgaggaagtggaaaacaatctcctgcatctggaggacctctgtggacagtgtgaattagagagatgcaagcacatgcagtctcagcagttggagaactataaaaagaataagcgcaaggaactggagaccttcaaagcagagctcgatgcggaacacgcacagaaagtgttggagatggagcatacccagcaaatgaaactgaaggaacggcaaaagtttttcgaggaggcgtttcaacaggacatggagcagtacctttctactggataccttcagatcgctgaaaggagaggggatccctag

SEQ ID NO: 221528 - DNA, 2235 bp, synthetic construct
  misc_feature 1..2235: note = Description of Artificial Sequence: Synthetic coding sequence
  source 1..2235: mol_type = other DNA
atgattgaggacagcggcaaacggggaaatacaatggccgaacgcagacaactgttcgccgagatgcgggctcaggacttggaccggattagactttccacctacagaacggcttgcaaattaagatttgttcagaagaaatgcaatctgcatttggtggacatttggaacgtgatcgaggccctgagagagaacgcactgaataacctcgatcccaataccgagcttaacgtgtcccgtctggaggctgtcctgagcaccatattttaccagctgaacaagaggatgccaactacgcatcagatccacgtggaacaaagcatttcattgcttttgaacttcctcctcgccgctttcgacccagagggacatgggaagatcagcgtctttgcggtcaagatggcccttgccactctctgcgggggaaagataatggacaagctccgctacatattctctatgatatccgatagctcaggcgtcatggtttatggcaggtacgatcagtttctgcgggaggtgttgaagctaccaacagcggtgtttgaagggccaagcttcggatacacagagcagagcgccagatcttgcttcagccagcagaagaaggtgacattgaatggttttttagatactctcatgtccgatcccccacctcagtgcctggtgtggcttcccctactccataggttagcgaacgtggagaacgtgttccaccctgtagaatgttcttactgtcattcagaatccatgatgggtttccgttatagatgtcagcaatgtcataattaccagctctgccaggactgcttttggagaggacacgctggcggatcacatagcaaccagcaccagatgaaggagtataccagttggaaatcccctgctaagaagcttacgaacgccttatctaagagcctctcgtgcgccagctccagggaacctctacatccgatgtttccagaccaaccagagaaacccctgaatctggctcatatcgtcctggataatatgccccctcgcccagtgaccagtatgaacgacacccttttttcacacagcgtgccaagttccgggtcaccatttataacccggtccagcccccctaaagactctgaggtcgaacagaacaagctccttgcccgagccgcaccggctttcctgaaaggaaagggaattcagtactccctgaacgtcgcagatcgcctcgccgacgaacatgtacttatcggactatacgtcaatatgctccggaataatcctagctgtatgctggaaagctctaatcgcctggacgaagaacatagactgattgccagatacgccgcacggctcgccgctgagtcgtccagcagccagcctccccagcaacgtagcgcgccagacattagctttaccatcgatgcaaataagcaacagcgtcagctgattgccgaattggaaaataaaaaccgtgagatcctccaggagatccagaggctccgactggagcacgaacaggcatcacaaccaacgccagagaaagcccagcagaacccaaccttgctagcagaattaagattgttaaggcagagaaaggacgaattagaacagcgcatgtccgctctccaggaatcacgtagagagctgatggtccagctggaaggcctgatgaagctcctgaagacccagggggctggttcccctcgcagctcgcctagtcatacgatcagccgccctataccgatgcctattcggagtgcatcggcctgttccacccccacccataccccccaggatagtctaaccggggtagggggagatgtgcaggaagccttcgcacagtcatcaaggaggaacctccggaacgacctgctggtggcggcagattccattaccaacaccatgagctcactggtcaaagagctgaatagcgaggtcggcagtgagactgagagcaatgtcgactcagagtttgccagaacccaatttgaagatctcgtgccgagtcctaccagcgagaaggcttttctagcccagatccacgcccgaaaaccaggatacatacactcgggggcaacaaccagtacaatgagaggagacatggtcacagaggacgccgacccatacgtccagcctgaagacgagaactacgaaaatgatagtgtgcgccagcttgagaatgaactgcaaatggaagaatatctaaagcagaaactgcaggacgaggcataccaggtaagcttgcaagggtag

SEQ ID NO: 221529 - DNA, 1713 bp, synthetic construct
  misc_feature 1..1713: note = Description of Artificial Sequence: Synthetic coding sequence
  source 1..1713: mol_type = other DNA
atgatagaggactctggtaagagaggcaacacaatggctgagcggaggcagctttttgcggagatgagagcgcaggacctcgatcggatccggttgagcacttacaggacggcctgtaagttgagattcgtccagaaaaagtgtaaccttcatctggtcgatatttggaacgttattgaggcgctgcgcgaaaatgctcttaataatttagatcccaacactgagctgaacgtgtcaaggctggaggctgtcctttcaactatcttctatcaacttaataagcgcatgcccactacacaccagattcatgtggagcagtctattagcctactcctcaacttcttgctggccgcttttgatccagagggacacggcaagattagtgtgttcgccgtgaagatggccttagcaactttatgcgggggtaagatcatggacaagttgcgatatatcttcagcatgatcagtgactcttccggcgtgatggtgtacgggcgatacgatcagttcctcagggaagttcttaagctgccaaccgccgtttttgagggaccaagttttgggtacaccgagcagtcggcccgttcctgcttctcccagcagaagaaagtgactctgaacggatttcttgacacccttatgtccgacccgccaccacagtgtctcgtctggctgcccctgcttcaccggttggcaaacgtagagaatgttttccaccccgttgagtgttcctactgtcatagtgagtctatgatgggattcagatacaggtgtcagcagtgtcacaactatcagctgtgccaggactgtttttggcgcggtcacgccggtgggagccactccaatcagcaccagatgaaagaatacacctcctggaagagtccagcaaagaaactgaccaatgctctgagcaaatccttgagctgtgcttcatcccgggagcccctgcatccgatgttccctgatcagcctgagaaacctttaaatctggcccacatcgtggacacatggccacctagacccgtcactagcatgaacgacacattgttctcgcacagcgttccctcctctggaagtccctttatcacccggtcatctccaccaaaggactctgaggtggaacagaataaactgcttgcgcgagctgcccctgcattcctgaaagggaaaggcatacaatatagcctgaacgttgccgatcggttggctgacgagcacgtattaatagggctctacgttaacatgctccgaaacaatccttcctgtatgcttgaaagtagcaatcggctagacgaggagcatagactgatcgcgagatacgccgcacggcttgccgcagaatcgagctctagccagcccccacaacagaggtctgctccagacatctctttcaccatagatgctaataagcaacaaagacagctcatcgctgagcttgaaaacaagaaccgcgagatattgcaagagattcagcgcctcaggttagaacacgagcaggcttcccaaccgacacccgagaaagcccagcagaaccccactctattggccgagttgcgtttgctccggcagcgtaaggacgagctggaacagcggatgtcagcactccaggaaagcaggcgggaactcatggtacagctggaaggcctcatgaagctcctgaaagaagaagagctgaaacagggggtctcctatgtcccctattgtcgctcttag

SEQ ID NO: 221530 - DNA, 2061 bp, synthetic construct
  misc_feature 1..2061: note = Description of Artificial Sequence: Synthetic coding sequence
  source 1..2061: mol_type = other DNA
atgattgaggactccggaaagagagggaatacaatggcggaaaggaggcagttattcgcggagatgcgtgcccaagatctcgatcggatcagactctctacttataggacagcatgcaagctgcgttttgttcaaaaaaaatgtaacttgcacttggtagacatttggaatgtaatcgaggccctcagagagaacgcattgaacaatttggatcccaatacagagctgaacgtgtcacggctagaggctgtgctatccaccattttttatcagctgaataagcggatgccaaccactcaccaaatccacgtcgagcagtctatttccctcctgctgaacttccttttggcggcttttgaccctgaagggcatggcaaaatcagcgtcttcgcagtgaaaatggcattggccacactatgcggtggtaaaattatggataaactcaggtacatcttctccatgatctccgactcttcaggggtcatggtttatgggagatatgatcagtttctgcgagaggttcttaagctcccgaccgctgtgttcgaagggccaagctttggatacacagagcagagtgctaggtcctgctttagccagcaaaagaaagtcacgctgaatgggttccttgataccctgatgtctgatccccctccacagtgtttagtgtggctgcccctgcttcaccgcctagccaatgtggagaacgtgtttcatcccgtggagtgctcatactgccactccgaatccatgatgggttttaggtaccgttgccaacaatgtcataattaccaactctgtcaagactgtttctggcggggtcacgcgggaggttcacattccaatcagcatcaaatgaaggaatacacttcatggaaatcccccgctaaaaaactcaccaatgccctttcaaaatcgctgtcttgcgctagttcgcgggagcccttacatcccatgttcccagatcagccagagaagcctttgaaccttgcccatatcgtcgatacttggccacctagacctgttaccagcatgaacgatacactgtttagccacagcgtccccagttcagggtcaccgtttatcaccaggagcatgctggaatcatcaaatcgtctagacgaggaacaccggctcatagctagatatgccgctcgtttggctgccgagtcttcttcttcccagccaccacagcagagatcagcccctgacatttctttcacaatcgacgctaacaaacaacaacggcagcttatagcagaactagaaaacaagaatagagagatccttcaggagattcagcggctgcggttggagcacgaacaagcaagccagcccacgcccgaaaaggcccagcagaatcctacattgttggcagaattgagactattgagacagcggaaggatgaactggagcaaaggatgagcgccctccaggaatccaggcgcgagttgatggtgcagctcgaaggcttaatgaagttgttaaagactcagggtgccggttccccacggtcatctccatcccatacaattagccggcctatccctatgcctattcggagtgcttctgcatgcagcacccctacccacacccctcaagacagcctgaccggagtaggtggggacgtgcaggaggcctttgcccagtccagccgacgaaatctgaggaatgacctcctagtcgccgcagatagtattacgaataccatgtctagtctggttaaggaactcaattccgaagtcggctccgaaactgagagcaacgtggattccgaattcgcgcgtactcagtttgaggatctcgttccttcgccaacttccgagaaagctttcctcgcccagatccacgcgaggaagcctggttacatccactctggtgcgactacctcaaccatgagaggcgacatggtgaccgaggatgccgacccatacgttcaacctgaggatgagaactatgagaatgatagtgtgagacagctggaaaacgagcttcagatggaggagtatttgaaacagaaactgcaggatgaggcatatcaggtctctctgcaggggtag

SEQ ID NO: 221531 - DNA, 1125 bp, synthetic construct
  misc_feature 1..1125: note = Description of Artificial Sequence: Synthetic coding sequence
  source 1..1125: mol_type = other DNA
atgatcgaggatagtggcaaacgtggaaacactatggctgagcgtagacagttatttgcagagatgcgggcacaagatctggaccgcatcaggctatccacatacaggacagcgtgtaaactgcggtttgtccagaaaaagtgtaacctgcacttagttgatatctggaacgtgattgaggctcttagggaaaatgcactgaacaacttagatccaaatactgagctgaacgtgtcccgcctcgaggcagttctgagtacgatcttttaccaactcaacaaaaggatgcccaccacccatcagatccacgtggagcagtccatttccttgctactaaatttcctcctggctgcgttcgaccctgaaggacacgggaagatctctgtgttcgccgtgaagatggctcttgctacgctgtgtgggggtaagatcatggataaactgagatacattttttccatgattagtgattcctctggggtcatggtgtacggacgctacgaccagtttctgcgtgaggtcctgaaactcccaactgccgttttcgaggggccaagtttcgggtacactgaacagagcgccagatcatgcttttcacagcagaagaaagtcacgcttaatggcttcctcgacaccctgatgtctgatccaccacctcagtgccttgtgtggctgcctctgctgcatcgacttgcaaatgtggagaacgtgttccatcctgtggagtgtagctactgtcacagcgagagcatgatgggattccggtaccgctgtcagcaatgccacaactaccaattatgtcaggactgcttttggaggggtcacgcgggtggctcccactctaatcagcatcagatgaaggagtacacctcgtggaagagccctgccaagaaactgacgaacgcactgtccaagtctttgtcctgcgcctcctctagagaacctctgcatccaatgtttccagaccagcccgagaagccactcaatctagctcacatagtggacacctggccaccccgacccgtgacttcaatgaatgatacactcttttctcattcagtccctagcagcgggtctccttttatcacccgcagcagtgatggtgcctttggcggttgtgtgtag

SEQ ID NO: 221532 - DNA, 1704 bp, synthetic construct
  misc_feature 1..1704: note = Description of Artificial Sequence: Synthetic coding sequence
  source 1..1704: mol_type = other DNA
atgatcgaggacagcgggaaacgaggaaataccatggccgagcggcgtcaactcttcgcggagatgagagcacaggaccttgaccgcatccgcctgtccacttatcggacagcctgtaagctgcgattcgtgcagaagaaatgtaatcttcatttggtcgatatatggaatgtgatagaagctcttcgcgaaaacgctctgaataaccttgatcctaacacagagttgaatgtcagtcgcttggaggcggtgctgagcacaatcttctaccagctcaataagagaatgcccactacccaccagattcatgtggagcagtccatcagtctccttttaaactttctgctggcagcctttgaccctgaggggcatggtaagatcagtgttttcgcggtaaagatggccttggccaccctgtgcggtggcaagataatggacaaactccgttatattttctccatgattagcgatagttctggggtgatggtctatggtcgctacgaccagtttctgagggaagtgctgaagctgccaacggcggtgttcgaggggccatcctttgggtatacagagcagagcgcaagatcatgtttctcacagcagaagaaggtgaccctgaatgggtttctggataccctcatgagcgatccccctccccagtgtcttgtatggctgcctctgttacaccggctggctaacgttgagaacgtgtttcatccggttgaatgcagctattgtcactctgaatccatgatgggtttcagatatagatgtcagcaatgccataactaccagctctgtcaggattgcttttggcggggacatgctggcggaagtcacagcaatcaacaccagatgaaagagtatacaagctggaagtccccagctaagaagctaacaaatgccctgtcaaagagtctcagttgcgcctcctctcgggagcccctgcaccccatgttccccgatcagcccgagaagccgttaaacctggcgcatattgtccctccgcgaccagtaacaagtatgaatgacacattgttctctcattctgtaccgtcctcaggctctccattcatcactcgcagcagtccgcctaaagattcagaagttgaacagaacaagctcttggccagagctgcccctgctttcctgaagggcaagggaattcagtatagccttaatgtggccgaccgcttggcggatgaacacgtgcttatcggtctttacgtcaacatgctgcgcaataacccctcctgtatgctcgagtcatccaatagactggacgaggagcacaggctgattgcaagatacgctgcaaggctggccgctgagtcatcctcatctcagcctccacagcaacgctccgcaccagacatcagctttaccatagacgccaataaacagcagaggcagttaatagctgaactcgagaacaaaaaccgagaaatattgcaagaaatccaaaggttgcggttagagcatgagcaggccagccagccaactcccgaaaaagcccagcagaacccaacactgctcgccgaacttagactgctcagacagagaaaggacgaactggagcagcgtatgtccgctttgcaggagagcagacgcgaactcatggttcagcttgagggccttatgaaactgctcaaagaagaagagctaaagcagggggtatcatacgtgccctattgtcgatcatag

SEQ ID NO: 221533 - DNA, 1176 bp, synthetic construct
  misc_feature 1..1176: note = Description of Artificial Sequence: Synthetic coding sequence
  source 1..1176: mol_type = other DNA
atgttccccgaccagccagagaagccgctgaatctggcacatatcgttccacctagaccggtcactagtatgaacgacactctctttagccactctgtacccagctctggcagccctttcatcacaaggagctctccacctaaagattccgaagtggaacagaacaaactgttggccagagcagcacccgcatttctcaagggtaagggaatgctggaatcttctaacaggctagacgaagagcatcggttaattgcaaggtacgcggcaaggctggctgctgagagctccagttcccaaccaccccagcagcgatcagcccctgatatctcctttaccattgatgcgaacaaacaacagagacagctcattgctgaactggagaataagaaccgagaaattctgcaggaaattcagcgactccggttagagcacgagcaagcctcccaaccaacccccgaaaaagcgcagcagaacccgaccctgcttgccgagctgcgccttctgagacaacggaaagatgaacttgagcagcggatgtcggcactgcaagaatcccggagagagcttatggtgcagctggaagggctgatgaagctcctgaaaacccagggggctggcagtcctaggagttcaccttcacacacaatctctaggcctattcccatgccgatccgatctgcttctgcttgtagcacccccacccacactcctcaggactccctcaccggagtgggcggagacgtccaggaagcatttgctcaaagcagccgccgaaacttgagaaacgacctgcttgtcgccgcagatagtattaccaataccatgtcttccctggtgaaggaactgaatagcgaggtaggaagcgaaacggaatctaatgtggacagtgagttcgcgagaacacagtttgaggaccttgtaccttcgccaaccagcgagaaagccttcctggcccagatccacgccaggaagcctggttatattcattctggagccacaaccagcactatgcgaggggatatggtgaccgaagatgctgacccctacgtgcaaccagaggatgaaaactatgagaatgactctgtccgacagctggagaatgaacttcagatggaggagtacctgaagcagaagctgcaggatgaggcatatcaggtctccctccaggggtag

SEQ ID NO: 221534 - DNA, 2232 bp, synthetic construct
  misc_feature 1..2232: note = Description of Artificial Sequence: Synthetic coding sequence
  source 1..2232: mol_type = other DNA
atgattgaagactctggtaaaagggggaataccatggcagaacggcgtcagctgtttgccgagatgcgcgctcaagatctggatcggatacgcttgtcaacctatagaaccgcctgtaagctacggtttgtgcagaagaagtgcaacctgcacctggtcgacatttggaatgtgattgaggcgcttagagagaacgcccttaacaatctggatcccaacactgagctcaacgtgtccaggctcgaggccgtactgagtacaatcttctaccaacttaacaagcggatgccgaccacccaccagattcacgtcgagcaatccatttcactgttgctaaactttttgctggccgcttttgatcctgaggggcatgggaagataagtgtgttcgcagttaagatggccctggcaaccctctgcgggggaaagataatggacaagctgagatatattttcagcatgatttcggactcatccggagtcatggtatatggtagatatgaccaatttctgagagaagtgctgaaactgcctactgctgtttttgaaggcccatcctttgggtatactgaacagagcgcgagaagctgcttctcgcaacagaaaaaagtgactctaaacggcttcctcgataccctgatgtcagatccacccccacagtgtctggtctggcttccacttctccatagactggcgaatgtggagaacgtctttcatccggttgaatgttcatattgtcactcggagagcatgatggggttccggtatcggtgccagcagtgtcacaactatcagctgtgtcaagattgcttttggagggggcatgctgggggaagccacagtaaccagcatcagatgaaagagtacacaagctggaagagtccggctaagaagctgaccaatgcactgtccaaaagcctttcgtgtgcttcaagtcgggagccactgcaccctatgttccctgaccagccggagaagccactgaacctggctcacatcgttgatacatggccaccgagacctgtgacctctatgaatgacacactgttctctcactccgtaccatcttctgggtccccatttataaccaggtcatctccaccaaaagattccgaggtggagcagaacaagctgctggcacgcgctgcccctgcctttttgaagggtaaagggatccagtattcacttaacgtcgcagaccgcctggccgacgagcatgtgcttattggattatacgtcaacatgttgcggaataacccttcctgcatgttggagagttctaaccgcctcgatgaagaacatcgactcatcgcccgttatgcagctaggctggctgccgagtcgagtagctcgcagccgccacaacagcgctcagcccctgacatctccttcacaatcgacgctaacaaacagcaacgacaactgattgccgaattggaaaataaaaatcgcgagatccttcaggagatccaaaggttgaggctggaacacgagcaagccagccagcctactcccgaaaaagcgcagcaaaaccccacgctcctggctgagctaaggctcctgcgacagagaaaggacgagctcgagcagcgcatgtctgctttacaggagtcgaggagggagctgatggtgcagttggagggcctaatgaagctcctcaaaactcagggagccggatctccacgctcctcaccttctcacactatctcgagacctatccctatgcctatcagatctgcttcagcttgctcaacacccacacatactccccaggacagtctgacaggggtaggtggggatgttcaggaagcattcgcccagagttctaggaggaatctccgcaatgatttactggtcgctgcggactcaatcaccaacacgatgagtagcctggttaaggagttgaacagtgaggttggatccgagactgagtcaaacgtggattccgaattcgcaagaactcagtttgaagacctggtgcccagtcccacttctgaaaaggcatttctcgcgcagattcatgcaagaaagccagggtacattcactcaggcgcaaccacctcaacaatgcgaggcgacatggttacggaagacgctgacccttatgttcaacccgaagatgagaattacgagaacgattctgtcagacagctagaaaatgagctgcagatggaggaatatctcaagcagaagctgcaggatgaggcctaccaggtcagtttacagggatag

SEQ ID NO: 221535 - DNA, 2073 bp, synthetic construct
  misc_feature 1..2073: note = Description of Artificial Sequence: Synthetic coding sequence
  source 1..2073: mol_type = other DNA
atgatcgaagactccggcaaacgaggcaacactatggccgagcggagacagttattcgcagaaatgagggcccaggacctggatcggatccgcctttcaacatacagaacagcttgtaagctcagattcgtgcaaaagaagtgtaaccttcatctcgtggatatttggaatgttattgaggctctaagggaaaacgcactgaataatttggatccaaatacagagttgaatgtgagccggcttgaggctgtcctgagcacaatcttctaccagctcaataagcgaatgcccactacacatcagatacatgtggaacagtcgattagcctgttattaaactttctccttgcagcctttgaccctgagggtcatggaaaaatttctgtcttcgcagtaaagatggcgctggcaacactgtgtggaggtaaaataatggacaaactgaggtacatcttcagtatgataagcgattcctcaggggtcatggtgtacggacgctacgatcagtttcttcgggaggtcctgaagctaccaacagcagtgttcgaaggtcctagctttggctatacggagcaaagcgcacgctcatgtttctcacaacaaaagaaagttaccctcaatggctttctggatactctgatgagcgaccccccaccccagtgcctggtgtggctgccgctgcttcataggctcgccaacgttgagaacgtgttccacccggtggaatgctcgtattgccactccgaatcgatgatgggatttagatataggtgccagcagtgccataactatcaactgtgtcaggattgtttctggagaggtcacgcaggcggatcccactccaaccagcatcagatgaaagagtacacttcctggaaatcccctgccaaaaagctgaccaacgctctgagcaagtccctctcttgcgccagctcccgggagcctctgcacccaatgtttcctgaccaacccgaaaaacctctgaatctggcacacattgtgccccctagacccgtcacctccatgaatgatacactcttttcccatagtgtgccctctagtggttctccctttatcacccgcagtatgcttgaatcttcaaataggttagatgaagagcacagactcatcgcacgctatgcggctaggctggccgctgagtcctcatcttcgcagccacctcagcagaggagtgctcccgatatttcttttaccattgacgccaataaacagcagcgtcagctaatcgccgagttggagaacaagaatagagagatactgcaggaaatccaacgcctccggctggagcacgagcaggcctcccagcccacccctgaaaaagcccagcagaaccccaccctgctagccgaacttcggttattgagacagcggaaggatgagctggaacaacgaatgtccgctctccaggagagccgtagggaactcatggtgcagctcgaaggacttatgaaattgctaaaagaagaagagctgaagcagggaactcagggggctgggagcccacgttctagtcctagtcatacaataagccgccctattccaatgccgatcagatctgcctcagcctgtagtacccccacccatacacctcaagattctctgaccggcgtggggggagacgtgcaggaagcctttgcccagtcatcacgccgtaacttacgcaacgacctgttagtggccgcagatagtattaccaacaccatgtcctctctcgttaaggagcttaattccgaagtggggagtgagacagagtctaatgtggactcagagtttgccaggacccaattcgaagatctggtgccatcacctaccagtgaaaaagcattcttggcgcagatacacgctcgtaagcccggatacatccactctggtgcaaccacatcgacaatgaggggtgatatggtcaccgaagatgccgatccttacgtgcagcctgaagacgaaaattatgagaacgacagtgttcgccagttggaaaatgagctgcagatggaagagtacctgaagcagaaactccaggatgaagcctaccaggtgagtctgcaggggtag

SEQ ID NO: 221536 - DNA, 2061 bp, synthetic construct
  misc_feature 1..2061: note = Description of Artificial Sequence: Synthetic coding sequence
  source 1..2061: mol_type = other DNA
atgatagaggactcaggcaaacggggaaatacaatggccgaaagacgccaactgttcgctgaaatgcgtgctcaagacctcgaccgtatccgactgtctacctacagaacagcctgtaaactcaggttcgtgcagaagaagtgcaacctgcatctcgtggacatctggaacgtgatagaggcgctgagagagaatgccctgaataatctggatccaaacaccgagcttaatgtatcaagactcgaagctgttctgagcacaattttttaccagctcaacaagaggatgccaaccactcatcaaattcatgtggaacagtccatctctctactgctgaatttcttgctggccgctttcgatcctgagggacacggcaagatcagcgtttttgccgtgaaaatggccctagctacattgtgcggcggaaaaatcatggataaactccggtacattttctcaatgatcagtgattcctctggagtcatggtgtacggccgatatgaccagtttctccgcgaagtgctgaaactcccaacggctgttttcgaagggcctagtttcggttacactgaacagagtgctcggagctgctttagtcagcagaaaaaagtcacccttaatggatttctcgatactttaatgagcgacccacctcctcagtgtctcgtctggctcccactcctccataggcttgctaacgtggaaaacgtttttcacccagtcgagtgcagttactgccattccgagtcgatgatgggcttccggtacaggtgtcagcaatgtcacaactaccaactgtgtcaggactgtttttggagaggccatgccggtggtagccattctaaccagcatcaaatgaaggaatatacaagttggaaatcaccagcaaaaaaactgaccaatgcattatcaaaatccctgagctgcgcctctagcagagagcctctccatcctatgtttcctgaccaaccagagaagcccttgaatcttgctcacattgtgtgcttccgccctccgcgtccagtgaccagtatgaacgacaccctgttctcccattctgttcccagctccggcagtcccttcattaccagaagcatgttagaaagcagtaatcgtcttgatgaggagcacaggctcatcgccaggtacgccgcacgactcgctgctgaatcctcatccagtcagccgccacagcaacgctccgccccagatatttcctttaccattgacgccaataagcaacagcgacagctaatcgccgaactcgagaacaaaaaccgtgagattcttcaggagattcaacgcctgagactggaacacgaacaggcttcccaaccgacgcccgagaaggcgcaacagaatccgaccctgcttgcagagctgaggctcctcagacagcgcaaagacgaactggagcagaggatgagcgcgttacaagaatctcggagggaactgatggttcagctggaaggcctgatgaagctacttaagacccagggtgccggtagccctagatcttctccctcacacacaatttctcggccaatacctatgcccattcgctccgcgtctgcgtgtagcacccccacgcacacccctcaggactcgttaaccggagttggcggagatgtccaggaggccttcgcccagagctccaggagaaatttacggaacgacctcctcgtggctgctgattctataaccaatactatgagctctctggtgaaggagctaaatagcgaagtgggctccgaaaccgaatccaatgtggatagtgagttcgccagaacacagttcgaagatctcgtgccaagccctacctcagaaaaggccttcctcgcccagatccatgctagaaagcctggatacattcatagcggcgctacaacctcaaccatgaggggcgatatggtgacggaagacgcagacccctatgttcagcccgaagacgagaattatgaaaacgattccgtgagacagctggagaacgagctgcagatggaagagtacctgaagcaaaaactgcaggacgaggcataccaggtcagtctccagggctag

SEQ ID NO: 221537 - DNA, 2232 bp, synthetic construct
  misc_feature 1..2232: note = Description of Artificial Sequence: Synthetic coding sequence
  source 1..2232: mol_type = other DNA
atgattgaggactctggtaagcggggaaataccatggcagagcgcaggcaactgttcgctgagatgagggcacaagatctcgatcggatacggttgtctacataccgcactgcatgcaaactgcggttcgtgcagaagaagtgcaacttacatctcgttgatatatggaacgtgatcgaggcgctaagggagaatgctcttaataacctcgaccctaatacagagctgaacgtgagtcgtctggaagctgttctgtcgaccatattttatcagctcaacaaacggatgcccactactcaccagatccatgtagagcagtcgatttctcttctgttaaattttttgttagctgcttttgaccctgaaggtcacggaaaaatcagtgtcttcgctgtaaagatggcattggctactctatgcggcggaaagatcatggataagcttaggtatatcttttcgatgataagtgatagttctggggtgatggtctacggacggtatgaccagttcctccgggaagtgttgaaactgcccacagctgtattcgaagggccaagttttggctacaccgagcagagcgcaagatcgtgcttctctcagcagaaaaaggtcaccctcaacggttttctggacaccttgatgtccgatcctcctccccaatgccttgtttggctgcccttgttgcaccgcctggctaacgtggagaatgtatttcatccggtggagtgctcatattgccactcagagtccatgatgggattccgttaccgatgccaacaatgccacaattaccagctgtgccaggattgtttttggagaggacatgcgggaggatcgcactcgaaccaacaccagatgaaggagtatacatcctggaaaagccctgcaaaaaagcttaccaacgcactcagtaagagtctctcctgcgctagcagccgggaacccttgcaccctatgttccctgaccagcccgagaaacccttgaacctcgcccacatcgtttgctttagacctccccgacccgtaacctcaatgaacgacaccctcttttcacattctgtaccctcttccgggagtccatttattaccagaagtagtcccccaaaagattccgaagtcgagcaaaataagcttttagccagggcagcaccagccttcctcaagggcaagggcattcagtattcccttaatgtggcagataggctagccgacgagcacgtgctgatcggcttgtatgtgaacatgctcagaaacaacccctcatgtatgctagagagctcaaaccgcctggacgaggaacaccgcctgattgcacgatatgccgctcgactcgccgctgaaagctcatctagccagcccccacagcagagatcagccccagacattagctttacaatcgacgctaataaacagcaacgccaactgatcgccgagctcgaaaacaaaaaccgagagatcctgcaggaaatccagaggctccgcctggaacatgagcaggcatctcagcccactccagaaaaagcgcagcagaaccccacccttcttgccgagctgcgcctgttgagacagcgtaaggacgagctcgagcaacggatgagcgcactgcaagaatctcgccgtgaactgatggtccagctggaagggctgatgaagctgctcaagacgcagggcgctggctcacctcgatcttcaccatcacatactatcagcaggccaattccaatgcctattcgcagtgcttccgcttgctccacaccaacacatactccccaggattctctaaccggggtgggaggtgacgtccaggaggccttcgcccagagctccagaagaaacctaagaaacgacctgctagtcgccgcagattctataacaaatactatgtcgagcctagtgaaggaactgaattcggaggtgggctccgaaaccgagagtaacgtcgattccgaatttgcccgaacacagttcgaggatctcgtgccatcgccaactagcgaaaaagcttttctggctcaaatccatgccagaaagcccggatacatccacagtggtgccaccacctctactatgcggggagacatggttaccgaggacgctgatccttatgtgcaaccagaagatgagaattacgaaaatgattccgtcaggcagctcgaaaatgaactccagatggaagaatacttgaagcaaaagctgcaggacgaggcgtatcaggtgagtctccagggctag

SEQ ID NO: 221538 - DNA, 2232 bp, synthetic construct
  misc_feature 1..2232: note = Description of Artificial Sequence: Synthetic coding sequence
  source 1..2232: mol_type = other DNA
atgatcgaagattctggtaagagggggaatactatggctgaaaggagacagttgtttgccgagatgagggcccaagatctggaccgcatcagacttagcacgtatagaactgcatgcaaactgcggttcgtgcagaagaagtgcaatttgcacctagtcgatatttggaacgtgatcgaagctttgagagagaatgcacttaataacctggatcccaacacagagttaaacgtgagcagattggaagctgtgctgtcgaccattttctaccagctgaacaagcgcatgccgaccacacaccagattcatgttgagcagtcgattagcttactgctaaactttcttctcgccgcttttgaccccgaaggacacgggaaaatcagcgtcttcgctgtgaagatggctctggccacactgtgtggcggaaaaattatggataagctgcgatacattttctctatgatctccgacagcagtggcgttatggtatatggtcgatatgaccagtttctgcgggaagtccttaagttgcccacagccgtctttgagggtccaagcttcggatacaccgaacaaagtgccaggtcttgcttctcgcaacagaagaaggtgaccctgaacggattccttgacacactcatgtctgaccccccaccacagtgtctcgtgtggctcccactcttgcacagactggccaacgtggaaaacgttttccacccagtggagtgtagctattgccactctgagagtatgatgggatttagataccggtgtcagcagtgtcataattatcagttgtgtcaggattgtttctggcggggtcacgccggtgggagtcactccaaccagcatcagatgaaagagtacacttcttggaagagtcctgccaagaagctgacaaacgctctctctaagtccctatcttgcgcaagttccagagagcccttacatccaatgttccccgaccagcccgagaagcctctgaatttggcccatatcgtggatacttggcctcctagaccagtcacctcaatgaatgacaccttattctcccactccgtcccatctagcggttccccttttatcacacggagctcacccccaaaagactccgaggtggaacagaataagctcctcgcgagggctgcacctgccttcttaaaaggaaaagggatacagtattctctgaacgttgcagaccgcctggccgacgaacatgtgttgatcggcctgtacgtaaacatgctgagaaacaatccaagctgcatgctggaatcaagcaataggctggacgaagagcatcgattgatagcccgatacgcggctcggctcgctgctgagtcaagctcaagccagccacctcagcaacgctcagccccagatatcagcttcacaatcgacgcgaataagcagcagagacaactgatcgccgagctggaaaataaaaaccgcgagattttgcaggagatccagcgccttaggctggagcatgaacaagccagccagcctacccccgagaaagcacaacagaaccccacattactcgcagaattgcggctcctacggcagagaaaagatgagctcgaacagagaatgtctgcactgcaggaaagtagacgggagctgatggttcaacttgagggccttatgaagttactgaagacacaaggcgcagggtcccccagaagttcccccagtcataccatctcaagacccattcctatgcctattcgttccgcctctgcatgcagcacaccaacccataccccacaggactccctgaccggcgtgggaggcgatgtccaggaggcattcgcgcagtcttctcgcaggaacctgcggaacgacttactggtggcagctgactctataaccaatacgatgtcctctctggtcaaggagcttaactctgaggtaggctcagagacagaatccaatgtggattctgagtttgctagaactcagtttgaagatctcgtaccatcaccaacaagcgagaaggcgttcctggcccagatccatgcacggaagcccggatacattcactccggcgcaaccacatcgaccatgcgcggtgacatggtgaccgaagacgccgatccctacgttcaaccagaggacgagaattacgagaatgacagcgttcgacaactggagaatgagctccagatggaggagtacctgaagcagaaactgcaggacgaagcttaccaggttagccttcagggatag

SEQ ID NO: 221539 - DNA, 1176 bp, synthetic construct
  misc_feature 1..1176: note = Description of Artificial Sequence: Synthetic coding sequence
  source 1..1176: mol_type = other DNA
atgtttcccgatcagccagagaaaccactgaatctggcacatattgtgccccctagacctgtcacctccatgaacgacactctttttagccattcagtgcctagctctggcagcccatttataacccgctcttctcccccaaaggactcagaggtagagcagaataagctcctcgctcgcgctgcccctgcgttcctaaagggcaagggcatgctagagtcctcaaaccgcctggacgaagagcatcggctgatcgcacgttatgcagctagactcgccgctgaaagttctagctcacagccccctcagcagcggagcgcacctgacatctcatttaccatagacgcaaataaacagcagaggcaactgattgctgagctggaaaataagaatagggagatccttcaggagatccaacgactgcgactggagcacgaacaagcatcacagcctaccccagaaaaagcacagcaaaaccccactctgttagccgagcttagactccttagacagcgcaaggatgaactcgagcaaagaatgtcagcgctccaagagagccgcagggaacttatggtgcagttggagggcttgatgaaattgttgaaaacccaaggagctgggagccctagaagcagcccttctcatactatctcccggcctatccctatgcccattaggtcggcttccgcttgcagtaccccaactcacacccctcaggacagcctcaccggagtgggtggggatgtgcaggaggcatttgcccagtcctcccggagaaatctccgcaatgacctcctggtggccgcagactctatcaccaacacaatgtcaagcctggtgaaggaattaaattcagaagtgggcagtgaaaccgagagcaacgtggattccgagtttgccagaacacaattcgaggacttggtccccagtcctacaagcgagaaagctttcctggcacagatccacgctaggaagccaggatacatccatagtggcgcaactacgagcaccatgagaggcgatatggtgactgaggatgccgacccctacgttcaaccggaagacgagaactacgagaatgattcggtccgccagctggaaaatgagctgcagatggaggagtacctcaaacagaagcttcaagacgaagcgtaccaggttagcttgcagggctag

SEQ ID NO: 221540 - DNA, 1116 bp, synthetic construct
  misc_feature 1..1116: note = Description of Artificial Sequence: Synthetic coding sequence
  source 1..1116: mol_type = other DNA
atgattgaggacagcggaaaaaggggtaatacaatggctgagagacggcaactgttcgccgaaatgagagcgcaggacctggatcggatccgactgagtacctataggacagcttgtaaactgcggtttgtgcagaagaagtgtaatctccatctcgtggatatctggaacgtaatagaagccttgagggagaatgctctcaataaccttgatccgaacacagaacttaacgtgagcagacttgaggccgttctctctacaatattctatcagctcaataagcggatgcctactactcatcagattcacgtggagcagtctataagcctgttgctcaacttccttctggctgccttcgaccctgaaggtcacggcaagatcagcgttttcgcggttaagatggcccttgccaccctctgtggcggtaagattatggataaacttcgatacatcttttctatgatttctgattccagtggcgtgatggtgtatggacgttacgaccagtttctgagagaggtgctaaaactccccactgccgtatttgaggggccttcctttgggtacacagagcaatctgcaagaagttgcttctcacagcagaaaaaggtgactctgaacggctttttagacaccctgatgtcagatcctcctccccaatgtctggtctggctaccactgctccataggctggccaatgtggagaacgtttttcatcctgtcgaatgttcttactgtcacagcgaatcaatgatgggcttccgataccgatgtcagcagtgccataactaccagttatgtcaggactgtttttggcgtggtcacgcaggagggtcccatagcaatcagcaccaaatgaaagagtacactagttggaagagcccagcaaaaaagcttacaaatgccttgagtaagagtttgtcctgcgcctccagtcgtgagcctctgcaccccatgtttccggatcagcccgagaaacccctcaacctggcccatatagttcctcctagacctgtgaccagtatgaatgacacccttttttcacatagtgttccatcttcaggctccccctttattactcggagcagcgatggcgcattcggaggttgcgtctag

SEQ ID NO: 221541 - DNA, 1794 bp, synthetic construct
  misc_feature 1..1794: note = Description of Artificial Sequence: Synthetic coding sequence
  source 1..1794: mol_type = other DNA
atgattgaggagagtggcaacaagagaaagacaatggcagagaagagacagttatttattgaaatgagagcccaaaacttcgatgtgatccggttatccacataccgaaccgcctgtaagctgaggttcgttcaaaagcggtgtaatctccatcttgtcgatatctggaatatgattgaggcctttcgcgacaatggactcaataccttagatcacaccaccgaaatctccgtgagccgcctggagaccgtcatttcatccatctactatcaactcaataaacgcttaccttccacacaccagatcagcgtggagcaatctataagcctactcctcaacttcatgatagcagcctatgatagcgagggtagaggcaaactcactgtgtttagcgtgaaagcaatgctggccacaatgtgcggcggtaagatgctggacaagctacgatatgtgttttcccagatgtctgacagtaatggactgatgattttctccaagtttgaccagtttctcaaggaggtgctgaagctgccaaccgctgtgtttgagggaccgtcattcggttatactgaacatagcgtacggacgtgcttcccacagcagaggaaaataatgctaaacatgtttcttgatacgatgatggcggatccacccccacagtgtttggtgtggttacccctaatgcaccggcttgcccacgtggagaatgtattccacccagtcgagtgttcttactgcaggtgtgagagtatgatggggttccgatacagatgccagcagtgtcataactaccagctatgccaaaattgcttttggcgagggcatgcgggtggaccacacagtaatcagcaccagatgaaagagcattcttcctggaagtctccggcaaagaagctgtcgcacgcgatcagcaagtctctgggctgtgtaccaacccgcgagcccccacatccggttttcccggagcagccagaaaaaccccttgatctggcgcatatcgttcccccacggcctctgacaaacatgaacgacaccatggtgtcccacatgagctcaggcgttccgacccctacaaagcgtctgcagtactcccaggatattccctcacacttagccgacgagcacgcactaatcgcctcttacgttgcgagactccagcactgcgctcgggtcctggactcaccttctcggctcgacgaagagcaccggttgatagccagatacgcagctcggctggcggcagaagccggaaatgtgaccagacctcctaccgatctctcattcaacttcgacgccaataaacaacagcgacagctaattgctgaactggaaaataagaatcgggagatcttgcaggagatacagagactgagactggaacatgaacaggcgagtcagcccacccctgagaaggctcaacagaatccaacacttctggccgagcttagactcctgaggcagaggaaagacgagcttgaacagaggatgtcagctctccaggaaagtcgcagagagctgatggtgcagctcgaagagcttatgaagcttctcaaagaagcagaagcccgtgagagtgcccaggcgacaggttctcctcatacctctccgactcacgggggtggccgaccaatgcctatgcctgtaagatctacctctgccggtagcactccaacacactgtccacaagattctttgagcggcgtggggggagacgtgcaggaggcctttgcgcaggccgaagagggtgcagaagaggaagaagagaagatgcagaacggcaaggaccgcggatag

SEQ ID NO: 221542 - DNA, 567 bp, synthetic construct
  misc_feature 1..567: note = Description of Artificial Sequence: Synthetic coding sequence
  source 1..567: mol_type = other DNA
atgattgaggaaagcgggaacaagagaaagaccatggccgagaaaagacagctgttcattgagatgagagcgcagaatttcgacgtgataagactttcaacttatcggaccgcttgtaagcttcggtttgtgcagaagcgctgtaacctgcacctggtggatatctggaatatgatcgaggcctttagggataacggcttaaataccctggaccacacaacagagatttctgtctcgagactcgagaccgttatcagctcaatctactaccaactcaacaagcgactgcccagcacgcaccagatctccgtggaacagagcatctccctcctgttgaatttcatgatcgccgcatatgacagcgaaggtagaggcaagcttacggtcttcagtgtgaaggccatgctggcaaccatgtgtggtggaaagatgcttgacaagctcagatacgtgttctctcagatgtcagacagcaatggactgatgatttttagtaaattcgaccagtttttaaaggaagtgctgaagctgccaacagctgttttcgaggggccaagtttcggctag

SEQ ID NO: 221543 - DNA, 399 bp, synthetic construct
  misc_feature 1..399: note = Description of Artificial Sequence: Synthetic coding sequence
  source 1..399: mol_type = other DNA
atgatagaagaaagcgggaataagcgcaagaccatggctgagaagagacagctcttcatcgaaatgagggcacagaattttgacgttattaggctgtcaacttaccggacagcctgtaaactccggtttgttcagaagcggtgtaatctgcatctggtcgacatttggaacatgatcgaggcttttcgggataatggactgaatacacttgaccacaccaccgaaatcagtgtatcccggttagaaaccgtaatatcctccatttattaccagttgaataagcggttaccatctacacaccaaatcagtgtggaacagtcaatttcacttttgctaaacttcatgattgccgcttacgactcagagggacgcggaaaacttaccgtgttttcagtgtag

SEQ ID NO: 221544 - DNA, 450 bp, synthetic construct
  misc_feature 1..450: note = Description of Artificial Sequence: Synthetic coding sequence
  source 1..450: mol_type = other DNA
atgatcgaagaatctggcaacaagcgaaaaacgatggcagaaaagcgccagctgttcatcgagatgcgggcacaaaactttgacgtcatccgactctctacttaccgcaccgcgtgcaaattacggtttgtccagaaacgttgtaatttgcaccttgtcgatatctggaatatgattgaagcattccgcgataacggactgaacacactggaccataccaccgaaatcagtgtcagccgcctggaaactgttatcagttcaatctattatcagctcaataaaaggttgccctccacccatcagatttcagtcgaacagtctattagtctccttctgaactttatgatcgccgcatatgattctgaaggccgtggcaagctgacagttttttctgtgaaggctatgctggctaccatgtgcggcggaaaaatgctggataagctgcggtag

SEQ ID NO: 221545 - DNA, 1794 bp, synthetic construct
  misc_feature 1..1794: note = Description of Artificial Sequence: Synthetic coding sequence
  source 1..1794: mol_type = other DNA
atgatcgaagaatccggcaacaagagaaaaaccatggccgagaaacggcagctctttatcgagatgagggcacaaaactttgacgtgatcaggctgagcacgtaccgtaccgcatgcaaactgcgctttgtccagaagaggtgcaatctccacctggtcgacatctggaatatgattgaagctttcagggataacggtcttaacacccttgatcatacaaccgagatttccgtgtcaaggctcgagactgtcatctcttcaatttactaccaactcaacaaaagattgcctagcactcaccagatttctgtggagcagtcgatcagcctgctcctcaacttcatgatcgccgcatacgattccgagggtcgcggaaagctaactgttttctccgtcaaagccatgctggccacaatgtgcgggggaaaaatgctggacaaactgaggtacgtcttctcccagatgagcgacagtaacggtctgatgatcttctccaaatttgaccagttcctgaaagaggtcctgaagcttcctactgccgtattcgagggcccatccttcggctataccgagcacagcgtaaggacgtgctttcctcaacagaggaaaatcatgcttaacatgtttctcgacacaatgatggccgatccacctccccagtgtctcgtgtggctgccactgatgcacagattggctcatgtggagaatgtctttcatcccgtagagtgttcgtactgtaggtgcgagtccatgatggggttccgatacaggtgccagcaatgccacaattaccagttgtgccagaattgtttttggcgcggacacgccggaggcccacacagcaaccaacaccagatgaaagagcattcttcatggaagagtccagcaaagaaactgtcccatgctattagcaaatcactgggatgcgtgcccacacgtgagccacctcatcccgtgttccctgagcagcctgaaaagcctctcgacctggctcacatcgtgccgccaaggcctctgaccaatatgaacgatactatggtctctcacatgtcaagtggggtacccactcctactaaaagattgcaatatagccaggacattccgagccacttagccgacgaacacgctcttattgcaagctacgtggccagactgcagcattgtgctagggtgctggactctccgtctcgtctggacgaggaacacagattgatcgcgaggtatgctgctagactagctgctgaagccggaaacgtgactcgccctcctaccgacctcagcttcaattttgacgctaataaacagcagagacagctgattgccgaactggaaaataagaatcgcgagatccttcaagaaatccagagactcaggctggaacacgagcaagcatcacagccaacaccagaaaaggctcagcagaaccccacgctgcttgctgaactgcgccttttacgccagcggaaagacgagcttgaacagcgtatgtccgccctccaagagagccggagagagttgatggttcagctggaggagctgatgaagctactcaaagaagaggaacagaaacaggccgcacaggctactggatcgccccacaccagccccacacacggaggaggcagacctatgcctatgccggtgcggagcacttctgccggttcaacaccaacccactgcccccaggacagtctgtctggagtaggaggggacgtccaggaggcattcgcacaggctgaggaaggtgcagaggaggaagaagagaagatgcagaatgggaaggatagaggatag

SEQ ID NO: 221546 - DNA, 1683 bp, synthetic construct
  misc_feature 1..1683: note = Description of Artificial Sequence: Synthetic coding sequence
  source 1..1683: mol_type = other DNA
atgattgaagagtcagggaacaagcgcaaaacaatggcggaaaagcgtcagctgttcatcgagatgcgcgctcagaacttcgacgttattcggctttccacttaccgcactgcttgcaaactccggttcgttcagaagagatgcaaccttcatctagtggatatttggaatatgatcgaggctttccgagacaacggattgaatactttagatcacactactgagatctctgtctctagacttgagacggtcatcagctctatctactatcagctgaacaagaggctgccttctacacaccaaattagtgtggaacaatccatcagtttgttgcttaactttatgatcgcagcctacgattcagaagggagaggcaagctgaccgtcttttctgtgaaggcaatgctcgcaacaatgtgcggcggaaagatgctcgacaaactgcggtatgtgttctctcagatgtccgactctaatgggctcatgatcttctccaagttcgatcagtttctgaaggaggtgctcaagttgccaaccgcagtgtttgaggggccttcatttgggtacacagagcattccgtcaggacatgcttcccacaacagaggaagattatgttaaatatgttccttgatacaatgatggccgaccctcctcctcaatgcctggtgtggctgcctctaatgcataggctggcccatgttgagaatgtgtttcatcctgtcgagtgttcatattgcaggtgtgagagtatgatgggatttcgctatcgatgccagcaatgtcacaactaccaactgtgtcagaactgtttttggcgaggccacgccggaggacctcactctaaccagcatcagatgaaagaacacagcagctggaagagcccagcaaagaaactgtctcatgcaatctccaaaagcctgggttgcgttcccacccgcgagccaccccacccagtcttccctgagcagccagaaaagcccctagatctggctcacattgttcccccacgacctttgacaaacatgaatgatactatggtgagccacatgagctctggcgtgcctactcctactaagagtgtgttggattctcccagccgtcttgatgaagagcacaggctcatcgcacgttacgccgctcggcttgctgctgaagctggcaatgttacacggccacccactgatctgtcctttaatttcgatgccaacaaacagcagcgccaactgattgccgagttggaaaacaaaaacagggaaatcttacaggaaatacagaggctgcgcttagagcatgagcaagcatctcagccgacccctgagaaagcccagcagaaccccacccttctcgctgaacttagactcctcagacagcgcaaggacgaactggaacagcgcatgagcgctcttcaggaatcaaggagagaactgatggtgcaactcgaagagctgatgaagctgctcaaggcccaggctacgggttccccccacactagccccacgcacggcggtggaaggccaatgcccatgccggtgcggagcacatctgcaggctccaccccaacccattgtcctcaagattcactgtccggcgtgggaggggacgtacaagaagccttcgcccaggctgaggagggagctgaggaagaggaggagaagatgcagaatggcaaggatcgagggtag

SEQ ID NO: 221547 - DNA, 1884 bp, synthetic construct
  misc_feature 1..1884: note = Description of Artificial Sequence: Synthetic coding sequence
  source 1..1884: mol_type = other DNA
atgatcgaagagtccgggaacaagcgcaaaactatggccgagaagaggcaactgtttattgaaatgagagcgcagaactttgacgtaatcagattatcaacatacaggacagcctgcaaactgaggtttgtccagaaacgatgtaacctccacctggttgacatttggaacatgatcgaagcatttcgggacaacggcctgaataccttagaccataccacagagattagcgtttcaaggctggagaccgtgatttcaagcatatattaccaactcaataagcggctgccctcaactcatcagatttcagttgagcagtcgattagccttctccttaatttcatgatcgcagcctatgacagtgagggacgaggaaaacttactgttttttcagtcaaagcgatgttagccactatgtgtggaggaaagatgcttgacaagttgaggtatgtgtttagccagatgtcagactccaatggtctgatgatttttagcaagttcgaccagtttctcaaagaagtcctgaagttaccaactgctgtgtttgaaggcccaagcttcggatacacagagcattcagtgagaacctgcttcccccagcaacgtaagatcatgctgaacatgttcctcgatactatgatggcagaccctccaccccagtgtcttgtttggctcccgctgatgcacagactagcacatgtggagaatgtgtttcatcctgtggagtgctcttactgccgatgcgagtcaatgatgggcttcaggtatcgctgccagcagtgtcacaactatcaattgtgtcagaattgcttttggagggggcacgccggtggccctcattccaatcagcatcaaatgaaggagcactctagttggaaatctcctgcaaagaaacttagccacgcaatcagtaaaagcctgggatgtgtaccgacacgcgagccgccacaccccgtcttccccgagcagcctgaaaagccgttagatctcgcacatatagtgcctcccaggcccttgacaaatatgaatgacacaatggtttcacatatgagctccggggtaccaactcccactaaacgcctccagtattcacaggatattccatctcatctcgctgatgaacacgccctcattgctagctatgtggctcggcttcagcactgtgctcgagttctcgactctccaagccgcctggatgaggaacaccgtctgattgcaaggtacgcagcgaggctggccgctgaagcagggaacgttacgcggccaccgacagacttgtcgtttaatttcgatgcgaacaaacaacaaaggcaactaatcgccgagcttgaaaataagaaccgggagatcctccaggaaatccagcgactaaggctcgaacacgaacaggcatcccaacccacccccgagaaagcacagcaaaaccccactttactggccgagttgagactgctgcgacagaggaaagatgaactcgagcagaggatgtcagccctgcaggaaagtaggcgtgagctgatggttcagttagaagagctaatgaagttgttgaaagaagaggaacaaaagcaggcggctcaggctacagggagccctcacactagccccacccatggaggcggaagacccatgcccatgcccgtccgctcaaccagtgcaggcagcaccccaacccattgtccccaagacagcctctcaggggttggaggcgacgtgcaggaagccttcgcacagggtacgaggcgaaaccttaggaatgaccttcttgttgccgctgacagcataactaatactatgtccagcctggtgaaggagctgcactccgctgaggagggcgctgaggaggaagaggagaaaatgcagaatggcaaagatagaggatag

SEQ ID NO: 221548 - DNA, 1704 bp, synthetic construct
  misc_feature 1..1704: note = Description of Artificial Sequence: Synthetic coding sequence
  source 1..1704: mol_type = other DNA
atgatcgaggaatccggcaataagcggaagaccatggctgagaagcgccagctattcattgagatgagggctcagaactttgacgtaattagactctctacttacagaaccgcatgcaaactccggtttgttcagaaacgctgcaatctccacctggtggacatctggaacatgattgaggcattccgggacaacggcctgaatacacttgaccatactacagaaataagcgtgtcaaggctggagacagtgatctcctccatctactaccagctgaataaaaggctgccatcaactcaccagatttcagtggaacagtccattagcctcttactgaattttatgatagccgcttatgactctgaaggccgagggaagctgacagtgttcagtgtcaaagcaatgctggcgaccatgtgtggcggaaaaatgctggataagctcagatatgtgttctctcagatgtctgatagcaatggcttgatgatcttctcaaagtttgatcagtttttaaaggaagtcctgaagctgcccacagcagtgttcgaggggccttcttttggttataccgagcatagcgtcagaacttgttttccccaacagcgcaagatcatgctcaacatgttcctcgacacaatgatggctgacccacctcctcagtgtctcgtgtggctcccactgatgcatcgactagcccacgtcgagaatgtatttcatcctgtggagtgttcctattgccgatgtgagtcaatgatggggtttaggtaccgatgtcagcagtgccacaattaccagctgtgccagaactgcttttggagggggcacgcaggtggccctcacagcaaccagcaccagatgaaagaacatagcagttggaagtctccggcaaagaagcttagtcacgcgatttccaagtccctgggctgtgtgccgacacgtgagccccctcatcccgtgttccctgagcagcccgaaaaaccgctcgacttagcccacatagtgcccccaaggccacttacgaacatgaacgatacaatggtgtcccatatgtccagcggcgtcccaaccccaactaagagcgtactagactctccgtcacgtctggacgaggagcatcggcttatcgccagatacgcagcacgattggctgccgaagccggaaatgtgacccggccacccaccgacttatctttcaattttgatgccaacaagcaacaaaggcagctcatcgccgagctggagaacaaaaaccgggaaatcttgcaagaaattcagcggctgcggctggaacacgagcaggctagtcagccaactcctgaaaaagcccagcagaatccgacgctgcttgccgaacttcggctgttgcggcaaaggaaggatgaactggaacagcgcatgtcggctttgcaggaatctaggagagagctgatggtccagctggaagagctgatgaaactgttgaaggaggaggaacagaagcaggctgctcaggcaacaggcagtccacacacatcacccacccacgggggaggaagaccaatgccaatgcccgtccgttctacaagcgccggatctacaccaactcactgtccgcaggactcattgtcaggagttgggggagacgttcaggaggcatttgctcaagccgaggaaggggcagaagaggaggaggagaaaatgcagaatgggaaagaccgcggatag

SEQ ID NO: 221549 - DNA, 1773 bp, synthetic construct
  misc_feature 1..1773: note = Description of Artificial Sequence: Synthetic coding sequence
  source 1..1773: mol_type = other DNA
atgattgaagaatccggcaataaaaggaagaccatggccgagaagagacagctgtttatcgaaatgagagcacagaacttcgatgtaattagactgtccacatatcggacggcctgtaagctacggtttgttcagaaaagatgtaaccttcacttggttgacatttggaatatgatcgaagccttcagagacaatggactgaacacattagatcatactacagagatttctgtcagtcggctagaaactgtgattagctctatctattatcaactcaataagcgcttacccagcacccaccagatttccgtggagcaatcaatcagcttacttctgaactttatgatcgctgcctacgacagcgagggcagggggaaacttactgtgttcagtgtgaaagcaatgctggctacgatgtgtggcggtaagatgctcgataaactccggtatgtgttttctcaaatgtccgatagcaatgggcttatgatctttagcaagtttgatcaatttctcaaggaggtgctgaagttgccaacagcggtgttcgaaggtccctcctttggctataccgaacactccgtccgaacctgctttcctcagcagcgcaagataatgcttaatatgttccttgacactatgatggctgaccctccacctcagtgcctagtgtggctgccccttatgcacagactcgcccatgtggagaatgtctttcatcccgttgagtgttcttattgtaggtgtgagtcgatgatgggcttccgctatagatgccagcaatgccataactaccagctgtgtcagaattgtttttggagagggcacgctggtgggcctcattcgaatcagcatcaaatgaaggaacattcctcatggaagagccccgcaaaaaaattgtctcacgccattagcaagtcactgggttgtgtgcccaccagagaacctccacatcctgtgtttcctgaacagcctgaaaaaccactcgacctcgcacacatcgttccaccgaggcccctaacaaatatgaatgacaccatggtcagccacatgagcagtggagttcctactcctacaaaaagtgtcttagatagccccagccgactggacgaagagcataggctgatcgccaggtatgcagcaaggctcgccgctgaggctgggaatgtgacccgcccaccgaccgacctgagcttcaatttcgacgctaacaaacagcagcggcaactgatcgccgaattggagaataaaaacagagaaatccttcaggaaattcagagacttcgactcgagcacgaacaggccagtcagccaacaccagagaaggctcaacagaaccccacactgctagcggaactgcggctgctgcgacagcgcaaggacgagttggagcagaggatgagcgcgctgcaggagtctaggagggagcttatggtgcagttagaagaacttatgaagctgctcaaggctcaagccacgggatcccctcatacaagtccgacacatgggggaggacggccaatgcccatgcccgtgcggtctacatccgctggcagtacaccaacacattgcccacaagatagtctgagcggggtggggggtgatgtgcaggaggcttttgctcagggcactcgcaggaacctgcgtaatgacctcctcgtcgccgcagacagtatcactaacactatgtcttccctggtgaaagagcttcacagtgcagaagaaggagcagaggaagaggaagagaagatgcagaatggaaaagaccgaggctag

SEQ ID NO: 221550 - DNA, 1830 bp, synthetic construct
  misc_feature 1..1830: note = Description of Artificial Sequence: Synthetic coding sequence
  source 1..1830: mol_type = other DNA
atgatagaagagagtggtaacaaaagaaagacaatggcagaaaaacgacagctcttcatcgagatgagagcacagaatttcgatgtcatcaggctctccacataccgtacagcatgtaaactccggttcgtgcagaaaaggtgcaacctccacctagtagacatttggaacatgatcgaagcttttagggataacggactgaacactctggatcataccaccgagataagcgtgtcaaggctagaaactgtaattagcagtatttattatcagctcaataagaggctgccctccacgcatcagatctcagtagagcagagtatctccttgcttctcaatttcatgattgccgcttatgactcggagggcagggggaaactgaccgtgttcagcgtgaaagctatgctggccaccatgtgtggcggaaagatgttagataagctgagatatgtgttctcgcagatgagcgattctaatgggctaatgatattttccaaatttgaccagtttcttaaggaggtattaaaactgcccaccgccgtgttcgagggaccctcatttggctatacagagcattcggtccgaacctgctttccccagcaaaggaaaattatgctcaatatgttcctagacaccatgatggccgatcctccccctcaatgccttgtctggctacccctcatgcacaggcttgctcacgtggaaaatgttttccaccctgttgaatgctcttactgccgatgcgaaagcatgatgggattccgctataggtgtcagcagtgtcataactatcagctgtgtcaaaactgcttctggcggggacacgcaggcggtccacactccaaccagcaccagatgaaagaacattccagctggaagtctcctgcaaagaaactgtctcatgctatcagcaaaagcttgggctgcgtccctactagggagcctccacaccctgtgtttcccgaacagccggaaaaacctctagatctggctcacattgtacccccacgtccactgactaatatgaacgacaccatggtgtcccatatgtcgtctggggtgcccactcccaccaaacgactccagtactctcaggacattccttcccacctagcggacgaacacgcactgatcgctagttatgtcgcaaggttacagcactgtgctagggtcctggactccccctctcgtctcgatgaggaacataggctcatcgctcgttacgccgctcggctagcagccgaggcaggtaatgtgacacggccacctacggacctttctttcaatttcgatgcaaataaacagcagagacagctcatcgcggagctggaaaataagaacagggagatcctacaagagatacagagactgaggctggagcacgaacaggcttcccagccaaccccagaaaaggctcagcagaatccaacgctgcttgccgagcttcgcctgttgcggcagaggaaagacgaactggaacagcgaatgtctgccctgcaagaatccagacgggaactgatggttcagctggaagaacttatgaaattgctcaaggaagaagaacaaaagcaagccgctcaggcgaccgggagcccacacacttccccaacccacggcggtggtcgacctatgcccatgccagttaggtcaacctccgcgggttccacccccacccactgtcctcaggactccttatcaggtgtgggcggtgacgttcaggaggccttcgcccaggggacgcgacgcaatcttaggaatgacctgctggttgcagctgatagcattaccaacacgatgtccagcctggtgaaagagcttcactctgggtag

SEQ ID NO: 221551 - DNA, 1638 bp, synthetic construct
  misc_feature 1..1638: note = Description of Artificial Sequence: Synthetic coding sequence
  source 1..1638: mol_type = other DNA
atgattgaagcttttagagataatgggctaaatacgctcgaccacactaccgagatttctgttagtcggcttgaaacagtgatcagctccatctactatcagctgaacaaaaggctcccgagcacacatcagatctccgtggaacagagcatctccttgctgctcaatttcatgatagcggcatacgacagcgaggggcgaggaaagctcacagtcttttcagttaaggcaatgctcgcaaccatgtgcggcggaaagatgcttgacaaactgcggtatgttttctcccagatgtcagacagcaacggattgatgatcttctctaagttcgatcagtttctgaaggaggtactgaaattacccacagcagtgttcgaaggacccagcttcggttatacagagcacagtgtcagaacctgcttcccccagcagaggaaaatcatgctcaatatgtttttagacactatgatggccgaccctcccccacagtgcttggtctggcttcccctcatgcaccggctggcccacgtagaaaacgtcttccaccccgtggagtgttcctactgtagatgcgagtctatgatgggattccggtatagatgtcagcagtgccacaattatcaactgtgccagaactgcttttggcggggtcatgccggtggacctcactcaaaccagcaccaaatgaaggaacattcttcttggaaaagtccagccaaaaagctttcgcacgctatctccaagagcctggggtgtgtacctacgcgagaacctcctcatcccgtgtttccagagcagcctgaaaaacccttagacctggcacatatcgtgccacctcgaccccttaccaacatgaatgatacaatggtgtcccatatgagcagcggcgttcccactccaactaagaggttgcagtactcccaagacatcccctcccacttagctgatgagcatgcattaatagcgagttacgtggccaggctgcagcactgtgcgagggtgctggattctccatctcgattggacgaggagcaccgcctgatagcacggtacgctgcccgactggccgctgaggcaggaaacgtgacgcgtcccccaaccgacctatctttcaactttgatgcaaacaaacagcagcggcagcttatcgcagagttggaaaacaagaaccgggagattctgcaggagatccaaaggctgcgccttgagcatgagcaggccagccagccgaccccagaaaaggcgcagcagaatccgacactacttgctgaactgcggttactgagacagaggaaggatgagttggagcaacggatgtctgctctgcaggagagccggagggagctgatggtacagttagaagaactgatgaagctgctgaaagctcaggccactggttccccccacactagcccaactcacggaggagggcgaccaatgcccatgccagtgcgtagcaccagcgctggctccacacccacacattgcccacaggactccctcagtggagtgggcggagatgtccaagaggcattcgcccagggcactcggaggaaccttaggaacgacctgctcgtggctgccgattccattaccaatacaatgagcagcttggttaaagagctgcactccggctag

SEQ ID NO: 221552 - DNA, 960 bp, synthetic construct
  misc_feature 1..960: note = Description of Artificial Sequence: Synthetic coding sequence
  source 1..960: mol_type = other DNA
atgaccgacgttttttctcagatgtctgactcaaatggactcatgattttcagcaagtttgatcagttcctgaaggaagttctaaagcttccaacagcagtctttgaaggcccatccttcgggtatacagagcacagtgtgagaacctgtttcccgcagcagcggaagattatgctaaatatgtttctcgacactatgatggcagaccctccccctcagtgtcttgtttggcttccactgatgcacaggctggcacacgtcgagaacgtgttccacccagttgagtgctcttattgcagatgtgagagcatgatgggtttccgctaccgctgccagcagtgccacaattaccagctgtgtcagaactgtttctggagaggtcatgctggcggtcctcactctaatcagcatcagatgaaggaacactcatcttggaaatctcccgctaagaagctctcacatgctataagcaaatccctcggctgtgtgcctacacgagaaccacctcatcccgtgtttcctgagcagccagagaagccactggatctggcccatattgttccgcctagaccccttactaatatgaacgataccatggtgtcccacatgagctcaggagtccctaccccgaccaaacggctccaatacagtcaagatatcccaagccaccttgccgacgaacatgctctcattgcaagttacgtggccagacttcagcactgtgctcgtgtactcgactctcccagccggctagacgaagagcacaggctcatagccagatatgcggctcgactggcagccgaggccggtaacgtaacccgaccaccaaccgatctgagtttcaacttcgacgcaaataagcagcagagacaactgatcgccgagctggagaataaaaaccgtgagatcttgcaggagatccaacggttgcgcctagagcacgaacaggcatcacagtag

SEQ ID NO: 221553 - DNA, 1251 bp, synthetic construct
  misc_feature 1..1251: note = Description of Artificial Sequence: Synthetic coding sequence
  source 1..1251: mol_type = other DNA
atgttaaacatgttcttggatactatgatggcagacccaccccctcagtgcctggtctggctaccactgatgcatcggcttgcacatgtggaaaatgtcttccaccccgtggagtgttcttactgccgatgtgaaagcatgatgggtttcaggtaccggtgtcagcagtgccacaactatcagctatgtcagaattgcttttggagggggcacgcagggggacctcactcaaatcagcaccagatgaaggaacactcatcttggaagtcgcccgcaaagaagctgagccacgcaatcagcaaaagtctcggctgtgtcccaactagggagccgcctcatcctgtgtttcccgagcagccagagaagcccctagatctggctcacattgtaccgccaaggccgctcaccaacatgaatgacacgatggtgtcccatatgtcatccggcgttccaaccccgaccaagagactgcagtacagtcaagatattccaagccacctcgcagatgaacacgctctgattgcgagctacgtggccaggctgcaacattgtgcccgagtactcgacagcccctctcgacttgatgaagaacacagactgatcgcaagatatgccgcaaggctggcagccgaggctggcaacgtgactaggccacctaccgacctctcgttcaatttcgatgctaataaacagcagcggcagctcatcgccgaacttgagaacaaaaatagagagatcctccaggagatccagcgcctgaggctcgagcacgaacaggctagccagccgactcctgagaaagcccaacagaaccccactctgctggccgagcttaggctgttacggcagcgcaaggatgagctcgaacagcgcatgagtgcgctgcaagagtctcggagagagctgatggtacaattagaagaactgatgaaactgctcaaggcgcaggccactgggtccccgcacacgtcaccaacccatggtggagggcgaccgatgcccatgcctgttaggagcacctccgccggttctactcctacacactgtccacaggactccctctcaggtgtgggcggagacgtgcaggaagctttcgcccagggcacaagacgcaatctgagaaacgatcttctggtggctgctgattcaataacaaacactatgtcatccctcgtgaaggaactgcattctgcagaagagggcgctgaggaagaggaggagaaaatgcaaaacggcaaagaccggggatag

SEQ ID NO: 221554 - DNA, 2688 bp, synthetic construct
  misc_feature 1..2688: note = Description of Artificial Sequence: Synthetic coding sequence
  source 1..2688: mol_type = other DNA
atgcgaatgagcgtggggttgtctcttcttcttcccttaagcggccgaacatttttacttttgctgtcagttgtcatggcacagagccattggccaagcgaacccagcgaagcagtgcgcgattgggagaaccagctggaagcaagtatgcactcggtcctgtctgacttacatgaggccgtgcccactgtagtgggaatacccgacggtaccgccgtcgtggggagaagctttagagtgacaatccccacagatcttatcgcttctagcggcgacatcatcaaagtcagtgcagccggaaaggaagccctcccatcatggctacactgggactctcaaagtcacactctggagggactgcctttggataccgacaaaggggtgcattatatctcggtgtcagccacaaggctgggcgctaatggttcccacattccacaaacctcttctgtgttctctattgaggtgtatcccgaggatcacagtgagcttcagagcgttcgtactgcctccccagacccgggagaggtggtcagctccgcatgtgccgctgacgaacctgtcaccgttctcactgtgattctggacgcggatcttaccaagatgaccccaaagcagcgcatagacctcttgcaccgtatgcgatcctttagcgaggtggagctccataacatgaaactagtgccagtcgtgaacaataggttgtttgacatgtccgccttcatggcagggcctggcaacgcgaaaaaggttgtggagaacggcgctctgctgtcgtggaagctggggtgcagtctgaaccagaattctgtacccgacatccatggagtcgaagcgcctgcgagagagggggcaatgagcgcccagctcgggtacccagtcgttgggtggcacattgcgaataaaaaacctcctctcccaaaaagagtacgtagacagatccatgcgacccccactcccgtcacggccatcgggcctccaacaacagccatccaggaaccgccttcccgtatcgtccctaccccaacctctcctgccattgcacctcccaccgagacaatggcccctcccgtccgggaccccgtgcctgggaaacctacagtgacaattcgaacacgcggagccattatccagacacccaccttgggtccaatccaacccacccgggtgagtgaggcaggcactaccgtgccaggacagattcggcctacgatgaccataccgggttacgttgaacccactgctgtggctacccctccgaccacaacaaccaaaaaaccgagggtctccactcctaaacctgctaccccctctaccgattcaaccaccactacaactagaagacctaccaaaaagcctcggacacctagaccggttcctcgggtgaccacaaaggtgagtatcactcgacttgagacagccagtccacccactaggatcaggacgactactagtggggttcctcgcggtggggaacccaaccagcgccctgaacttaagaatcacatcgaccgggtggatgcgtgggtgggaacttactttgaggtgaaaatcccatcggatacattctacgaccacgaagacaccaccaccgacaagctgaaactaacccttaagcttagagagcagcagttagtgggcgaaaaatcctgggtccagtttaacagcaactcacaactgatgtacggattacccgactcatcccacgttgggaaacacgaatatttcatgcacgcgactgacaaagggggactctccgctgtggacgccttcgagatacatgtgcacagacgaccacagggcgatagggccccagctcggttcaaggccaagttcgttggcgatcccgctcttgtactgaacgacattcacaagaagattgctcttgttaagaaacttgccttcgcctttggcgatcgaaattgtagcacaattacacttcagaatattactcgcggatcaattgttgtggaatggacgaacaacaccctgccgctggaaccctgtcccaaagagcaaatcgccggattgagtaggcgaattgcagaagatgacggcaaaccaaggccagcattctctaatgcattggagcctgactttaaggcaacatcaattactgtgaccggttccgggagctgcaggcatctgcagtttatccccgtggtgcctccgagaagagttccatccgaagctcctcctactgaggtccctgaccgggaccccgagaagtcctccgaggacgacgtgtacctgcacacagtcatccccgctgtagtggtggcggctattttgttgatagccggtatcatcgcaatgatctgctatcgaaagaaaagaaagggaaagttaacactagaggaccaagcaacattcatcaagaaaggcgttcccattatattcgccgacgagttggatgacagcaagccacccccaagttccagtatgcccctcatacttcaggaagaaaaggccccattgccaccacccgaatatccaaatcaatccgtgcccgagacaacacctcttaaccaggataccatgggcgagtacacgccactgcgggacgaggaccccaacgcacctccctaccagccgccaccaccattcacagcgcctatggagggcaagggatctcgccctaagaacatgacgccttacagaagtcctcctccgtatgtcccaccttag

SEQ ID NO: 221555 - DNA, 432 bp, synthetic construct
  misc_feature 1..432: note = Description of Artificial Sequence: Synthetic coding sequence
  source 1..432: mol_type = other DNA
atgaccccgaaacagaggatcgaccttcttcatcgcatgcgttccttctccgaagtcgagcttcacaacatgaaactagtgccagtcgttaataacagactcttcgatatgtcagcctttatggctggtcctggaaatgcaaaaaaggtggtcgaaaacggggctttgctttcctggaaactgggctgctcactcaatcagaatagcgtacccgacatccatggagttgaggctcccgctcgggagggcgctatgagtgcccaactcggttatcccgtggtcggatggcacatagccaataagaaaccacctgcactctccggtccacctaagcctcagtcgtcttggcgtgacttcggggatttctttatctttatcttctgcctcacagcatttggactgttcattgagaattcctcccttcacttttag

SEQ ID NO: 221556 - DNA, 267 bp, synthetic construct
  misc_feature 1..267: note = Description of Artificial Sequence: Synthetic coding sequence
  source 1..267: mol_type = other DNA
atgaggatgagcgtgggtctgagcttgctcctgcctctgtccgggaggacctttctgctgttgctgtccgtggtgatggcacaaagtcactggccttcggagccatctgaagctgtgcgtgactgggagaatcaactggaggcaagtatgcacagtgttctttccgacctgcacgaagccgtacctacagtcgtgggcattccggacggcactgccgtagttggtcgctccttcagggttacaattcctacagacttaatcgcttag

SEQ ID NO: 221557 - DNA, 48 bp, synthetic construct
  misc_feature 1..48: note = Description of Artificial Sequence: Synthetic coding sequence
  source 1..48: mol_type = other DNA
atgcgcatgtcagtcgggttgtcactgctgttacctctgagtgggtag

SEQ ID NO: 221558 - DNA, 321 bp, synthetic construct
  misc_feature 1..321: note = Description of Artificial Sequence: Synthetic coding sequence
  source 1..321: mol_type = other DNA
atgaggatgtctgtgggcttgagtctgttactacctctctcaggcaggacgtttctactgctgctgtcggtagtgatggctcaaagccactggccctccgaaccatcagaggcagtgagggactgggagaaccagctcgaggcttctatgcactctgttttgtcagatttgcacgaggcggtgcccacggtcgtcgggattcccgacggcactgctgtagtgggacgatccttccgtgtcactatcccaaccgatctgatcgcgtcgtccggcgatataatcaaggtgtcagctgcgggaaaagaagcactgcctagctag

SEQ ID NO: 221559 - DNA, 291 bp, synthetic construct
  misc_feature 1..291: note = Description of Artificial Sequence: Synthetic coding sequence
  source 1..291: mol_type = other DNA
atgcggatgagtgtaggcttaagtctgcttctgcctctttctgggagaacctttctgctcttactttcggtagttatggcacaatctcattggccctccgaacctagcgaagccgtgcgtgactgggaaaatcagctggaagcctctatgcattccgtgttatcagatctgcacgaggcagtgccaactgttgtgggcatccctgacggtacagccgtcgtgggtcggtccttcagggtgaccatccctaccgatctgatcgcgagttccggagatatcatcaaggtatag

SEQ ID NO: 221560 - DNA, 30 bp, synthetic construct
  misc_feature 1..30: note = Description of Artificial Sequence: Synthetic coding sequence
  source 1..30: mol_type = other DNA
atgcgcatgtccgttgggctgtccctgtag

SEQ ID NO: 221561 - DNA, 354 bp, synthetic construct
  misc_feature 1..354: note = Description of Artificial Sequence: Synthetic coding sequence
  source 1..354: mol_type = other DNA
atgcgaatgagtgtggggctgtccctccttctgcctttaagtggcaggacctttcttctgctcctgtccgtcgtgatggcacaaagccactggccctctgagccttccgaagccgtgagagattgggagaatcagcttgaggcctcaatgcactcagtcctgtctgatctgcacgaagccgttcctaccgttgttggaatccccgacggaacagcggtggtcggcagaagctttcgtgtgactatcccaactgacctgatcgcctctagcggggacatcattaaagttagcgctgccggaaaggaggccctccctagctggttacattgggactctcagagtcacacactctag

SEQ ID NO: 221562 - DNA, 159 bp, synthetic construct
  misc_feature 1..159: note = Description of Artificial Sequence: Synthetic coding sequence
  source 1..159: mol_type = other DNA
atgcgtatgtccgtcggcctcagtctgttactgcctttgtctggacgtactttcttactgctcctatcggtcgtgatggcccagagccattggcctagtgagccgtcggaagctgtgcgtgactgggagaaccagctcgaggccagtatgcatagttag

SEQ ID NO: 221563 - DNA, 261 bp, synthetic construct
  misc_feature 1..261: note = Description of Artificial Sequence: Synthetic coding sequence
  source 1..261: mol_type = other DNA
atgcgcatgagcgtcggcctgtccctcctgctccctttgagcgggagaaccttcctccttctcctgagcgtggtcatggctcagagtcattggccttcagaacccagtgaagcagtgagggactgggagaaccagctcgaggcctctatgcactcggtactttccgatctgcatgaggccgttcctacagtcgttggcatccccgacggcacagcagtggtgggcaggtcattccgcgtgactattccaacagatctttag

SEQ ID NO: 221564 - DNA, 126 bp, synthetic construct
  misc_feature 1..126: note = Description of Artificial Sequence: Synthetic coding sequence
  source 1..126: mol_type = other DNA
atgcgaatgtctgtgggcctgtccctgctgctgccactgagcggacgcaccttcctcctgctgctctccgtggtgatggctcagtcacattggccaagcgaaccctccgaagctgtacgggactag

SEQ ID NO: 221565 - DNA, 2688 bp, synthetic construct
  misc_feature 1..2688: note = Description of Artificial Sequence: Synthetic coding sequence
  source 1..2688: mol_type = other DNA
atgcgtatgtccgtgggattatctttgttactgcccttgtcaggcagaacctttctgttactgctgtccgtggtgatggctcaaagtcattggcctagcgaaccatctgaagcagtcagagactgggagaatcagctggaagctagtatgcattctgtcctctctgacctgcacgaggccgtgcccaccgttgtgggtattcccgacgggactgccgtggtgggacggtcttttagagttactatccccacggatctaatcgccagttctggggatataattaaggtcagcgccgcaggcaaggaggccttgcccagctggttgcattgggattcacagtctcatactctggagggattgccgttagataccgacaagggcgttcattatatttcagtgtccgcgacccgactcggagccaacggaagtcacattccccagacgtcatctgtattttcaatagaggtatatcctgaggaccactccgaactccaatctgtgagaaccgccagccccgatcccggtgaggtagtaagttcggcttgcgcggcagacgaacctgttaccgtcctgacggtgatacttgatgctgatctgacaaagatgaccccaaaacagcggattgaccttctgcacaggatgcggtctttctccgaggttgaactccataacatgaagcttgtgcccgtcgtgaataacagattgttcgacatgagtgcctttatggctggccctggaaatgcgaaaaaagtcgtcgaaaacggggcactcctcagctggaaactgggatgtagtttgaaccagaattccgtgcccgatatacatggggtggaggcacccgcaagagagggagctatgagcgctcagcttggctatccagttgtggggtggcacattgctaacaaaaagcccccactgcccaaacgggtgcgcagacagatccatgcaacgccaacccctgtaacggcgattgggcctccaaccacagctatccaagagccaccgagtagaatcgtgccaacaccaacaagcccagcgatcgctccacccactgagaccatggcgcctccagttagggacccagtccctggaaaacctacagttaccatcaggactaggggcgcaattattcagacccccactctcggtccaattcaacctactcgcgtgagcgaggcaggcaccactgtgccaggacaaattagacccaccatgactatccctggatatgtggaaccaacagccgtggctacacccccaaccactaccaccaaaaaaccacgggtgagcacccctaagcctgcaactccatcaaccgacagcacgaccacgaccaccagaagaccaacaaaaaagccgagaacacctagaccagtgccgagagtgacgaccaaagtgagcattactcgcctggagacagcttcacccccaacccgtatcagaactacaactagcggggtgccacgcggtggcgagccaaatcagcggcctgaacttaagaatcacatcgatcgtgttgacgcctgggtcggcacatacttcgaagtcaagatcccgagcgacacattttacgatcacgaagatacgacgactgataagttaaagctgacactgaagcttagggagcaacaactcgttggcgagaagagttgggttcagttcaactccaacagtcaacttatgtatggtctgcctgactcctctcacgtggggaagcacgagtactttatgcacgccacagataagggcggactgtctgccgtggatgcattcgaaattcatgttcaccgcaggcctcaaggcgatcgggcacctgcccgatttaaagcaaagttcgtgggcgatcctgcgctagttttgaatgacattcataaaaaaatagccctcgttaagaagttggcattcgccttcggggatagaaattgcagtacaattactctccagaacatcacaagagggtcaatagtggtggagtggactaacaatacgctgcctctcgaaccttgccctaaggagcagattgcagggctctcacggcgtattgcggaggatgacggcaaacctagacccgcattctcaaatgccctggagcccgacttcaaggctaccagtattacagtaaccgggtcaggctcatgtcgccatttacaatttatacccgtggtgccccctagacgtgttccatccgaggctccaccaaccgaggtgccggacagggatccagaaaagtcctccgaagacgacgtgtatttacacacagtcatcccagcggttgtcgtggcggctatcctcctgatcgccggaattatcgcaatgatctgctaccggaagaagcgcaagggcaaactaactttggaagatcaggccacattcattaagaaaggtgtacctatcatttttgctgatgaactggatgactccaagccgccacccagctcctctatgcctcttatcctgcaggaagagaaagccccactgcctccaccggagtaccctaaccagtccgtgcctgagaccacacctctgaatcaagataccatgggcgaatacacaccgctcagagacgaggatcccaacgccccaccataccaaccacctccccctttcactgcgccaatggagggcaaagggagcaggcctaaaaatatgacaccctaccgcagccctcccccttacgtgccaccatag

SEQ ID NO: 221566 - DNA, 2688 bp, synthetic construct
  misc_feature 1..2688: note = Description of Artificial Sequence: Synthetic coding sequence
  source 1..2688: mol_type = other DNA
atgcggatgagtgttggattgagtttactgctgcccctgtctggcaggactttcctgctgctgctcagcgttgtcatggcacagagtcattggccatcagaaccttcagaggcagtacgcgattgggagaatcaattggaggcatctatgcattccgtgctgagcgatcttcacgaggcagttcccacagtggtgggcatccctgatggtactgcagtggttggtcgctcttttagggtgacaatcccgactgatctcatcgcctcaagcggggacattatcaaggttagcgccgcaggcaaggaagctctcccaagctggctgcactgggactcacagtcccatacattggagggcttgccattggataccgacaagggcgtgcactatatttcagtgtctgctactagactgggcgctaacggcagccacattccacagacctcctcggtcttctctattgaagtgtaccccgaagatcatagcgaattacaaagtgtaaggactgccagcccggatcctggcgaggttgttagttccgcttgtgctgcagacgaacccgtcacagtgcttacagtgatactggatgctgaccttactaagatgactccaaaacagagaattgatctgctccatcgcatgcgaagctttagcgaggttgagctgcacaatatgaaattagtacctgtggtaaataacaggctgtttgatatgagcgcattcatggcaggcccaggtaatgccaagaaggtagtagaaaatggcgctctgctgtcctggaaattgggctgttcactcaatcaaaattctgtgcccgacatacacggagtcgaggcgccagctcgtgagggggctatgtcagcacagttggggtatcccgtggtgggatggcatattgcgaacaagaagccgcctcttccaaagcgtgtaagaaggcaaattcacgccacccccactcccgtcactgctatcgggcctcctaccacagcaattcaagagcccccatccagaatagtgccaacacctaccagcccagccatcgccccacccacagaaacaatggcacctcctgtgcgagacccagtccctggcaagccgactgtgaccatcagaacaaggggagccattatccagactccgactcttgggccaatacagcccactagggtctccgaagccggtacgacagtcccgggacagatcagaccaaccatgacaatccctggatatgtggagcccaccgctgtcgcaactccacccaccaccactaccaaaaagccacgggtctccacacccaaacctgctactccttccactgattcaacaactaccacaacccgtcgcccaaccaaaaaaccccgaacaccacggcctgtacccagagtcactactaaagtctccatcacgagactagagaccgcatcgccacctacgcgcattaggacgactacgtcgggggttccacgcggaggtgagcctaaccagaggcccgagttgaagaatcacatcgaccgcgttgatgcatgggtgggtacctattttgaggttaaaattccctccgacaccttctatgaccacgaagatacaaccacggacaagctaaaactgactctcaaactccgagagcaacagctggtgggagagaaatcttgggtccagttcaattctaatagccagctcatgtacggactgcctgactcatcccatgttggtaaacacgaatattttatgcatgccacggataagggaggactttcggctgtggatgctttcgaaatccacgtgcataggcggcctcagggcgaccgagcccctgcgcgatttaaggcgaagtttgtgggtgaccctgcgctggtgctgaatgatatccataaaaaaattgcactggtcaagaaactcgcatttgctttcggagacagaaactgctccacaatcaccctccagaacatcactcgcggtagtatcgttgtggaatggactaataacacactgcctcttgagccttgtccgaaagagcagatagcgggattatccaggagaattgctgaggatgatggaaaacctcggcctgcattttctaatgctctggagcctgatttcaaagccacgtctattactgtaaccggttcaggcagctgccgacacctgcagtttatccccgttgtccctcctaggcgggtgccttcagaggctcctcctaccgaggttcctgacagggacccagaaaagtcaagtgaagacgatgtgtatctccacaccgtcattcccgctgtggtggtagcagccatcttattaattgctggcatcatcgccatgatctgctaccggaagaaaaggaaaggaaaactgactctagaagaccaggcgactttcattaagaagggtgtacctatcatctttgcagatgaacttgacgatagcaaacctccacctagttctagcatgcccctgatcctgcaggaagaaaaggcccctctgccaccacctgagtacccaaatcaatctgtcccagagactaccccccttaaccaggacacaatgggggagtacactccgcttcgagacgaggatccaaacgcccctccttaccaaccaccacctccatttacggcgcctatggaagggaaaggaagccgtccaaaaaatatgactccgtatcggtcaccgccaccatatgttcccccttag

SEQ ID NO: 221567 - DNA, 2688 bp, synthetic construct
  misc_feature 1..2688: note = Description of Artificial Sequence: Synthetic coding sequence
  source 1..2688: mol_type = other DNA
atgaggatgagcgttgggctgtccctattactcccactttctggcagaacttttttgttactgctctctgtggtgatggcacagagccattggccatccgagccttccgaagctgtccgggactgggaaaatcagctagaggcttccatgcattccgttctctcagaccttcacgaggctgtgcccaccgtcgtgggtatacctgacggcaccgccgtggttggtcggtcgtttcgcgtcacaatcccaactgatctgatcgcgtcatctggagacatcatcaaggtcagtgcagccggaaaagaggcgctgccatcctggctgcactgggacagccagtcgcacacattagagggcttacctctggataccgacaagggcgttcactacatttccgtgtctgcaacccgcctcggggctaacggaagccatataccacagacatccagcgtcttctctatcgaagtctaccctgaagaccattctgaattgcagtcagtgagaacagcttcgccggacccaggcgaagtcgtatcaagcgcctgtgctgccgatgagccagtaacagtgcttaccgtgatcctcgatgctgacctaacgaagatgacccccaagcagcgaatcgacctcctgcaccggatgcggagcttctctgaagtagagcttcacaatatgaaactggtccccgtggtcaacaatcgccttttcgacatgagcgcatttatggcagggcctggaaatgcgaagaaagtggtagagaacggcgcactgctcagctggaaactaggctgttcattaaaccagaactccgtgccggacatacacggggtggaggcgccagctagggagggtgcaatgtctgcacaattgggctatccagttgtgggctggcatattgcaaataagaagccaccacttcccaagcgcgtccgacgacagattcacgcaacacctacacccgtgaccgccataggtccacccaccactgccatacaggagcccccaagtagaatcgtgccaacacccaccagtccggcaatcgcgcctcctacggagactatggcaccacccgtcagggaccctgtgcctggcaaaccaactgtgaccattaggactcgaggcgcaattattcagacgcccactctcgggcctatacagccaaccagagtgagtgaagcagggacaaccgtgcctggacaaatccgcccaacaatgacgattcccggttatgtcgagcccacagccgtcgctacaccccctactaccaccactaaaaaacctcgggtgagtacaccaaagcctgccaccccaagcaccgattcaaccaccactaccacccggaggccaaccaagaagccacgtacaccacggcctgtgccacgggtcacaactaaggtctcaataacccggctggaaacagcgtcaccacccacccgaatccggacaactacaagtggcgtccctaggggcggtgagccaaaccagaggccagaactcaagaaccatatcgacagagtggacgcatgggtggggacttactttgaggtgaagatcccatctgatactttttatgaccacgaagacacgaccaccgacaagctgaaactgactcttaaactgagggagcagcagctggtaggcgaaaaatcttgggttcaattcaactccaactcccaactgatgtacggcctgccagactccagccacgtaggcaaacatgagtacttcatgcacgcaaccgataaaggtggtttgtccgccgtggacgcctttgaaatccatgtgcatcggcgaccgcagggcgaccgcgctccagctagatttaaagctaaattcgtcggggatcccgcactcgtcttgaacgatatacataagaagatcgcactggtgaagaaacttgcctttgcttttggagaccgcaattgtagcacgataacccttcagaatatcactaggggctctatcgttgtggaatggactaacaacaccctgcccctagagccatgccccaaagagcagatcgcaggcctgtcgaggcgcatcgccgaagatgatggcaagccccgacctgctttcagcaatgcactcgagcctgatttcaaggctaccagcataaccgtgacaggatctggaagttgcagacaccttcagtttatcccggtggtgcccccacgcagagtcccaagcgaggccccacccacagaagtgcccgatcgggaccccgagaagagcagcgaggatgacgtgtatctgcatacggtgattccagcagtggtggtagctgcgatcctgctcatagctgggatcatcgcaatgatctgttacaggaagaaacgtaagggcaagctcaccctggaggaccaagctacgtttattaagaagggggtgcctatcatctttgcagatgaactcgatgatagcaagccacccccttcctcctccatgcccttgatactgcaggaagaaaaggccccactgcccccaccagaataccctaaccaaagcgtgcccgaaaccacccccctgaaccaagatacgatgggagaatatacacccctgagggacgaggatcctaacgccccaccataccagcctccaccgccattcaccgccccaatggagggcaaggggtcgcggccaaagaatatgaccccttaccggagtccccctccgtacgtgccaccttag

SEQ ID NO: 221568 - DNA, 2688 bp, synthetic construct
  misc_feature 1..2688: note = Description of Artificial Sequence: Synthetic coding sequence
  source 1..2688: mol_type = other DNA
atgcggatgtcagtgggactctccctgctgctccctctgtccggacgcacttttctcctgctactgtccgttgttatggcccagtctcattggccctccgagccatccgaggccgtgagggattgggaaaatcagctcgaggctagcatgcattcagtgttgagtgacctacacgaagccgtgcctacagtggtggggattcctgacggaaccgccgtggttggtaggtccttccgcgtcactatcccgactgacctcattgccagttccggcgacatcattaaggtgtccgctgcaggcaaagaagcgcttccatcgtggctacattgggattctcagtcgcacactctcgaagggcttcccctggatactgataaaggcgtccactacatcagcgtctcagccacaagactcggggcaaacgggtcccatattcctcagacgagctccgtgttttctattgaagtctatccagaggaccacagcgaattgcagtctgtgcggacagctagcccagacccgggagaggtggtctcttcagcctgcgccgctgatgaaccagtcaccgtcttaacagtcattcttgacgcagatctgacgaaaatgacccctaagcaaagaatcgatctactgcacaggatgcgctctttctccgaagttgagctgcataacatgaagctcgtgccagtggttaataataggctctttgacatgtcggccttcatggccggacctggaaatgctaagaaggtggtggagaatggggcattgctcagctggaaactgggatgcagtcttaatcagaactccgttcctgacatacacggcgtggaagcccctgctagagaaggggctatgagtgcccagctagggtatccagtggtgggctggcatatcgcgaataaaaagccgcctcttcctaagcgcgtgcgtaggcaaatacatgcaactcctacgcccgtcaccgccataggcccacccaccaccgctatccaggaacccccaagccgcatcgttcctacacccacatcaccagcaattgcgcctcctactgagacaatggcacctccggtcagagatcctgtacccggaaagcccactgtcaccatacgcactagaggagcaatcattcagaccccaaccttgggccctatccagcctaccagagtgtccgaagctggcacaactgtccccggacaaatccggccaacaatgaccattcctgggtatgtggagcctaccgcagtagctacacccccaacgactaccaccaaaaaaccgcgagtgtccaccccaaaacccgcaactccatccacggacagtaccacaaccactactcgacgtccaacgaagaaacccaggacccctagaccagtacctcgggtcacaacaaaggtgagcataacccgactggaaactgcatctccaccaacacgtattaggactaccacctcgggagttcccaggggcggagagcctaaccagcgtcctgagcttaaaaatcatatcgaccgtgtggatgcctgggtgggcacctattttgaggtcaaaatcccctccgacacattttatgaccacgaagacactaccactgacaaactcaaacttacactgaaactacgcgagcagcagctcgtgggggagaagtcctgggtccagttcaactctaactcgcagctcatgtacgggctgcccgattcttcccacgtaggcaagcacgagtatttcatgcacgccaccgacaaaggcggactgtcagcggtcgatgctttcgagattcatgtgcacagacggccacagggagatagggcaccagctcgctttaaggccaaatttgtgggcgacccagctctcgtactcaacgatattcacaaaaagatcgccctcgtgaaaaaactggcctttgccttcggggataggaattgcagcacaatcacactccagaatattacccgtgggtcgatcgtagtggagtggaccaataataccctgccgctggaaccgtgcccaaaggagcagatcgcagggctttccaggcgaattgcagaagacgacggcaaacccaggccagcctttagcaacgctctcgaacctgactttaaggcaactagtatcaccgtcacaggttcaggctcatgcaggcacctccagtttatacctgttgtaccccctagaagagtcccttccgaagcccctcccaccgaggttccggacagggacccagaaaagagttcggaagacgatgtgtatcttcacacagtgataccagctgtcgtcgtggcagctattctcctcatcgccggtattattgccatgatctgctatagaaaaaagaggaaaggcaagcttactctggaggaccaggccacatttataaaaaaaggtgtgccaatcatctttgctgacgagttggacgatagtaagcctccaccaagcagcagcatgcctttgatcctgcaggaagaaaaggcacctctgccacctccagagtatcccaaccagtccgtccctgaaacaacaccgttgaatcaggacactatgggcgaatataccccactccgtgatgaagaccccaacgcgccaccatatcaaccaccacccccattcaccgcacctatggagggaaaggggtcgcggccaaagaacatgacgccttataggtctccacccccttacgttccaccttag

SEQ ID NO: 221569 - DNA, 2688 bp, synthetic construct
  misc_feature 1..2688: note = Description of Artificial Sequence: Synthetic coding sequence
  source 1..2688: mol_type = other DNA
atgcgcatgagtgttggtctgtctctgctgctgccgctgagcggccgtaccttcctgctgttgctgagtgtggttatggcccaaagtcattggccgtcagaaccctccgaagccgtgagagattgggagaaccaactggaagccagtatgcactctgtgctgagtgatttacacgaggccgtgcctacagtggtcggcatacctgacgggaccgccgtggtgggacgcagctttagagtgacgattcccacagatctcattgcttcatctggggatattattaaggtgagcgctgctggaaaggaagctctgcctagctggctccattgggactcccagagccacaccttagaaggacttccactggacacagataaaggggtccattatatctccgtgtcagctaccagacttggagccaacggcagccatattccgcagacttcgagtgtgtttagtatagaggtgtaccctgaagatcactctgaactgcagagcgtacgaacagcctctcccgatccgggtgaggtggtaagctctgcctgtgccgcagacgaaccagtgacagtgctcacggttattttggacgcagatctgactaaaatgacgcccaaacaacgcatcgacctcctgcaccgtatgcggtcttttagtgaggtggagctgcacaacatgaagttggtgcctgtcgtcaataacaggctgttcgatatgagtgcatttatggcaggccctggaaacgctaagaaggtagtggagaacggggctctactctcttggaaacttggttgttctcttaatcaaaatagtgtgccagacatccacggtgtggaagcacctgcccgtgaaggggctatgagcgcgcagctgggttaccctgtggtgggctggcacatcgcaaacaagaaacccccactccctaagcgcgttcgacgacaaatacatgccacgccaaccccagtgacagcaataggaccacctacaactgctatccaggagccaccatccagaatcgttccaacccccacctctcctgccattgctcccccaaccgagacaatggctccaccagtacgcgaccctgtgccaggcaagccaaccgtcactatacgtacacggggtgccattatccagactccgacgctggggccaatccaaccaacacgagtgtccgaggctgggactacggtaccgggacaaatccggccaaccatgactatcccaggctacgtcgaaccaaccgccgtggccaccccgccaacaacaactaccaagaagcctagggtgagcactcccaagcctgcaacgccatctactgattctacaaccactacaaccaggaggccaaccaaaaagccgaggaccccgagacctgtccccagagtgactacaaaggtgagcataacacgtctggaaactgcgtctcctccaactcgcattcggacaaccacttcaggagtgcctcgcggaggcgaacccaatcagcgtccggagcttaaaaaccatatagacagggtggatgcgtgggtgggcacttacttcgaggttaagattccaagcgatactttttacgatcacgaagacaccaccactgacaagctaaagctgacactgaagctgagagaacagcagctcgtaggagagaagagctgggtgcaatttaacagcaattctcagctaatgtatgggcttcctgattcctctcatgtgggcaagcatgagtattttatgcacgcaaccgacaagggaggtctaagtgccgtggatgcttttgaaatccatgttcaccggcgaccccagggcgaccgggcacccgcaagattcaaagccaaattcgtcggcgacccggctctggtcctcaatgacattcataagaaaattgccctggtgaagaaattggcattcgcgttcggggacagaaattgttccacgattactctgcagaatatcacccgcggttccattgtggttgagtggaccaacaataccctcccactggagccatgtccaaaggagcagatcgctgggttgtcgaggcggatcgccgaagacgatggcaaaccaaggccagctttttccaacgctttagagcctgattttaaagctaccagcattaccgtgaccggttccgggagttgccggcacctgcaatttatcccagtggtccctccaaggcgcgtgccctccgaggcccctcccacagaagtgccagacagggatcccgagaagtcctcagaagatgatgtgtatttacatacagtgatcccggcagtggtcgtggcggctatcctgttgattgccggaataatcgcgatgatctgttatagaaagaaacgaaagggtaaactgaccctagaggaccaggcgacattcatcaaaaagggtgtacccatcatattcgcagacgaattggatgactccaaacctcccccttcgagcagcatgcccctgatactgcaggaggaaaaggctcccctgcctccgccagagtatccgaaccagtctgtccccgaaacaacgcctctgaatcaggataccatgggcgaatacacccctctgcgggatgaggatcccaacgctccaccgtaccagcctccccctccattcacagcgccaatggagggtaagggctcacgccctaagaacatgaccccttacagatccccacccccatacgtacccccttag

SEQ ID NO: 221570 - DNA, 2025 bp, synthetic construct
  misc_feature 1..2025: note = Description of Artificial Sequence: Synthetic coding sequence
  source 1..2025: mol_type = other DNA
atggccgctgggggagccgagggaggctcaggtcccggagctgcaatgggagactgcgctgagatcaaaagccaatttcgaacacgggaagggttctacaagctgctgcccggagacggagcggctcggcgatcgggaccggcatcggctcagacgccagtccccccacagccacctcagcccccaccagggcctgcctcagcatccgggcctggcgcagccggtcccgctagctctccaccccctgctggccctggcccaggccctgcgttgccagctgtgcgcctgtctctggtgcgcctgggcgaacccgatagcgccggagcaggagagccccctgccacgccagccggactggggtcaggtggcgaccgcgtctgtttcaacctgggaagagaactgtatttctaccctggttgctgccggagaggttcccagagatccatcgacctgaataaaccaatagacaagaggatttataaaggcacacagcccacctgccatgactttaaccagttcactgccgcaacagagacaattagcttattggtgggcttctctgctggccaggtgcagtatctggatctgataaagaaggacaccagtaagctgtttaatgaagaaaggctgatcgacaaaacgaaggtgacctacctgaagtggctgccggagtctgagtcgctgtttcttgcctcacacgcatctgggcacttatacctgtacaatgtctcacacccatgcgcttccgcacctccacagtattcattgctgaaacagggggaagggttctctgtatacgctgcgaaaagcaaagcccctcgtaacccgttggccaagtgggctgtgggtgaagggcctctcaacgaattcgccttcagccccgacggcaggcaccttgcatgtgtatcacaggacggctgccttagagtgttccatttcgactctatgctgctacgagggctcatgaaatcctatttcggcggactgctctgcgtgtgctggtccccagatggccgttacgtggtgacaggtggtgaggatgacctcgtgacggtgtggagtttcacggaaggcagggtggtggccagggggcacggccataagtcgtgggtgaacgcggtggcgtttgatccttacactacgcgggctgaagaggcagcaaccgctgctggtgctgatggcgagcgtagtggcgaggaggaggaggaggagcctgaggcagccggaacagggtccgctggaggcgctcccctctccccacttcctaaagctgggtccattacttatcgctttggatctgcagggcaggacactcagttctgcctgtgggatttgactgaggatgttctataccctcatcctccactggccagaactagaacactgccaggcacaccaggcacaacacctccggctgccagcagctcccgtggaggagaacccggtcctggaccgttgccgaggagccttagtaggtcgaattccctgccacatcctgctggaggtgggaaggccggtgggccaggggtggccgcagagccaggcacaccatttagcattggacgattcgctacgcttaccctgcaggaaagaagagaccgaggagccgaaaaggaacataagagataccattcactcggcaacataagtcggggtgggtcaggcggaagcgggtcggggggtgagaaaccgtccgggcctgttccaaggagccgattggacccagcgaaggtcctgggaacagcgctgtgtccacggatccacgaggtgcccctcctcgaaccattggtgtgtaaaaaaatcgctcaggaaagactgactgtactgctcttcttggaagactgcatcattaccgcgtgtcaagagggtttgatatgtacctgggccagacctggaaaggcctttaccgacgaggaaacggaggcacagacgggcgagggatcttggcctaggtccccgtcaaagtccgttgttgagggaattagctctcagcccggaaacagtccttccgggaccgtcgtctag

SEQ ID NO: 221571 - DNA, 1890 bp, synthetic construct
  misc_feature 1..1890: note = Description of Artificial Sequence: Synthetic coding sequence
  source 1..1890: mol_type = other DNA
atgtccgccgaagtacgcctgaggcgccttcagcagttggtactcgaccccggttttctgggcttagaacccttgctggacctgttattgggagttcaccaggagctgggggcttcggagctagcccaggataaatacgtggctgatttcctgcagtgggcagagcccattgtggtgcgactgaaggaagtacgcctgcaacgggacgacttcgagatcctgaaggtgattggcagaggggctttcagtgaagtcgctgtggtaaagatgaagcagactgggcaagtgtatgcgatgaaaatcatgaataagtgggatatgctcaaaaggggtgaggtaagctgcttcagagaggaacgcgatgtcttggtcaacggggaccgacggtggatcacccagctgcactttgctttccaggacgaaaactacctatatctggtgatggagtactacgttgggggtgatctgctgactttgctgagtaaattcggcgagcggatccccgctgagatggcaagattctatttagccgagatcgtcatggccatcgactctgtgcaccgtttaggctacgtccaccgggacatcaagcctgataatatattgctggaccgatgtgggcacataaggcttgccgactttgggtcctgtcttaaactccgtgcagatggaacagtccgtagcttagtggccgtaggtaccccagattatctcagtccagagattttgcaagccgtgggtggcggacctggaaccggctcttacggcccagagtgcgactggtgggctctgggtgtgtttgcctatgaaatgttctacgggcaaacacccttttacgcagatagcacagctgagacttatggcaaaatagtccactacaaagagcatctcagccttcctttagtcgatgagggagtgcctgaagaagctcgggattttatccagcgcttgctgtgtcccccagagacgaggctggggaggggcggagctggcgacttccgcacccacccttttttcttcggtctcgactgggatggtcttcgggacagcgtcccacccttcacaccagacttcgaaggggcaactgatacctgtaatttcgatctcgttgaggatggtctgaccgcaatggtgagtggcggtggagagacacttagtgatatcagagagggggctccactgggtgtacacctccctttcgttggatacagctacagctgtatggccctcagagatagcgaagtacctggacccactccaatggaactagaagccgagcagctcttagagccccacgtccaggccccatcactagaaccatccgtgagcccgcaggacgagacagctgaagtcgctgtgccagcggctgtgcccgcagccgaggccgaagctgaagttaccctaagggagctgcaggaagcccttgaagaggaggttttgacacgtcagagcttgagcagggaaatggaggcaatccgaaccgataatcagaatttcgcaagccagcttcgtgaggccgaggccagaaatcgagatctagaggcgcatgtgagacaactgcaggaacgaatggaactcctccaggcagagggagccaccgcagtaacaggagtgccctccccgagggctactgaccctcccagtcacctcgacggtccaccggctgtagccgtgggccagtgccctttggtcggcccaggtcctatgcaccgcaggcacctgttgttgccagccagagtgcccagacccggactgagcgaggcgttgagcttactcctctttgcagtggtactttcccgcgctgcggctctggggtgcatcggattggtggctcacgctggccagctgaccgccgtgtggcgtcgacccggagcagctcgcgctccttag

SEQ ID NO: 221572 - DNA, 1968 bp, synthetic construct
  misc_feature 1..1968: note = Description of Artificial Sequence: Synthetic coding sequence
  source 1..1968: mol_type = other DNA
atggtcttgcctgtgcagcacgtgtcgcgcggtgccgctgaggccgctccagccgctggcgtgggtccaggcctccctggtgcaggcgcacctgcccgaccctccccaggcagacctcccggtgctgggcgactgcgaacaggacctggtcaggtgcggggacgcttgttggctgttggccctaaatcccgggtctttcagagcgttgtgcaggaaccacctgcctctgaaagccgagcggagcccattgtggtccgactgaaggaagtccgcctccagagagacgattttgaaatcctgaaggtcatagggcgaggagccttctcagaggtggccgtggttaagatgaaacagacaggccaggtatacgctatgaagatcatgaacaagtgggacatgctaaagaggggcgaggtgagttgcttccgggaagaacgagacgtacttgtgaacggcgataggaggtggattacacagctccattttgctttccaagacgagaactatttgtaccttgtcatggaatattacgtaggcggagatttgctgaccttgctgtcaaagtttggagagagaatccctgccgagatggctcgcttttacttggccgagatcgtgatggctatcgattccgttcacagactggggtacgtgcatcgcgatataaaacctgacaacatcttgctggacaggtgtggacacatcagattagctgattttggctcttgcttgaagttaagggccgacgggaccgtgcgtagcttggtggccgttggcacacccgactacctgtcccccgagatcctacaggccgtcgggggaggaccaggcacgggctcttatggtcctgaatgcgactggtgggcccttggcgtcttcgcctacgaaatgttctatgggcagacacccttttatgcagactcgacggcggaaacctacggcaagattgtccattacaaggaacatttaagcttgcctctggtggacgaaggcgtgccagaagaagcccgagattttatccaacggctcctctgtccccctgagacacgcctaggacgaggaggcgcaggagattttaggacgcacccattctttttcggcttggactgggatggcctgcgggacagtgtaccgcctttcactcctgattttgagggcgcaaccgacacctgtaattttgatctagtggaagacggactgacagcaatggtttctgggggtggtgaaaccctgtcagatattcgcgaaggtgcccctctaggggttcaccttccttttgtcgggtattcctacagctgtatggcgctgagggattctgaagtgcccggtcccacccctatggaactcgaggctgagcaattgcttgagccgcatgtgcaggctccttcactcgagcccagtgtttctccccaggatgagacagccgaagtggctgttcccgctgctgtgccggcagctgaagctgaagccgaagttacactgcgagaactgcaagaggccctcgaagaggaagtgctgacgcgccagtctctctcccgggaaatggaggccattagaacggacaatcagaactttgccagccagctgcgcgaagcggaggccaggaacagagatctggaggcacatgttaggcagctccaggaacgaatggagctattgcaagccgaaggggctaccgccgtgaccggagtccccagtcccagagcaacagatccgccaagccaccttgacgggccaccagcagtggcagttgggcaatgcccactcgtgggcccagggcctatgcataggcgccatttgctgctcccggctagggtgccaaggccagggttatcagaagctctgtcactgcttctctttgctgtcgtgctctcccgggcagccgcacttggctgtatcggattggtcgcgcacgctggacagctcactgctgtgtggagaaggcctggggcagctcgggctccctag

SEQ ID NO: 221573 - DNA, 1920 bp, synthetic construct
  misc_feature 1..1920: note = Description of Artificial Sequence: Synthetic coding sequence
  source 1..1920: mol_type = other DNA
atgggcggacacttctggccccctgagccatacactgtttttatgtgggggtccccttgggaagcggatagtccaagggttaagttgcggggacgggagaagggacgccagacggaggggggtgcctttccactggtgagttcggccctgagtggcgacccaagattcttttcccccactactccgcctgctgagccaattgtggtaaggttgaaggaggtgcgcctgcagcgagacgactttgaaattctgaaagtaataggcagaggcgctttctccgaagtggccgttgtcaagatgaagcagaccggccaggtgtacgcgatgaaaatcatgaataagtgggatatgctgaaacggggtgaggtttcctgtttcagggaggagagggacgtgctggtgaacggcgaccgcagatggatcacgcaactccatttcgcttttcaggacgaaaactatttatatctcgtaatggagtattacgtgggtggggacttgctgacccttctttcgaagttcggcgagcgcatccccgctgagatggcccgtttttatttagctgagattgtgatggccattgactctgttcaccggctaggctacgtgcaccgcgatatcaaacctgataacatactgctggaccgctgtggccatatcagactcgctgacttcgggtcatgtctcaaactgcgcgctgatggtactgtgcgaagtctcgtggcagtaggcacaccagattacttgtctcctgagattctacaggcggtgggtgggggtccgggtactggctcctacggcccagagtgcgattggtgggcactcggcgtgttcgcctatgagatgttttacggccagacccctttctatgcagactctaccgctgagacctatggaaagattgtccactacaaagaacacctgtcgctgcctctggtggacgaaggcgtgcccgaggaagcacgcgatttcattcagcggctgctatgtcctccagagacgagactcggcaggggtggcgctggcgattttagaactcacccatttttctttggattagactgggatggattgcgcgatagcgtcccccctttcactccagactttgaaggagccactgacacatgcaactttgatctggtggaagatggcctcacggctatggtatctggcggtggagagactctgagcgatataagagaaggcgctcccctgggagtccacctgccttttgtcggatattcctacagctgtatggcattgcgcgactcagaggtcccaggcccaacacctatggaactggaagctgagcagctgctggagccccacgtccaggctccctccctcgaaccttcagtgtctccacaagatgagaccgcagaagttgctgttcctgcggcagtgcccgctgcagaggctgaagccgaggtcacgctgcgggagctgcaggaggctttggaggaagaagtgctgacaagacagagcctttcccgtgagatggaggctattaggaccgataatcagaactttgcttcccagcttagggaggcagaggctaggaatagggatttggaggcacacgtaaggcagttacaggaaagaatggagttactgcaggccgagggcgctacagcggtgaccggggtcccaagccctagggctacagacccaccatctcatctggatggccctcctgctgtcgctgtggggcagtgccccctggtgggcccaggtcccatgcaccgacggcatctcttgttgccggcaagagtgccacgcccaggtctctcagaggcactgtctcttctgctgttcgctgtggtgttatctagagctgctgccttagggtgtatcgggcttgtcgcgcacgcagggcagcttacggccgtgtggagacgacctggtgccgctagggctccatag

SEQ ID NO: 221574 - DNA, 1830 bp, synthetic construct
  misc_feature 1..1830: note = Description of Artificial Sequence: Synthetic coding sequence
  source 1..1830: mol_type = other DNA
atggggggacacttttggccacccgagccttacactgtattcatgtggggtagcccctgggaagccgacagtccgagggtaaagctaaggggcagggaaaagggccgtcaaactgaaggcggagcctttcctctcgtgtcatcagctctctcaggcgacccacgattcttctctccgacaactcctccagccgagccaatcgtagtcagactcaaagaggtgcgtctgcagcgggacgactttgagattctgaaagtgattggacgcggagccttttctgaggtggccgtggtgaagatgaaacagacagggcaggtgtatgcaatgaagattatgaataagtgggacatgctgaagaggggagaagtatcctgttttcgggaggaacgcgacgtcttggtgaacggcgacaggcgttggattacccagctgcatttcgcttttcaagacgaaaattacctctatcttgtgatggagtattacgtgggtggggatctcctgactctcctttccaagttcggggagcgcataccagccgagatggccaggttttatctggctgaaatagtgatggctattgactcggtgcacaggcttgggtatgtacatagggatattaagccagacaacattttgttggatcgttgcggccacattcggttagctgattttggatcttgcctgaagctgagggcagatggcaccgtgcgttctctggtcgccgtgggaacacccgactacctttcaccggagatactgcaagctgtgggtgggggaccaggcaccggatcctatggaccagagtgtgattggtgggcactcggtgtatttgcgtatgaaatgttttacggacagacacccttttacgcagactcaaccgccgaaacatacggaaaaatcgtgcactataaagagcacctgtctcttccattagtagacgagggggtgccagaggaagcgagggattttattcagcgattactctgtccacccgagacaaggctcggacgcggtggggcaggagattttagaacccatccattcttttttgggctagactgggacggcctacgagattcagtgcctccttttacgccggacttcgagggggctacagatacgtgtaatttcgatctggtggaagacggcctcacggcgatggtcagcgggggaggggaaactctttctgatatcagagagggcgcacccctaggggtccacctgccgtttgtcgggtatagctatagctgtatggctctccgggactccgaagtacccggacctacacctatggagctagaggccgagcaactgctggaaccacatgtgcaggctccttcgttggagccaagcgtctcccctcaggacgagaccgcagaagtcgcggtgcccgctgcagtgcccgctgcagaggctgaagctgaggtgactttacgcgaactgcaagaagccctggaagaagaggtgctgacccgccagagcctgtcccgggaaatggaagcaatacgtacagacaaccagaacttcgcttcacagctcagagaagcagaggccagaaacagggacctggaggctcatgtacggcagctgcaggaaagaatggagttgctacaagcagaaggcgctaccgctgttacgggagtaccttccccacgcgcaaccgaccccccatcccatgtgcctagaccagggttatctgaagccctgtccctactgttatttgccgtcgtcctcagtagagcggctgcccttggttgtattggcttagtcgcccatgctgggcaattgactgccgtctggaggcgccctggcgcagctcgggctccttag

SEQ ID NO: 221575 - DNA, 1593 bp, synthetic construct
  misc_feature 1..1593: note = Description of Artificial Sequence: Synthetic coding sequence
  source 1..1593: mol_type = other DNA
atgtctgcggaggtgcgcctgcggagattacagcagcttgtcctcgatcctggatttctaggactagaaccacttttggatctcctgttgggcgttcaccaggagctcggtgccagcgagcttgctcaagacaaatacgtggctgacttcctgcagtgggccgaaccaatagttgtacgcctgaaagaagttagattgcaacgggacgatttcgagatactgaaggtgattggtcgaggagcattctctgaggttgccgtagtgaagatgaaacagactggtcaggtatatgccatgaagattatgaacaagtgggacatgctcaagcgcggtgaagtttcttgcttcagagaggaaagggatgttttagtgaatggagaccggcgatggatcacccagctgcatttcgccttccaggatgaaaactacctgtatttggtaatggaatattacgtgggaggagatctgctaactctgctcagtaagttcggcgagcgcattccggctgaaatggcaaggttctacctagctgagatagtgatggcaattgattctgtgcatagactcgggtacgtccacagagacataaaacccgataacattctcctcgatcggtgcggacatattcgattagcggactttggctcctgcctcaaactgagagcagacggaacggttcgctctctcgttgccgttgggacccccgattacctgtctcccgagattctccaggcggtggggggaggtcccggaacaggaagctatggccctgagtgtgactggtgggccttgggggtcttcgcttacgagatgttctatgggcagaccccattctacgccgattcaacagccgaaacctacgggaaaattgtgcactacaaggaacaccttagtttacctcttgtggatgagggcgtgcccgaggaggcaagagacttcattcaacggctgctgtgtccgccagaaactcggctcggacggggtggagcaggagacttccggacacacccattcttctttgggctggactgggacgggctgcgcgatagtgtgcctcctttcaccccggatttcgaaggcgcaacagacacttgcaacttcgatctggttgaggatggcctgaccgccatggaaactctgagcgacatacgggagggggctcctttgggcgtgcatctccctttcgtcggctattcctactcttgtatggcgcttcgcgatagtgaagtgcctgggcctactcctatggaactcgaagccgagcagttgctcgaaccgcacgtccaggccccaagcttggagcctagcgtgtcccctcaagatgagacagccgaagtggctgtgcccgctgccgtgcccgctgcagaggccgaggccgaggtgactttacgtgagttacaggaggcattagaggaagaggtactgactcggcagtcactgtcccgcgagatggaagctatccgcaccgacaaccagaacttcgcctcacagttgagagaagctgaggctcggaatagagatttagaagcccatgtccgccagcttcaggaacgaatggaactgctgcaggccgaaggcgctacagggccatag

SEQ ID NO: 221576 - DNA, 1866 bp, synthetic construct
  misc_feature 1..1866: note = Description of Artificial Sequence: Synthetic coding sequence
  source 1..1866: mol_type = other DNA
atgtcagcagaagttcgcttgagaagacttcagcagctcgttttagaccctgggtttctgggccttgagcccctactggatttgctgctgggcgtacatcaggagcttggggcaagcgagctcgcgcaggataaatatgtggccgactttttacagtgggccgaacctatagtcgtgcgcctcaaagaggtcaggctccagcgcgatgatttcgagattttaaaggtcatcggacgaggcgctttctccgaggtagccgttgtcaagatgaagcagacggggcaggtgtatgccatgaaaatcatgaacaagtgggatatgctgaagcggggtgaggtgtcttgtttccgtgaggagagggatgtgctggtaaacggcgatcggaggtggatcacacagctgcactttgcattccaagatgaaaactacctgtacctggttatggaatactatgtgggaggggatctgctgaccctgctctccaaatttggggaacggatcccagctgagatggctagattttatctcgctgaaatcgtaatggccatcgacagcgtgcataggttaggctacgtgcatcgtgatattaaacctgacaatattctgctagacaggtgcggtcatattagactcgcagattttggctcatgccttaaactccgtgcagatggtactgtgcgcagtttagtagccgtggggacccccgactatctgtctcctgagattttacaggcagtcggaggaggacccggtactggctcctatggcccagagtgtgattggtgggcacttggagtctttgcctacgaaatgttctacggccagactccattctatgccgacagtaccgctgagacatacggcaaaatcgttcattacaaagagcatctctccctgccgctagtcgatgagggggtcccagaagaagccagagattttattcagcgcctgctgtgtccaccagagacaagattaggaagaggaggggcaggggacttcaggactcatccattcttcttcggtcttgattgggacggactcagggacagtgttcctccctttacacccgattttgagggggctaccgacacgtgcaatttcgacctggttgaggacggtctcaccgcgatggaaaccctaagcgatattagggagggcgcacctctgggggtgcaccttcctttcgtgggttactcatatagttgcatggctcttagagactccgaggttcccggtcctacccctatggaactcgaggctgaacagctattggaaccccatgtgcaggctccttctctcgagccatctgtaagcccccaggatgaaactgcggaagtggcagtccccgcagctgtgccagcggctgaggcagaagcggaagtgactctcagagaactccaggaagccctggaggaggaagtgttgacacggcagtccctgtctcgcgaaatggaggcaatcaggacggacaatcagaactttgcctctcagctgagagaggccgaagctaggaatagggacctagaggcccacgtgcggcagttgcaagagagaatggagctcctccaggccgagggcgcaactgccgtgaccggagtgcccagtcctcgtgcaaccgaccccccttcccatctggatggtcctccctggctttgggcttcggctaggtggtgggggcagatgcacaggcggcatctgcttctgccagcacgggtccccaggccaggactatcggaagccctctccctcctgttatttgccgtggttctgagccgcgctgccgctctgggctgcattggcctggtggctcatgcaggccagctgaccgctgtgtggagaaggcccggtgctgcacgggctccctag

SEQ ID NO: 221577 - DNA, 1875 bp, synthetic construct
  misc_feature 1..1875: note = Description of Artificial Sequence: Synthetic coding sequence
  source 1..1875: mol_type = other DNA
atgtcagccgaagtgagactgcgcaggctccagcaactggttctcgacccgggtttcctggggttggagccgttgctcgatcttctgcttggcgtccaccaggagctgggggctagcgaactggcacaagataagtacgtcgccgacttcctgcagtgggctgaaccaatagttgtaagactaaaggaggttcggttacagagagatgatttcgagatcctgaaggtgattggccgaggggctttctcagaagttgcggtggtgaaaatgaaacagaccggacaagtgtacgctatgaaaattatgaataagtgggatatgctgaagcggggagaagtcagttgttttagagaagaacgtgacgttctcgtgaatggtgaccggaggtggatcactcaactgcatttcgctttccaggatgagaactacctgtaccttgtgatggagtactacgttggcggtgacctcctgactctactttccaaatttggcgaacggatacctgccgagatggccaggttttacctggcagagatcgtgatggctatagactcagtacacagacttgggtatgtgcatcgagatattaaaccagacaatatcctgctcgatcgctgcgggcatatcagactcgcagattttggttcatgcctcaagctgcgggctgacggaacagtccggagccttgtagccgtgggcacccccgactacctgtctccagaaatccttcaagctgtcggaggcggtcctgggacagggtcctatgggccagaatgtgactggtgggcactcggggtctttgcatacgaaatgttttacgggcagacgcccttctatgcggatagtaccgcagagacgtacggaaaaatcgtgcactataaagaacacttgtctctgcctcttgtcgacgagggcgtgcctgaagaagcgcgagattttattcagcggcttctgtgcccaccagagacacgactgggacggggaggcgctggggatttccgaactcatccgtttttttttgggcttgactgggacggtctgcgcgactctgtgcccccatttacccccgactttgagggcgcaacagatacttgcaattttgacctggtagaggatgggctcaccgcgatggagacactgagcgacatccgcgaaggcgctccactgggcgttcatctaccatttgtgggctattcttattcctgcatggcccttagagactcagaggtgcccggacccacaccaatggaacttgaagccgaacagctcctcgagccacatgtgcaagctccgagcctggaaccgtcagtcagcccccaggatgagacggccgaagtggcagtacccgcagctgtgcctgccgcagaggccgaggcagaagtgaccctccgcgaattgcaggaggcattggaggaggaggtcctcacgcgccagagtctatcaagggagatggaggccatacggacagacaaccaaaattttgcttctcagctgcgtgaagccgaggcaaggaaccgggatctggaggcccacgtgagacagctgcaggaacgaatggagctgctccaggctgagggagcaactgccgtcaccggggtccccagtccgagggctaccgaccctcccagtcacctcgacggaccacctgccgttgccgttggacagtgtccattggtagggccaggcccaatgcatagacggcacctgcttttgcccgcacgtgtgccccgtccaggattatcagaagcactcagtctgctgttattcgccgtggtgctatccagagctgctgctttgggctgtattggccttgtagcacatgctggtcagctgacagcggtctggcgaagacccggagccgctcgcgctccctag

SEQ ID NO: 221578 - DNA, 1878 bp, synthetic construct
  misc_feature 1..1878: note = Description of Artificial Sequence: Synthetic coding sequence
  source 1..1878: mol_type = other DNA
atgtcagcagaagttaggctgcgcagactgcagcagctggtgctcgacccaggctttttgggtttagagcctctactggatctgctgctcggggtccaccaggagctgggggcatcagaactggcgcaagacaagtatgtcgccgatttccttcagtgggccgaacctattgtggtgcgtctgaaggaagtgagactgcagagggatgactttgaaattcttaaggtgatcggacggggagcattcagcgaggtggctgttgtcaagatgaagcagacaggacaggtttatgcgatgaaaattatgaataaatgggatatgttgaagcgaggggaggtctcctgttttagggaggagcgcgacgtcttagtcaatggtgatcggagatggatcacccagctgcactttgcgttccaggacgaaaactatctttatctagttatggagtattatgtgggcggagacctgttgactcttctgtcaaagtttggcgagagaatccccgcagagatggcgcgattctacctggccgaaatcgtcatggccatagattcagtccaccgcctgggatacgtccacagagacataaagcctgacaatattctgctggacaggtgtggccacattagactcgccgacttcggcagctgcttaaaattgcgagcagacggaactgtgaggtctctggtggcagtcggtactccagattatctgtcccctgagattctgcaggcagtcggcggtgggccagggacaggatcctacggcccagagtgtgattggtgggcactgggagttttcgcttacgagatgttctacggccagacccctttttacgccgatagtaccgctgaaacctatggcaagatcgtgcactacaaagagcacctttccctgccattggtggatgaaggagtcccagaagaagccagagattttatacagcggttgctgtgccctccggaaactcggctcggtcggggaggcgcaggtgactttaggactcacccattctttttcggcctggactgggacggcctgcgcgactccgtgccccctttcactcccgacttcgagggcgctactgacacctgcaattttgatctggtcgaagatggtttaaccgcaatggagaccctatctgatatacgggagggcgctcccctgggtgtgcatcttccttttgtcggctattcttactcatgcatggctctgagagattcagaagtgcctggcccaactcctatggagttggaagcagagcaactccttgagcctcatgtccaggccccttctttagagccaagtgtgtctcctcaggacgaaaccgcggaggttgcagtacctgccgcagtcccagctgccgaagcagaggctgaagtcacgctccgggaactgcaggaggctctagaggaagaggtgctgactcgccagtctctctctcgcgaaatggaggcgattcgcacggataatcagaatttcgcgtcacaattaagggaagccgaagccagaaaccgggacctggaagcacatgtccgtcagcttcaggaacggatggagctgctccaggcggagggagccacagcggtgactggagtgcccagtcctcgggcaactgaccccccatcccatatggcgccacgcccttggctgtgggctagtgccaggtggtggggacaagccccttgtactgcggctacttgttgtagcttgcccggtagcttggggctcgcttaccgtagaaggttcccctgctcttgctctccattgttttgtctcgtgccccctccctgggccgctctcgggtggtggccaacccctgccaacagtccccaaagcggagccgcacaggaaccacccgcattgccggagccctag

SEQ ID NO: 221579 - DNA, 129 bp, synthetic construct
  misc_feature 1..129: note = Description of Artificial Sequence: Synthetic coding sequence
  source 1..129: mol_type = other DNA
atggaactgttacaagctgagggcgcaacggctcgctggccccctggtcggggatgcgggcctgtgccagcaggcggtgctaggccacacgccccaccccctcccgctgccccttgccaaggcccttag

SEQ ID NO: 221580 - DNA, 3402 bp, synthetic construct
  misc_feature 1..3402: note = Description of Artificial Sequence: Synthetic coding sequence
  source 1..3402: mol_type = other DNA
atgccctcgtccctgatgctcgaggtgcccgctctcgctgatttcaatagagcgtggaccgagttaactgattggttatctttactggatcaagttataaagtcccaacgtgtgatggtcggcgacctggaagatatcaatgagatgattatcaaacaaaaagcaactatgcaggacctcgagcagcgaaggcctcaactggaggagcttatcacagccgctcaaaatctgaagaataaaacaagcaaccaggaagctaggaccatcattaccgacagaatcgagaggattcagaaccagtgggacgaggtgcaagagcacctgcaaaaccggcgtcagcaactcaatgaaatgcttaaggatagcacccagtggctcgaagcgaaagaggaagccgaacaagtcttggggcaagcccgtgccaaattagaatcttggaaggaaggaccatacactgtcgacgccatccagaaaaagatcactgagaccaaacaactggccaaggatttgaggcagtggcagacaaatgtcgatgttgctaacgacttggcactcaagttattgcgtgattactctgccgatgacaccagaaaagtacatatgattacggaaaatattaacgcctcctggcgcagcatccacaagcgcgtttcagagcgtgaagctgcactggaagagacccacaggttactacagcaatttccactggacctggagaagttcctggcttggctcacggaagccgaaaccacagccaacgtgttacaagatgctacgaggaaagaaagattattagaggactccaagggagtgaaggagctgatgaaacagtggcaggatctgcagggtgaaatagaggcacatactgatgtgtaccataacctggacgagaactctcaaaaaatactacgatcactggagggcagcgacgacgccgtattactacagaggcgtctcgacaacatgaattttaaatggagtgagctaagaaaaaagtcccttaatattaggtcgcatctcgaagcgtcaagcgaccagtggaaaagactgcacttgtccttgcaggaactgctcgtttggttacagcttaaagatgatgagctgtcacgccaggctccaattgggggagattttcctgccgtgcaaaagcagaatgatgttcaccgcgctttcaagagagaacttaagacaaaggaacctgttatcatgagcacgcttgagaccgtacgcatttttctgaccgagcagccgttagagggtcttgaaaaactgtaccaggagccacgcgaactgccaccagaagaaagagcacagaatgtgacccggctcctacgcaagcaggcggaagaggtgaataccgagtgggagaagcttaacctccatagcgcagactggcagcgcaagatcgacgaaactctggagagactgagagaactccaggaggccaccgatgagttagacttaaaactccgccaagccgaggtgatcaagggcagctggcagccggttggcgacctgttaatagacagtctgcaagatcacttggaaaaagtcaaggctttgcggggtgagatagctccgctgaaggaaaatgtgagccacgtgaatgatctcgctaggcagctgactacgctcggaattcaactatccccatataacctaagcacactcgaagatctaaatacccggtggaagttgctacaggtggctgtggaagaccgcgtaaggcagttgcacgaggcccaccgggatttcggaccagcttctcaacatttcctgagcacctccgtccagggaccgtgggagcgcgctatcagcccaaataaggtgccatactatattaaccatgaaacgcagaccacgtgttgggaccatccgaagatgacagagctttaccagtccctggccgacctcaataacgtcagattttctgcttatcgaacagccatgaagctaagaaggctgcagaaagccttatgcctggatctcctttcgctctcggcggcttgcgacgccctggatcagcacaacttaaagcagaacgatcaaccgatggatatcctccagataataaattgtctgacaacaatttatgatcgcttggagcaggagcacaacaaccttgtgaacgtgccgttatgtgtggacatgtgtcttaattggcttctgaacgtgtacgatacgggaaggacaggaagaatacgtgtcctgtctttcaagaccggcataattagcctctgtaaggcccatctcgaggacaaatatcggtacctcttcaagcaagtagcttcatccaccggtttttgcgaccaaagacgtctagggctgttgctccatgactccattcagattccgcgacagctcggggaggtggcatcattcggagggtccaatattgaaccttccgtcaggagctgtttccagtttgcaaacaacaaacctgaaatcgaggcagccctttttctggactggatgcgccttgagcctcagtctatggtgtggctcccagtgctccatagagtggctgcagctgagactgccaaacaccaggccaagtgcaatatatgtaaggagtgccccattattggcttcagatatcggagcctgaagcattttaactacgacatttgtcagagctgctttttttccggccgagtagctaaaggccataaaatgcattaccccatggttgagtactgtaccccaacaacatccggcgaggacgtccgggattttgcgaaggtccttaaaaacaaatttcggaccaagagatatttcgccaaacacccaagaatgggctacctccctgtacagacggtgctcgaaggagacaatatggaaactaacctgcaggcggaatacgaccggctgaaacagcagcacgagcataaagggctgagccctctaccaagccctcctgagatgatgccgacgtccccacagtcacctagggatgccgagctgatcgccgaagccaagctgctgaggcagcacaaaggcaggctcgaggcaagaatgcagatcctcgaagaccacaataaacagctcgaaagccagttacatcggctcaggcagttgttggagcagccccaagccgaagccaaggtgaatggcaccaccgtttcatcaccaagcacatccctgcaacgcagtgacagctcgcagcctatgctgctgagagtggtgggctcccagacttccgactccatgggggaggaggatttactttctccgccacaggatacgagtacagggctcgaggaggtaatggaacagcttaataacagttttccgtcaagtaggggccacaatgtcggctccttattccacatggcagatgatttaggtcgagccatggagagcctggtgtctgtaatgacggatgaagaaggcgctgaatag

SEQ ID NO: 221581 - DNA, 11058 bp, synthetic construct
  misc_feature 1..11058: note = Description of Artificial Sequence: Synthetic coding sequence
  source 1..11058: mol_type = other DNA
atgctgtggtgggaggaagtggaagattgctacgaacgtgaggacgtccaaaagaaaacttttactaagtgggtgaatgcccagttctccaaattcggaaaacagcatattgagaacctgtttagtgatctacaggacggacgtagactgctcgatcttctcgaaggactcactggacaaaagctgcctaaagaaaagggaagtaccagagtacacgccctgaataatgtgaacaaagccctgagagtcctgcagaacaataacgttgatttagtcaacattggctccaccgacattgtggacgggaatcacaaactgaccctgggcctcatttggaacattattctgcactggcaagtcaaaaacgtgatgaaaaatatcatggcgggattgcagcagaccaatagtgaaaagattcttctgagttgggtgaggcagtccaccaggaattacccccaggttaacgttataaacttcacaaccagctggtctgatggacttgccctcaatgccctgattcacagccaccggccagacctgttcgactggaactctgttgtatgtcagcagtctgccactcagagacttgagcatgcattcaatatcgctcgctaccagcttggcattgagaaactgctcgaccccgaagacgtggatacaacctaccccgataaaaagtcgattctgatgtatatcacatccctctttcaggtccttccccagcaagtaagtatcgaggcaatccaggaggtggaaatgttgccaagaccacctaaggtcaccaaagaagaacattttcaacttcatcaccagatgcattattctcagcaaatcactgtgtcactggctcagggctacgagaggacctctagtcccaaacccaggtttaagtcttatgcctatacgcaggccgcttatgtgaccacttctgatcctacccgcagcccattcccctcccagcatctcgaagctcctgaggataagtcatttggaagctcattgatggagtcagaggtgaacctggataggtatcagaccgccctggaagaagtgctatcttggctgctatcggccgaagacaccctccaggctcagggtgagatatccaatgacgtcgaagtggttaaagatcagtttcacacccacgagggctacatgatggacctgacagcccatcagggacgcgtgggcaacattctccagctgggcagtaagctgataggcacgggcaagttgtcagaggatgaggagacagaggttcaggagcagatgaatctgctgaattcacggtgggagtgtctgagagttgcttccatggaaaagcagtctaatcttcacagagtcctgatggacctgcagaatcaaaaactcaaggagctgaacgattggttgacgaaaacagaggaacgaacacgaaagatggaggaagagccattgggacctgacctcgaagatctaaaaagacaggtccagcagcacaaggtgctacaggaagacctggagcaggaacaagtcagggttaattctctcacacacatggttgtcgttgtggacgagagttctggcgatcacgccactgccgctcttgaggagcagctcaaggtgctaggggaccggtgggccaatatatgccgttggaccgaggataggtgggttcttttacaggatatccttcttaagtggcaaaggctcacagaggagcagtgtcttttctctgcttggttaagcgagaaagaagatgctgttaacaagatacacactaccggcttcaaggaccagaatgagatgctgagttccctccagaagcttgcggttctgaaggctgacctggaaaaaaagaagcagagcatgggtaagctgtacagcttgaaacaggacctgctttctacactcaagaacaagtcagtgacacagaagacagaggcctggttggataactttgcccgatgttgggacaatttagtccaaaaattggaaaaaagtaccgctcaaatctcccaggctgtaaccacaacccagccttctctgacccaaactactgtgatggaaactgtgacgaccgtgaccacgagagagcaaatcctggtgaagcatgcacaggaagaactccctccccctccgcctcaaaagaaaaggcagataactgtggacagtgagattcgcaagcgcctggatgttgatattacagagctgcattcttggatcactcgctcagaggctgtcctccagtccccagaatttgccatctttcgtaaggaaggcaacttctctgatcttaaggaaaaggtgaacgccattgagcgggagaaagccgagaaatttcgcaagttacaggacgcttcccggagcgctcaggcactggtggagcagatggttaacgaaggagttaacgccgattctattaaacaagctagtgaacagttgaactcccgatggattgagttttgtcagttgctgtccgaacgactcaattggttggagtaccagaacaatatcattgccttctacaatcaactgcagcagctcgagcagatgacgaccacagctgagaattggttaaagatccagcccacaaccccctctgaacctacagcaatcaagtctcagcttaaaatttgcaaggatgaagttaataggctgtcagatttacagcctcagatagagcgcctcaagatccagagtatagcactaaaagagaagggccagggacctatgtttttggatgccgacttcgtcgcttttaccaaccattttaagcaggtgttcagcgatgtccaagcccgtgagaaggagctgcagaccatttttgataccctgccccctatgcgctatcaggaaacaatgtccgctattcgaacctgggtgcagcagtctgagactaagctgagcataccgcagctgtccgtgacggattatgaaataatggaacagaggctgggtgagctgcaagctttacagtcttctctccaggagcagcagagtggcctgtactacctgtccaccaccgtaaaagagatgtctaaaaaagcaccatccgaaatttctcgaaagtaccagtctgaattcgaagaaatagaggggaggtggaaaaagctctcgtcacagctggtggaacattgccagaaactcgaggaacagatgaataagctcagaaaaatacaaaatcacattcagacccttaagaagtggatggcagaggtcgacgtttttctgaaggaggaatggccagcactcggtgatagtgagatcctgaaaaagcagctgaagcaatgtcgcctgcttgtcagtgatatccagaccattcagccctctctcaatagcgtgaacgagggtggacagaagattaaaaatgaggcagaaccagaatttgctagccgactcgagacagagctgaaagagctcaatacacagtgggatcacatgtgccagcaggtctacgccaggaaggaggctttaaaaggcggactcgaaaagacagtctcactacagaaggacctgagtgaaatgcacgaatggatgacccaggcggaggaagagtatcttgagcgggattttgaatacaagactccagacgaactgcagaaagcagtggaagagatgaagcgggcaaaggaagaagcccagcagaaagaggcaaaagtcaaactcctgacggagtcagtgaatagcgtgatcgctcaggcccctcccgtagcccaggaggctctgaaaaaagaactcgagacccttactacgaattaccagtggctttgtacacggctaaacgggaagtgcaaaaccctggaagaggtatgggcttgctggcacgaactgctgtcatacctggagaaggccaataagtggttgaacgaagttgagttcaaactcaagactactgagaacatcccaggaggtgctgaagaaattagcgaagtgttggactcattggagaacctcatgagacactccgaggacaaccccaatcagatcagaattcttgcccagaccctgacagacggtggagtgatggatgaacttattaatgaagaactggaaacctttaattccaggtggcgcgagcttcatgaagaagcggttagacggcagaaactgctggagcagtccattcaatcagcccaagagaccgaaaagagtttgcacctgattcaggagagcctgaccttcattgataagcagctagccgcttatatcgcagataaagtggatgcagcccagatgcctcaggaagctcaaaagatccagagcgaccttacaagtcacgagatctcactcgaggaaatgaaaaaacacaaccagggcaaagaagctgcccagagagttctgagccaaatagatgtcgcccagaaaaagcttcaagatgtgtccatgaaatttcgcctgttccagaagcccgcaaatttcgaacagcggctgcaggaatccaagatgatattagatgaagtgaagatgcacctgccagcactggaaactaagtcggtggaacaggaggttgtgcagtcgcagcttaatcactgcgtcaatctctacaaatcgctttcagaggtcaagtcggaagttgagatggtcataaagacaggacgccagattgtgcagaagaagcagacggagaacccaaaagagctggatgaacgagttaccgctctaaagctgcattacaacgagttgggggcaaaagtgaccgagcggaagcaacaactagagaagtgccttaagctctccaggaagatgcgcaaagaaatgaatgtactgacagagtggttagcagccacggacatggagctgacgaagcgttctgccgtggagggcatgcccagcaatctggacagcgaggtcgcttgggggaaggctacgcagaaggagatcgagaagcagaaggtgcatttgaagtctattaccgaggtgggggaggccttaaagactgtgcttgggaaaaaggaaactctggtcgaagacaaactgagcctcctaaacagtaactggatagctgttacttccagagctgaggaatggcttaatctgctcctcgaataccagaaacacatggagactttcgatcagaacgtggatcacatcaccaagtggattatccaggctgacacactgttggatgagagcgaaaaaaagaagccacaacagaaagaagatgtcctgaaaaggctgaaagctgaactgaacgacatccgcccaaaggtggacagcacacgagatcaggccgctaacctcatggctaatcgcggtgaccactgtcgcaagttggtggagccacagattagcgagctcaatcaccggtttgctgcaatcagtcaccggattaagactgggaaggcctcaatccctctcaaagaactggagcagtttaactcagatatccagaagctcctggagcctctcgaagcagagatacaacagggcgttaaccttaaggaggaggacttcaacaaagacatgaatgaggataatgagggtaccgtgaaggagctccttcagcggggagacaatctccagcagaggattaccgacgagcgcaaacgggaagagatcaagattaagcaacagcttctgcagacgaagcacaatgcgttaaaagacctacgctcccagcggagaaaaaaagctctggagatttcccaccagtggtatcagtacaagaggcaagccgacgacctgctgaagtgcttagatgacatcgaaaaaaagttagcctcactgcccgagccacgcgatgaaagaaaaattaaggaaattgatagagagctgcagaagaagaaggaggagctgaacgctgtgcgcagacaagccgaaggactgtcagaggacggggcagcgatggcagtcgaacccactcaaattcagctgtcgaaacgatggcgggaaatagagtccaagtttgctcagtttcggcgacttaattttgcacagatccacactgtacgggaggaaacaatgatggtcatgactgaggatatgccactggagatcagttatgtgccttctacatacttgacggagataactcatgtatcccaggcccttctggaggtggaacagctgttgaacgctccagatctgtgtgcaaaggatttcgaggacctgtttaagcaggaggaatctctcaaaaacatcaaagacagcctgcagcagtccagtgggagaattgatattatccactctaagaagaccgccgctctgcagagcgctactcctgtggaacgggtcaaactccaggaggccctgtcgcagttggactttcagtgggagaaagtgaataaaatgtataaggaccgacaggggagatttgatcgatccgttgagaaatggcgaaggtttcactatgacatcaaaatttttaaccagtggttaactgaggctgagcagtttcttcgaaaaacgcagatcccggagaattgggagcatgctaaatataagtggtacttgaaggaattgcaagatggcatcgggcagagacagacagtggtgaggaccttaaatgccaccggggaggagattatacagcaaagcagcaagacagacgcctctatcctccaggaaaaattaggctcgctcaatctgaggtggcaagaggtgtgcaaacaactttccgaccgcaagaagcgcctggaggagcagaagaatattttgagcgaattccagagagacttaaacgagtttgttctctggcttgaagaagcagataatattgcgtctataccacttgagcctggcaaggaacaacagctgaaagagaagttggaacaggtcaagctcctggtagaggagctccccctgaggcagggaattttgaagcagttgaatgaaaccggtggccctgtcttagtttccgctcccatctcgcctgaggagcaggataaactcgagaacaagctaaaacagactaacctgcagtggatcaaagtttcccgtgctttgcctgagaaacagggcgagatcgaggctcagatcaaagaccttggccagctagaaaaaaagctggaggatttggaagaacaactgaatcatttgctgttgtggttgagccctatccgcaatcagttggaaatatacaaccagccaaaccaagagggcccatttgacgtgaaggaaaccgaaatcgccgtgcaggctaaacaaccagatgtggaagagattctctcaaaaggacagcatctgtacaaggaaaaacccgctacccagccagtaaagcgcaagctggaggatcttagtagcgagtggaaggcagtgaatcgcttgcttcaggaactgagggcaaagcagccagacttggccccaggactgacgacaatcggagcctcgcctacacaaaccgtgactctggttactcagcctgtggtcactaaagagactgcgatttccaagctggaaatgcctagctctctcatgctggaggtgcccgcacttgctgattttaacagggcttggaccgagctgactgactggctgagcttactagatcaggtgatcaaaagtcagcgggtaatggtcggcgatcttgaagacatcaacgaaatgattatcaagcagaaggcgacgatgcaggatctggagcaaagacggccacagcttgaggaactgatcactgccgctcagaaccttaagaacaaaacatctaaccaggaggcaaggaccattatcactgaccggatcgaacgcatacaaaaccaatgggacgaggttcaggagcacctacagaaccgacggcaacagctgaacgagatgctgaaggatagcacccagtggcttgaggccaaagaggaagcagaacaagtgttgggtcaggcaagagcaaaactcgagtcttggaaggagggaccatataccgtcgatgccatccaaaaaaaaatcaccgaaacaaaacagctggcaaaagatcttcgtcagtggcagactaacgttgacgttgcaaacgacctcgcccttaaactcctcagggactacagtgccgatgacacccgcaaagtccatatgattacggagaacatcaacgcatcatggcgctctattcataaacgagtgagtgaacgggaggcggctctggaagagactcataggctactgcagcaattcccgctagacctggagaaattcctggcttggctgaccgaagccgaaacgaccgctaacgtgctccaggacgcaactcgcaaggagagactgctcgaagactccaaaggggtgaaggagctcatgaagcaatggcaggatttgcaaggtgaaattgaagcccacaccgacgtgtaccataacctcgacgaaaactcccagaaaatattgagatcattggaagggtctgacgatgcagtgctattacagcgcaggctggataacatgaactttaagtggtcagagctgcggaaaaagagcctcaacatcaggtcccatttagaagcatcttcagaccaatggaaacggttacacctgagtttgcaagaactgcttgtctggttacaactaaaagatgatgaactcagccgtcaagcaccgatcggcggtgactttcccgcagtgcaaaagcagaacgacgttcatcgcgcatttaaaagagaactgaagacaaaagagccagtcataatgagcactctggaaaccgtgagaatatttcttacagagcagcctttggaaggcctggagaagctttaccaagagcctagagaactgccacctgaggaaagagcgcagaatgttacaaggttactgcgcaaacaggcagaggaagtgaatacggagtgggaaaaactgaatctgcactccgccgactggcagaggaagatcgacgagactctcgagaggcttcgggagctgcaagaagcaacagacgagctggatctgaaattgagacaggctgaggtgattaagggcagctggcaaccagtgggagatctgctcatcgactccctgcaggatcacctcgaaaaggtaaaagccctcaggggcgagatcgctccgctgaaggaaaatgtaagtcatgtgaacgacctggctcgccagctgacgaccctgggtattcaacttagtccctataatctgagtacactggaagatcttaacacccggtggaagctgctccaggtggcagtggaggacagggtgcgtcaactgcatgaagcccacagggattttggcccagcatctcaacactttctgtcgactagcgtccaaggtccttgggagcgggctatctcccctaacaaggtaccatattacatcaatcacgagacacagactacatgctgggatcatcccaagatgacagaattataccagtctctggcggatctgaacaatgtgcgcttcagcgcttacagaaccgctatgaaacttcggagactgcagaaagcactctgtctggatctcctgagcctctccgcagcatgcgatgctctggaccagcataatctaaagcagaatgatcagcctatggatatacttcagatcataaattgtctcaccactatatatgacaggttagagcaggagcacaacaacctggtgaacgtccccctgtgtgtcgatatgtgcttgaattggctgttaaacgtgtatgatacagggcgtacaggccgaattcgtgtcctgtccttcaagactggcatcatcagtttatgtaaggcacacctggaagataagtataggtacctgtttaagcaggtggcttcaagcactggcttttgtgaccaacgacgcttaggccttttgttgcacgatagcatacagatcccaaggcaactgggggaggtggcctcgtttggaggctcaaacatcgagccttcagtaagatcatgtttccaattcgcaaataacaaacccgagattgaagccgctttgttcctggactggatgagactcgagccccaatctatggtctggctgccggtgctgcatcgcgtcgccgctgcggagacggccaagcaccaggcgaagtgtaacatctgtaaggagtgccccatcattggctttaggtatagaagcctcaagcactttaactatgatatttgccagagctgcttcttctccgggagagtggcaaaggggcataagatgcactaccctatggtggaatactgtacccccacgacgagcggggaagatgttagggactttgcgaaggtgctaaagaataaattcagaacgaagcgttactttgccaagcatccccgaatgggttatttgccggtgcagactgtccttgagggtgataacatggaaacgcccgtgactctgattaacttctggcccgtagactccgctccagcatcctcccctcagctcagccatgacgacacgcactcccggatcgagcactacgcctctcgacttgccgagatggagaactctaacggctcttacctgaacgacagtattagccccaatgagagcattgacgatgagcacttactgattcaacactactgtcaaagtctgaaccaagatagtccactatcacagccacggagcccggctcagatccttatttctctcgagtccgaggagaggggagaactcgagagaatactcgctgatctggaagaggaaaatcgaaatttacaggcagaatatgacagacttaagcaacagcacgagcacaagggcctttcgcctcttcctagccctccagaaatgatgcccacctccccccaatctccaagagacgccgagctgattgcggaggcaaagctacttcggcaacataaggggcgactcgaggctcgcatgcagattttggaagatcacaacaagcagctcgaatcacagctgcaccgcttgcgacagcttttagagcagccgcaggctgaagcaaaggttaacggtactacagtgtcttcaccatcgacttcacttcagaggtcagactcttctcagccgatgctgttacgcgtggtgggctcacagactagtgactccatgggggaggaagacctcctatcgccccctcaggacacctcaacagggctcgaagaagtgatggagcaactaaataatagtttcccttcgtcccggggacgaaatacgcccggtaagccaatgcgcgaggatacaatgtag

SEQ ID NO: 221582 - DNA, 3693 bp, synthetic construct
  misc_feature 1..3693: note = Description of Artificial Sequence: Synthetic coding sequence
  source 1..3693: mol_type = other DNA
atgccttcaagcctgatgctggaggtaccagctcttgctgattttaatcgtgcgtggaccgagctgacagattggctgtccttacttgaccaggtaatcaagagtcaacgtgttatggtgggcgatctcgaggacatcaatgagatgataatcaagcagaaagccaccatgcaagatcttgagcagaggcgacctcaactagaagagctgattacagctgcccagaatcttaaaaataaaacctctaatcaggaggcccgaactatcataaccgataggatcgagcgcatccaaaaccaatgggacgaggtccaagaacacttacagaatagacgtcaacaactgaatgaaatgctcaaggattccactcagtggctggaggcaaaggaagaggccgaacaggtattggggcaagccagggccaaactcgagtcctggaaagagggcccttacaccgttgatgccattcagaagaaaatcactgagacaaaacagctggccaaggatctacgccaatggcagaccaatgtggatgtcgccaatgacctggcgttgaagctgcttcgagactactctgccgatgacacacgcaaagtgcacatgattaccgaaaatattaacgcatcttggagaagtatacataaacgcgtgtccgagcgggaagctgcgctggaggaaactcaccggttgctgcagcagttccccttagacctcgagaagttcctggcctggctaaccgaggcagaaacaacggccaacgtgctccaggacgccacacgtaaggaacgtctgctggaggacagcaagggcgtgaaggagcttatgaagcagtggcaggacttgcagggggagatcgaggcgcataccgacgtctaccacaatctggatgaaaattcgcagaagatacttagaagcctcgaaggcagtgacgacgcagttctcctgcagcgcaggctggacaacatgaattttaaatggtccgagttacggaagaagagtttgaacatccgctctcatctagaggcctcttccgaccagtggaagcgactgcatctatcacttcaggaattactggtctggttgcagctgaaggatgacgaacttagtagacaagctcccatcggcggagactttcccgctgttcaaaaacaaaacgacgtgcatagggcttttaagagggagcttaaaaccaaagaacctgtgattatgtcaaccctcgaaacggtgcggatcttcctgacggaacaacctctggaggggttggagaaactgtaccaagagccaagggagctgcccccagaggaaagggctcaaaacgtaactcgcctgctccgaaagcaggccgaggaagtcaacactgagtgggagaagctcaatctgcacagcgcggattggcagagaaagattgatgagactctcgagcgcttaagggagctgcaggaggctacggatgagctggatctgaagttgaggcaggccgaggttatcaaggggagctggcagcctgtgggcgacctgcttatagattcgctgcaggaccaccttgagaaggtgaaagcactacgtggcgaaattgcccctctgaaagagaatgtctcacatgtgaatgacctggccaggcagctgacaaccttgggcattcagctatccccttacaacctctcaaccttggaagatctgaatacacgctggaaattacttcaggttgctgtggaggatcgcgtaagacaactacatgaggcccaccgtgactttggcccagcttcacagcacttcctcagcacttctgtccagggcccatgggagagggcaatctccccaaacaaggttccatattacattaaccacgagacccagaccacatgttgggaccaccccaaaatgacggaactctaccagtctctggctgacttgaataacgtgcggttctccgcctacagaactgcgatgaagctccgccgactgcagaaggcactctgtctagatttactgtccctgtccgccgcttgtgacgcattggatcagcacaatctcaagcagaacgatcaacccatggatatccttcaaatcattaactgtttaaccacaatttatgaccgattggagcaggagcacaataatctggttaatgtacccctgtgtgtggacatgtgcctaaattggctcttaaacgtgtacgatacaggtaggactggtcgcatcagggtgttaagtttcaaaaccggtataatttccctatgcaaggcccatctggaggacaaataccgttatttgttcaagcaggtcgcctcctccactggcttttgcgaccaaaggagactgggtttgcttctccacgattccatccagattccacggcagctgggagaggtggcctcatttgggggaagcaatattgagccaagcgttcggagttgctttcagtttgctaacaacaagcctgagatagaggctgctcttttcctcgactggatgcggttggagccccagagcatggtttggctccccgtgctacatagagtggccgctgcggagaccgcaaaacatcaggcgaagtgtaacatttgtaaagagtgcccaattatcgggttcagatacagatctctgaaacacttcaactacgatatatgtcagtcttgcttcttttctggcagggtcgccaagggacacaagatgcattacccgatggtcgagtattgcacccccaccacaagtggtgaggatgtgagagacttcgccaaagtgctgaaaaataagtttaggacaaagcgctatttcgccaagcaccctcgcatgggctacttaccggttcagaccgtgttggagggagataacatggaaacacccgcttcttcaccccagctaagccacgatgatactcattcgcgcatcgaacattatgccagccgactggccgaaatggagaattcaaatggatcatacctgaacgattctatttcgccaaatgaaagtatcgacgatgagcacctccttattcagcactactgccagagcctgaatcaggatagccccctgtcccaaccgaggtctcctgcccagatattgatttccttggaaagcgaagagcggggtgagctggagcggatcctagccgatctggaggaggagaaccggaacctgcaggctgaatatgatcggctaaaacagcaacatgaacacaaggggctaagtcccttaccttctcctcccgaaatgatgccaacctcccctcaatctccacgcgacgccgagctgatcgccgaggccaaactcctcaggcaacataaaggaaggcttgaggctcggatgcagatcctggaagatcacaataaacagctggagtcacagctgcacaggctccgccagctgctggaacagccacaggctgaagccaaggtgaatggtacgacagttagcagtccgagtacgagtctgcagcggtccgattccagccagccgatgcttctccgggttgtcggctcccagaccagcgattccatgggcgaggaagacctgttatctccgccacaggatacaagcaccggccttgaggaggtgatggaacagctgaataacagtttcccttcgtcgcgaggacacaatgttgggtccctgtttcatatggcagacgatttgggacgggctatggaatccttagtgtctgttatgactgatgaggagggagcagaatag

SEQ ID NO: 221583 - DNA, 1869 bp, synthetic construct
  misc_feature 1..1869: note = Description of Artificial Sequence: Synthetic coding sequence
  source 1..1869: mol_type = other DNA
atgcgagagcagttgaagggtcatgagacccagactacttgttgggatcacccaaagatgacggagttatatcagtccctggcggatttgaacaacgtgcggttcagtgcctatcgcactgcaatgaagctgagaagacttcaaaaagcactctgtctggacctgctgtctctgagtgccgcatgcgatgccctcgaccaacacaatctcaagcaaaacgaccagccgatggatatcctgcagatcatcaactgcctgactaccatctacgacagactggagcaagaacacaacaatctggtgaatgtgcccctgtgtgtggatatgtgtctgaattggctgctcaatgtttacgataccggccgaaccgggagaattagggtgctgagcttcaaaacaggcatcatttccctgtgcaaagctcacctggaagataagtataggtaccttttcaaacaagtggcctcttccacaggattctgtgaccagcgtaggctgggattgttactccacgatagtattcaaattccacgtcagctgggggaagtcgcctcttttggtggctccaatatagagccatcagtgcgatcatgttttcaatttgccaacaataagcctgagatagaggctgctcttttcttggactggatgagattagaaccacaatctatggtctggctgcccgttcttcatcgcgttgcagccgctgaaaccgctaagcatcaggccaagtgtaatatctgcaaagagtgcccgattattgggttcaggtaccggagtttaaaacactttaattacgatatctgtcaaagctgtttcttctccggccgagtggcgaaaggtcataagatgcattaccccatggtggaatactgtacacccaccacttcgggcgaggacgtgagagattttgcaaaggttctgaagaataagtttcggaccaaaagatatttcgccaagcaccctcggatggggtatcttccagtacagaccgtgttggaaggtgacaacatggaaactcctgcctcttctcctcagctgtctcacgacgatacccactcccggattgagcactacgcttctcgcctcgcggaaatggaaaactcaaatgggagctatctgaacgactcaatcagtcccaacgagagcatagatgacgagcatctgctgatccagcattactgtcagtctttaaaccaggatagcccactctcccagccccgatctcccgctcaaattctgatttccttggaatcagaagaacggggagagctagaacgcatactggccgacttagaggaagagaatcgaaacctgcaggctgaatacgatcgattgaagcagcagcacgagcacaagggcctgagcccactacccagcccgcctgaaatgatgcctacttcaccccagtcccctagagatgctgagctcatcgcagaagctaagttattgagacagcataagggcaggctcgaagctaggatgcagatactggaagaccataataaacagctcgaaagccagctgcatcgtctcaggcaacttctggaacagccccaggccgaggctaaggtgaatgggaccacagtgagcagccccagcacctctctgcagagatccgactccagtcagcccatgctgttacgggtagtgggcagccagacctccgactccatgggagaggaggacctgctgagcccacctcaggatactagcacaggactcgaagaggtgatggagcaactgaacaatagctttcccagttctcgaggccataacgtgggatccctgtttcatatggctgacgacctggggagggccatggagtctctcgtctcagtgatgaccgatgaagaaggggctgaatag

SEQ ID NO: 221584 - DNA, 11046 bp, synthetic construct
  misc_feature 1..11046: note = Description of Artificial Sequence: Synthetic coding sequence
  source 1..11046: mol_type = other DNA
atgagtgaggtatcatccgatgaaagagaggatgtgcagaaaaagacttttaccaagtgggtcaatgctcaatttagcaaatttggtaagcagcacatcgaaaacctgttttctgatctccaggacgggaggcggctgctggatctcctggaaggcttgactggccaaaagctccctaaggaaaaaggctccacccgcgtgcacgccctgaacaacgtaaataaggcccttagagttctgcagaacaacaacgttgatctcgtgaatattggctccacggacattgtcgatggcaaccacaagctcacattaggccttatatggaacatcattcttcactggcaggttaaaaacgtaatgaagaacattatggcgggactgcagcagaccaactccgagaaaattctcctttcatgggtgcgacagtcgacccgaaattacccccaagtcaacgtgatcaacttcactacctcctggagcgatgggcttgccctgaacgccctgatccactctcaccggccagacctgtttgactggaatagcgttgtatgccagcaatcggctacgcagaggcttgagcacgcatttaatatcgctcggtaccaactgggcatcgaaaagctgcttgatcccgaggacgtggataccacctacccagacaaaaaaagcattctgatgtacattaccagcttgttccaagtgttgccgcagcaggttagtatcgaagctatccaagaggtagaaatgctcccccgtccccctaaggtgaccaaggaagaacattttcagctccaccaccagatgcattactctcagcagattactgtctctctggctcagggatacgaacgcacaagctcgcccaaaccacgtttcaagtcttacgcttacacccaagctgcttacgtcacaacatccgacccaacgcgatcccccttccccagccagcacttggaagccccagaggacaagagcttcggaagttccttgatggaatccgaggtgaatctcgatagataccaaactgccctggaagaagtgctcagctggttgctgagcgcagaggacacattgcaggcgcagggagaaatcagcaatgatgtcgaagtggtcaaagatcagtttcatacacacgaaggatatatgatggatctgacagcacatcaggggagagtgggaaatatcctgcaattgggctcgaagctaatcggtactggcaagctctccgaagacgaagagaccgaagttcaggagcagatgaaccttcttaactcacggtgggagtgcttaagggtggcttccatggagaagcaatctaacctacaccgtgtcctgatggatctgcagaatcaaaagttgaaggaactgaatgactggcttacaaaaacagaagaacgcacccgtaaaatggaggaggagcctctaggtcccgatctggaagatctgaagcgccaggtacagcagcataaggtcctgcaggaggatctggaacaggagcaggtaagggtcaattccctcactcatatggttgtggttgtggacgaaagtagcggagaccatgccactgccgctctggaagaacagctcaaggtgctcggcgacagatgggccaacatctgccgctggacagaagaccgatgggtactcttgcaagatatcctcctcaaatggcaacggttgactgaagaacagtgcctgttcagtgcatggctttccgagaaggaagatgcggtgaataagatccacacaaccggattcaaggatcagaacgagatgcttagctcgctgcagaaactggcagtcctgaaagccgacctggagaaaaagaagcagtcgatgggaaaactatatagcctgaaacaggacctgctatctactctgaagaacaagtccgtcactcagaagactgaagcctggctggataacttcgcacggtgctgggacaacctggtgcagaagcttgagaaaagtacagcccagatttctcaggccgtcaccactacgcagccaagcttaacccagactacagtgatggagacagtaacaacggtgacaaccagggaacaaattcttgttaagcacgcccaggaggagttacccccacccccaccccagaaaaagcgccagataacagtggacagtgagatccgtaaacgcctagacgtggatattaccgagctgcattcatggattacaagaagcgaggcagtgttgcagtcccctgagttcgccatatttcgaaaagaaggaaacttcagtgacttaaaagagaaggtaaacgcgatcgagcgagagaaagccgagaagtttcgcaaattgcaggatgcctccaggtccgcgcaggccctggtggagcagatggtgaatgagggcgtgaatgccgatagtatcaagcaagcgtcagaacagctgaactctagatggatagaattctgccagctgttgtccgaacggcttaattggcttgaatatcagaataacattatagctttttacaatcaattacagcaactggagcagatgacaaccaccgccgagaactggctgaaaatccaacccactactccatctgagcctaccgcgattaagtcccaactcaaaatttgcaaggacgaggtgaatcggctgtccgacctgcagccccagatcgaacgcctgaagattcaaagcatcgccctgaaggaaaaaggacagggccctatgtttcttgatgctgacttcgtagcattcacaaaccatttcaaacaggtgttctcagatgtgcaggcacgggagaaagagctgcagaccatctttgacaccctgccacctatgcggtatcaggagacgatgagtgccatcagaacatgggtgcagcaatctgagacaaagttgagtattcctcagctcagtgtgaccgactacgaaatcatggaacaacgtctgggagaactccaagccctgcagagcagcctccaggagcagcaatcgggtctgtactatctatccactaccgtgaaggagatgagcaagaaggccccaagtgaaatctctcggaagtatcagtctgagttcgaggagattgaagggaggtggaagaagttgagcagccagctagtcgagcattgccagaagctcgaagagcaaatgaacaagctccgaaaaatccagaaccacatccagacgctgaagaagtggatggcagaggttgacgtgttcctgaaagaagagtggccagcattgggtgattctgaaattctaaagaagcagttgaagcagtgtcgccttctagttagcgatatccagaccatccaaccctccctgaactccgttaacgagggcggacagaaaatcaagaacgaggcggagccggagtttgcctcaaggctggaaaccgaactcaaagagctgaacacacaatgggaccacatgtgtcaacaggtgtatgccagaaaagaggccttgaaagggggactagagaagacagtgtccttacagaaagacttgtctgagatgcatgagtggatgactcaggccgaggaagagtaccttgagagggacttcgagtacaagacgccggatgaactgcaaaaggcagtggaagagatgaaaagagccaaagaggaagcacagcagaaggaggctaaagtcaagttgctgactgagagcgtgaactcagtcattgcccaggcccctccagtcgcccaggaagcgctcaagaaggagctggagacactcactactaactaccagtggctgtgtaccagactgaatggcaagtgtaaaaccctcgaggaagtatgggcgtgctggcacgagctgctgtcctacctcgaaaaggctaacaaatggctcaatgaggtggaattcaagctgaagacaacagagaacatccctggaggggctgaggaaatctccgaggttctggattctctggaaaaccttatgcgacactcagaagacaaccccaatcagattcggatacttgcccagacgttgaccgacgggggtgtcatggatgagttgataaatgaagaattagagaccttcaactcgagatggcgggagttacacgaggaggcagtgcgcaggcagaagctgttagagcagtcaattcagtctgctcaggaaactgaaaagagcctccacctcattcaggagagtcttacattcatcgacaagcagctagccgcatacattgcagataaagtagacgccgctcagatgcctcaagaggctcagaaaattcagagcgacctgacttcccacgagatcagtctggaagagatgaagaagcacaaccaaggaaaggaagccgcacagagggtgttgtcacagatcgacgtcgctcaaaagaaactgcaggatgtgagcatgaaatttcgcctctttcagaaaccagccaacttcgagcaacggctgcaggaaagtaaaatgatccttgacgaagtgaagatgcacttgcctgcccttgagaccaagagtgttgagcaggaggttgttcaatcacaactgaaccattgcgtgaatctctacaagtcactgagtgaagtgaagagtgaggtcgagatggtgattaaaaccggcagacaaatcgttcagaagaagcagactgagaaccctaaggagctggatgaacgagtaaccgctttgaagctgcactataacgaattaggggctaaagtgaccgaacggaagcagcagcttgagaagtgtcttaagctaagtcgcaagatgcgcaaagaaatgaatgtgttaacggagtggctggctgccacagacatggagctgaccaaacgttccgcagtggagggcatgcccagcaacctggacagcgaagtcgcgtgggggaaagctacccagaaggagatagaaaaacagaaggttcatctcaagagcatcactgaggtcggtgaggccctgaagaccgtgctgggcaagaaggagactctggtcgaggacaaactcagtctattgaatagcaattggatagcagtgacctctagagcagaggaatggctaaacctgttacttgaataccagaagcatatggaaacttttgaccagaacgttgaccacattaccaaatggattattcaggccgataccctgctggacgaaagcgagaagaagaagcctcagcagaaggaggacgtgttgaaacgactcaaggccgaattaaatgatatcagaccaaaagttgattccacccgtgatcaggctgctaatctgatggccaaccggggtgaccactgtcgtaagctggtggagcctcaaattagcgagttgaatcacaggttcgcagcgataagccatcgcatcaaaactggtaaggcttcaatccccctcaaggagcttgagcagtttaactctgacatccagaagctgctcgagccgttggaagcagaaatacagcagggcgtgaaccttaaagaagaagatttcaacaaggacatgaatgaggacaatgaggggaccgtgaaagagctcctacagcggggtgacaacctacagcagcggattactgacgagaggaaaagggaggaaatcaagattaagcagcagctgctgcagaccaagcacaatgccctaaaagacctgaggagtcagcgccgaaagaaagctctagagattagccaccagtggtaccagtacaaaagacaggctgacgatctgttaaaatgtctcgacgacattgagaaaaagttagcctctcttccagagcccagagatgaaagaaagatcaaagaaatcgacagagagctgcaaaagaagaaggaggaattaaatgctgttagacgccaggctgagggcctgtccgaagacggagctgccatggctgtggagccaactcagattcaactttccaagcggtggcgggaaatagagagcaaattcgcccagtttcgcaggctgaacttcgctcagatccacactgtcagagaggagacgatgatggtaatgactgaggacatgccacttgaaatctcttatgtaccctccacatatctcactgagatcacccacgtgtcccaggctttgctggaggttgagcaactgttgaacgccccagacctgtgcgctaaggacttcgaagatctgttcaagcaagaagagagcctgaaaaatataaaggacagcttgcagcagtctagtggcaggatcgatattatccattctaaaaaaactgctgctcttcagagcgccacacctgtggagcgggtaaagctgcaagaggctctcagtcaattagatttccaatgggaaaaggtgaataagatgtataaagaccgacaaggaaggttcgaccgcagcgtggagaagtggcggcgatttcactatgacatcaagattttcaaccagtggctcacagaggccgaacaatttctcagaaaaactcagattccagagaactgggaacatgcaaagtacaaatggtatctgaaggagctgcaggatggcattgggcagcgacagactgtcgtcagaacattaaacgccacgggtgaggagattatccagcagagttctaaaacagatgccagcattctgcaggaaaagctggggagcctaaaccttagatggcaagaagtatgcaagcagctctctgaccgtaaaaaaaggcttgaggagcaaaagaatatactttcagagttccagagggatctcaacgaattcgttctttggctggaggaagccgacaacatcgcctcaatcccattggagcctggtaaggaacaacaactcaaggaaaagttagagcaagtcaagctgcttgttgaagagctgccactgcgccaggggatccttaaacagctcaacgagacaggaggtccagttctggtaagtgccccaatttcccctgaggaacaagacaagctggagaacaaactcaagcagacaaatctgcaatggattaaggtttccagggctctccccgaaaagcaaggggagatcgaggctcaaatcaaagatctgggccaactggaaaaaaaactcgaggatctagaggaacagctgaatcatctcctgttgtggctgagcccaatcaggaatcaactggaaatctataaccagcctaaccaggaaggtccatttgacgtgaaggagacagagatagccgtacaagcaaaacagcccgatgtggaggagattctctcaaaggggcagcatctgtacaaggaaaagccagccacccagccagtgaagcgcaaactcgaggacctgagcagtgagtggaaagcagtgaaccgcctgctccaggaattacgtgcaaagcaacccgatctggcccctggactgacaacaataggcgctagcccgacacagaccgtgaccctggtcacacagcccgtggtgaccaaagagaccgctatctccaaactcgagatgccatcctcccttatgctggaagtgcccgcactcgccgactttaaccgggcatggacggaactcacagactggctgagtctactggatcaagtgataaagagccaacgagttatggtcggagacttagaggacattaatgagatgatcataaaacagaaggcaactatgcaggatctcgaacaaaggcgaccccagttagaggaattaataacggcagcccagaatctgaagaacaagacgagtaaccaggaggcacggaccattatcactgataggatcgagagaattcagaaccaatgggatgaggttcaggaacatctccaaaatagacgccaacagctgaacgagatgcttaaagacagcacccagtggctggaagccaaggaggaggctgagcaggtgttgggccaagcacgagccaagctcgagtcttggaaagaaggcccttacacagtggatgctatccagaagaagattacagagacaaagcagctggccaaggatctgagacagtggcaaaccaacgtcgatgtcgctaatgatctggcactcaagttattaagagactacagcgccgacgacaccaggaaggtccacatgatcaccgaaaacatcaacgcctcttggcggtcaattcataagagggtctctgaacgcgaggctgcactggaagaaacccacagattgctccagcaattcccactcgacctggaaaagtttctcgcctggcttaccgaagccgaaaccacagccaacgttttacaggatgccactcggaaggaacggctgctggaggacagtaaaggcgtcaaggagctcatgaaacagtggcaggatctccagggggagatagaggcacacacagatgtttaccataaccttgacgagaatagtcagaagatcttgagatcactcgaaggaagtgacgatgctgtgctcctacagaggcgtctggacaatatgaacttcaagtggagtgaactgaggaaaaagtccctcaatatcaggtcacatttggaagcctcaagtgatcaatggaagcggctgcacttatcactccaggaactgctcgtgtggctccaacttaaggatgatgaactctcgcgtcaggcaccaatcggcggagatttcccagcggtgcagaagcagaacgacgtgcacagagcatttaaacgagaattgaaaactaaagagcctgttattatgtcgactctcgaaaccgtacgaatctttttaacagaacagccccttgagggactggagaagttgtaccaggaacctagagagctgcctcccgaagagagagcgcagaatgtcacccgcttgctacgaaaacaggccgaggaggtcaatacggagtgggaaaagctgaacctccactcagctgattggcagcgaaaaatcgatgagacactggaaagactaagagaactccaggaagcaacagatgaactggatctgaagctgcgccaggctgaagtcattaagggctcctggcagcccgtaggcgacttgctcatcgactcactccaggatcacttggaaaaagtgaaagcgctcaggggtgagattgcaccgttgaaagaaaacgtcagccacgtgaacgacctcgctagacagctcactacacttggtattcaactgagcccttacaatctttcaaccctcgaggacctgaatacacggtggaaactgctgcaagtggccgtggaggatcgggtcaggcaactgcacgaggcccaccgggatttcggtcccgcttctcagcacttcctcagtacttccgttcaggggccatgggagagagccatttcacccaataaagtcccttactatatcaaccatgagacccaaactacctgttgggatcaccccaaaatgactgaactttaccagagcttggccgacttgaacaatgtgcgctttagtgcatataggaccgcaatgaaactgcgaaggctgcaaaaagccctttgtctcgacctgctgtctctgagcgccgcttgtgacgccctcgatcagcacaatctcaagcagaacgatcaaccaatggacattttacagatcataaattgccttactacaatatatgaccgcctcgaacaggagcataataatttggtcaatgttcctctgtgcgtggacatgtgcctgaattggctgctgaacgtatacgataccgggcgaacaggccgaatccgggtcctgtcttttaagactggtatcatttccctatgtaaggcgcatctcgaggataagtacagatacctgttcaagcaagtcgcctcctcgaccggcttctgcgatcagaggaggctaggtctgctcctgcatgactctattcagatccccagacagctcggcgaggtagcttccttcggaggaagcaacattgagccatccgtgcgctcatgttttcaattcgccaacaacaaaccggaaattgaggctgctttgtttctggattggatgagacttgaacctcagtcgatggtatggttgcctgtgctgcatcgagtggcagccgctgaaacagctaagcatcaagccaaatgcaacatctgcaaggaatgccccatcattggattccgttataggtcacttaaacattttaactatgatatctgtcagagttgctttttttcaggaagagtggccaagggacataagatgcattatccaatggtggagtattgtacacccacaacttctggcgaagatgtgagggacttcgccaaagttctaaaaaataaatttagaactaagaggtattttgctaaacacccgcgtatgggttatctgccagtccagaccgtcctggagggggacaacatggaaactcccgtgaccctgattaacttttggccagtggacagcgcacccgcaagcagccctcagctgagccatgacgacacgcatagcaggattgagcactacgcaagtcgtctggctgagatggagaactccaacgggagctacctcaacgactccatctctcccaacgaatctatcgatgacgagcacctgctgatccagcactattgtcagtcactgaatcaggattccccactgtcccaaccacggtctcccgctcagatcttaatcagtctggagtccgaggaacggggagagcttgagaggatcctggcagatctcgaagaagaaaatcgaaacttacaggccgagtatgaccgcctcaagcagcagcatgagcacaaaggattatccccactccctagcccaccagaaatgatgcctacaagcccacagtcccccagggacgctgagctcattgccgaggcgaaacttttgaggcaacataagggaaggcttgaagcgcgtatgcagatcctggaggaccacaacaagcagctagaatctcagttgcacaggctgcgacaactgttggagcagccgcaggccgaagctaaggtgaacggcaccacagtgtcttcacccagcacaagcctccagcgcagtgattcgtcacagcctatgctgctgcgagtggtgggaagccaaacctctgattcaatgggggaggaagacctcctcagtcctccacaggataccagcacgggcctcgaagaggtgatggagcagctgaacaacagcttcccatcgtctcggggtcgcaatactccaggcaagcccatgcgagaagatacgatgtag

SEQ ID NO: 221585 - DNA, 7034 bp, synthetic construct
  misc_feature 1..7034: note = Description of Artificial Sequence: Synthetic coding sequence
  source 1..7034: mol_type = other DNA
atgaccgagatgattctgctgatcttcttcccggcttattttctgaacgccgtgaggcgacagaagcttctggagcagagcatccaatcagctcaggaaacagagaaatctctgcatctaatccaagaatccctgaccttcatcgacaagcagctggcagcttatatagccgacaaagtggacgctgcacaaatgccccaggaagcccaaaagatccagagcgacctgacatcgcacgagattagtctcgaggaaatgaaaaaacataatcagggcaaagaagctgcccagagagtcctcagccaaattgatgttgcccagaagaagttacaggatgtcagtatgaagttcagactgtttcagaaaccggctaattttgagcaacgcctccaagagtctaaaatgattcttgacgaggtgaagatgcacctgcccgctctggaaaccaagagtgttgaacaagaagtcgttcagagccaactcaatcactgcgtaaatctgtataaaagcctctcagaggtcaaaagcgaggtagaaatggtcatcaagacagggaggcagattgtgcagaagaagcagactgagaaccctaaggagttagacgagagggtgactgcgctcaagctgcattacaacgagctcggagcaaaggtgaccgagaggaaacagcagctggagaagtgtctgaaactgtcccggaaaatgcgcaaggaaatgaatgttctgacagagtggctggcagccactgacatggaactaactaagcgctccgctgtggagggcatgccaagtaacctcgactctgaggtcgcgtggggtaaggccacccaaaaggaaatcgaaaagcagaaagtccacctaaaaagcattaccgaggtgggggaagcactcaaaacagtgctcggtaaaaaagagaccctggtcgaagacaaattgagccttttgaacagtaactggatagcagtcacaagtagagccgaggagtggctgaacctgttgctggaataccagaagcatatggaaaccttcgaccagaacgtggatcacatcaccaagtggattattcaggctgacaccctgttagacgaaagtgagaagaaaaaaccccaacaaaaggaagatgtgttaaagcgactgaaggccgagttaaatgacatccggcctaaagttgattccacaagagaccaggccgcaaatcttatggcaaacaggggggaccactgccgaaagctcgtcgaaccacagatatccgagctgaatcatcgtttcgcggctatcagtcacagaattaagaccggtaaggcgtctatccctctgaaagagctcgagcagtttaacagtgatatccagaagctactggagccgctggaggccgaaatacagcaaggcgttaacttgaaagaagaggactttaataaggatatgaacgaggacaatgagggaacagttaaggagctcctacagcgcggtgacaacctacagcagcgcatcacggatgagcgaaagcgggaggagatcaagatcaagcagcaactgttacaaaccaaacacaacgcgcttaaagacctccgctcacagcggagaaaaaaagcactggagatctctcatcagtggtatcagtataagcgccaggccgacgatctgctgaaatgcttagacgatatagagaagaagctagcatccctgccagaaccaagggatgaaagaaagataaaggagattgatagagagcttcagaagaaaaaggaagagctgaacgccgtgcgtagacaagccgagggcctgtcagaggatggcgctgctatggctgtcgaacctactcagatccagctctccaagaggtggcgggagattgagagtaagttcgctcaattcagacgattgaacttcgcgcagatacatacagttcgggaggagaccatgatggtcatgactgaagacatgcctttggaaattagttacgtccctagcacctatctgacagagattacgcacgtcagccaagccctcctggaggtggagcagctcctgaatgctcctgatctgtgtgccaaagatttcgaggatctctttaagcaggaggagagccttaaaaacattaaggattcgctgcagcaaagcagtgggaggatcgacataatccacagcaagaagaccgctgctttgcagagcgctacccctgtggagagggtaaaactccaggaggccctaagccagctagactttcaatgggagaaggtgaacaagatgtacaaagatcgacagggtcggttcgatcgctctgtcgaaaagtggaggcgattccactatgacattaaaatctttaaccaatggctaaccgaggcagaacaatttctcagaaagacacaaatccctgagaactgggagcacgccaagtataagtggtacctgaaagagctccaggatggaataggccagaggcagacagtagttcgcactctgaatgccaccggcgaggagatcatccagcagagctctaagaccgacgcctctatcttgcaggaaaagctagggtcattgaatctgcgctggcaggaggtttgtaaacaactgtccgacaggaagaaacgtcttgaggagcaaaagaacatcctgtccgagttccagcgagatctcaatgagtttgtcctgtggctcgaggaggcagacaacatcgccagtatacccctggaacccggaaaggagcagcagctgaaagaaaaactggaacaggtgaagcttttagtggaggaactgcctttaagacaggggattctgaaacagctgaacgaaacgggcggacctgttctggtttccgcaccgatctcacctgaggagcaggataaactggagaataagctaaagcagacaaatctacagtggatcaaggtgagtcgtgctctcccagagaagcagggggagatcgaagctcagattaaggacctaggacagctcgagaagaaactggaggatttggaggaacagctaaaccacctgctgctgtggctaagccccattagaaaccagctggaaatctacaaccaacccaaccaggagggcccttttgacgtaaaggaaactgagatcgccgtacaggctaagcaacccgacgtcgaggaaatcctatctaaaggacaacacctctataaggaaaagccagccacccagccagttaagcgcaagttggaagacctgagctctgaatggaaggcagtgaatcgcttgcttcaggaactgcgggcaaagcagcccgatctggcccctggcctcaccacaatcggggcttctcccacccagaccgtaacattagtcacccaacctgttgtaaccaaggaaactgccatctccaaactggaaatgccatcctctttgatgctggaggttcctgccctggctgacttcaacagagcctggacagagctgacagactggttgagtctgctcgaccaggttatcaaatctcagagagttatggtgggcgatctggaagatatcaatgagatgataattaaacagaaggcaaccatgcaggacctcgaacagcgcaggccacagctcgaagagctgattaccgcggctcagaacctgaagaataagacgagcaatcaggaggcgagaactattatcacagacaggattgagcgaatccagaaccagtgggatgaggtccaggaacacctgcagaatcgacggcaacagctgaatgaaatgttaaaggattctacccagtggctcgaagctaaggaggaggcagagcaagtgctgggacaggcaagagccaaacttgagtcttggaaggaaggtccttacacagtagacgcaatccaaaagaagataaccgaaacaaagcaactcgcaaaggacttgaggcagtggcagaccaacgtagacgttgccaatgatcttgccttaaagctcctgcgggattattcagccgatgatacaaggaaagtacacatgatcacagaaaatattaacgcttcttggaggtcaattcacaagcgggtcagtgaacgggaagctgcgctcgaggagacccaccggctgcttcaacagttccctttggatttggagaaatttctggcctggttgactgaggcagagactacagccaatgtgttgcaggacgctactcgcaaggagagactgctcgaagactccaagggggtaaaagagttgatgaagcagtggcaggaccttcagggggaaattgaagctcatacggatgtgtaccacaacctcgatgagaatagtcaaaaaatactgcgttcacttgagggatccgacgacgccgtactcctgcagagaagactagacaacatgaacttcaagtggtcagagctaagaaaaaaaagtctaaacatcaggagtcacttggaggcatcctccgaccagtggaagcgtctccacctaagcctgcaggagctcttagtctggctgcagctcaaggatgatgaactgtcccggcaagccccaatcggcggagattttcctgctgtacagaaacagaacgatgtgcatagagccttcaaaagggagctcaaaacaaaggaaccagtcatcatgtcaacattggagacagtcaggattttcctgacggaacagccactggagggacttgaaaaactgtatcaagagcccagggagctgcccccagaagagagagcccaaaatgtcactcgactgttgcggaagcaggccgaagaagtgaacactgagtgggaaaagctgaatctgcatagtgctgattggcagaggaaaattgacgaaaccctggaacgcctacgcgaactgcaggaggctacggatgaactggatttgaagctgcgacaggccgaagtcatcaagggttcttggcagcctgttggcgatctactaatcgattcgcttcaagaccacttggagaaagtgaaagctctcaggggagaaatcgctcccttaaaggaaaatgtgagccacgtcaatgacctggccaggcaattaactaccttgggaatacaactctctccttacaacctttccacactggaagacctgaacacgagatggaaactcctgcaagtggctgtggaggatcgggtgcggcaattgcacgaggcccatagagattttggacccgctagccaacatttcttgagcacatcagtccagggaccctgggagagggcaatctcccctaataaggtcccctattatattaaccatgaaacacagaccacctgctgggaccacccaaagatgactgagttgtaccagtcacttgctgacttaaataacgtccgattctcagcttatcggaccgcgatgaagctgagacggctgcagaaagccctctgtcttgacctgctgtctctgtcagcggcttgcgacgctctggatcagcataacctcaaacaaaatgatcagcctatggatatcctccagatcataaactgcctgactacaatttacgatcggcttgaacaggagcataataatctggttaacgtgcctctgtgcgtcgacatgtgcctaaattggctgctcaacgtgtacgataccggtcgtacagggaggatacgagtcttgagtttcaagacagggataatcagcctgtgtaaagcgcaccttgaagacaagtatcggtacctgttcaagcaggtcgcgagttcaactgggttttgcgaccagagaagactcggcttgcttctacacgactctattcaaatacctcgacagctgggcgaagtggcttctttcggcggaagtaatatcgagccttcagtgcgctcttgcttccagtttgcaaataacaagcccgagattgaggccgctctgttcctcgactggatgagattggagcctcagagcatggtgtggctgcctgtactccaccgggtggccgcagccgagacagcaaaacaccaggcaaaatgtaacatttgcaaagagtgccctataatcggatttagataccgcagccttaagcactttaactatgatatatgccaaagttgcttcttttcaggaagagtcgccaaaggtcacaagatgcattaccccatggtggagtattgtacaccaacgacgtccggcgaggacgtcagagacttcgccaaggttctgaagaataagttcaggaccaaacgatatttcgctaaacatcccaggatggggtacctacccgtgcagacagtcctggaaggggacaatatggaaacccccgtgaccctgattaacttttggccagtcgactcagcacccgctagcagtccccaactgagtcacgacgacacacacagccggatcgaacattacgcatctaggctcgccgaaatggaaaacagtaacgggtcctaccttaatgactccatcagtcctaatgagtctattgacgacgaacacctgctgatccagcactactgccaatctctgaaccaggactcacctttgagccagccccgaagcccggcacaaatcttgatctccctggaaagcgaagagcgcggagaactcgaacgaatactcgcggacctcgaggaagagaataggaacctccaggccgaatatgacaggctgaaacaacagcatgagcacaaaggccttagcccgctgccctccccaccggagatgatgcctacatctccacagagtcccagagacgcagagctgattgctgaggcgaaactgcttcgccagcataaaggacggcttgaagcgagaatgcagatcctggaagaccataacaaacagctggagtcccagctacatcgcttgagacaactcctggaacagcctcaagctgaagccaaagtcaatggaactacagtctcctcccccagcacatccctgcagcgcagtgatagttctcagccaatgctgctacgcgtggtggggagccagacctcggactctatgggagaagaggaccttctgtctcctccacaggacacgagtaccggactggaggaagtgatggagcagttaaataatagctttcctagcagtcgcggaaggaacacaccaggcaaacccatgcgggaagacacaccata

SEQ ID NO: 221586 - DNA, 7026 bp, synthetic construct
  misc_feature 1..7026: note = Description of Artificial Sequence: Synthetic coding sequence
  source 1..7026: mol_type = other DNA
atgagtgcacggaagctgaggaacctgagctataagaaggccgtgcgccgtcagaaactcctggaacaaagcatccaaagtgcccaggagaccgaaaaatcactccatctgattcaagagtctctaacttttatcgacaagcaactggccgcttatatcgctgacaaagtagatgccgctcaaatgccacaggaagcacagaagatacagtccgatctgaccagccacgagatttccctggaggagatgaaaaagcacaaccaaggaaaagaagccgcacagcgcgtgctcagccagatcgacgtcgctcagaagaagttacaagacgtgtcaatgaagtttagattatttcagaagcctgctaactttgagcagcgattgcaggaaagcaaaatgatccttgacgaagtcaagatgcacctccccgcactggagaccaagagcgtcgagcaggaggtcgtccagagtcagctcaatcactgtgtgaacctctacaagtcattaagcgaagtaaaatccgaggttgagatggttattaagaccggacgacaaatcgtgcagaaaaaacaaacagaaaatcccaaagagcttgatgagcgggtgacagctctgaaactccactacaacgagctaggcgctaaggtgactgaaaggaagcaacagctggagaaatgtttgaagctgtcaagaaagatgcgcaaggaaatgaacgtgcttaccgaatggctggcggcaaccgacatggagctaacgaagcgctccgccgtcgagggtatgccgagtaacctcgattcagaagtcgcctggggcaaggccacccagaaggagatcgagaaacagaaagtacatcttaaaagcatcacagaggtcggggaagcactgaaaactgtgctgggtaaaaaagaaactcttgttgaagataaactgtctcttctgaatagcaattggatagccgtcaccagtcgcgcagaagagtggctcaacttactcctggagtaccagaagcacatggagacatttgatcaaaatgtggatcacattacaaaatggatcattcaggccgacaccctgttggacgagtccgagaaaaagaagccccagcaaaaagaagatgtgctcaaacggcttaaggccgagctgaatgatatccggccaaaggttgattccaccagagaccaagccgcaaacctcatggcaaatcgcggagatcattgccgcaagctggtggaacctcagatctccgagttaaatcatcgatttgccgcaattagccatagaatcaagaccggcaaggcttccatccctttaaaggagctcgagcagtttaactccgacattcaaaagttactagaaccgctcgaagcagagatccagcagggggtcaatctcaaggaagaagacttcaataaagacatgaatgaggataatgagggaacagttaaggaactgcttcaaagaggggacaacttgcaacagcgcataaccgatgagcggaaaagggaggagattaaaattaaacagcagctgctgcagacaaaacacaacgccttgaaggatcttcgaagccaacggaggaaaaaagccttggaaattagccaccagtggtaccagtataagcgtcaggccgacgatttgctaaagtgccttgacgacatagaaaaaaaattggcgagtcttcccgagccacgcgatgagcggaaaattaaagagattgatcgggaactgcaaaagaaaaaggaggagctcaatgcagtgaggaggcaggcagaaggcctgagtgaagacggagccgcaatggccgttgaacccacacagatccagttgtctaagagatggcgagagatagagagcaagtttgcgcagtttagacggcttaacttcgcacagatccacaccgtccgcgaggagaccatgatggtcatgactgaagacatgcctctcgagatctcttatgtccccagcacatatctaacggagatcactcatgtatcacaagccttgctggaagtagagcagctccttaacgctcctgatctctgcgctaaggactttgaagatctgttcaaacaggaggaaagccttaagaacataaaggactccttacagcagtcttcaggaaggatcgacattattcactccaaaaaaacagcagccttgcagagcgcgacacccgtcgagagagtaaagcttcaagaagctttgagccagctcgactttcagtgggagaaggtaaacaagatgtataaagatcggcagggaaggtttgaccggtctgtagaaaagtggcggagattccactacgacatcaagatcttcaatcaatggctcaccgaggccgaacagttcctaaggaagacacagatcccagaaaattgggaacacgctaagtacaagtggtatctgaaggagctacaggacggaatagggcagcggcagacggtggtgaggaccctaaatgccacgggcgaagagataattcagcagtcttcaaagactgatgcctccattctgcaagaaaaactggggagtcttaacctgagatggcaagaggtctgcaaacaattaagtgacagaaaaaaaaggttagaggagcagaaaaatatactttccgaatttcaacgggacttaaacgaattcgtcctctggctggaggaagctgataacatcgcaagcatcccactcgagcccggtaaagaacagcagctgaaggaaaaactggagcaggtaaaactgttggttgaagagctgccccttcgacagggcattttaaagcagctcaacgagacaggaggcccagtgctggtcagtgctcccatctccccagaggaacaggacaaattggagaataagttgaaacaaacgaatctccagtggatcaaagtgagtagggccctgccagaaaagcagggggagatcgaggcccagatcaaagacttaggccaactggagaagaagcttgaggatcttgaggaacaactcaatcacctgcttctctggctgtccccaattagaaaccagctggagatctataaccaacccaaccaggagggaccttttgatgtcaaagagaccgagatcgcagttcaagccaagcagccagacgtagaagagattctgtctaagggacagcacctctataaagaaaagcccgctacacagcccgttaaacgaaaattggaagacctctcttctgaatggaaagcagtaaacagactgttgcaggaactaagggccaaacagccagatcttgcccctgggttgaccaccattggagcttcccctacccagacagttacgttggtcactcaaccagtagtaacgaaagaaaccgccatctcaaagctggagatgccatccagcctgatgttggaagtgccagccctagctgattttaatcgggcatggaccgagctgactgactggctctcgttattagaccaggtgattaaatcacagagagtgatggtgggtgaccttgaagacattaacgagatgataattaagcagaaggccacaatgcaggaccttgagcagcgacggcctcaattggaggagcttattactgctgcccagaatctcaagaataagacaagcaaccaggaggctcggacgatcatcaccgatcgcatcgaacgtatccagaatcagtgggacgaagtccaggaacatctgcagaatagacgccagcagttgaatgaaatgctcaaggattccacacagtggttggaggctaaggaagaagccgaacaggtcctgggccaagctcgggctaagctcgagtcttggaaggagggaccctacacagtagatgccattcagaaaaagatcactgaaacgaaacagctcgccaaggatctacgccaatggcagaccaacgtggatgtggctaacgatctcgccctgaagcttctgcgggactattccgctgacgacactcgcaaggttcatatgattactgagaacatcaacgctagttggagaagcattcacaagcgcgtgtccgaacgagaagcagctctggaagaaacccataggctgctgcagcagtttcctctggatcttgagaaatttctggcctggctgaccgaagctgaaacaacggcaaatgtacttcaagacgccaccaggaaagagaggcttctcgaagactccaagggggtcaaagagctaatgaagcagtggcaggacctccagggcgagattgaagcacatactgatgtctaccataaccttgacgagaatagccagaaaatactgcggtccttggagggatccgacgacgccgttctgcttcagcgaaggctggataacatgaacttcaagtggtctgaactccggaagaagagcttaaatatcagaagccacctggaggcatccagtgatcagtggaagaggctccacctgagcttgcaagagctccttgtctggctgcaactgaaagacgacgaactcagtcggcaggctcccatcggaggggattttcctgcagtgcagaagcagaatgacgtacatcgtgccttcaagcgtgaactgaagaccaaggaaccggtgatcatgagcacgcttgaaactgtcaggattttcctgaccgaacagccattggaaggattggaaaagctttatcaggaaccgagggagctaccacctgaagagagggcccaaaatgttacccggctgttgagaaagcaggccgaggaggtcaacacagaatgggagaaattgaacctgcatagcgccgattggcaacgcaaaatcgacgagactctcgagaggctgagggaattgcaagaggctaccgacgaactcgacttaaagctgcgccaagccgaggttatcaaaggctcctggcaaccagtgggcgatctgctgatagactcccttcaggaccacctggagaaagtgaaggccctccgaggggagattgcaccattgaaagagaacgtgagccacgttaacgatctagctcggcagctgaccaccttaggtatccagttgagtccctacaatttaagcacactggaggacctgaatacgcgctggaagctgcttcaggtagctgtggaggatagggtgcgtcagcttcatgaagcccatagagatttcggaccagccagccagcacttcctgtctaccagcgtgcagggcccttgggagagagccatcagccccaacaaggtgccctattacattaatcacgaaactcagacgacctgctgggatcatcccaagatgactgagctctatcagagcctagctgatctgaataatgtgcgcttttcagcctaccgtacggcgatgaaacttaggcggctgcagaaagcgctctgtctggacctcctgtccctatcagctgcttgtgatgcactcgaccagcataatttaaagcagaacgatcagcctatggatattcttcaaatcatcaactgtctgactactatctatgataggctggaacaggaacataacaacctggtcaatgttccattgtgcgtcgacatgtgtctgaattggctcttgaatgtgtatgatacggggaggacaggaagaattcgcgtactctcatttaaaacaggaatcattagtctgtgcaaggcgcacctcgaagacaagtatcggtacctgttcaaacaggtcgccagctcgactggcttctgcgatcagcgtcgcctgggactcctcctgcacgactccattcagattcctaggcagctaggcgaggtggcctcctttggtggatcaaatatcgagccgagcgtcaggagttgctttcagttcgccaataataagcctgagatagaagcagctctttttctcgactggatgagacttgagccccaatccatggtttggctcccagtccttcaccgggtggctgcagcagagacagcaaagcaccaggcaaagtgcaacatttgtaaagaatgtccgatcatcggttttcgttatcggagtctgaaacattttaattacgatatttgtcagagttgctttttcagcggaagggtggctaagggccataaaatgcactaccccatggtggaatattgcacacccacaacgtcgggcgaagacgtgagagactttgcgaaggtactcaagaacaaattcaggacaaaacggtatttcgctaagcatcctcgaatgggttatttacctgtccagaccgtcctggaaggggacaatatggagacgcctgtgaccttgattaacttttggccagtcgattctgccccagcctcctccccccaactgagccacgatgacactcattctcgtatcgagcattacgcttcccgattggcagaaatggagaattccaacggctcttacctgaacgatagcatttctcctaatgaatctattgatgatgagcacctactgatacagcactactgccagtcgcttaatcaagactcccctctttcccagccacgctcaccagctcaaatcctgatttctctggagtctgaggaacggggtgagctggaaagaatactggccgatttagaggaggagaaccggaatcttcaggccgaatacgaccgtctgaagcagcagcacgaacacaaaggtctttcccccttaccctctcctcccgagatgatgcccacatctcctcagagtcctagagatgctgagctgatcgctgaggccaagttattacgacaacacaaagggaggttggaagccaggatgcaaatactcgaggaccacaacaaacagctggaaagccagctgcacagactgcgccaactcttggagcagccccaggcagaggccaaagtaaatggaactaccgtgagctccccttctactagcctgcagcggtctgatagcagccagccaatgctgcttcgtgtggtgggctcacaaacctccgactccatgggggaagaagaccttctcagcccgcctcaggacacctccaccggtttggaggaagttatggaacagctgaacaatagcttccccagcagcagagggcgaaacactcctggaaaacccatgagggaggacacaccatat

SEQ ID NO: 221587 - DNA, 1854 bp, synthetic construct
  misc_feature 1..1854: note = Description of Artificial Sequence: Synthetic coding sequence
  source 1..1854: mol_type = other DNA
atgcgagagcagttaaaagggcacgagacacagacaacttgttgggatcaccccaaaatgactgagctttaccaatctctcgcagacctaaataatgtacggttcagcgcctaccgaacggccatgaaactcagaagactgcagaaagccctttgcttagatctactgtctttgagcgccgcttgtgacgctctggaccaacacaatctgaaacaaaacgaccagccaatggatatccttcagattataaactgtctgactactatctacgatcgcttagagcaggagcacaacaacctagtgaacgtgcccctctgtgtcgatatgtgcttgaattggctgctgaatgtatacgacacgggcagaactggccgtattagagtgctgtcattcaaaaccggaatcatcagcttgtgcaaggctcaccttgaagataagtataggtatctgttcaaacaggtagcgtctagtactggcttctgtgaccagcgcagactggggctgttgctgcacgacagcattcagatccccagacagctgggggaagtagcgtccttcggcggatccaatatcgaaccaagtgttaggtcctgtttccaattcgcaaacaataagccagagatcgaggctgcgctcttcctggattggatgcggctcgaaccacagtcaatggtgtggctgcctgtcttgcatcgcgtggccgctgccgaaactgcgaagcatcaagcgaagtgcaacatctgcaaggagtgcccaatcatcgggttccggtacaggtctctaaaacacttcaactacgatatctgtcagagttgttttttttctggacgggtggccaaggggcataagatgcattaccctatggttgagtactgtacgccaacaaccagtggggaggacgtgcgggatttcgccaaggtcctaaagaataaatttagaacgaagcggtatttcgctaagcaccccagaatggggtacctgcccgtgcagacagtgctggagggggacaacatggagacaccagtcactctgatcaatttctggccagtagacagcgcccctgcttccagcccccagctctctcacgacgacacacatagccgtattgaacactatgcaagtcgtctggccgagatggagaacagcaacggcagctacctgaacgactcaatctcgccaaatgagtcaatagacgacgagcacctactgatccagcattattgccaatcactaaatcaggatagtcctttgtcccagccgcgatctcccgcacagatactaatcagcctggagagtgaggaacggggtgagctggaaagaattctggcggacctcgaggaggaaaatagaaatctgcaagcggagtacgatcgcctgaaacagcagcacgaacataaggggctgtccccactcccctccccgccagaaatgatgccgactagtcctcagtctcctagggatgccgagttaattgccgaggctaagctgctaagacagcacaaggggaggctcgaagctcggatgcagatcctggaggatcacaacaagcagctggagtctcagctccaccggctgagacagctcctcgaacaaccccaggccgaggccaaggtgaatgggaccactgtgagctccccaagcacaagtcttcagagaagtgactctagtcagccaatgctgctgagggtggtagggtcccagacttccgactcaatgggtgaagaggacctattgagtccccctcaggatacttctaccgggctcgaggaagtgatggaacagctgaataatagtttcccctcaagcagaggcaggaacacacccggtaaacctatgagagaagacacaatgtag

SEQ ID NO: 221588 - DNA, 3678 bp, synthetic construct
  misc_feature 1..3678: note = Description of Artificial Sequence: Synthetic coding sequence
  source 1..3678: mol_type = other DNA
atgcccagttccctgatgctagaggttcctgctcttgcagatttcaatagggcatggactgagctaaccgactggctcagcctgctggatcaggtcatcaaatcccagcgagtaatggtgggtgacctggaagatatcaatgaaatgatcattaaacaaaaggctacaatgcaggacctagagcagcggagaccccagctggaggaactgatcactgctgcccagaacctgaaaaacaaaacgtctaatcaggaggccaggaccattattacagacaggattgaacgcattcagaatcagtgggacgaagtgcaggagcatctccaaaatagacgtcagcagctaaacgaaatgctcaaagattctacacagtggctcgaggccaaggaagaggctgaacaggttcttggccaggccagggccaagctggaatcttggaaggaaggaccatatactgttgacgcaatccagaaaaagatcacagagacaaaacagcttgcaaaagatctacggcaatggcagacaaatgtggacgttgcaaacgacttagctcttaaactgcttagagactatagcgcagatgacactcgaaaagtgcacatgataaccgagaatataaatgcctcttggaggtccattcacaagcgcgtttccgaaagggaggcagccctggaggaaacacacagacttctccaacagtttcccctagacctggagaaatttctggcttggcttactgaggcagagactaccgcaaatgtgttgcaggacgctacacgcaaggagagactcctcgaagactccaaaggagtcaaggagcttatgaaacaatggcaggatcttcagggtgaaattgaagcgcataccgacgtctatcataacttggacgaaaactctcagaagatattacggtctcttgaggggagcgacgatgcagtgctactccagcgcaggctggataatatgaattttaagtggagtgagctgcggaagaagagtctcaatatcaggtctcacctggaagcaagctcagaccagtggaaacggctgcatctgtccctgcaagaacttctagtatggctgcagctgaaagacgatgagctgtcacgacaggcacccatcggtggcgattttccagccgttcagaagcagaacgatgtgcacagggccttcaagagggaactgaaaacaaaagagccagtgataatgtccacactagaaactgtcaggatctttctgacggagcagccccttgaaggcctggaaaagctgtaccaagagcctagggaactcccccctgaagagagagcccagaacgtgactagactcctccggaagcaagcagaagaggtcaataccgaatgggagaaactcaacctgcactctgccgattggcaacgcaaaattgatgagactctggagagactgcgggaacttcaggaagccaccgatgaactggacttgaagttaagacaggcagaggtcatcaaggggagttggcaaccagttggcgacctccttatcgattcattgcaggaccatctcgaaaaggtcaaagcattgaggggtgagatcgcacctctgaaagagaacgtgtcccatgtaaacgacctcgcgaggcaactaacgaccctggggattcagctctccccctacaatctttctacactggaggatctcaatacccgctggaagcttctccaggtggccgtggaggatagagttcgtcagctgcacgaagcccacagggactttgggccagcatctcagcattttctgtcaacttccgtccagggaccatgggagcgcgcaatctctcccaacaaagtcccttactatattaaccatgagacacagactacatgctgggaccatcccaaaatgaccgaactttaccagtccctggcagacctcaataatgtcagattctctgcctataggacggccatgaagctgcggcgacttcagaaggcgctgtgccttgatctcctgtccctcagcgctgcctgtgatgccctggatcagcacaatctgaagcagaacgatcaacccatggacatcttacaaataattaactgtctcaccactatatatgataggctcgagcaggaacacaataatttggtgaacgtgcctctgtgtgtcgacatgtgtttgaactggctacttaatgtgtacgacacaggcagaacaggccgaattcgcgtcctgtccttcaaaacaggtatcatctctctctgtaaggcccatctggaagacaagtataggtacctgttcaaacaggtagctagctctaccggcttctgcgaccagcggagattgggcctgctgctacacgacagcatccaaatccccaggcagctgggcgaggtagcaagctttgggggaagtaatatcgaaccgagcgttaggtcatgttttcagttcgccaataataagcccgaaatcgaagctgctctcttccttgattggatgaggcttgaaccccaatcaatggtgtggctccctgtgctgcacagggttgccgctgccgaaacagccaaacaccaggccaaatgcaatatctgtaaagagtgtcccataatcggcttcaggtaccgctccttgaaacattttaactatgacatttgccagagttgtttttttagcggtagagtagccaaagggcataaaatgcactaccctatggtggaatactgtacgcccaccacttcaggcgaagatgttagagacttcgccaaggtcttaaaaaacaagtttcgcactaaaaggtactttgccaagcatcctcggatgggttacttgcctgtccagaccgtccttgagggagacaatatggagacccctgttactctgatcaacttctggccggttgactctgccccagccagttctcctcagctctcccacgacgacacgcacagtagaatagaacattatgcctctagactcgccgaaatggagaactccaacggttcctacctgaatgactccatttcgccaaatgagagcattgatgacgagcacctgctcattcaacactactgtcagtccctcaaccaggattcccctttgtcccagcctcgctccccggctcaaatcctgattagccttgagagcgaggagaggggcgagctagagaggattctggcggacctcgaggaggagaaccgcaacctgcaggcagaatatgatcggctgaagcagcaacacgaacataaaggtctgtccccccttcccagcccacctgaaatgatgcccaccagcccacagagccctcgggacgccgagttgatcgcggaggctaagctcctgcggcagcataaggggagacttgaagccagaatgcagattttggaggaccacaacaaacagctggagtcccagctgcatcgcttgcgacagctgctggagcagcctcaagcagaggccaaggtcaacggtaccactgtcagctctccttcaacgagccttcagagatcagattcatctcaacccatgcttttgagggtggtcgggtctcagacaagcgattcaatgggtgaagaggacttgctgagcccacctcaggacactagcactggcttggaagaagtgatggaacagctgaataactcatttccgtcctcccggggtcggaatactcctgggaaacccatgagggaggataccatgtag

SEQ ID NO: 221589 - DNA, 1908 bp, synthetic construct
  misc_feature 1..1908: note = Description of Artificial Sequence: Synthetic coding sequence
  source 1..1908: mol_type = other DNA
atgcgcgagcagctgaaagggcacgaaacacagacgacatgctgggatcaccccaaaatgacagagctctaccagagcctcgccgacctcaataatgtgcggttcagcgcttatcgaaccgctatgaagctccgcaggctgcaaaaagctctgtgcttagaccttctgtctcttagtgctgcatgcgatgcgctcgaccaacacaatctgaaacagaatgaccaacctatggatatacttcagataatcaattgcttgactactatctacgataggctggaacaagaacacaacaatctggttaacgtgcctctctgtgtggacatgtgtctgaactggcttcttaacgtttatgacacaggacgcacaggccgaatacgcgtgctgtcattcaagactggcataatatcactgtgcaaagctcatctggaggacaagtaccgctacctgttcaaacaggtggcctctagcaccggattctgtgaccaacgccgactgggacttctcctccacgattccatccaaataccacggcaactgggggaggtagcctccttcgggggttccaacatcgaacccagtgtccggtcatgctttcagtttgcgaataacaaacccgaaatagaagctgcattgttcctggattggatgcgtttggagccccaatcaatggtctggctgccagtactgcaccgtgtagcagccgctgagactgcgaagcaccaggccaaatgtaacatctgtaaagagtgccctataattggattcagataccgctctctgaagcacttcaactatgatatttgccaatcctgcttctttagcgggagggtggcaaaaggacataagatgcattaccccatggtggaatattgcacccctaccacaagcggagaagacgtgagagacttcgccaaggtcctaaaaaacaaattcagaacaaagaggtatttcgcgaagcaccctagaatgggctacctccctgtgcagacagtgctagaaggagacaacatggagacacctgtcacgttaatcaatttctggcctgtcgactcggccccagccagctcacctcagctcagccatgatgatacacatagtagaattgaacattacgccagccgcttagctgaaatggagaacagcaacgggagttatctcaatgactcaattagcccaaatgaaagtatagatgatgaacacttgctgattcagcactattgtcaaagcctaaatcaggactcacccctttcccagcctcgcagcccggcacaaattttaatcagcttggagtcagaggagcgtggcgagttagaacgaatcctagcggatctggaggaagagaatcgtaatcttcaggccgagtatgacagactgaaacagcagcatgaacacaagggccttagtccactcccttccccccctgaaatgatgccaacaagccctcagtccccccgagacgccgaactgattgctgaagcaaaattgctgcgccagcataaaggtcggctggaggctaggatgcagattcttgaggaccacaacaagcaattagagtctcagcttcatcgtctgcggcagctgctggagcagccccaggccgaagccaaagtcaatggtactactgtatcctctccgtctacatctctgcagcggagtgactcctcacagcctatgcttctcagggttgtgggatctcagactagtgactctatgggggaagaggacttactctcgcccccacaggatacaagcaccggcttggaagaggtcatggagcaactgaacaattctttcccgagcagcagaggtcataatgttgggtctctgtttcatatggccgatgacttaggacgcgcaatggaatctctcgtgagcgtgatgacagacgaagagggcgcagaatag

SEQ ID NO: 221590 - DNA, 3732 bp, synthetic construct
  misc_feature 1..3732: note = Description of Artificial Sequence: Synthetic coding sequence
  source 1..3732: mol_type = other DNA
atgccatcaagcctgatgctcgaggtgccagccctggccgacttcaaccgcgcatggaccgaactgacagactggttaagcctgctggatcaagttatcaaaagccagcgggtcatggtaggcgacctcgaagacataaacgaaatgatcattaagcagaaggctactatgcaggatttggagcaaaggaggcctcagcttgaagaactcatcacagcagcccagaatcttaagaacaagacaagcaatcaggaagcgcgaacaatcatcaccgatagaatcgagcgcatccaaaatcaatgggacgaggtgcaggagcatttgcaaaacaggaggcagcagcttaatgaaatgcttaaggatagtacgcaatggcttgaggcgaaggaagaggcggaacaggtcctgggacaagcccgagctaagctggagagctggaaagaggggccatacacagtcgatgccatccagaagaagattactgagactaaacagttagcaaaggacttgcgtcagtggcaaaccaacgtcgacgtggccaacgatctggcactgaaactgctccgcgattattccgccgatgataccaggaaggtacatatgatcacggaaaatatcaacgcatcctggcgttctatccataaaagggtcagcgagcgcgaggccgctctggaggaaacacaccggttactgcaacaattcccgctggacttagagaaatttctggcctggctcacagaagcggagactaccgcaaatgttcttcaggatgccactcggaaagaacgactgctggaagactcaaaaggagtgaaagagttaatgaaacagtggcaggacctgcaaggcgaaattgaggcccacactgatgtgtatcacaaccttgacgaaaactcccaaaaaatcttgcgctccctggaaggaagcgatgacgcagtactgttgcagaggcgactggataatatgaactttaagtggtcagaattgaggaaaaagagcctgaacattcggtcccacttggaggcatcttctgaccagtggaaacgcctccacctctcattgcaggagcttttggtctggttacagcttaaagatgatgaactgagccgtcaggccccaataggaggagatttccctgccgtacaaaaacagaacgatgtgcatcgggctttcaagagagaattgaagaccaaagagcccgttatcatgtctactctggagacagtgagaatctttctgaccgagcagccactggagggcctggaaaagttataccaggaacccagggaactgcccccagaggagcgagcgcaaaacgtgacgaggctcctgcggaaacaggcagaagaagtaaacaccgagtgggagaagctgaacttacattcagccgactggcaaaggaagatcgacgagactttggaaaggctcagagaactgcaagaagcaacagacgagctggatcttaagctgcgccaggctgaagtcatcaaggggtcctggcagccagtaggagatctgctgatcgacagtttacaagaccacctggaaaaggttaaggctctgaggggcgaaattgcaccccttaaggagaatgtgagccacgtgaatgatttggcaagacagttaactaccctgggcattcagctgtccccctataatctgtccacgctcgaagacttgaatacaaggtggaagctgctgcaggtggccgtggaggaccgggtgaggcagctgcacgaagcccacagggatttcggaccagcctcccagcattttctgtctacatccgtacagggcccttgggaaagggccatctctcctaacaaggtcccgtattacatcaaccacgaaacacaaacaacttgttgggaccatcccaaaatgaccgaactgtaccagtctttggccgacctgaacaatgtcaggttctctgcctacagaaccgcgatgaagttacgacgattgcagaaggcgctgtgtctggacctgctcagcctatctgccgcatgtgacgccctcgatcagcacaacctgaagcagaatgatcaaccaatggatatactacagattattaattgtctgacaaccatctacgacagattggagcaggagcataataatttggttaatgttcctctctgtgtcgacatgtgcctgaactggttgctaaacgtgtatgacacaggcagaactggcagaattagggtgttgtccttcaaaaccggcatcatctccttatgtaaggcacatctcgaagacaagtacaggtatctttttaagcaagtggccagctcgactggcttctgtgaccagcgtaggcttggccttctgctccatgacagcattcagattcctcgtcagcttggcgaagtagcttcatttggtggcagcaatattgaaccttctgtccggtcatgtttccagtttgcgaataataaaccagagatcgaagccgctttgttcctggactggatgaggcttgaaccccaatctatggtttggctcccagtcctccaccgggtcgcagccgctgagactgctaagcatcaggcaaagtgtaacatttgcaaggagtgtccaatcataggattcaggtaccggtctctcaaacacttcaattacgacatctgccagtcatgctttttctctggcagggtcgccaaaggccataagatgcactatccgatggtcgagtactgtactcccaccactagtggagaagatgtgcgtgactttgccaaggtgctgaagaacaagttcagaacgaagcggtattttgctaagcatccgaggatggggtatctccctgtccaaactgtccttgagggcgataatatggagacccccgttacattgatcaacttttggcccgtggactctgcccctgcttctagcccccaactgtcacacgacgatactcactctcgtatagaacactacgcctcaaggcttgctgaaatggagaacagcaacgggagttacctgaacgacagcatcagtcctaatgagtccatcgatgatgagcacctattgattcagcattactgtcagagcctcaaccaggacagccctctcagtcagcctagatcaccagctcaaatcctcatctccctggagtcagaggagagaggagagctagagaggatcttggccgacctggaggaggagaacagaaatctgcaggctgaatacgataggctaaagcagcagcatgagcataaaggcctctcccctctgccctccccccctgagatgatgcctacaagcccccagagtcccagggacgccgaacttatcgccgaggccaagctgctccgacagcacaagggcaggcttgaagctcggatgcaaatcttggaggaccataacaagcagctggagtctcagcttcatagacttagacagctactggaacagccgcaggctgaggcgaaggtcaacggcactactgtgtctagtccgtccaccagcctccaacgtagcgactcatcgcagcccatgttactgcgggtggtcggctcacagacctcagattccatgggggaagaggatctgctcagccctccgcaagatacttccaccggtcttgaagaggttatggagcagctgaacaatagcttcccatcttctagaggccacaatgtaggatcactttttcacatggcagacgacttggggagggcaatggagtcattagtgtccgtgatgacagatgaggagggtgctgaatag

SEQ ID NO: 221591 - DNA, 11034 bp, synthetic construct
  misc_feature 1..11034: note = Description of Artificial Sequence: Synthetic coding sequence
  source 1..11034: mol_type = other DNA
atcctggatgagcgtgaggacgtgcaaaagaagactttcaccaagtgggtgaacgcacaattctccaagtttggcaaacaacacatagagaacctgttcagtgacctccaagatgggcgtagactgctcgacctgctggaagggctcaccgggcaaaagttgcctaaggagaaaggctctactcgcgttcacgctctgaataatgtgaacaaagcgctgagagtgctgcagaacaataacgttgatctggtgaatatcgggagcaccgacattgtggacggcaaccataaactgacgctcgggctcatttggaatattatcctccattggcaggttaagaacgtgatgaaaaatataatggcgggtttacagcagaccaattcggagaaaattctgctcagttgggtgcggcagagcaccagaaactatccccaggtgaatgtgattaactttaccacttcatggtcagatgggctcgccctgaatgctctcatacattcacataggcctgatctcttcgactggaattctgtggtgtgccaacaaagcgccacccaaaggttagaacacgccttcaacattgcgcgatatcagctaggaatagaaaagctccttgatcccgaagacgtagacacaacataccccgacaaaaaaagtatccttatgtacatcacaagtctgttccaggtgttgcctcagcaggtgtcaattgaggccattcaggaggtcgaaatgctaccacgaccaccaaaagtaaccaaggaggagcatttccaacttcaccatcagatgcactacagtcaacagatcaccgtctctctggctcagggctatgagaggacctcttctcccaagccacgctttaagtcctatgcctacacgcaagctgcctacgtgacgacctcagaccctaccagatcaccctttccaagccaacatctggaagcacccgaggataagagctttggttccagtctgatggaaagtgaggtgaatttggatagatatcaaaccgcattagaggaagtgctgagctggcttctgagcgccgaagatactctgcaggcgcagggcgagatctcaaacgatgttgaagttgtgaaagatcagttccatacccatgaggggtacatgatggacctgacagctcatcagggcagagtgggtaacattttgcagctgggcagcaagctgatcggaaccggtaagctgtccgaggatgaggaaacggaggtgcaagagcagatgaaccttctgaacagcaggtgggagtgcctgagggttgcatccatggaaaaacagtccaacctccaccgggtactaatggacctgcaaaatcaaaagcttaaagagctgaacgattggctaactaaaactgaggaacgaacaagaaagatggaggaggagcctctcggtcctgaccttgaagacctgaagcggcaggttcagcagcacaaagttcttcaggaagacctggagcaggaacaggtgagagtcaactccttgacacacatggtggtggttgtggatgaatcatccggcgaccatgccactgccgctctggaagagcagctaaaagtccttggtgataggtgggctaacatctgccgatggaccgaggataggtgggtcctgcttcaggatatcctactgaaatggcagcggctcactgaggaacaatgtctgtttagcgcatggctgagcgaaaaggaagatgccgtcaacaagatccataccactggatttaaggaccaaaatgagatgttgagtagtttgcagaagctggctgtgctgaaggctgatctcgagaagaagaaacaatcaatgggaaagctgtactctctgaaacaggacctgttgtctaccttaaagaacaaatccgtaacccaaaaaactgaggcttggctcgataattttgctagatgttgggataacctcgtgcaaaagctcgagaagtccaccgctcagatttcgcaggctgtgaccaccacgcagccatcactgacgcagaccaccgtcatggagactgtcaccacggtcacaaccagagagcagatcctagttaaacacgcccaggaggaactgccccctccaccaccccaaaaaaaacggcagattactgtggactccgaaattcgtaagcgactggatgttgacattactgagctgcacagctggattactcgatctgaggcagtgctgcagtcgcccgagtttgcaatattcagaaaggaaggcaacttctcagacttaaaagaaaaagtcaatgctatagagagagagaaagcagagaagttcaggaagctgcaggacgcttcccggagtgcacaagctctcgtggaacagatggtgaacgaaggggtcaacgcggactctataaagcaggcatccgaacagctgaattccaggtggatcgaattctgccaacttctttcagaaaggctgaactggctcgaataccaaaacaacattatcgctttctataaccaactgcagcagttggagcagatgaccaccaccgccgagaattggctaaaaatacaacctaccacacccagtgaacctaccgctatcaagtctcaactgaagatctgtaaggatgaagtgaaccggctttctgacctgcaacctcagattgaaagacttaagattcaaagcattgcgctcaaagagaagggtcagggacccatgtttctggatgcagacttcgttgcattcacaaaccacttcaaacaggttttctctgatgttcaggctcgggagaaggaactccagactatcttcgacaccctccccccaatgcgatatcaagagaccatgtccgcaattaggacctgggttcaacagtccgaaacgaagctgtctataccccaactctcggtgacagattacgagattatggaacagagactgggggagttgcaagccctccaatcttcccttcaggagcaacaatcggggctatactacctttctaccacagtcaaagaaatgagtaagaaagcccctagtgaaattagccgaaagtaccagtcagagtttgaggagatcgaaggaaggtggaaaaagctgtccagccagctggtcgaacactgccagaagctcgaggaacagatgaataaactgcggaagatccagaaccatatacaaaccctgaaaaaatggatggcggaggtggacgtctttctgaaagaggagtggccagcactgggggatagcgaaatcctcaagaagcagctgaagcagtgccggctgttggtgtctgacatccagactatacagccttcactcaacagtgtgaatgaaggcggtcagaaaataaagaacgaggccgaacccgaattcgcgtccaggctcgagaccgagttgaaggagttgaacactcagtgggaccatatgtgccaacaggtgtacgcacgtaaagaagctctgaaaggtgggctggagaaaaccgttagcctgcagaaggacctgtccgaaatgcacgaatggatgacgcaggctgaagaagaatatttggagagggactttgaatacaaaacacctgacgagcttcagaaggccgtggaagaaatgaaacgagccaaagaggaagcacaacagaaagaagcgaaagtcaaattgctgacagaatccgtgaatagcgtgattgctcaggccccacccgtggcccaggaagctctgaagaaagaactggagaccctgacaaccaactaccagtggttatgtacccggctcaatggaaagtgcaaaaccctcgaggaggtgtgggcatgctggcatgaacttctgtcatatctcgaaaaagccaacaagtggctcaatgaggttgaattcaaactgaaaaccacagaaaatatcccagggggagccgaggaaatctctgaagtactggacagcctcgagaatttgatgcgtcactccgaggataaccccaaccagattagaattcttgcacagaccttaaccgacggtggggtcatggatgaacttatcaacgaagagttggaaacatttaactcgcggtggagggaactccatgaagaagccgttcggaggcagaaacttctggagcagtctattcagagcgcacaggagacggagaaatctctgcacctgatccaagaatcactgactttcatcgacaaacaattagccgcatacattgccgacaaagtggatgcagcccaaatgccacaggaggcacagaaaatccagtctgatctgacatcccatgagatttccctggaggaaatgaagaaacataaccaagggaaggaggccgcacagcgagtgctgtcccagatagacgtcgcacagaaaaaactccaggatgtgagcatgaagtttagacttttccaaaagccagccaattttgagcagaggctccaggaaagtaagatgatactggatgaagtgaaaatgcatctccctgctctggagactaagtccgtggaacaggaagtggtgcagtcccagctcaatcactgcgtgaacctttacaaatctctgtccgaggtcaagagcgaggtcgaaatggtcattaagactggcaggcaaatcgtccaaaaaaagcagacagagaatcctaaggaattggacgaacgggtaacagctctgaagctgcattacaacgagctgggtgccaaggttacggagaggaagcaacaactggagaagtgcctgaaattgtcccgcaaaatgcggaaggagatgaatgttttaacagagtggcttgcagccacggatatggagcttaccaagcggtcagccgtggaggggatgcccagtaacctggattctgaagtggcgtggggcaaagcgactcaaaaagaaatcgagaagcaaaaagtgcatctgaaaagcatcacggaggtgggcgaggctcttaaaaccgtactgggaaaaaaagagacactcgtggaagataagctcagcttgctgaatagcaactggattgcagtgacatcaagagccgaagagtggctgaatctgcttttggaataccaaaagcacatggaaaccttcgatcagaacgtggaccacataaccaagtggattatccaagctgatacactcctcgatgagtctgagaaaaagaagccacagcagaaggaagacgtgctcaagcgccttaaagcggagctcaacgacataaggcccaaagtagacagcaccagagatcaagccgctaacttgatggccaatcggggtgatcattgcagaaaacttgtagagccacagatcagtgaacttaatcacaggtttgccgctattagtcacaggattaaaacgggcaaggcctccatccccttaaaagaacttgaacagttcaatagcgacatacagaaacttctcgaacccctggaggccgagatccaacagggcgtgaatttgaaagaagaagatttcaacaaagacatgaacgaagataatgaaggaacagtcaaagaactcttgcaacggggagataacctccagcagcgcatcaccgatgagcgtaaacgggaagagattaaaatcaagcagcagttgctgcagaccaaacataatgctctgaaagaccttcgctcacagcgaaggaagaaagccttggaaatcagccatcaatggtatcagtacaagcggcaggcagacgacttactaaagtgcctggatgacatagagaagaagctagcctctcttccagaaccacgcgatgaacggaaaatcaaggaaattgatagggaactccaaaaaaaaaaagaggagctgaatgccgtccgacgccaggcagaaggactttctgaagatggtgcagccatggcggtggaaccaactcagattcagctttcaaaacggtggcgtgagatagagagcaagtttgctcagttccgacggctcaactttgctcagatccacacggtgcgcgaggagacaatgatggttatgactgaggacatgccgctggagatatcgtacgttcctagtacataccttaccgagatcacacatgtgtcgcaagctctgctggaagtggagcagctcctgaacgcacctgatctgtgcgccaaagacttcgaggacttattcaagcaagaagagtctttaaaaaatattaaggattccctacagcaatcctctggcagaatcgacataatacactccaagaagaccgctgcactccagtcggcaactcctgtcgaaagggtgaagttgcaggaagccctctctcagttagactttcagtgggaaaaggttaataagatgtacaaagacagacagggcaggttcgacaggagtgttgagaaatggcgacgcttccactatgatattaaaattttcaaccagtggttgactgaagccgaacaatttctgaggaagacacagataccagagaattgggaacacgctaagtacaagtggtacctcaaggagctccaggacggtattggacagcgccagaccgtcgtaaggaccctgaatgccactggggaggagataatccagcagagcagtaagaccgacgcttcaattttgcaggagaaactgggctcccttaacctgagatggcaggaggtctgtaagcagctctcagatagaaaaaagagacttgaggagcagaagaatatacttagcgagtttcaaagggatctgaatgagttcgtcctctggctcgaggaagcagataatatagcctctatccctctcgagcctggcaaagaacagcagctgaaggaaaagctcgaacaggttaagctattagtcgaagagctccccttgagacaagggattctgaagcagctgaatgagactgggggaccggtcctcgtatcagctcctatttcacccgaggagcaggataaactagaaaacaaactgaagcagacaaacctacagtggatcaaggtatccagggcactgcctgagaaacaaggcgagattgaagcccaaatcaaggatctcgggcagctggagaaaaagcttgaagacctggaagagcagctaaatcacttgctgctttggctctcaccaatccggaaccagctggaaatctataaccagcccaaccaggagggaccatttgatgtgaaggagacagagatcgcagtccaagcaaaacagccagacgttgaagagattctatccaagggccagcacctgtacaaggaaaaaccggctactcagcccgttaaacggaagctggaggatttgtcctccgagtggaaggccgtgaacagacttctgcaggaacttcgtgcgaagcagcccgaccttgcgcctggactgacaaccataggcgcatctccgacacagacggtgactctggtgacccaaccggtggttacgaaggaaaccgcaatcagtaagttggagatgccttccagtttgatgctcgaggtcccagcgttagcagattttaatcgggcatggactgaacttactgattggctgtcccttttagaccaggtcattaagtcacagcgagtgatggtgggagatctcgaggacatcaatgagatgatcattaaacagaaggccactatgcaggacctagagcagagacggccacagctggaggagctgatcacggcagcccagaatctgaagaacaagaccagcaaccaggaggctcggacgataattaccgaccggatcgagaggatacaaaaccagtgggacgaagtgcaagaacatctacagaaccgccgacaacagctgaacgaaatgttaaaggattcaactcagtggctcgaggcgaaggaagaagcggaacaggtcctgggtcaagctcgtgccaaactagaaagctggaaagagggaccctatactgtcgacgccatccagaagaaaatcaccgagacgaaacaactggccaaggacctccgtcagtggcaaaccaatgtggatgtcgccaacgatctggccctcaagctgctgagggattattctgctgacgacacccgaaaagtgcacatgataactgagaacatcaacgcatcctggcggtcgattcataagagagtcagcgagagagaagcagcactggaagagacacaccgattgttacagcagttccccctcgatctcgaaaagttccttgcgtggctcacagaggctgagaccaccgccaacgtgctgcaagatgctacaaggaaagagcggctgctggaagatagcaaaggtgtgaaagagctcatgaaacagtggcaggaccttcaaggcgaaatcgaagcacacacagatgtataccacaacttagatgaaaatagccaaaaaattttgagatcgttggaagggagtgacgacgctgtgctccttcagcggagactggacaacatgaattttaagtggtcagagctccgcaaaaaatcactgaacatcaggtctcacttagaggcctctagcgaccagtggaagagattacatctctcactgcaggaattgttagtctggctccaactgaaagacgacgagctctcgaggcaagcaccgattggcggtgatttccccgctgtccagaagcagaacgacgtgcatcgtgccttcaaacgggaattgaagacaaaggagcctgtcattatgtccacgctcgaaactgtgcggatctttctgactgagcagcctctggagggcctggaaaaattgtaccaggagcctagggagttgcctcccgaagaacgcgctcagaatgttacacgcctgctgcgcaaacaggctgaagaggtgaataccgagtgggaaaaactcaacttacatagcgcagattggcagagaaagattgacgagactttagaaagattgcgtgaattgcaagaggcaactgacgaactcgacctgaaacttcgacaagccgaagtcattaaaggatcctggcagccggtgggcgatctactgatagacagtctgcaagatcatctggagaaggtgaaagccttacgcggagaaattgcaccactgaaggagaatgtgtcacacgtgaacgatctcgcacgccaacttacgacattagggatacagcttagcccatacaacctgtccacactcgaagacctgaacacaagatggaaattgcttcaggttgcagtggaggatcgcgtgcgccagctgcacgaggcgcacagagatttcgggccagcctcccagcactttctgtctaccagcgtgcaaggcccatgggagcgcgcaatttcacctaacaaagtgccgtattacatcaatcacgagactcaaactacttgctgggatcatccaaagatgaccgagctgtaccagagccttgcagatcttaataacgtacgcttctccgcgtatagaacagccatgaaacttaggaggcttcagaaggcactttgcctggacttgctgagtctgagcgcagcctgcgacgccctggatcagcataatctaaaacagaacgatcagcctatggatattctgcaaattatcaattgtctgaccaccatttatgatcggctggaacaggagcacaataacctggtgaatgtgcccctctgcgtggatatgtgtctcaattggctcctgaacgtttacgacactggacggacaggccgaatccgagtgcttagctttaagacaggaatcatttctctgtgtaaggcacacttggaagataagtatcgctatctctttaaacaagtcgcctcatccactgggttctgtgaccagaggcgtctggggctgctcctacacgattccatccagatcccacgccagttaggtgaagtcgcctcattcggcggaagcaacattgaacccagcgttcggtcgtgcttccagtttgcaaacaacaaacctgagattgaggctgctctattcttggactggatgcgactcgagccgcagagtatggtctggctgccggtgttacatcgtgtggccgcagcggagaccgctaaacatcaggctaagtgtaacatatgcaaagaatgtccaataataggatttcgataccggtcactgaagcattttaactacgatatctgtcagtcttgctttttcagcggtcgagtcgccaagggacataaaatgcactatccaatggtcgagtattgtactccaactactagcggagaggacgtacgcgactttgctaaagtgctcaagaataagttcaggacaaaacgctatttcgctaaacatccgaggatgggatacctgccggttcagacggtcctggagggtgataacatggagacgcccgtcactctgatcaacttctggccagtcgatagcgccccagcctcgtcgccacaacttagtcatgacgacacccattcgagaatcgagcattacgcatcacgtctggccgaaatggaaaacagtaatggctcgtatctgaatgactcaatctctcctaatgagagtatagatgatgagcatctactgatacagcactactgccagagcctaaaccaggactcccctctatcccagccgcgatctccggctcagatcctgatttccttggagtctgaggagagaggcgagctggaaaggattctggcagacctggaagaggaaaaccgcaacctgcaagcagagtatgacaggctgaaacaacagcatgaacacaagggactttcgcctctgccctcaccgccagagatgatgcccacttctcctcagtcccctcgcgacgctgagctgatcgcagaggcaaagctcttacgtcagcataaggggcgtcttgaagcccgaatgcaaatcctcgaggaccacaataaacagctggagtcacagctgcatagactccgacagctccttgagcaaccccaagccgaggccaaagtgaatgggacgacagtcagttccccctctacatctcttcagcgctccgatagctctcagcctatgctgctgcgcgttgtgggcagtcagaccagcgattccatgggtgaggaagatcttctgtcccctccccaggacacctctacaggcctcgaagaggttatggaacagctgaataatagtttcccttcaagccgcggacgaaatacccccggtaagccgatgagggaggatacaccctaa

SEQ ID NO: 221592 - DNA, 10689 bp, synthetic construct
  misc_feature 1..10689: note = Description of Artificial Sequence: Synthetic coding sequence
  source 1..10689: mol_type = other DNA
atgaaaaacatcatggcaggcctacagcaaacaaatagtgaaaagatcctgctcagttgggtacgtcaatctacaagaaactacccccaggtgaacgtgattaacttcactacttcctggtcggacggcctggcgttgaacgcactgattcattcgcaccgacctgacctcttcgattggaatagtgtcgtttgccagcagtctgcaacccaacgattggagcatgcttttaacatcgccagatatcagctggggattgagaaactactcgatcccgaggacgtcgacacaacttatcctgataagaaatctattctcatgtatattactagtctcttccaggttctccctcagcaagttagtattgaggctattcaggaggtggaaatgcttccgagaccccctaaggtcacgaaagaagagcatttccagctgcaccaccagatgcactactcacagcagatcaccgtctccctagcccagggctatgagagaacatcatctccaaaaccaagatttaaaagctacgcttatacccaggccgcttatgtgacgacaagcgaccctacccgttccccctttccatcccaacatcttgaagccccagaggacaaaagctttggaagctccctgatggagtctgaagtcaacctcgatagatatcagacggcattagaggaggtcctcagttggctgctttctgccgaagacacactgcaagctcaaggggaaatctctaatgacgtcgaagttgttaaggaccagttccatactcatgagggttatatgatggacctgaccgctcaccagggtcgcgtgggcaatatcctccaattgggctcaaaactcatcggaaccgggaagctgagtgaagacgaggaaaccgaagtgcaggagcagatgaacctgctgaattcaaggtgggagtgtctcagggtggcctccatggagaagcagtccaaccttcatagggttttgatggatcttcagaatcagaaattgaaagagttaaacgactggctgactaaaacggaagaaaggacgcgcaaaatggaggaagaacccctgggtcccgacctggaagatttaaagagacaggtacagcagcataaagtgcttcaggaggacctcgagcaggagcaggttcgagtgaacagtcttactcatatggtggtcgtcgtggacgagtcctccggggatcatgcgacagctgcattagaagagcagctaaaagtgcttggcgaccgctgggctaacatctgccgttggaccgaagatagatgggttctcctgcaggacattctgctcaagtggcagagactgaccgaagaacagtgtctcttctctgcgtggctctccgagaaagaggacgcggtgaacaagattcatacaacgggctttaaggaccaaaacgagatgcttagttcgctgcaaaaactcgcggtgcttaaagcggatctcgagaaaaagaagcagagcatgggcaagctgtactctcttaaacaggatctgctctcgactttgaaaaacaaaagcgttacccagaagacagaagcgtggctcgacaacttcgctcggtgttgggataatctggtgcagaagctagaaaaatcgacggcccagatttcgcaagccgtgacgacgacacagccttctctcacacaaacgaccgtgatggagacagtcactactgtgaccacccgagagcagatcctggtgaagcatgcccaggaagagctgcccccaccgcctccccagaaaaaaaggcagattaccgtggacagcgagatccggaagagactcgatgtggacattaccgagctgcacagttggatcactagatctgaggccgtgttacagtctccggaatttgcaatctttcgaaaagagggtaatttttctgacctgaaggagaaagtgaatgcgattgagcgagaaaaggccgaaaagttccgtaagctacaagacgcttcaagaagcgctcaggctctggtggagcagatggtaaacgagggagttaatgccgactcaatcaagcaagcatcggaacagctgaatagcagatggattgagttctgccagctgctgtcagagcggttgaactggttggaataccaaaataacataatcgctttttataaccaattgcagcagctcgagcaaatgaccaccaccgctgagaattggctcaagattcaaccaactacaccatcagagccaactgccatcaaaagccaactgaaaatctgcaaagacgaagtgaaccgactgagcgacctccagcctcagatagaacggctcaaaatacaaagcatcgccctgaaagaaaagggacagggccctatgtttttagatgcagatttcgtcgcctttacgaaccattttaagcaggtctttagcgatgtgcaggctcgagagaaagaactgcagacaatcttcgacacccttccccctatgcgctaccaggagaccatgtcagccattcggacctgggtgcagcaatccgagacgaagctttcgattccgcagctatctgtcacagactatgagattatggaacagaggttaggggagttgcaggccctgcaaagtagcctccaggagcagcagagcggactgtactatctgagcaccacagtgaaggaaatgtcaaaaaaggcccctagcgagatttcccgcaaatatcagtcagagtttgaggagattgaaggacgctggaagaaactgtctagccagctagtagagcactgccagaaactcgaggagcagatgaacaaactacggaagatccagaaccacattcagacgttgaagaaatggatggctgaagtggatgtgtttctgaaagaggaatggcctgccctgggtgacagtgaaattcttaaaaagcagctgaagcagtgtaggttgcttgtgagtgacatacagacgatccagcccagcctgaactccgtgaacgagggtgggcaaaaaattaaaaacgaggcagagccagaattcgcaagccggctggaaacagagcttaaagagctcaacacccagtgggaccacatgtgccagcaagtctatgccagaaaggaggccctgaagggcggtctggagaagacagtgtctctgcaaaaagatttaagcgagatgcacgaatggatgacacaggctgaggaggaatatttagaacgtgacttcgaatacaagacccccgatgagctgcagaaagccgtagaagaaatgaaacgcgctaaagaggaggcgcagcaaaaggaggccaaggtcaagttgttgacagagtcagtaaacagcgtaatcgctcaggctccaccagtggcgcaggaggcccttaaaaaggagctggagactctgacgacaaactatcagtggctatgtacaaggctgaacgggaagtgtaaaacactcgaggaggtgtgggcctgctggcacgagctgctcagctacctcgaaaaggccaacaagtggctgaacgaagttgagtttaaactcaaaactacagaaaatatcccgggaggcgctgaggaaatctccgaggtgcttgattccctcgaaaacctcatgcgccacagcgaggacaaccccaaccaaattcgcattctggcacaaacactgaccgatggaggggtaatggacgaactgataaatgaagaacttgaaactttcaattcccgatggcgggagctgcatgaagaggcagtaaggaggcagaagctgctggagcagtctatccaatcggcgcaagagaccgagaaaagcttgcacctgatccaggaaagccttaccttcatcgataagcaactagctgcctatattgcggacaaagtcgatgccgctcaaatgccacaagaggcccagaagatacagagcgacctcacctcacatgagatctccctagaggagatgaaaaaacataatcagggcaaggaagccgctcagagagtgttgtcgcaaattgacgtggcacagaaaaaacttcaggatgtgagtatgaaattccggctgtttcagaagcccgctaattttgagcaaaggctgcaggagagcaagatgatcctggatgaagtaaagatgcacttgccagctctcgagacaaaatctgttgagcaggaggtggtgcagtcacagctgaatcactgtgtcaatctctacaagtccctctctgaggtgaagtcagaagtagagatggtcatcaagactggtcggcaaattgtgcagaagaagcaaacagagaatccaaaggaactggacgagcgagtgaccgccctgaaactacactataacgagttaggggctaaggtcaccgagcgaaaacagcagcttgagaagtgcctaaagctcagtagaaagatgcggaaggagatgaacgtcctgaccgagtggttggccgctaccgacatggagcttacgaaaaggagtgctgttgagggcatgcccagtaatctcgactccgaagtcgcctggggtaaagcaacccagaaggaaatagagaagcaaaaagtacatctcaaatcgatcactgaggtgggagaggctctgaagactgtgttgggaaaaaaggaaacactggtggaggataaactctctttactcaattcgaactggattgctgtaacttcacgggcagaagaatggttaaacctgctgttagagtatcaaaagcacatggagacttttgaccagaacgtagaccacatcactaagtggatcatccaggcagatacgctgctcgacgaaagcgaaaagaagaagccccagcagaaggaggacgttctcaagagacttaaggctgaattaaacgacatcagacctaaggtggattcaacgcgagatcaagcagctaatttgatggctaataggggggaccactgccgaaagctggtggagccccaaatctctgagttgaaccatcggttcgcagctatatcccaccgaattaagacaggcaaggcaagtatcccattgaaagagctcgaacaatttaattccgatattcagaaactcctcgagcctctagaggccgaaatccagcagggcgtaaatttgaaagaagaagacttcaacaaggacatgaacgaggataacgaggggaccgtaaaggaactgctccagcggggagacaatctccagcaacggatcactgatgaaaggaaacgggaagaaattaaaataaagcaacagctgctccaaactaaacataacgccctgaaagacctgagatcccagaggcgcaagaaagcattagaaatctctcatcaatggtatcaatataagagacaagcagacgacttactgaagtgcttagatgatattgaaaaaaagcttgcttcactgcccgaaccacgcgacgagagaaagattaaagaaattgaccgcgaactgcagaagaagaaagaggagctgaatgcggtgcggcgacaggctgagggtctgagcgaagatggtgctgcaatggcagtggagccgactcaaattcagctgtccaaacgctggcgggagatcgagtccaaattcgcccagtttagaaggctcaactttgcgcagattcacactgttcgagaggaaacaatgatggtcatgactgaggatatgccgctggaaataagctatgtcccctctacctacctcactgagatcacacatgtgtcacaggccctgcttgaagtggagcagctgctaaatgcaccggatctgtgtgctaaagactttgaggatctgttcaagcaggaagagtctctgaaaaatattaaggattcgttgcagcagtcttccggcaggatcgatatcatccatagcaagaaaacagccgcactgcagtctgccactcccgttgaacgggtgaagctccaggaagccttgtcacagctcgattttcagtgggaaaaagtcaataagatgtataaggaccgtcaggggcgtttcgatcggtctgtggagaagtggcgacgttttcactacgatatcaaaatttttaaccagtggctcaccgaggctgaacagttcctgaggaagacccagattcccgaaaactgggagcatgccaagtataaatggtatctcatcgccttgaaagacggaatcggtcaaagacagacggttgtgagaactctgaatgccacaggtgaggaaattatccagcagagcagcaagacagatgctagcattctgcaggagaagcttgggagtctgaacttgcggtggcaggaggtgtgcaagcaactttccgaccggaagaaacgcttggaggaacagaaaaacattctctctgagtttcagcgggatctgaacgagtttgtgctgtggctcgaggaggccgacaatattgcgtccatccctcttgagcccggaaaagagcagcagttaaaagagaaactggagcaggtcaaactgctggtggaggagttgcccttgagacaaggcatcttgaagcagctgaacgagacaggcggtccggtgttagtgagcgccccaattagtccagaagaacaagacaaactcgaaaataaactcaagcagaccaacctacagtggattaaggtgtctcgagccctcccagagaaacagggggagattgaggctcagatcaaggatcttggccagctggaaaaaaaactggaggatctggaagaacagttgaaccatctcctactgtggctctccccaattaggaatcagctcgagatctataaccaacccaaccaggagggacccttcgacgtcaaggagaccgaaatagcggtgcaagctaaacaacccgatgtggaagagatcctgtcgaaagggcaacacctatacaaagagaagccagccacccagccagtgaagcggaaactcgaagacctgtcgtctgaatggaaagctgtcaaccgtctgttacaagaattgagagctaaacagcctgatttagctccagggttgactaccataggcgcatcgcccacgcaaactgtcacacttgtgacgcagcccgtggtgaccaaagaaaccgcgataagcaagctcgaaatgccttcctctctgatgctggaagtgccagctctcgctgactttaacagagcatggactgaactgaccgactggctgtctctcttggaccaggtgatcaaaagtcaacgcgtgatggtgggagaccttgaggacatcaatgaaatgatcatcaagcaaaaggccaccatgcaagacctcgaacagcggagaccccaattggaagagttgatcaccgcggctcagaacctgaagaacaaaacctctaatcaggaggcgcgaacaatcatcacagacaggattgagcgcattcagaaccagtgggacgaggtgcaagagcatcttcaaaatcggaggcagcagctcaatgaaatgcttaaagattccactcaatggctagaagcaaaagaggaagccgaacaggtgctcgggcaagcaagagccaaattagagtcttggaaagaaggtccttacactgtcgacgccatccagaagaaaattactgagactaagcagctcgcgaaggacctgaggcagtggcagaccaacgtcgacgtagccaacgacttggcattaaagctgctgcgggactactcagccgatgacacgagaaaagttcacatgatcacagagaacattaacgctagttggcgcagtatacataagagagtctccgaaagagaggcagctcttgaggaaacccaccgactgttgcagcagtttccccttgacctcgaaaagtttcttgcatggttgacagaagcggaaacgacggccaatgtgttgcaggacgctactaggaaagagcggttgttggaggatagcaagggtgtaaaggagttgatgaagcagtggcaggacctgcagggggagattgaagcccatacagacgtttatcacaaccttgatgaaaactcgcagaagattctgcgatcactcgaaggatccgatgatgcggtgttgctccagagacgactggacaacatgaatttcaagtggagcgagctgcgcaaaaagtccctgaatatcagaagccatctggaggcgtcatctgatcagtggaaacggctgcatttgtcattgcaggagctgctcgtctggctccagttgaaagatgatgaactgagccgacaagccccaatcgggggagatttccccgctgtccagaagcaaaatgacgttcaccgcgcttttaagcgcgagctgaaaaccaaagagccagtcattatgtcaacactggaaaccgtgagaattttcctgactgaacagccactcgagggactagaaaaactttaccaggaaccacgggaactgccacctgaggagagggctcagaacgtaacacggctgctcagaaagcaggcggaggaggtgaacactgagtgggagaaactgaatttgcattctgcagactggcagagaaagattgacgagaccttggaaagactgcgcgaactgcaggaagctaccgacgaactggacctgaaactgagacaggcagaggttataaagggatcctggcagcccgtcggcgatctgcttattgactcgttgcaggatcacctcgaaaaagtgaaagccctcagaggagaaattgctccactgaaagaaaacgtgagtcacgtcaatgatttggcacgccagctgaccaccctggggatccagttgagcccctataacctttccactctggaagacctcaataccaggtggaagttgctccaggtggcagtcgaagacagggtccgccaactccacgaggcacatagggattttggcccagcctctcagcactttctctccacttccgttcagggaccgtgggagagagccatctcacctaacaaggttccctattatattaaccatgagacacagactacctgttgggaccatccgaagatgactgagttatatcagagcctggctgatcttaacaatgtgcggttcagcgcatatcgcactgccatgaaactccgcaggctgcagaaggcactgtgcctggatctgctctccctgtccgccgcatgcgacgccctcgaccagcacaacctaaagcagaacgatcagcccatggatatcctgcagatcatcaactgtcttaccaccatctacgaccgcttggaacaggagcataacaacctggtcaatgtgcccctctgcgtggacatgtgtttgaactggctgctgaatgtctatgataccggccgtaccggacggatcagggttctttcctttaaaactggaattatctcactttgcaaagcacacctcgaagataaatatcgatacctttttaaacaggttgcttcaagcaccgggttctgcgaccagcggaggctggggctgcttctgcatgatagcatccagatcccccgacagcttggcgaggttgctagcttcggcggtagcaatatcgaaccgtctgtaagatcttgcttccaatttgcgaacaacaaacctgaaatcgaggccgctcttttcctcgactggatgcggttagagccacagagtatggtgtggctccccgtgctgcatcgcgtggctgctgccgagacagccaagcatcaggccaaatgtaacatctgtaaggagtgtcccattattggcttcagataccggtccttgaagcatttcaactatgacatatgccagagttgtttcttcagtggcagggtggcaaagggccacaagatgcattatcccatggtggagtactgcacaccgaccaccagcggtgaagacgtgcgggatttcgctaaggtgctgaaaaataagtttaggacaaaacgctacttcgctaagcatcctagaatggggtatctgccagtccagaccgtattggagggagataacatggagacacctgtcaccctgataaacttttggccagtcgacagcgctcccgcatcttctccgcaactgtcacacgatgacacacactctagaattgagcattacgcatctcgccttgctgaaatggaaaatagcaatggcagctaccttaatgattcaatcagtcctaatgaatcgatcgacgatgagcacctgctaatccaacactactgccaatcactgaaccaggacagccctttaagccagcccaggtcccccgctcagatactaataagcttggaaagcgaggagcggggtgagttggaacgcatcttggccgaccttgaagaagaaaaccgaaatctgcaggctgagtatgatcggctaaaacaacagcacgagcacaagggcctttcccccctcccttctccgccagagatgatgcctacctcaccacaatcccctcgcgatgctgagcttatagctgaagccaagcttctccggcagcacaagggccgactggaggcccgaatgcaaattctggaggaccataataagcaactcgaatcccagctccataggcttagacagctgcttgagcagccccaggccgaggccaaagtcaatggcactactgtgagtagcccaagcactagcctgcagagaagcgatagctcccagcccatgctgctcagagttgtgggcagccagactagtgactccatgggggaggaggacctgttaagtcccccacaggatacttccaccggactggaagaagtcatggagcagttgaataactcctttccgtccagccggggacgcaacactcctggcaaaccgatgagagaggacacaatgtag

SEQ ID NO: 221593 - DNA, 3348 bp, synthetic construct
  misc_feature 1..3348: note = Description of Artificial Sequence: Synthetic coding sequence
  source 1..3348: mol_type = other DNA
atgccaagcagtttgatgcttgaagtgccagcactggcggacttcaatcgagcctggacggaattaacagattggcttagccttctcgaccaggtgatcaagtcacagagagtgatggtcggcgatttagaagatattaatgagatgataatcaaacaaaaagccaccatgcaggatctggaacagcgacgaccacagttggaggaactcataaccgcagctcagaatctcaagaacaagacgagcaaccaggaggcccgtacaatcattactgaccggatcgaacgcatccagaaccaatgggatgaagtccaggagcatctgcagaatagacgccaacagcttaatgaaatgctgaaagattctacccagtggcttgaagcgaaggaagaagccgagcaggttttggggcaggccagggcgaagctcgagtcctggaaagaaggcccatacaccgttgatgcaatccagaagaaaattaccgaaacaaaacagctcgctaaggacctcagacagtggcaaactaatgtcgatgtggccaacgatctggcccttaagttgctgagagactacagcgccgatgatacaagaaaggtccatatgattaccgagaacattaacgcctcatggcggagtatccacaaaagggtgtctgaaagagaagcagcgctagaggagacacaccgcctgctccagcaattccctctggatctggaaaaatttttggcgtggcttactgaagccgaaaccaccgcaaatgtgctgcaggatgccacgaggaaagaacgcctgcttgaggattcgaagggtgttaaggagttgatgaaacagtggcaggacctacaaggtgagattgaggctcacacagatgtttaccacaacctggacgagaattcgcagaaaattctccggtcgctagaagggagcgatgacgccgtcctgcttcagagaagactggacaatatgaactttaaatggtcagagctgagaaaaaaatcgctcaatattagatcccatctggaagcttcctctgaccagtggaagcgtctgcatctgtcattacaggagctgctggtttggctacagttgaaggacgacgagcttagtaggcaggccccaattgggggagacttcccagcagtgcagaagcagaacgacgtacaccgggcttttaagagggagctgaagaccaaggaaccagtgattatgtctaccttagagacagtcagaatcttcctcacagaacagccacttgagggactcgagaagctataccaggagcctagagagctgccccctgaagagagagctcagaatgttacccgacttctgcgaaagcaggcggaggaggtgaacactgagtgggaaaagctgaacctccactccgccgactggcagcgaaaaattgacgaaacactggaacgtttacgtgagctgcaggaggctacagatgagctggacctgaagctgaggcaggcagaagtgataaagggtagctggcagccagtgggcgatcttctgattgactcactgcaggatcatcttgagaaagtgaaagcactacgcggtgagatcgccccactcaaagagaatgtatctcacgtgaacgacctggctcggcaactgacaacactcgggatacagctatctccctataatctgtctactctcgaagatcttaacacacgttggaagcttctgcaagttgctgtggaagatagagtcaggcagcttcacgaagctcacagggattttgggcctgcctctcagcactttctctcaacatcagtgcaggggccatgggagcgagccattagccctaacaaggtgccctactacataaaccacgaaacgcaaaccacgtgctgggaccacccgaagatgactgagctgtaccagtctctggccgacctgaacaatgtgcgcttctctgcctacagaactgccatgaagctgcggcgtctgcaaaaggccctttgtttagatctactgagtttgagcgctgcttgcgatgccctggatcagcataacctgaagcagaatgaccagcctatggacattctgcaaatcattaattgccttactaccatctatgaccggttagaacaggagcataataacctcgtgaatgtgcccctatgcgtcgacatgtgtcttaattggctgctgaacgtctacgataccggcagaactggcagaattagggtgttgagctttaagaccggcattatttctctatgcaaagctcatcttgaggataagtatcgatatctatttaaacaggtagcttcgtcgactggcttttgtgatcagcgtcgactcggcctcctgctccatgatagtatccagatcccaagacagctcggcgaagtcgcttcattcggcggatccaacatcgagccatctgtgaggtcctgcttccaattcgcgaataacaagcccgagattgaagccgcactctttttagactggatgcgcctggaaccccagtcaatggtatggctgccagtcctccacagggtcgcggctgcagaaacagctaagcaccaggccaaatgcaatatctgcaaagagtgtcccatcattgggtttagatatagaagcctgaaacattttaactacgacatctgccaatcctgcttttttagcggacgggttgcgaagggacataaaatgcattacccaatggtcgagtactgcaccccaaccacgtcaggtgaagatgtcagggactttgcgaaagttctgaagaacaaattccgtaccaaacggtattttgcgaaacacccgcgaatgggttacttgccagtccagactgtgcttgaaggggacaacatggagacgaacttgcaggccgaatatgatcggctgaagcagcagcacgaacacaaagggctgtcacctctcccttcaccacccgagatgatgccaactagcccccagtccccccgagatgcagaactcatcgcagaagccaagctgctgcgccagcataaaggcagactggaggcccgaatgcagattttggaagaccataacaagcaactggagagtcaactgcatagactgcgacagctgctggagcagccgcaagcggaagccaaagttaatggaaccaccgtcagttcgcctagtaccagtctgcagcgctctgacagtagccagcctatgctgctgagagtggttgggtcccagacgtctgacagtatgggagaagaagatcttctgagccctccccaggacacctctactggacttgaagaagtgatggaacagctgaacaactcgttcccatcctccaggggacgcaacactcctggaaaacccatgagagaagacacaatgtag

SEQ ID NO: 221594 - DNA, 11058 bp, synthetic construct
  misc_feature 1..11058: note = Description of Artificial Sequence: Synthetic coding sequence
  source 1..11058: mol_type = other DNA
atgctgtggtgggaagaggttgaagactgttacgagcgcgaggacgtgcaaaagaagacatttacaaagtgggtgaacgcgcagttctccaagtttggcaagcagcacatagaaaacctatttagcgaccttcaggatggccgtaggctcttagacctgctcgagggactgacaggccaaaagttgccgaaggagaaggggtctaccagggtccacgccctcaacaatgtcaacaaagccttacgagtcttgcagaataataacgtagatttagtcaatatcggttccacagatatcgtggacggaaatcataaattaaccttggggcttatctggaatatcatcctgcactggcaggtgaaaaatgttatgaaaaatataatggctgggctgcagcagacgaatagcgaaaaaatattgttgtcttgggtcaggcaaagcacacggaactacccccaggtgaatgtgattaactttaccaccagttggagtgacggccttgcactgaatgccttgattcactctcacagacctgatctctttgattggaacagtgtggtgtgccagcagtccgccacacagcgcctggaacacgccttcaacattgctaggtatcagttaggaattgagaagctgctggaccccgaggatgtagacacaacctatccagataaaaaatccatcctgatgtacatcactagcctctttcaggtgcttcctcagcaagtatctatagaggccatccaggaggttgaaatgctgcccaggccccctaaagtcactaaggaggaacattttcagctgcaccatcagatgcactattctcagcaaatcactgtctcactagcccagggttatgaacgtacatcatccccaaagcctcggttcaaatcctacgcttacacacaagcagcctacgtgactacgtctgatcctactaggtcaccattcccttctcaacacctcgaggccccagaagacaagtccttcggttcttctctcatggaaagtgaggttaatcttgaccgataccagaccgctcttgaggaagttctgtcctggctgctatcggccgaggacaccctccaggcacagggcgaaataagcaacgacgtggaggtcgtgaaggatcagttccacacacatgagggatacatgatggacctaaccgcccatcagggacgggtcggaaacatcttgcagctgggctctaaactgatcggtacgggaaaattgagcgaagacgaagagaccgaggtgcaggaacagatgaatttgttaaactctcggtgggaatgtctgcgggtcgcatctatggagaaacaaagtaacctgcaccgtgtattgatggatctccagaatcaaaaactgaaagaattgaatgattggcttacaaaaaccgaggagaggacaaggaagatggaagaggaaccactgggtcctgacttggaggacctgaaacgacaggtccagcagcacaaagtgctccaggaggaccttgaacaggaacaagttagagttaattccttgactcatatggtggtcgtggtggatgagtcgtctggcgatcatgctactgccgcattggaggagcaactgaaagtgctcggggaccggtgggctaatatctgtaggtggacggaagataggtgggtcctactccaggacatcttgctgaaatggcagcggctgaccgaggagcagtgtcttttttccgcatggttgtcggagaaggaagatgcggtgaataaaattcatactacaggatttaaggatcagaacgagatgctatcttccctccaaaagcttgctgtcctgaaggctgatctcgagaaaaaaaagcagagcatgggcaagctttactccctcaagcaggatcttctgtctactctcaagaataaatctgtcactcagaaaacagaagcgtggctggacaattttgcacggtgctgggataatcttgtgcagaagctggaaaaaagcacagcgcagatttcacaggccgttaccacgacccagccaagtcttactcagactacagtgatggagactgtgactacagtcacgacacgtgagcagattctggtcaaacacgcacaggaagaactgccccctcctcccccacagaagaagagacagatcaccgtggactctgaaattcgcaaaagactggatgtcgatatcaccgaattacactcctggataaccaggagtgaggccgtgctgcaaagccctgaattcgcgatttttcgtaaggaggggaacttttccgatctcaaagagaaagtgaacgcaatcgagcgggagaaggcagagaaattcagaaagctgcaagatgctagccgcagcgcacaggccctggtggagcagatggtcaacgaaggtgtgaacgccgattctatcaagcaggctagtgagcagctaaacagccggtggatcgaattctgtcagcttctctctgagagattgaactggctcgaatatcagaacaacatcattgcattctataaccaactgcagcagctcgagcagatgaccaccaccgctgagaactggctaaagatccagccaactactccttctgaaccaacagccatcaagtctcagctgaaaatttgtaaggatgaggtgaacaggctgtcagaccttcagccacagatagaaaggctgaaaattcagagcatagctctaaaagagaagggccagggtccgatgttcctcgacgccgatttcgtggccttcactaaccactttaaacaggtatttagcgatgtgcaggctagagagaaagaactacaaactatatttgacaccttgccgcctatgcgctaccaggaaacgatgagcgccatcaggacttgggtgcagcaaagtgaaaccaagctgtcaatcccacaactttcagtgacagactacgagatcatggaacagcgtctcggcgagcttcaggcccttcaatcttccctccaggaacagcagtccggactgtattatttgtcaaccaccgtgaaagagatgagcaagaaggccccttccgagatttcacggaaataccagagcgaattcgaagagatcgaaggaagatggaagaaactcagcagccagctcgtggaacactgccagaagcttgaggagcagatgaacaagcttcggaagattcagaaccatattcaaactctgaaaaaatggatggcagaagtcgatgtcttcctgaaggaagaatggccggctctgggagacagtgaaatcctgaagaaacagctgaagcagtgccgcctgctcgtgagcgatatacagaccatccagccctccctgaactctgtcaacgaaggcggtcaaaaaatcaaaaacgaggccgagccagagttcgcctccagactggagacagagctgaaggaactaaatacccagtgggatcatatgtgtcaacaggtgtacgctaggaaggaagccctaaagggtggcttagaaaagaccgtgagcctccagaaagacctgtcggaaatgcatgagtggatgacacaggcagaggaagagtatctggagcgcgacttcgaatacaagaccccagacgaactccagaaagccgtagaagagatgaagagggcaaaagaggaagctcagcagaaggaagctaaggtgaagttgctaaccgagagcgtgaattccgtgatcgcgcaggcgccaccagtggcgcaggaggccctcaagaaagagctggaaactctgacaacaaactatcaatggctgtgcactcggttaaacggcaaatgtaaaacattagaagaagtctgggcgtgttggcatgagctgctgtcgtacctggagaaggccaataaatggctgaatgaagtggaattcaaactcaagacaactgaaaacatacctggtggggctgaggaaatctctgaagtcctcgatagcctggaaaatctgatgagacatagcgaggacaatcctaaccagatacggatcctggctcaaacattgaccgatggaggcgtcatggatgaactaattaacgaggagctggaaacattcaactccaggtggagggagctgcacgaagaagctgtccgcaggcagaagctgctggagcaatcgatccaatctgcacaggagactgagaaaagtctgcatctgatccaggagagtcttacgtttatcgacaagcagttagcggcatacatagctgataaggtcgatgctgcacagatgccacaagaggcccagaaaatccagtcagatttgacatcccacgagatatctctggaagagatgaagaagcacaatcagggaaaagaagcagctcaaagagtactgagccagatagacgtagcccaaaagaagcttcaggatgtctccatgaagttccgcctgttccagaagcccgcaaactttgaacagcggctccaggaaagcaaaatgattctggatgaggtgaaaatgcatttgcctgctctagagacaaagtccgtggagcaggaagtggtgcaaagccagcttaatcattgtgtgaacctctacaaatctctcagtgaggtcaaatctgaagtcgaaatggtgatcaaaaccggtcgacagatcgtgcaaaaaaaacaaaccgagaatcctaaggaactggacgagcgggtgactgctctgaaactgcactataacgaattgggggcaaaagtaacagagcgcaaacagcagctggaaaaatgcttaaagctgagtcgtaaaatgcgcaaagagatgaatgtcttaaccgaatggctggccgctactgacatggagctgaccaagcgctctgccgtggagggaatgcccagcaacctggactctgaggtggcatgggggaaggctacgcagaaggagattgagaagcagaaggtgcacctcaaaagcattacagaagttggggaagctttaaaaactgtgttaggtaagaaagaaactctagtagaagacaagttgagtctcctcaactctaactggatagctgtgacaagtcgtgcagaggagtggcttaatttattgctggaataccagaagcacatggaaacttttgatcagaatgtggaccatatcaccaagtggattatccaagccgataccctgctggatgagagtgagaagaaaaagccccagcagaaagaggatgtcttgaaacggctcaaggcagagctcaacgatatccggccaaaggtggacagcaccagggaccaggccgcaaacctgatggccaaccggggtgatcactgccgaaagttggttgaaccacaaatatccgagctgaaccatcgcttcgctgccatcagccatagaatcaaaacagggaaggccagtatccctctcaaggaattagagcagtttaacagcgacatccaaaagcttctggaacctctggaagccgagattcagcagggggtgaatctcaaggaggaagatttcaataaggatatgaatgaagataatgagggcacggtgaaggaacttctgcaacgcggagacaaccttcagcagcggatcaccgacgaacgtaaacgggaggaaatcaagatcaagcagcaactgttacagaccaagcataacgcgctgaaagatctccgaagccaacgaaggaaaaaggccttggagatctcacatcagtggtatcagtacaaacgccaagctgatgatctactgaagtgcctagacgacatcgaaaagaagctggcctctttgccggagcctcgggatgaacggaagataaaggagatcgacagagaactgcagaaaaagaaagaagagctgaatgcggtgaggagacaggccgaaggcctctctgaagatggggctgcgatggccgtggaaccaactcaaatccagctatccaaacgttggcgggagatcgaaagcaagttcgctcagtttcggcgactcaatttcgcccagatccatacagtgcgcgaggagacaatgatggtcatgaccgaggacatgcctctagagatctcatacgtgccatcaacttacctgacagagataacacacgtgagccaggctttgctggaggttgagcagcttttaaacgcacctgatctgtgcgcgaaagactttgaggacctcttcaagcaggaggagtccctcaagaatatcaaagactctttgcaacagtcaagcggcaggatagatatcatccactcgaagaaaacagctgcccttcagagcgcgacaccagtggagcgagttaagctgcaggaggccttatcacaactggattttcaatgggagaaagttaataaaatgtacaaggaccggcagggccgattcgaccggtctgttgagaagtggagacgattccactatgatatcaagattttcaaccagtggctgaccgaggccgagcagtttctccgcaagacccaaatccccgagaattgggagcacgccaagtacaaatggtatctcatcgcactgaaagatggtatcgggcagcgacaaaccgtcgtccggactcttaacgcgaccggagaagagattattcaacagtcctctaaaacagacgccagtatacttcaggagaaattgggaagccttaatttgagatggcaggaagtatgcaagcagctgtccgatcggaagaaacggctggaggaacaaaagaacatcttgagtgagttccagcgcgaccttaatgagttcgtgctgtggctagaggaggcagataacatcgcttccatcccattggagccaggcaaagaacagcagcttaaagagaagctggaacaggttaaactgttggtggaggagctgccacttagacagggtatcttaaagcagctgaatgaaactgggggacctgtgcttgtgtccgcccctatctctccagaagaacaggataagttggaaaacaagctcaagcagactaacctccagtggattaaggtgtctagggccctccctgagaagcagggcgagatcgaggcacagatcaaggaccttggtcagctggaaaaaaagctggaagatctggaagagcagctcaatcacttactgttatggcttagccccattcggaaccagttggagatctataaccagccaaaccaggaagggcctttcgatgttaaggaaaccgagattgctgtgcaggcgaaacagcctgatgtggaggagatactgtctaagggccaacacttgtataaggagaagcctgcaacccagccagtcaagcgcaaactggaagatctgagtagcgagtggaaagcagtcaaccgactgcttcaggaacttcgggcaaaacagccggatctggccccaggcctcacaactattggagcaagcccgacacagaccgtgactttagtaacacaacctgtggtgactaaagaaaccgctatctccaagttggaaatgccttcgtctctgatgctcgaggtgccggctctggctgacttcaaccgcgcatggaccgagttaacggattggttatctctgctggaccaggtgattaaaagccagcgagttatggtaggtgacctggaagatatcaacgagatgattataaaacagaaagctacgatgcaggacctggagcagcggcgaccgcagctggaagagctcattaccgcggcacaaaatttgaaaaataagacttctaaccaagaagcgaggactataatcacagaccggattgagcgcattcaaaatcagtgggatgaagtacaagagcacctccaaaacaggaggcagcagctgaacgagatgctaaaggactccacccagtggctcgaggctaaggaagaggcagaacaggtcctggggcaggccagggcaaagctagagtcttggaaagaaggaccatataccgtggacgccattcaaaagaagatcactgaaaccaagcaattggcaaaggatctccggcagtggcagactaatgttgacgtggctaatgacctcgcactcaaactgttgcgagactactccgccgatgacacaaggaaagtacatatgataaccgagaacatcaatgcgtcatggcggagtattcacaagcgagtgtcagaacgcgaggccgcactggaggagacccaccgactcctgcaacagtttcccctcgacctggaaaaattccttgcctggctgacagaggccgaaactacggcgaatgtcctgcaagatgccaccagaaaggaacggctcctggaggatagcaaaggggttaaagaactgatgaagcaatggcaggacctgcagggagagatcgaagctcacacagacgtttaccataacctggatgagaactcccagaaaatcctacgctctctggagggctccgacgacgccgtgttgttgcagcggagactggacaacatgaactttaagtggagcgaacttagaaagaagagccttaatatacgaagccacttagaggcaagctccgatcagtggaaacgccttcacctctctctccaggagctgctggtgtggctccagctgaaggacgatgagctatcacgccaggccccaatcgggggagatttcccagcagtgcagaaacagaacgacgtgcaccgggcatttaaacgagaactgaaaacaaaagagcccgtcatcatgtctactctggaaacggtccggatcttcttgacagaacagccgcttgaaggtcttgaaaagctctatcaggagcctagagagttacccccagaggaacgcgcacagaacgtcacgaggctccttcgtaagcaggctgaggaagtgaacactgagtgggaaaaactaaacctacacagcgccgactggcagcgaaagatcgatgaaacattggagagactacgggaactccaggaagccacggacgagctggacctaaagttacgacaggcggaagtcatcaaaggcagttggcagccagtgggtgacctcctgatcgattctttgcaagaccatctggaaaaggtgaaagctctgagaggtgaaattgccccactgaaggaaaacgtgagccacgtgaatgacttagccaggcagctcacgaccctgggaatacagctgagtccgtataatctgagtacactggaggatctgaacacaaggtggaaactcttacaagtcgccgttgaggatagagtgagacagttgcatgaagcgcaccgagatttcggccctgcaagccagcactttctgtcgactagcgttcaaggcccttgggagagggccatctctcccaataaggtaccgtactacattaaccacgagacccagactacgtgttgggaccatccaaagatgaccgagctctaccagtctctcgctgatttaaataacgtgaggttctccgcatacaggacagccatgaagctgcggcgtctgcagaaagccctttgccttgaccttctgtctttatctgctgcatgcgatgccctcgaccagcacaatttgaagcaaaacgaccagcccatggatattttacaaatcataaactgcctgactaccatctatgatagactggagcaggagcacaacaacctcgttaatgtgcccctatgtgtcgatatgtgcctgaattggctgctgaatgtctatgacacaggaagaacggggcgtattcgggtgttgtccttcaaaaccggaattatatctctctgcaaggcgcacctggaggataagtatcgctacttattcaagcaggtagctagtagtaccggattttgtgaccagagacgtctaggcttgctcctccacgacagcatacaaatccccaggcaactgggggaggtcgcttccttcggcggaagcaatatagagccctcggtaaggtcctgtttccagtttgcgaataacaaaccagagattgaagctgcgctgttcctagattggatgcggctcgaacctcagagtatggtctggttgcctgttcttcacagagtggccgcagctgaaaccgcaaaacaccaggccaagtgtaacatttgcaaggaatgtcccatcatcggcttccggtatagaagcctgaagcattttaattacgacatttgccagtcctgctttttttccggccgtgtggccaagggccacaaaatgcattacccaatggtggagtactgtactccaaccacctctggagaagatgttcgagacttcgccaaagtgcttaagaataaatttaggacgaagcggtactttgccaagcatccccgtatgggctacctgcctgtacagaccgtgctagagggcgataacatggaaactcctgtgactctcataaatttctggccggtcgatagcgcccctgcctccagccctcaattgagccacgatgacacgcacagtaggatcgaacattacgcttctcgcctagccgagatggaaaactctaacgggtcctatctgaacgactccatatcacctaatgagtccattgatgacgaacacctcctgatacagcattactgtcagtctttgaatcaggattcacctctatcacagccgagatctcctgcccaaattcttatttccctggaatctgaagaaagaggagaattggagagaatcctggccgaccttgaagaggagaatcggaatctccaagccgaatatgatcggctgaagcagcagcacgagcacaaggggctgagtcccctgccctcaccacctgaaatgatgcccacctcgccacagtctccccgagatgctgaactgatagccgaagctaagctgctccggcagcacaagggccgtctggaggcacggatgcagatattggaagatcacaataaacaattggagtcacagctccaccgtttaaggcagctgttggagcagcctcaagccgaggccaaagtcaacggtactacggtgagttctccctctacctcactccagcgatcagactcttcccagccaatgttgctgagagtcgtggggagtcagactagtgatagcatgggtgaggaggacttattgagcccgccacaggacacgtccaccggcctcgaagaagtgatggagcagctgaataactctttcccttcgtctcgcggtaggaatactcccggaaagccaatgagggaggacactatgtaa

SEQ ID NO: 221595 - DNA, 2874 bp, synthetic construct
  misc_feature 1..2874: note = Description of Artificial Sequence: Synthetic coding sequence
  source 1..2874: mol_type = other DNA
atgcagccaatggttatgcaggggtgtccctacaccctcccgagatgtcacgactggcaggctgcggaccaattccaccattccagctcactgagatccacgtgtcctcatccacaggtacgtgctgctgtcacgtctccggcaccccctcaggacggggcaggagttccgtgtctctccctcaagctcttaaacgggtccgtgggagccagtggccctttggaacccccagccatgaacctgtgctggaacgagatcaaaaagaaatcccacaatctgagggctcgcctggaggcattcagcgatcactcgggaaagctgcagcttccacttcaggaaattatcgattggctctctcaaaaggacgaagagctttccgcgcaattgccgttgcagggcgatgtcgctctagtgcagcaggagaaggagacacatgccgcatttatggaagaggtgaaatccagagggccatacatttattccgtcttggagtcagcacaggcttttctgagtcagcatccatttgaagaacttgaggaacctcatagtgaatcaaaagatacctctcctaaacagaggatccagaatctttcgcggtttgtgtggaagcaggccaccgtggcatcagagctgtgggaaaagctgaccgcacggtgtgttgaccagcacaggcacatagaacggacactggagcagctactcgaaatccagggggcaatggaggagctgagcactaccctcagccaggcagagggggtgagggcaacgtgggaacctattggcgatctgttcatagacagtctgcccgagcacatacaggctatcaaactcttcaaagaggaattttcccccatgaaggacggcgtgaagctggtgaatgatctggcgcaccaattagcgattagcgacgtacatctcagcatggagaactcgcaggccctagaacagatcaacgttaggtggaagcagcttcaggcctcggtgtcagaacggctcaaacagctgcaggatgcccatcgcgatttcggacctgggagccagcacttcctttcgtctagcgtgcaggttccctgggaaagggcgatctcccccaacaaggtgccctactacatcaatcaccaagctcagacaacctgttgggaccatccgaaaatgacagagctttatcaaactttggccgatctaaataacatcaaatttagcgcttacaggactgctatgaaacttagaagagtgcagaaggctttaaggctggatctcgtgaccctgacaacagctctcgagatctttaacgagcacgacctgcaggcaagcgagcatgtgatggatgtagttgaagttattcactgcctaaccgccctttatgagaggttggaagaggaaagaggaatcctcgtcaacgtgcctctgtgcgttgacatgagccttaattggctgctcaacgtttttgactccggcagatctggcaaaatgcgcgcactttcctttaagacagggatagcctgcctctgcgggacagaggttaaggagaaattgcagtatctgttctcccaggtcgctaactccggctctcagtgcgaccaacgccacctcggcgttcttctacacgaggccattcaggtacctcgacaactcggtgaggtagccgcatttgggggttccaacgtggagccatccgtgcgatcctgctttagattctccacagggaaaccagttatagaggcatcacagtttctggaatgggttaatcttgagccccaatcaatggtttggctagccgtgttgcatcgcgttactattgccgaacaagtgaagcaccagacaaaatgttccatttgccgccagtgtcccattaaaggatttcgctaccggagcctaaagcagtttaatgtggacatctgtcaaacctgcttcctgacgggaagggcctcaaagggtaataagctacactaccccataatggagtattatacccctaccaccagttccgagaatatgcgcgacttcgcaaccactcttaaaaacaagttcagatcaaaacattacttctcaaaacatccacagcggggttaccttcccgtgcagtccgttctcgaagcggactactccgagacacccgcttcatctccaatgtggcctcacgccgacacccatagtaggatagagcatttcgccagcagactggccgaaatggaatcgcagaattgcagcttctttaatgattctctgtcccccgacgattccatcgatgaggatcagtatctactgagacattcttcacccatcaccgatcgggaacctgccttcggtcagcaggccccatgttccgtggccacggaatctaaaggcgagctccagaaaatcctggcacatcttgaagacgaaaaccgcatccttcaaggagaactgcgcaggttgaaatggcaacacgaggaggcagccgaagctcccagtctggccgatgggtctaccgaggccgctaccgaccaccgtaacgaggagctactggctgaggcccgaatcttacgtcaacacaagtctagactcgagacaaggatgcagatcctcgaggatcataacaagcagttagaatcacaactccagagactgcgagagctgttgctgcaacctccaacagagtcggacgggagcggtagcgccggttcaagcttggcaagtagcccacagcagtcagaaggttctcatcccagggagaagggtcaaactacgcccgatacggaggccgctgatgatgtcgggtctaagagccaagacgtgagcctctgcctggaggatatcatggagaaactgcgccacgcctttccttctgttaggagttccgacgtgacggcgaatacactgttggccagctag

SEQ ID NO: 221596 - DNA, 2874 bp, synthetic construct
  misc_feature 1..2874: note = Description of Artificial Sequence: Synthetic coding sequence
  source 1..2874: mol_type = other DNA
atgcagccaatggttatgcaggggtgcccctataccctgccgaggtgccatgactggcaggcagccgatcagttccatcactcatcctccttgaggagcacatgcccccacccccaggtgagggcggctgtgacctcacctgctccgcctcaggacggcgcaggagtaccgtgtctatcactaaaactacttaacgggtctgttggcgcatctgggcctcttgaaccacctgcaatgaacctgtgttggaatgaaattaagaaaaagagccacaacctaagagctcgcctcgaagctttcagcgatcatagcgggaagttacagctcccactgcaggagattattgattggttatcccagaaagatgaggaactgagtgcacagttgccactgcagggggatgtcgccctggtgcagcaggagaaagaaactcacgccgctttcatggaggaggtgaaatcaagaggaccttacatatattcagttttggagtccgcacaggcattcttgtcccagcaccctttcgaagagttagaagagcctcacagtgaatcaaaagatacttctcccaaacagcgcatccaaaacctatcgcgtttcgtctggaagcaggctaccgttgccagcgagctgtgggagaaactcaccgcacggtgtgtcgaccagcatagacatatcgaacgcacactagaacagctcctggagatccagggcgcaatggaagagctgtcgactacactgtcacaggctgagggagtgcgggctacctgggaacctatcggcgatctctttattgattccctccctgaacatatccaagctatcaagctgtttaaggaagagttcagtcccatgaaggacggggtgaagctcgtcaatgacctggctcatcagcttgctatctctgacgttcatctaagcatggaaaacagccaggcactggagcagataaatgtgcgctggaagcaactgcaagctagcgtatctgaacggctaaagcagctgcaggacgcccatagggacttcggccctggctcacaacatttcctgagctcaagcgtccaagtgccatgggaacgcgcaatcagcccaaataaagtaccgtattatatcaatcaccaggcacaaacaacctgttgggaccaccccaagatgacagagctctaccagaccctggctgacctgaacaacatcaagttctctgcttatcgaaccgccatgaagctaagaagggtccaaaaggctctgagattggacctggtaactctaacaactgcccttgagatcttcaacgagcacgacttgcaagctagtgaacacgtcatggacgttgtcgaggtgatccattgccttacagcactttacgagcgcctggaggaagagcggggtattttggtgaatgtcccactgtgcgtcgatatgtccctcaactggctcttgaatgtgttcgattccgggagatctggtaagatgagagccctgtcgttcaagactgggatcgcttgtctgtgcggcacggaggttaaggagaagctacaatatctgttcagtcaagtggccaactcgggcagtcagtgcgatcagcgacacctgggtgtgctgcttcatgaggccattcaggtccctcggcagttgggggaggtggccgcatttggcggtagtaacgtggaaccctctgtacggtcctgcttccgattctccacagggaagcctgtgatcgaggccagtcaatttctggagtgggttaaccttgaaccacaatctatggtctggctggcagtactgcatcgagtgaccatagccgagcaagttaagcaccagaccaaatgctctatttgtcggcagtgccccatcaaaggtttccggtataggagcctcaagcaattcaacgtcgacatttgccagacctgctttctgaccggcagagcatcaaagggtaataaattacattatccgattatggagtactacacacccaccacaagtagcgaaaacatgagagatttcgcaaccacactcaaaaacaagttccgtagcaagcactatttcagcaagcacccacagcgcggatatctccccgtgcagagcgtcttagaggccgactacagcgagacacccgcttcctccccaatgtggccacacgccgatacccacagtagaatcgagcactttgctagccggctcgctgagatggaatcacagaactgttccttctttaatgatagcctttctccggacgacagcatcgacgaagatcagtatctgctccggcacagtagcccaatcacagatagggagccagcattcggacagcaggcaccttgcagcgtggctaccgagagcaagggagagttgcagaaaatcctggcccacctggaagacgaaaatcgcatactgcagggtgagctcagacgacttaagtggcagcacgaggaagccgctgaggcaccttcccttgcagacggctccaccgaggccgctaccgatcatcggaacgaggaattgttagccgaggccagaattctccgccagcacaagtcgcgcttagagacgcgaatgcagatactcgaggaccataacaaacagttagaatctcagctccagcggctgagggagcttctgcttcagcccccaacagagtctgacggctctggcagtgccggaagcagcctggcttccagcccgcagcagtctgagggttctcatcccagagaaaagggtcagacaacacctgacacggaagccgctgacgacgtcggctcgaagtcacaggacgtctctctctgcttggaggacatcatggagaaactacggcatgcttttccatccgtacgaagtagcgacgtgaccgctaataccttgctggcaagctag

SEQ ID NO: 221597 - DNA, 2874 bp, synthetic construct
  misc_feature 1..2874: note = Description of Artificial Sequence: Synthetic coding sequence
  source 1..2874: mol_type = other DNA
atgcagccaatggtcatgcagggatgtccctacacactgccccgttgccacgactggcaggcagccgatcagttccatcacagctcctcgcttcggtccacctgtccccatccccaggtgcgggcagcagtgacaagtcccgctccaccccaggacggcgctggcgtgccctgcctgtcactgaagctgctgaacggctctgtgggtgcgtctggacctttagagcctccagccatgaacttatgctggaacgaaatcaagaagaaatcgcacaacctaagagcaagactggaggctttctccgatcattcaggcaagttgcaactgccactgcaggaaatcatcgattggttaagccagaaagacgaagaactgagcgcacagttgccactccagggagacgtggccctggtgcagcaagaaaaagagacgcacgcagcatttatggaagaggtaaagagtagaggaccttacatatacagtgtgttagagagcgcacaggcattcttgagccagcatccctttgaggagctggaggaaccgcattctgagagtaaggatacatccccaaagcagaggatccagaacctatctagatttgtgtggaaacaggccaccgtggcctcagaactttgggagaagctcacagcccgatgtgttgaccaacatcgtcatattgaacgaaccctagagcaattgctggaaatacagggcgcaatggaagagcttagtaccactctctcccaagccgaaggggtccgtgcaacctgggaacccataggggacctctttatcgactcattgcctgagcatatccaagctattaagctgtttaaggaggaattcagcccaatgaaggacggcgttaaactggtcaacgatctcgctcatcagctggctatctccgacgttcatctatccatggaaaattctcaagccctcgaacagattaatgtgcggtggaaacagctccaagcgtcagtatctgagcggcttaaacagttgcaggatgcacaccgcgatttcggtccaggatcccagcatttcctctcctcaagcgtacaggtgccgtgggagagggcaattagccccaacaaggtaccttactatatcaaccatcaagctcaaacaacatgctgggatcatccaaaaatgaccgagctctatcagacattagccgacctgaacaacatcaaattctcggcataccgaacagccatgaagctgcgaagagtgcaaaaggccctccgtctggatctagtgacccttactaccgctcttgaaatattcaatgagcatgatttgcaggcaagcgaacacgtgatggacgtggtggaggtgattcactgcttgaccgccttatatgaaagacttgaagaggaaaggggcatcctggtgaatgtcccactgtgcgtagacatgtccctgaattggcttttgaatgttttcgactcaggacggtccggtaagatgcgggctctgtcctttaaaaccggaattgcctgtttatgcggcacagaggtaaaggagaaactccagtacctgtttagccaggtggccaacagcgggtctcagtgtgatcagagacacctgggtgtgttgttacacgaagccattcaggttcccagacaactgggcgaagtagccgctttcggcggtagtaacgtggaaccatctgtccggtcctgcttccgattctctaccggcaaaccagtaattgaggcctcccaattcctggagtgggtgaacctggagccacagtcgatggtttggcttgccgtgttgcaccgggtgacaatagccgaacaggtgaagcatcagacaaaatgtagtatctgtaggcagtgcccaattaagggtttccgttaccgtagcctcaaacagttcaatgttgacatctgtcagacttgctttctgacaggcagagcttccaaaggaaataaacttcactatccaatcatggagtactatacccccacaacttcttcagagaatatgagggattttgccacgaccctgaagaataagttcaggagcaaacattacttttccaagcacccacagcgtgggtatctgccagtgcagtctgtgctagaggccgactactcagaaacgcctgcttcatcacctatgtggccgcatgctgacacccactcccggatagagcattttgccagcagactagctgagatggagagtcagaattgtagtttctttaatgattcactgagccctgatgactccatcgacgaggaccagtacctgttaaggcactccagtcctattaccgacagagaacctgcttttggacagcaggcaccctgttctgtggctactgaatccaaaggcgagctacagaagattctggcacatctcgaggacgaaaataggattttacagggcgaactgagacggctgaaatggcagcacgaggaggccgcagaggccccttcattagcagacggctctaccgaggcggcaaccgatcaccgaaatgaggagctcttggccgaggccaggatccttagacaacataagagcaggctggagacccgtatgcagatacttgaggatcacaataagcagctggagtcccagttgcagcgcctgcgcgagctacttttgcaaccgcctaccgagtccgacggctctggttccgccggatcttctctggctagttccccacagcagagtgaaggttcacatccacgagaaaagggtcaaactactcccgatactgaagccgctgatgatgttggctcaaaatctcaagacgtttccctctgcctggaagacatcatggaaaaacttaggcacgcgttccccagtgtccgtagtagcgacgtgactgccaacaccctccttgcctcatag

SEQ ID NO: 221598 - DNA, 2640 bp, synthetic construct
  misc_feature 1..2640: note = Description of Artificial Sequence: Synthetic coding sequence
  source 1..2640: mol_type = other DNA
atgaatctgtgttggaatgaaatcaagaaaaagagtcataacctccgcgctaggctggaggccttttctgatcattccggaaaattgcagcttcccctacaagagattatcgactggctgtctcagaaggacgaagaactgagtgcgcagctacccctccagggagatgtggccctcgttcagcaggagaaagagacccatgccgcatttatggaagaggtgaaatcacggggtccctatatttattctgtactggagtccgcccaggcatttttgtcccaacaccccttcgaagaactggaagagccccatagtgaatctaaggataccagccctaagcagagaattcagaacctcagccgctttgtgtggaaacaggcgacagtagcatctgagctgtgggagaaactcacagcccgatgtgtggaccagcacaggcacattgagaggaccctggagcagctcctcgagatccagggagccatggaggagctctccactacgctaagccaagccgagggggtccgggcaacttgggaaccaatcggagacctattcattgacagcctacccgagcacattcaggctataaagctgttcaaggaagagttttcacctatgaaggatggcgtcaaactggtcaatgatttagcccaccagctggccatctcggatgtgcaccttagcatggagaattctcaggcccttgaacagattaacgtccggtggaagcagctccaggcatcagtcagtgagcggctcaagcaattgcaggacgctcacagggattttggacccggaagtcagcacttcctgagctccagcgtacaggtgccgtgggagagggccatatcaccaaacaaggtgccgtactacatcaaccatcaagctcagactacatgctgggatcatcccaaaatgacagagttgtaccagaccctggcggatctcaataatattaagttttccgcatacagaaccgctatgaaactgcggagagtgcaaaaggccctgcgccttgatctggtgactttgacgaccgctctggaaatcttcaatgaacacgatttacaggcgagcgagcatgtcatggacgtcgttgaagttatccactgtctgacggctctctatgaacggcttgaagaggaaagagggatcctggtgaacgtgccactgtgcgttgacatgagcctgaactggctgttgaacgtctttgattctggccgtagcggcaagatgcgggcactcagcttcaaaactggaatagcctgtctatgcgggacagaggtgaaggaaaagctgcagtacctcttttctcaggtggctaacagcggaagccagtgtgaccaaaggcacctcggggtactgctgcatgaagcaatccaggttcccaggcaattaggcgaagtggccgctttcgggggaagcaacgtggagccgtctgtacgtagctgcttccgtttctccactggcaagcctgtgattgaagcatctcagtttctggagtgggtgaatctagaaccgcagtccatggtatggttggctgtgctccatagggtgaccattgccgaacaagtgaaacaccagaccaaatgtagcatttgccggcaatgcccaattaaagggttccgatataggtctcttaagcagtttaatgtcgacatctgccagacctgttttctgaccgggagggcatccaaaggaaacaaactgcactacccaataatggaatactataccccaacgacaagtagtgagaatatgcgcgacttcgcaacaactcttaagaacaaattccgcagcaagcactatttcagcaagcacccccagagaggatatctgccggtgcaaagtgtgctcgaggccgactattccgagacacctgcgtcctctccaatgtggcctcacgccgatactcactccaggatcgagcattttgcatcaagactcgcggagatggagagccagaactgctctttcttcaatgactcccttagccccgacgattcaatcgatgaggatcaatatcttctgcggcacagtagtccaataacagaccgagagcctgccttcggtcagcaggcgccttgttcggttgccaccgagagtaagggggagctgcagaaaatactggcccacctcgaagatgaaaataggatcttgcagggggagctgcgtaggctgaaatggcaacacgaggaggctgctgaagcaccatctctggcagacggtagtaccgaggccgcaaccgaccatcgcaacgaggaactgttagccgaggccagaattctgaggcaacacaaatcgagattagagactaggatgcagatcctggaggatcacaacaaacagttggagtctcaactgcagcggctaagagagctattgctgcagccacccactgaatccgatggatcagggagcgccggatcgtcactcgcatcttctccacagcagtctgagggttcacaccccagagaaaaaggccaaactactcccgacactgaggccgcagacgacgttggctctaagtcccaggacgtaagcctctgtctggaggatattatggaaaagctgagacacgcttttccgtcagtgagatcctctgacgttacagccaacacattgctggcgagctag

SEQ ID NO: 221599 - DNA, 9128 bp, synthetic construct
  misc_feature 1..9128: note = Description of Artificial Sequence: Synthetic coding sequence
  source 1..9128: mol_type = other DNA
atgcaccatgggaccggtcctcaaaacgtgcagcatcaactccagcgatctagggcttgccctgggtctgaaggtgaggagcagcccgcacatccaaacccgcctcctagtccagccgcacccttcgccccatccgccagcccatctgctccccagagccccagctaccagatccagcagttaatgaacaggtctccagcgacagggcagaacgtcaacattacattacagagcgtggggccagtagtggggggtaaccagcagataacactggccccactgcccctcccttcccccacatccccgggtttccaattttctgctcaacctagacgattcgagcatggaagcccaagttacatacaggtcactagccccctgagccagcaggtgcagacacagtcgccaactcagcctagccctgggcctggccaagccctacagaacgtgcgggctggggcaccaggtcccggtctcgggctatgttcctccagccctacaggcggtttcgttgacgccagcgtgctagtgagacagattagcttaagcccgtccagtggagggcacttcgtgttccaggatggctccggtctaacacaaatcgcccagggggcacaggtacaactgcagcaccccggaacacctataactgtgcgcgaacgtcggccaagccagccccacactcagtctggaggcactatacatcacctggggccacagtcacctgccgcagcaggaggcgcagggctccaaccgctggcatccccatcccacatcaccactgctaacttaccccctcagatctctagcattattcagggccagctggtgcagcagcagcaggtgctgcagggccctccactgcctcggcctttagggttcgaaaggacacccggtgtgttgctgccaggcgctggtggagctgctggctttggaatgacaagcccaccgcctcctacttccccaagcaggaccgctgtacccccaggcttatcatccttgccattaacgagtgtagggaatacaggaatgaaaaaggtccccaaaaaactcgaagagatccccccagcttccccggaaatggcacagatgcggaaacaatgcctggattaccactatcaggagatgcaggctttaaaggaagttttcaaagagtacctcattgaattgttttttctacaacactttcaggggaacatgatggactttctggccttcaaaaaaaagcattatgcccctctccaagcttacctgagacaaaatgacctggacatcgaggaagaagaggaggaggaagaggaggaagaggagaagagtgaagtcatcaacgatgagcaacaggcactagctgggagccttgtcgccggtgccggatcaacagttgagactgatctgttcaagcggcagcaagccatgccatcaacgggcatggccgaacagagtaaacggcctcggctggaagtgggccaccagggggtggtatttcagcaccccggagcggacgcaggagtgcctttacaacagttgatgcctacggcccagggcggaatgccgcctacaccccaggccgctcagctcgctggccagcggcagtcccagcagcagtatgatccctctacaggcccacccgtgcaaaatgcagccagtctgcacaccccgttgccacagctgcccggaaggctcccccctgcaggagtgcccaccgcagctctgagctccgccctgcagtttgctcagcagccacaggttgtggaggcccaaactcaattgcagatccctgtgaaaacacagcaaccaaacgtgccaattcctgcaccgccttcatcccagctgcctatccctcccagccagcccgctcagctggcgctgcacgtccccaccccaggtaaggtccaagtccaagcttctcagttaagcagtttaccacagatggtcgcctccactagacttcctgtggacccagcacccccttgtcctaggcccttgcccactagctccactagtagtttggcaccagtctccgggtctggcccagggccttctccagccaggtctagtcccgttaaccggcctagctcagctactaacaaggccctttcacccgtcacttcccggacccctggcgtggtcgcctctgcccctactaaaccccagtcacccgcacagaatgccacctcctctcaggatagctcccaggacactctgactgaacagataactttggagaatcaggtgcatcaacggattgcagaactgcggaaagccggactttggagtcagcgtcggctgccaaagcttcaagaggcccctagacccaagtcacattgggactatctcctagaagagatgcagtggatggctaccgactttgctcaggaaagacgctggaaggtcgccgcagcaaagaaactagtcagaacagtggtccgacatcatgaggaaaaacagctcagggaggagagaggtaagaaggaggagcagagtcgcctgaggcgcatagccgcaagtactgcacgggagattgaatgcttctggtctaacatcgagcaagtggtagaaatcaagctgcgcgtggagctggaggaaaagaggaaaaaagccttgaacttgcagaaagtttctaggcgtgggaaggagcttcggcctaaaggcttcgacgctctccaggaaagttccctggactccgggatgtccggtagaaagagaaaagcgtcaatttccctcaccgatgatgaggtggatgacgaagaggagacaatagaagaggaggaggccaacgaaggtgtggtagatcaccaaactgagctgagtaacttagctaaagaggccgagctccccctgctggacctcatgaagctctatgagggtgcctttctgccttccagtcaatggcccaggccaaagcctgatggggaagacacgagcggtgaggaggatgctgatgattgtccaggagacagggagtcaaggaaagatttagtgctgatcgactccctgttcattatggaccagtttaaagccgctgagcggatgaatattgggaagcccaacgctaaggatattgcagacgtcaccgcagttgcagaagcgatcctgcccaagggcagcgctcgggtgacaacctcagttaaatttaacgctccatcactgctatacggcgcactgagagattaccagaaaattggtctggactggctggcaaagctctatagaaagaacctaaacggaatcctggcagatgaggctggtctgggaaaaacggtgcagattatcgcattcttcgcccacctcgcgtgcaatgaggggaattgggggccacacctggtggtggtcaggtcctgtaacatactcaagtgggagctggagttgaaaagatggtgtccgggtttaaagatcctctcatatatcggtagtcaccgtgagttgaaggcaaagagacaggaatgggccgaaccgaatagctttcatgtctgtatcactagctacacgcagttctttagaggcctaacagcgtttacaagggtgagatggaagtgtctggtcatagacgaaatgcagagagtgaagggaatgaccgaacgccactgggaggcagtcttcacccttcagtcacaacagaggctgctcctgatcgattctcctttacacaatacattcctggagctgtggactatggtgcatttcttggtgcctggtatctccagaccatacttgagcagcccattacgagcccctagcgaagagagccaagactactaccacaaggtggttattagactgcaccgcgtgacacagccatttattcttagaaggactaaaagggacgtggagaagcaactcaccaaaaagtatgaacatgttctcaaatgtcggctctctaacaggcagaaagcgctgtatgaagatgtcatcttgcaacctggtactcaagaggcgctgaagagtgggcatttcgtcaatgtgctgagtatcctcgttcgtctgcagaggatttgtaaccaccctggcctcgtggaacccagacatcctggaagttcgtatgtggctgggcctctggagtatcccagtgccagcctgatattgaaagccttggagagagatttctggaaggaggcggacctgagcatgttcgaccttataggcttagaaaataaaattaccagacatgaggccgagttgctgagcaagaaaaagatcccacgaaagcttatggaggaaataagcactagtgccgctccagctgcccgacctgctgcagccaagctcaaagcctcaagactcttccaacctgtacaatacggacagaaaccagaaggtcgaactgtcgcctttcccagtacacatccccctcggactgctgccccaaccactgcgtccgccgctccccagggcccattgcgaggcagaccacccattgccaccttttcagcaaaccccgaagctaaaggaggcgaagtcgtgaagatagctcagctggcctcaataaccggtcctcagtcccgagtggctcagccagagactccagttaccctgcaattccaaggctccaaattcacgctcagccactctcagctgcgtcaattgacagccggacagccactgcagctgcaggggagcgtgcttcagatcgtgtctgctccagggcagccttatctgagagcaccaggaccagtagtgatgcagactgtctctcaggcgggagccgtgcacggcgcattgggcagcaaacctccagccggaggacccagtcccgctcctctgacaccacaggtgggtgttcccggtcgcgtcgccgtcaatgcactggcggtcggtgaaccaggcaccgcgagcaaaccagcatcccccattggtggacccacacaggaggaaaagacacgactgctgaaagaacgactggatcagatataccttgtcaacgaaagacgttgctcccaggctccagtgtatggaagagatctgctgagaatatgcgctttacctagccacggaagggtgcagtggagaggttctctggatgggaggagaggcaaagaagcgggtccagcccattcctacacgagtagttcggaatccccctccgaattgatgcttaccctgtgtcgatgcggagagtctttgcaagatgtgattgatagggtggcctttgtgataccccctgtggtagccgctccaccttcactccgggtgccccgaccacccccactgtactcacaccgcatgagaatactgcgccaggggttgagggagcacgccgctccgtacttccaacagttgcgccagactaccgctccgagactcttgcagttccccgagctgcggctcgtgcagttcgactctggcaaattggaggcgctggctatcctcctacaaaagcttaagagcgagggacgtagggttctcatcctcagtcagatgatcctaatgctcgatatcctggagatgtttcttaatttccactacttaacctacgtgcgcatagacgagaacgctagttcggaacagagacaggaactgatgaggagttttaaccgtgatcgcagaatcttctgtgctatcctgagtacgcactcccgaacaacagggatcaacctcgtcgaggccgatacagtcgttttttacgataatgacttgaatccagttatggacgcgaaggcgcaagagtggtgcgaccggatagggaggtgtaaggatattcatatctatcgcttagtcagcggaaattcaatcgaggaaaagctgctgaaaaatgggaccaaggatctgattcgggaagtggctgcacagggcaatgattactcaatggcttttctgacccagcgtactattcaggaactcttcgaggtttacagccccatggacgatgccggattccccgtgaaggcagaagagtttgtggtactgtctcaggagccgtcagttactgaaaccatcgctcctaaaatagccagaccgttcattgaagctctcaaatctatcgagtatctggaagaggatgcacagaaaagtgcccaggaaggagtgttgggacctcacactgacgctcttagctctgatagcgagaatatgccatgtgacgaggagcccagtcagttggaagagctggccgacttcatggaacagctgaccccaattgagaaatatgcactgaattatctggagcttttccatacaagtattgaacaagaaaaggaacggaatagtgaggacgcagtgatgaccgctgtacgcgcttgggagttctggaatttgaaaacattacaagaaagagaggctaggctgcggcttgagcaggaggaagccgagttactcacttatacccgagaggatgcatacagtatggaatacgtgtacgaagacgtcgacgggcagacagaagtcatgcccctgtggacacccccaaccccaccccaagacgacagcgacatttatctagattcagtaatgtgcctgatgtatgaggccaccccaattcctgaggccaagctgcccccagtctacgtgaggaaggagcggaagcggcacaaaactgacccgtccgcggcaggtcgcaagaagaaacaaagacacggagaagctgtggtgccacccagatccttattcgatagggctacgccagggcttctgaaaattcgtagggagggcaaggaacagaagaagaatattttgctgaaacagcaggtgccattcgccaaacccttgcctaccttcgctaagcccacggccgaaccaggtcaagataatccggaatggttgatctctgaagattgggctctcctgcaagccgtgaagcagcttctggagcttcccctcaacctgacgattgttagtcctgcccacacccccaactgggatctcgttagcgacgtggtcaattcatgcagccgtatttataggagcagtaaacagtgccgcaacaggtacgagaatgtgattattcctcgggaagagggtaagtccaaaaataacaggccccttcgaacctcacaaatttacgcccaagatgagaatgctactcacacacagctttacacaagtcacttcgatctgatgaagatgacagctggcaaacggagtccaccaatcaagcccctgctgggcatgaatccttttcagaagaacccaaagcacgctagcgtccttgcagaatccgggatcaattatgataagccattgcctccaattcaggtagcctctttgcgagcagagcgtatcgccaaagaaaagaaagctctggccgatcagcagaaggctcaacagcctgcagtcgcacagccccctccgcctcagccccagccacctccccctccccagcagcccccaccacctcttccacaaccacaggctgcgggttctcaaccaccggcaggaccccctgcggtccagccgcagccacagccccaacctcaaacacagccccaacccgttcaagcgcctgcgaaagctcaacctgctatcaccacgggtggttccgcagcagtcttggcgggaaccataaagacttccgtcactggcacctccatgccgactggggctgtgagcggcaatgtcatcgtgaatacaattgccggtgtgcccgctgcaacttttcagtccattaacaaacgactggcaagccccgtggcaccgggtgcccttactactccaggcggttccgcacctgcccaggtcgtacacacccagcccccaccccgtgccgtgggaagccccgctaccgccaccccggaccttgtttccatggccactactcagggcgtgcgcgcagtcacctctgtaaccgcaagtgctgttgtgacgaccaatctcacaccagtccagactccagctcgttcactcgtcccacaggtgtcacaggctacaggggtgcagcttcccggaaaaaccattactccagcacattttcagctcctgcgacagcaacagcagcagcagcagcagcagcagcagcagcaacagcagcagcagcagcagcagcagcagcagcagcagcagcagcagcaaaccactaccacaagccaagttcaagttccgcaaatacagggccaggcgcagagcccagctcagattaaggccgtcggcaagcttacaccagaacacttaattaaaatgcagaaacagaagctgcaaatgcctcctcaacctcctccccctcaggcccagagcgctcccccacagccaacagcccaggttcaggtgcagacttctcaaccccctcagcagcagagcccccagttaaccaccgtaaccgccccaaggcctggggctttgctgaccgggacaactgtcgcgaacctgcaggtcgctaggctgacacgtgtccctaccagtcaactgcaggcgcaagggcagatgcagacccaagctccacaacctgctcaggtcgctctggctaagccgcctgtggtttcggtcccagcagcggtggtctcctcacctggtgtaacgactctcccgatgaacgtggcgggtatatcagtagccatcgggcagccacaaaaggctgccggtcagaccgtggtcgctcagccagtgcacatgcaacagctgttaaagctcaaacagcaggccgtacagcagcagaaagccatccagcctcaggctgcccagggaccggctgccgtccaacagaagatcacagcacagcaaataacaacccccggagctcagcagaaagtggcgtatgctgctcagccagcgctgaaaactcaatttcttacgacgcccatttcccaggcccagaagcttgcaggggcacagcaagttcaaacacagattcaggtcgctaaactccctcaggtggtgcagcagcaaacccccgttgcctccatccagcaggtagcatccgcttcccagcaggcaagtccgcagactgtagctctcactcaggcaactgccgcaggccagcaggtccagatgatccccgcagtgacagccaccgctcaagttgtacagcagaaactgattcagcagcaggtggtaacaacggcaagtgcacctctacaaacacccggagctcccaatcctgctcaggtaccagcttcctccgattcgccttcccagcagcccaagttgcagatgagagtccctgcggtccgactgaagaccccgacaaagccgccttgtcagta

SEQ ID NO: 221600 - DNA, 9260 bp, synthetic construct
  misc_feature 1..9260: note = Description of Artificial Sequence: Synthetic coding sequence
  source 1..9260: mol_type = other DNA
atgcaccatggaacggggccacagaacgtccagcaccaactgcaacgcagtagagcctgtcctgggtccgaaggtgaggaacagccagcccaccctaatccgcctccttctcctgctgcacctttcgcaccatcagcttctccgagcgctccccaatcaccctcttatcagattcaacaacttatgaatcgatcccccgctactgggcagaacgtcaacattacgctacagtctgtgggccctgtggtcggaggcaatcagcagatcacgctagctcccctgccactgcctagccccacctcccctggttttcagttcagtgcgcagcctcgaaggttcgagcacggcagtccctcatacatccaggtcacatcaccactttcgcaacaggtccagacccaatctccaactcaaccatctccagggccaggacaggcgttgcagaatgtcagggcgggagcaccaggtcctggcctaggtctctgcagctccagccccaccggcggattcgtcgacgcgagcgtgttggttcgacagatcagcctttccccttccagtgggggacatttcgtgttccaggatggtagcggcctgacacagattgcgcaaggtgcgcaggtgcaactccagcatccgggaacaccgattacagtaagggagaggcggcctagtcaaccgcatacgcagagtggcggtaccattcaccacctagggcctcaatcacccgcagcagccggtggtgccggactgcagccacttgcatcaccttctcatattactacagccaatctgcctccccagatctcatcaattatccagggccagctggtacagcagcagcaggtactacaggggccacccctgccacgtcctcttggattcgagcgcacccccggtgtcctgctacctggggctggcggagcagccggttttggcatgacgagtcctcctccacctacatctcccagccggactgccgtgcctcccggactctcttccctccccctgactagcgtgggaaatacgggtatgaagaaggttcccaaaaagctggaagaaattccccctgcttcacctgagatggcccagatgcgcaagcagtgccttgactaccattaccaagagatgcaggccttaaaggaagtgtttaaagagtatttaatagagcttttctttcttcagcatttccagggtaatatgatggacttcctcgccttcaaaaaaaaacactacgctccactccaggcttatttacggcagaacgatctcgatattgaggaagaggaggaggaagaggaggaggaggaggaaaagtctgaggtgattaatgatgagcaggcccttgccggtagcctggtggctggcgctggcagcacagtggagacagatctgtttaaacggcagcaggcgatgccctctaccggaatggctggaggcatgcctccgactccccaggccgctcagctggctggacagcggcagtcgcaacagcagtacgacccgtccaccggcccacctgtgcagaacgccgcatcactccacaccccactgccacagctgcctgggagactgccccctgccggagtccccacggctgccctgagctctgccctgcaatttgcgcagcagccgcaggttgtggaagctcagactcagctgcagattcccgtcaagactcaacagccaaacgtccccatccctgctccacctagtagccagctacccatccctccaagtcaacctgcccagctggcactccatgtgcctactccaggcaaagtccaagtccaggcaagccagctgtcctctttgccgcaaatggtcgcttcaacccgcttgcctgttgatccagcgcctccctgccccaggcctttacccaccagttcaacaagttccttagcaccagtgagtggatcaggacccggaccgtcacccgcacgtagttcacccgtcaaccgcccttcttccgctactaataaggctcttagccccgtcacaagccgaacccccggtgtagtggcttctgccccaactaagccccagagcccagctcaaaacgccacatcttctcaggacagtagtcaggatacacttacggagcagatcactctggagaatcaagtccaccagcgtatcgctgagctgcgcaaagcaggtctttggtctcagagaagactgcccaaactgcaggaggctccgagacccaaatcccattgggattacctgttggaagagatgcagtggatggccacagactttgcccaggaacgcaggtggaaagtggcggcagcaaagaaactagtgcgcacagtcgttcgtcaccacgaggagaaacagctgagggaggaaagaggtaagaaagaagaacagtctagactgcgacggatcgccgcatcgactgccagggagatcgagtgcttctggagtaatatcgaacaggtggtggagatcaaactcagggtagagttagaggaaaaacgaaaaaaagccctaaacttgcaaaaggtaagtcggagaggaaaggagttgcggcctaaaggctttgacgctctccaggaatcttcattagactccggcatgtccggtcgaaagaggaaggcttcaattagtttgaccgacgacgaggtcgatgacgaggaggagactattgaggaggaggaagccaatgagggagtggtcgaccaccagacagagctgtccaatctcgctaaggaagcagaattgccgcttctggaccttatgaagctgtatgagggggcatttctgccttccagccagtggcctaggcctaaaccagacggcgaggacaccagtggcgaggaggatgccgacgactgccctggggatcgcgaatctcgcaaagatcttgtgctgattgactctttgtttattatggatcagttcaaagctgcggagcggatgaacattggcaagcctaacgccaaagatatcgccgatgtcacagcggtcgccgaagccatactgcccaaagggtccgccagagtcacaacctcagtgaaatttaacgctccctcacttttatatggggcactgcgagactaccagaaaattggactggattggttagccaagctgtaccgcaaaaatctcaacgggattctcgccgatgaggctggattgggcaaaactgtgcagattattgccttctttgctcacctcgcgtgcaatgagggcaactgggggccacacctggtggtcgtgcggtcttgtaatattcttaaatgggagctcgagctgaaacgatggtgcccagggctgaagattctgagttatattggttctcacagagagctcaaagcaaagaggcaagaatgggccgaaccgaacagcttccacgtatgcatcacgtcttacactcagttttttcggggtctcactgccttcaccagggtgcggtggaaatgtctcgtgattgacgaaatgcagagagtgaagggaatgaccgagcgccattgggaagccgttttcactttgcaatcccagcagcggttgctcctgatcgattctcctcttcataataccttcctggaactgtggacaatggttcacttccttgtcccgggaattagtcgcccttacttatcttcaccactgcgcgcaccctccgaggagagccaagattattatcacaaggtggtgattcggctccatagggtgacccagccgtttatcctgcgacggaccaaaagagacgttgagaagcagctgacgaagaagtacgagcatgtgctgaaatgcaggctgagtaaccggcagaaagcactctacgaggatgtcatactgcagccaggaacacaggaggcactgaagagcggacattttgttaatgtactaagcattctggtccggctgcagcgcatatgtaatcatcccggactggtcgagccacgccatccaggtagcagctacgttgccggaccattggaatatccctctgcaagcctcatcctaaaagccctcgaaagggatttctggaaggaggctgacctgagcatgtttgatttaattggactcgaaaataagattactcgccacgaggcagaacttcttagtaaaaagaaaattcctcgcaaactgatggaggaaatctcgacctctgcagcacccgcagcgagacccgctgccgctaagttgaaggcttcacgcctgttccagcccgttcagtacggacagaagccagaggggcgaaccgtggcatttccctccacgcaccctcccagaactgcagcccctactactgcctcggctgctccacaaggcccacttagaggccgtcccccaattgccaccttttctgcaaaccccgaggccaaggctgcagcggcacccttccagacatctcaggcgtctgcatcagcccctaggcaccagccagccagtgcctctagtacagccgcttctcccgctcatcccgctaagcttcgagcccagacgactgctcaggcaagcactcccggtcagccccctcctcagccccaggccccttcccatgcggcagggcagagtgcactcccccaacggctggtcctcccctcccaggctcaggccaggcttccctcaggagaggtcgtaaaaatcgcacagctggcgagcattactggtccccagagccgcgtcgcccaacccgaaaccccagttaccctgcagttccagggcagcaagttcaccctctctcacagccaactacgacagctgaccgccggacaacctctacagctgcagggctccgtactacagatcgtatctgctccagggcagccatacttacgcgctccaggtcctgtcgtgatgcagacagtgtctcaggcaggagctgttcacggtgcccttggcagtaaaccaccagctggagggccatcccctgccccactgactccccaagtaggagtgcctggcagggtcgcggtaaacgctctggccgttggagagcctggcacagcatccaagccggcttcccccataggcggacctacccaggaggaaaaaacacgcctcctgaaggagagactggaccaaatttacctcgtcaacgagcggcgatgcagccaggctccagtgtacggtcgtgatctgctgcggatctgcgctcttccctcccacggcagagtgcagtggcggggatcactcgatggccgacggggaaaagaggccggtcctgctcactcctatacctctagcagtgagagtccttctgaactgatgctaaccctctgcagatgcggtgagtccctgcaggatgtgatagatcgcgtcgccttcgtaattcccccagtcgtggcagcccctccatccctccgggtgcctaggccaccgcctctttatagtcaccgcatgcgcatccttcgtcaaggactccgggaacatgccgctccttacttccagcaactccggcaaaccaccgctcccagactgctgcagtttcccgaacttaggctggttcagtttgacagtggtaagcttgaggcacttgcaattctcttgcagaaactgaaatcagagggacgtagggtcctgatcctgtcgcaaatgatcctgatgcttgacattctcgagatgtttctgaattttcattatctcacttacgtaaggatagacgagaacgcatcctccgagcagaggcaagaattgatgcggtctttcaaccgagatcgccgtattttctgcgctatcctcagcactcatagtcggacaacgggcatcaacttggtggaggcagacactgtcgtgttttacgacaacgacctgaatcccgtcatggatgctaaggcgcaggagtggtgtgataggatcggacggtgtaaggatattcatatttaccgcttagtaagcggcaatagcatcgaagaaaaactgcttaagaatggaacaaaagacctcattcgcgaagtagcagcccaagggaatgactactctatggccttcctcacacaacggaccatacaagagctgtttgaagtttactcacccatggatgatgctggctttccggtcaaagcagaggaattcgtcgtcctgagtcaagaaccctctgttacggaaacaatcgcaccaaaaatcgctcgcccattcatagaggccctgaagagcattgaatatctggaagaggatgcgcagaaaagtgctcaggaaggggtattaggccctcacacagacgccctctcctctgattccgagaacatgccttgtgatgaggagccatcgcagctggaagagcttgccgactttatggagcagctgacacctatcgagaaatatgcattgaactacctggagttattccacacttccatcgaacaggaaaaggaacggaacagtgaggacgccgtaatgaccgctgtgagagcatgggaattctggaatctgaaaacgttacaggagagagaggcccgtttgcgactcgaacaagaagaagcggagctgctcacatacactagggaggacgcttattctatggagtacgtgtacgaggacgtggacggccagaccgaggtcatgcccttgtggacgccacccaccccccctcaagatgactccgatatatatctggactccgtcatgtgtctgatgtatgaggccacaccaatcccagaggccaaactgccccctgtctacgttagaaaggagagaaaaaggcataaaactgatcccagcgccgctgggaggaagaagaagcagcgccacggagaggccgtcgtgccccctaggtctctgtttgacagagcaactcctggtctactgaagattcggcgtgaaggtaaggaacaaaaaaaaaacattttactgaaacaacaagtgccctttgccaaacctctgccaacctttgctaagcctactgccgaacccggacaggataacccagaatggctgatcagtgaggactgggccttactgcaggcggtgaaacagcttctcgagctacccctcaacctcacaatagtgagtcccgctcacacccccaattgggatctggtgagcgatgtcgttaatagttgctctcgcatttatcggagctccaagcagtgccgcaaccgctacgagaatgtgatcatcccacgcgaggaagggaagtctaagaataatcggcctctgagaacctctcagatatacgctcaagacgaaaatgctactcacacccagctttacactagccatttcgacctgatgaagatgacagcaggaaagcgcagcccccctatcaaaccccttttaggaatgaatcctttccagaaaaatcccaagcacgccagcgtgttggcagaaagtggtattaactatgataagccgctgcctcctattcaggtagcatcactgcgagccgaaagaatcgccaaagagaaaaaagccctcgcggaccagcagaaggcccagcaaccagcggtggctcagccacctccacctcaaccccaacctccccctccaccacagcagcctccccctcctctacctcagccacaagcagccggttcccaaccacccgctggcccaccagctgtccagcctcaaccccagccccagccgcagacccagccgcagcccgtacaggccccagctaaagctcaacctgcaattactactggcggttccgcagcggtgctggctgggacgattaaaacctcagtcaccggaacttctatgccaacaggcgctgtgtctgggaacgtgatcgtgaatacaattgcgggagtacccgctgccacctttcaaagtattaacaaaagacttgcatctcctgtggctcctggtgctctgacaactcctggagggtcagcaccagctcaggtggtccatacccagcctcctcccagagccgtgggatcacctgcgacagctacccctgatttagtctcaatggctacaacacagggcgtacgggcagttacctctgttactgcaagcgctgtggtaaccaccaatctgacaccagtccagacccccgctcgctctctggtgcctcaggtcagtcaggcaacaggtgtgcagttacctggaaaaacgattacacccgctcacttccagctgctaagacagcagcaacagcagcagcagcagcagcagcaacagcagcagcagcaacagcagcaacagcagcagcagcagcagcagcagcaacagactacaaccaccagccaggtgcaggtgccccagatccaagggcaggctcagagcccagctcagataaaggccgttggcaaactcacacccgaacacctcataaaaatgcagaagcagaagctgcaaatgccccctcagcccccaccacctcaggcacagtctgccccacctcagccgacagcccaagtccaggtccagacgagccagccaccgcaacagcaaagcccgcagctgaccacggttacagccccaaggcccggagcacttctgaccggaactactgttgccaacctccaggttgcccgactaactcgggtcccgacgagtcaactgcaggcccagggacaaatgcagacgcaggctccgcagcccgctcaggtggcactcgcaaaaccccctgtggtttctgtaccagctgcagttgtaagttcccctggagtgacaactctaccgatgaacgtcgctggcatctcagtcgcgatcggacagccccaaaaggctgccggacagacggtggtggctcagccagtacacatgcaacaactgctcaaactgaagcagcaggcagtgcaacagcagaaagccatccagcctcaggccgcacaggggcctgccgctgtacagcagaaaatcaccgcccaacagattacgactcccggtgcccagcagaaggtagcctatgccgcacaaccagctctcaaaacccagtttctgacaacaccaatttcgcaggcacagaaactggccggtgcacagcaagttcagactcaaattcaggttgcaaaactgcctcaagtggttcaacagcaaacccctgttgcgtcaattcagcaggtggcttccgcctctcagcaggcttctcctcaaacagtggctctcacccaagctacagcggctgggcagcaggtccagatgatccccgctgtgactgcgaccgcccaggtggtgcagcagaaattgattcagcagcaggtcgttacaacggccagtgctcctttgcagaccccaggagcacccaatcctgcccaagtgcccgcttcctctgattccccaagccagcagcctaaactccaaatgcgggtccctgcggtccgcctgaagactcctacaaaacccccttgtcaata

SEQ ID NO: 221601 - DNA, 9479 bp, synthetic construct
  misc_feature 1..9479: note = Description of Artificial Sequence: Synthetic coding sequence
  source 1..9479: mol_type = other DNA
atgcaccacgggaccggtccacagaatgtgcagcatcaacttcagcgctcccgggcttgtccaggttcggaaggtgaagaacagccagcacaccccaaccctcctcctagcccagccgctcccttcgctccctccgcctccccttctgctcctcagtcaccttcataccagattcagcagctgatgaatcggtctccagcaacagggcagaatgtaaacattacactccagtcagtaggccctgttgtgggagggaatcagcagattactctggcaccattgccactgccctcacctacgtcacctggatttcaattctctgctcaaccacgtcggtttgagcatggctcaccatcatacattcaggtcacatcacccctgtcccagcaggtacaaacccagagtcctacccaaccctcacctggccctggtcaggccctgcagaatgtgcgcgctggagcgcctggcccagggctcggtctgtgctctagtagtcccaccgggggattcgttgacgccagtgttcttgttcgccagatctccctttctccctctagcggtggccacttcgtctttcaagacgggtccgggctgactcagattgcacagggagcccaggtgcagctgcagcatccaggcaccccaataacagttcgtgaacgtaggccatcccagccccatacccagagcggtggcacaattcaccatctggggcctcaaagccccgctgctgccggtggggctggcctccagcccctcgctagtccttcccatattaccaccgccaatctacccccacagatttcctctattattcagggacagttggttcagcagcagcaggttctgcagggtccacctctgccaagaccgttaggcttcgaacggacgcccggagtgctattgcccggagccggaggcgctgccggattcgggatgacaagccccccacctccaaccagcccctctaggaccgccgtacctcccggactgagctctttgccactgacatctgtagggaacactggaatgaagaaagtccctaagaaattggaggaaatacctcctgcctctccagagatggcacaaatgagaaaacaatgtcttgattatcactaccaggaaatgcaagccctgaaagaagtctttaaagagtacttaatcgagctgttctttttgcaacatttccagggaaatatgatggattttctcgcatttaagaagaaacattacgcgcctcttcaggcttacctacggcaaaacgacctggacatcgaggaggaggaagaggaggaggaagaagaggaagagaaatccgaagtaatcaatgatgaagtcaaggtcgtcactgggaaagatgggcagaccggcacaccggtagctatcgccactcagttgcctccgaaagtgtcagccgcatttagctctcagcagcagccatttcaacaggccctcgcagggagcctggttgccggtgcaggaagtacagtggagacagacctttttaaacggcagcaggcaatgccatcaacaggtatggcagaacagtctaaacggcctcgtcttgaagtgggccaccagggtgtggtgttccagcaccctggcgctgatgcaggcgtccccttgcagcaattaatgcccaccgcacagggcggaatgccccctacaccacaggctgctcagctggccggacagcggcagagccagcaacagtatgacccatctacgggccctcctgtgcagaacgccgcttctctgcatacaccactcccccagctccctggcaggcttcccccagccggtgtccctactgctgctctttcatcggcccttcagtttgcccagcagccccaagtcgttgaagctcagactcagttgcaaatacccgtgaaaacacagcagcccaacgttcctatacccgctcctccctcttctcaacttcccatacccccaagccagcccgctcaattggctttgcatgtccctacgccgggtaaggtccaggtacaagccagtcagttgagcagtctgcctcagatggtggcatcaacaagactgccggtagatcccgctccaccctgtcctcgcccattacccacgtcctctaccagttccctggccccagtctcagggtccgggccaggacccagtcccgcacgaagcagtcctgtgaaccggcctagcagcgctacaaacaaagccctgtctcccgttaccagtcgcacacctggagtagtagccagtgccccaactaaaccacagagccccgctcagaatgccacctccagtcaagacagctcccaggacacactcactgagcagatcactttagaaaaccaagtgcatcagagaatcgctgagctccggaaggctggattatggagtcagagacgtctgccaaagctccaagaagctcctaggcccaagagccactgggactatctgttagaggagatgcagtggatggcaacagatttcgcgcaagagcgccgatggaaggttgccgcagctaaaaagctggtcaggacagtggtgaggcaccacgaggagaaacaattacgtgaagaacgcggtaagaaagaagagcagagtcgcctaaggcgcattgctgctagcacagctcgcgaaatcgaatgtttctggtctaatatagagcaagttgtggaaataaaacttcgggtcgagttggaagaaaagaggaaaaaggctctcaatctacagaaggtgagtagaagagggaaggaattgcgtccaaaaggattcgatgccctgcaagaaagctcccttgactcagggatgagcgggagaaagcgaaaagcctcaatctctctcactgacgacgaagtggatgacgaggaggaaaccatcgaggaggaagaagcgaatgaaggagtagtagatcaccagaccgagctttcaaatttggccaaggaagccgaactgcccctgctggacctcatgaagctttatgagggggctttcctgccttcctcccagtggccaaggcccaaaccagacggtgaggataccagcggggaggaggacgcagacgattgtcctggcgaccgtgagtcacgaaaagatctggtgttaatagactcactctttataatggaccagttcaaagccgcagaacggatgaacataggtaagccaaatgctaaagatatcgctgacgtaaccgctgttgccgaggcgattctgccaaagggctctgctcgggtcaccacatctgttaagtttaatgcaccaagcctgttgtatggggcattacgggattaccagaaaatcggccttgattggctggctaaactgtataggaagaacctaaacgggatcctggctgatgaggctggacttggcaagactgtgcaaatcatagccttcttcgctcacctggcatgcaatgaggggaactggggacctcacctcgtcgtggttcgatcctgcaatatcctcaagtgggaactggagcttaaaagatggtgccctgggctgaagattttgagctatattggatcgcaccgtgagcttaaggcgaaacgccaggagtgggccgaacctaattcttttcacgtgtgcattacatcatatacccagttttttagaggcttgaccgcttttacgcgtgtgcgatggaagtgtcttgtcattgacgagatgcagcgggtcaaggggatgactgagagacactgggaagcagttttcaccttacagagccagcagcgcctattactgatcgattctcctctgcacaacactttcctagagctttggacaatggtgcactttctagtccctggaatttctcgaccctacctgagcagccctctgagggctccttcagaggaatctcaggactattaccataaggtggtgattagacttcacagagtcacacagccttttattctgcgaaggacaaaacgggacgtagagaagcagctgaccaagaaatacgagcacgtcttaaagtgtaggctttcaaatcgccagaaagccctgtatgaagacgtgatcctgcaacccggaacccaggaggctctgaaatccgggcactttgtaaatgttttgtctatattggtccgtttacagcgcatctgtaaccaccctggcctagtagagcctagacaccctgggtctagttacgtcgccggtcccctggagtacccgagtgcgagcctcatcctaaaggcactggaacgcgacttctggaaggaggctgatctgtctatgtttgacctaattggcttggagaacaaaatcacgaggcatgaggcggaactgcttagcaagaagaagattcctaggaagctaatggaggaaatctctacttccgccgcacccgctgctaggcccgcagccgctaagctgaaagcgtccagattgttccaacctgttcagtatggccagaagcctgaagggagaacggttgcattcccgtcaacccatccgccacggacagctgccccaacaacagcaagcgccgctccacagggccctctgcgtggcagaccgccaatagccactttcagtgccaatcctgaggccaaggccgcagccgctcctttccagacttctcaggccagcgcgtcggcgcctaggcatcagcctgctagcgcatctagcactgcagcctcaccggcacacccagcaaaactcagggctcagactaccgcgcaagcatctacgcctgggcagcccccaccccaaccacaggctcccagccacgccgctggccaatctgcgctgccccagcgactggttctgcctagccaggcccaggcgaggttgccttctggagaggtagtcaaaattgctcagctcgcgtctattaccgggccacaaagccgggtggcgcaacctgagacacctgtgaccctgcagtttcaaggcagtaagttcaccttgagccatagtcaattacgtcagctgactgctggccagcccctccagcttcagggttcagtcctgcagattgtgtccgctcccggtcaaccctaccttcgcgcacctggccctgtggtgatgcagaccgtttcccaggcaggtgcagttcacggtgctctaggttctaagcccccagcaggcggtccctcccccgcacccctgaccccccaggtcggcgtgccaggcagagtcgccgtgaacgctctcgccgttggggagccgggtaccgcatccaagccggcttcacccatcgggggacctacccaggaagagaaaactagacttctcaaagagcggcttgatcaaatctacctggtcaacgaacggcgttgtagccaggccccagtgtacgggagagatctactgcgtatatgtgcgttgccatctcacggcagggtgcagtggagaggcagccttgacggcaggagaggcaaagaagcgggacctgctcacagctatacctcgtcctccgaatccccatctgagctgatgttgactctgtgtcgatgcggagaaagtcttcaggatgtgatcgatcgcgtagccttcgtgataccacccgttgttgctgctccaccctcactgagggtccctaggcctccgcctctgtattcacacaggatgcggatactgcgacagggactccgagagcacgccgctccgtactttcagcagctgagacaaaccaccgcccctcggctgttgcaattcccggaactgcgcctggtgcagttcgatagcgggaaattagaagccctggccatacttcttcaaaagcttaagagcgaaggacgacgcgtgctgattctcagtcaaatgatcctgatgttggacattcttgagatgtttcttaatttccactatctcacgtatgtgcggattgacgaaaatgcttccagcgagcagcgtcaggaattgatgcgctcctttaatagagatagacggattttctgtgctattctgtcaactcacagtcgaacaactggaatcaacctggtggaggccgacaccgtggttttttatgacaatgaccttaatccggtgatggatgcaaaggctcaggagtggtgtgatagaatcggccgttgcaaagacatccacatttatcgattagtgtccggcaacagcatcgaagagaaattactgaagaatggaaccaaagacctcattcgggaggttgcagcacagggcaacgactactcaatggcatttcttacccagaggaccatccaggaactgtttgaggtgtatagcccaatggacgatgccggttttccagtaaaggccgaggaatttgtagttctctcccaagagccttcagtcacagagactatcgccccaaagatcgcaagacccttcatcgaggcgctgaagagtatcgaatacttggaggaagacgctcagaagtccgcccaggagggcgtgctggggcctcataccgatgcactgagtagcgactctgagaatatgccatgcgacgaggagccatctcagcttgaagaactggccgatttcatggagcagttgacaccaatcgagaaatatgccctgaactatctggaactgttccacacatccattgagcaggagaaagagcgaaacagcgaagacgctgtgatgactgctgtaagggcatgggagttttggaaccttaagaccttgcaagaaagggaggccagattacggttggagcaggaagaagctgagctgctgacgtatacacgcgaggacgcctattcgatggagtatgtgtacgaggacgtggatggccaaacagaagtgatgccgctgtggacaccgcctaccccccctcaagacgactcagatatttatcttgatagcgtaatgtgcttaatgtatgaagctacacccataccagaggccaaattgccacctgtgtacgttcgcaaagaacggaagcgacacaaaaccgacccgtccgcggctggccgaaagaaaaagcagcggcacggggaagccgtggtgcctcctaggtctctcttcgatagggccactccaggcctccttaagattcgtagggagggcaaggaacagaagaagaacattctcctgaagcagcaggtgccgttcgcaaagcccctgcccacctttgctaagcctacggccgagcccggacaagacaacccagagtggcttatctcagaggattgggcacttctgcaggctgtgaagcagttgctggaactgcctttaaatctgactatagtgtcgccagctcacacccctaattgggatctagttagcgatgtggtgaactcttgctcgaggatatataggtcttcaaaacagtgtcgtaataggtacgaaaatgtgatcatcccaagggaggaaggcaaaagcaagaataaccgtccactgcgcacctcccaaatatacgcacaggacgagaatgcaacccatacgcagctctacaccagccatttcgaccttatgaaaatgaccgccggaaaacgctctcccccaattaagcctctgctgggcatgaatccatttcagaaaaaccccaaacatgctagcgttttggcggaatccggcatcaactacgacaaacccctacccccaatccaggtggcctctctgagggctgagagaatcgctaaagagaagaaggcactggccgatcagcagaaagcccagcaacctgcagtggcgcagccacctcctccccagcctcagcctccgccacccccacagcagcccccacctcctctgcctcagccgcaggcggcagggtcccagccccctgcgggaccccctgctgtccaaccacaaccccagcctcagccacagacccaaccacagccagtacaggctcccgctaaggcacagcccgctatcactaccgggggttctgctgccgtgctcgccggaactattaaaactagcgtgacgggcacctctatgccaaccggcgcagtaagcggaaatgtgatcgttaacacaatcgctggggtacccgctgctacattccagagcatcaataagcggcttgcttcacccgtggcccctggcgcactgaccacccctggagggagcgcccctgctcaagtggttcacactcaacctcctcctcgtgcagttggaagccctgccacggccacacccgaccttgtgtccatggccactacacagggtgtgagggccgtcacgagtgtgactgcaagcgccgtcgtgactacaaatctgacaccagtacagacccctgccagatcgctggtgcctcaggttagtcaggctacaggagtgcaattgcctgggaaaacgatcactcccgctcattttcagttgcttcgacagcaacaacagcagcagcagcagcagcagcaacagcagcagcagcagcaacagcaacagcaacaacaacagcagcagcagcagcagacaacgacgaccagtcaggtgcaggtgcctcaaatccagggccaagctcagtcgccagctcagatcaaagctgtgggaaaacttactccggagcacctgataaagatgcaaaaacagaaactccaaatgccaccccagccacccccaccccaggcccagagcgccccacctcaacccacagctcaggtgcaggtgcaaacgtcccagcctcctcagcagcagagtccccaactgactacggtgacggccccaagaccaggcgctcttctgacaggtaccacagtggccaacctacaggtggctaggttgactcgagtccccaccagccagctacaagctcaggggcagatgcagacccaagcaccgcaaccagcccaggtcgctttagccaagcccccagtcgtgagcgtgcccgctgctgttgtctctagccccggagtcactactctgcctatgaacgtggccggaatctccgtagccatcggtcagcctcagaaagccgcaggacagacggtcgtagcgcagcctgtacatatgcagcagctgctgaagctgaaacagcaggcagtgcagcagcaaaaggccatacagcctcaggccgcacaggggcctgcggctgtccagcaaaagattaccgcacagcagattacaacccccggagcacaacaaaaagtcgcctatgctgcacagccagcgctgaaaacacagttcttgaccacccctatttcacaagctcagaaactcgcgggtgctcagcaggttcagactcagattcaggtggccaagctcccccaggtcgtccagcagcagacgccagtggcatccattcagcaggtggccagcgcctctcagcaggcgtctcctcagacggtcgctctgacccaggcgaccgcggctggtcagcaggtacaaatgattcctgccgtgaccgctacggcccaggtggtgcaacagaagttgattcagcagcaggtggttacaaccgcctccgcaccactgcagacacccggagcgcctaatcccgctcaggtgcctgccagtagcgatagtccctcccagcagccaaagcttcagatgagagtgcccgcagtgcggctcaagacccccaccaagccaccctgccaata

SEQ ID NO: 221602 - DNA, 9371 bp, synthetic construct
  misc_feature 1..9371: note = Description of Artificial Sequence: Synthetic coding sequence
  source 1..9371: mol_type = other DNA
atgcaccacggaactggcccacagaacgtgcagcaccagctgcagcgttctagagcttgtcccggaagtgaaggtgaggaacagccagcacatccaaatcctcccccttcgcccgctgctcccttcgctccctcagcaagcccctcggcaccacagagcccgtcttaccaaatccagcaactaatgaatcggagtcccgctaccggtcagaatgtgaacataacactgcagagcgtaggtccagtagtgggtggtaatcagcagatcactctggctccacttcccttgccatcccctacttcaccaggcttccagttctctgctcaacctagacgttttgagcacggcagccctagctacattcaggtaactagccctctctcccagcaggtgcagacacaaagtcccacacaaccatctccaggccctggtcaggcgctgcagaatgtgcgcgctggtgccccaggacctgggctgggtctgtgttctagctctcccactgggggattcgttgatgcatccgtgctcgtgagacagattagcctcagtccatcaagtggcggacatttcgtgttccaagacgggagtggattgacccagatagcccaaggtgcccaggtgcaactgcagcacccaggaactcccatcactgtgcgtgagagaaggcccagccagccacacactcagtccggcggtactatacatcacctgggaccacagtcgcccgctgctgcaggaggtgctggactgcaaccactcgcctccccctctcacattaccactgccaacttgccccctcagatctccagcattattcagggccaattggttcaacaacaacaagtgcttcaaggaccaccactccctcgccctctggggttcgagcgaacaccaggcgtgctgcttcctggggctgggggagccgctggtttcggcatgacctccccaccgccaccaacgtctccatcgaggaccgctgtacctcctggtctgtccagcctgcctttgacaagcgtgggaaacacaggtatgaaaaaggtgcccaagaagttggaagagatccctccggcttctcccgagatggcccagatgcggaagcaatgccttgattaccattaccaggagatgcaggccctcaaggaggtgttcaaggagtatctgatagagctgttcttcctacagcacttccaaggtaatatgatggattttttggcctttaagaaaaagcactatgccccattacaggcatacctgcggcagaatgacctggatatcgaggaggaggaggaggaggaggaagaggaggaagagaagtccgaagtcataaacgacgaacagcaagctctggctggttctctagttgccggagcaggctctaccgttgagaccgatttattcaaacgccaacaggctatgccttccactggcatggctgaacagtctaagcgccctaggctggaagtgggccaccagggagttgtcttccagcatccgggagcggacgcaggagtgccactccagcagctcatgccaactgctcagggcggaatgccaccgacaccccaagccgctcagttggccggtcagcggcagtctcaacaacaatatgatccttctactggcccaccagttcagaatgcagcaagcttacatacacctcttccacaactgcccggacgcctgcctccagcgggagtgcctacagcggcactcagcagcgctctgcagttcgcccagcagccacaagtcgtcgaagcccagacacaactacaaattccggtcaagacacagcagccaaacgtcccgattcccgctccaccctctagccagctcccaattcctccctctcagcctgcccagctggccctgcatgtccccacccctggcaaggtacaggtacaggccagccaactgtccagtctgccacagatggtcgcctcaacgcgcctgcccgtcgatcccgctcctccttgtcccagaccgctgcccacaagcagcacttcgtccctggcaccagtttcgggatcagggcctgggccttctccggcaaggagcagccccgttaacaggccatcctctgccaccaataaagctctgtcacccgtgacctctagaactcctggtgttgttgcttccgccccaactaaaccccagagtccagctcaaaatgctactagcagtcaggactcctcccaggatactctgacggaacagataactctggagaaccaggtgcaccagagaattgcagagttgaggaaggctggcctgtggtctcagagaaggctgcccaagctgcaggaagccccacggcctaagtcacactgggattatctcctggaggaaatgcagtggatggcgaccgacttcgcccaagaacggagatggaaggtggccgctgccaaaaagcttgtccggaccgttgtgcggcaccatgaggagaagcagctacgggaggagcgtggcaaaaaagaggagcaatctagactgcggcgtattgctgccagcacagcccgagaaattgagtgcttctggtccaacatcgagcaagtcgtggagattaaattgagagtggagttggaggagaagagaaaaaaggccctgaatcttcagaaggtgtcccggcgaggaaaggagttgcggccaaagggttttgatgctcttcaagagtcttctctcgatagcggaatgagtggtcggaagcgcaaagcttctatttcccttacagacgatgaagtcgacgacgaagaggaaaccatcgaagaggaggaagcaaacgaaggagtggtcgatcatcagactgaactcagcaaccttgcaaaagaggctgagctgccgctgctggacctcatgaagctctacgagggagctttccttccctcgtcccagtggcctcgtccgaagcctgacggcgaagacacatccggtgaagaagatgcagacgactgcccgggagatcgggagtcacggaaggacctcgtactgatagatagcctgttcattatggatcagttcaaggccgctgaaaggatgaacattggcaagcccaatgccaaagacatcgccgacgtcactgccgttgccgaagctattctgccaaaaggaagcgcgcgagtgaccacttccgtgaagttcaatgccccaagcctgctctacggggcactcagagattatcagaaaatcgggctggactggctcgccaagctctatcggaaaaacttgaatggcatactagcagacgaagctggcctgggaaagaccgtgcagattatagcatttttcgcccacttagcctgtaatgaaggtaactggggtccacacttggtggtcgtgcgctcttgcaacattctgaagtgggagttggagctgaagcgttggtgcccaggcttaaagattctgagctacattggctctcatcgcgaactcaaggcaaagaggcaggaatgggcagagccaaattcatttcacgtatgtattacctcctatactcagttcttccggggactcaccgcctttactcgggttaggtggaagtgtctggtcatcgacgagatgcaaagggtgaaaggcatgacggagcgacactgggaggccgtgttcaccctccagagtcaacagcggttgctgttgattgacagtcccctgcacaacacttttttagaactgtggacgatggtccacttcttggtgccgggtatctcccgaccctacttgagttccccactgagggcgcctagcgaagaaagtcaggattactatcacaaggtcgtgatcaggcttcacagggtcacacagccatttatcttacgaaggaccaagagggacgtggagaaacagctgaccaagaaatatgaacacgtcctgaaatgccgattgagcaatcggcaaaaagctttatatgaagacgtgatcttgcaacccggtacccaggaggcattgaagagtggccacttcgtcaatgttctgtccatcctagtgcgactccagagaatctgtaaccatcctggactagtggaacctagacatcctgggagctcatacgtggcaggtcccctggaatatcctagcgcttctctcatactgaaggccctggagagggatttttggaaagaggcagacctatccatgttcgacctgattggcctagagaacaagatcacgaggcacgaggctgaattactgtccaagaaaaaaattccacgaaaattgatggaggagatatcaacatcggccgcaccagctgcacgacccgcagccgcaaagcttaaagcgagccggttgttccaacccgttcagtacggccagaagcctgaaggaagaactgtagcctttccatcaacccatcccccacgtaccgccgcacccacgaccgcttctgcagcaccccagggacccctgaggggccgtccccctatcgccacatttagcgccaaccctgaagcaaaagccgctgcggcaccattccaaactagtcaggcaagtgccagcgcaccaagacaccagcctgcctctgcgtcaagcactgctgcgagtcccgctcatccagcaaagctccgggcacaaaccactgcacaggcctctactcctggtcagcctccccctcagccacaggcccctagtcatgctgcgggacagtctgctctgccacaaagattagtgcttcccagccaggctcaggcacggctgccaagcggagaggtggtgaaaattgctcagctcgcatccataaccgggcctcagtcacgggtcgcccaaccagaaacaccagtcacactacagttccagggtagtaagtttacgctttcacactctcaattgagacagctgaccgcgggacagcctctgcaactgcaggggtccgtgctgcaaattgtctcagctcctggacagccttatctgagggcacctggacccgtggttatgcaaacagtgagccaggccggagcggtccacggagctctaggcagcaagcccccagccggagggcctagtccagcccctctaaccccccaggtgggtgtgcctggaagggtagctgtcaacgcacttgccgtgggcgagcctggaaccgcttctaaaccagcatccccaatcggtggaccaacacaggaggaaaaaacccgccttttgaaagaaagactggaccagatctacttggttaatgaaaggcgctgttcacaggccccagtgtatgggagggatctgctccgtatctgcgctctcccgtcccacggccgtgtgcagtggagaggcagtctggatgggagacggggtaaggaagcagggccagcccactcctatacctcctccagcgagagcccaagcgagctgatgttgactctctgccgatgtggcgagagtctccaggatgtcatcgatcgcgttgccttcgtgattcccccagttgtcgccgcacctccaagcctaagggtcccgaggccgcctcctctgtattcacacaggatgagaattctaaggcagggcttacgcgaacatgcagcaccatacttccagcagttgagacagactaccgcgcctcggctcctacaatttccagaactgcgcttagtgcaattcgattcgggtaaactggaggccctcgccatactgttgcagaaacttaaaagcgaaggcaggcgggtcttaatcctaagtcagatgatcttaatgttggacatactcgaaatgtttcttaattttcattatcttacttatgtgagaattgacgagaacgcctcaagcgagcagcgtcaggagctgatgcgatcgtttaatagggatagaaggattttttgcgccatactgagcacacactcccgcactacaggtatcaacctcgtggaggccgacaccgtggtcttttacgacaacgaccttaaccccgtcatggacgcgaaagctcaggaatggtgcgaccgaattggtaggtgtaaagacatacacatctatcgccttgtgtctggtaatagcatcgaagaaaaactcctcaagaatgggactaaagatctgattagggaggtggccgcacaaggcaacgattattctatggcattcctgactcagcgcacaattcaggaactgtttgaggtgtattctcctatggacgatgccggtttcccagtgaaggccgaggaattcgtagtgctgtcccaggaaccgtcagtcaccgaaactatcgctcctaaaattgcgagaccgtttatcgaggcattgaagtccatagaatacctggaggaagatgctcaaaaatccgcccaagagggcgtattgggcccacacacagacgcgttatccagcgacagcgaaaatatgccctgcgacgaagaaccatctcagctggaagagctcgccgatttcatggaacaactgacaccaatagagaaatatgcactaaattacctagaactgttccacacttctattgagcaggagaaagagaggaatagtgaggacgccgtgatgactgcagtccgggcttgggaattttggaatttgaagacactgcaggaacgggaagccaggttgcggctggaacaggaggaggctgagcttttgacatatacccgggaggacgcatactccatggaatatgtctatgaggacgttgatggacagactgaggtcatgcctctctggacccctcctacacctccccaggacgactcggacatttacctggattcggtgatgtgtctgatgtacgaggccacaccaataccagaagctaagttgccacctgtctacgtgcgaaaggaacgtaaacgacataagactgatccctccgccgctgggcgtaaaaagaaacagaggcacggtgaagcagtcgtgcctccgaggtccctcttcgaccgcgctacgcccggactcctcaagatcagacgcgaaggaaaagaacagaaaaagaacatccttctcaaacaacaggtgcctttcgcaaagccactccctacctttgctaagcccactgctgagcctggtcaggataatcctgaatggctgatcagtgaagattgggctctactgcaggccgtaaagcagttgctggagcttccactgaacctcaccatcgtgagccctgcccacacgcctaactgggatctcgtctccgacgtagtgaactcatgcagccgaatatacaggtcctctaagcaatgtagaaataggtacgagaatgtcattatcccgagggaagaaggcaaaagtaaaaacaatagacccttgcggacaagccagatatatgcacaggacgaaaatgctacgcatacacagctctatacatcgcacttcgacttgatgaagatgaccgcagggaagcggtccccacccattaaacccctgctgggaatgaacccatttcagaagaatccaaagcacgcgtccgtgctggcagagtcaggcattaattatgataagcccctccctccaatccaggttgccagtttgagagccgaaagaatcgccaaggaaaagaaagccctcgctgaccaacagaaagcacaacaaccagcagtagcgcagccacctcctccacaaccgcagccgcctccaccaccccagcaacctcctccccctctgcctcagccccaggccgctggctcccagcctccggcagggcctcctgctgtgcagccccaaccacaaccccagcctcagactcagccccagcccgtgcaggcccctgccaaagctcaaccagctattactaccgggggaagtgcagccgtgctggccggaacaatcaagacgtccgtgactggaacttcaatgccgaccggggctgtgtcaggcaatgtcatagttaacaccatagctggagtgccggcagctacgtttcagtctatcaataaaagactggcttcacctgtcgccccaggggctcttacgacccccggtggatctgctcccgcacaagtcgttcacacgcagcctccgcctcgagcagtgggctcccccgcaacagctaccccagatctcgtatccatggccacgactcaaggcgttagagcggtcacatcggtcaccgcgtccgccgtcgtgactaccaatctgaccccggtgcaaactccagcgcgatccctcgtcccccaagtaagccaggccaccggtgtgcagctccccggaaagaccatcacaccagcccacttccagctcttgcgccagcagcagcaacaacagcaacagcagcagcagcagcagcaacagcaacagcagcagcagcaacagcagcagcaacaacagcagcagacgacaactacttctcaggtacaggtccctcaaattcagggtcaggcacaaagccccgcacagattaaagcagtgggtaaacttacccctgagcacctaatcaaaatgcaaaaacaaaaacttcagatgccaccccagcccccacccccacaagcacaatccgctcccccacagccaacagctcaggttcaggttcagacttctcaaccaccacagcagcaatctcctcagcttacaactgtgactgctccacgacctggggcactgctgaccggaaccaccgtggcgaatcttcaggtggcaagactcactcgtgtccctactagtcagctccaggcccagggccagatgcagactcaggcgcctcagccagcacaggtcgcgctcgcaaagccaccagtcgtatctgttccagctgctgtggtatcctctcccggagtgacaaccctgccaatgaacgttgctggtatatcagttgcaatcggacagcctcagaaagcagcaggccagacggtggtggcacagcctgttcacatgcagcagctgcttaaactgaaacaacaggcagtgcagcagcagaaggccatccagcctcaagccgctcagggcccagctgccgtccagcagaaaatcacggcgcaacagattactacccctggtgcgcagcagaaagtcgcctacgcagcccagccggcattaaagacccagtttctgaccacgcctatttcccaggcccagaagttggccggagcccagcaggtgcagactcagatccaggtcgcgaaacttccacaggtggtgcaacaacaaactcctgtcgcctctatccagcaggttgcatctgcttcgcagcaggcctccccgcagacagtggctttaacccaggccactgccgcaggccagcaggtccagatgattccagcagtaaccgcaacggctcaggttgtgcaacagaagctgattcagcagcaggtcgtgactactgcctcagcgccactgcagaccccaggtgctcctaaccccgcacaggttcccgcatcaagtgactccccttcccagcagccaaaacttcaaatgcgcgtgccagccgtacggctcaagaccccgacaaaacccccatgccagta

SEQ ID NO: 221603 - DNA, 9369 bp, synthetic construct
  misc_feature 1..9369: note = Description of Artificial Sequence: Synthetic coding sequence
  source 1..9369: mol_type = other DNA
atgcaccatggtactggtcctcagaatgtccagcaccaactgcagcgcagtcgcgcatgcccgggatctgaaggcgaggagcagcccgcacatcccaatcccccaccatcccctgcagccccattcgccccatcggcatccccttctgccccacagagcccatcttatcaaatacaacagctgatgaatcgcagcccagctaccgggcaaaacgtcaatataaccttacagtcggtgggccctgtggttggtgggaatcagcagatcacacttgctcctctccctttgccgtcccctacaagccccggattccagttcagcgcccaaccccgtcgctttgagcacggctcaccttcatatatacaagtgaccagccctttgagtcagcaggtgcaaacccagagcccgacacagccgagccctggaccaggccaggctctgcagaatgtgagggccggtgctcctggacccggattgggcctgtgttcgagttcaccaacaggaggcttcgtggacgcctctgtgctggtgaggcagattagtctcagtccttcttccggtggacattttgtgttccaggatggaagcggactcacacagatcgcacagggcgctcaggtgcagctgcaacatcctggtacacctataactgtcagagaacggcgaccatctcagcctcatacgcaaagtggcggtaccattcatcatttagggcctcagtcacccgctgcagccggtggggctggactgcagcctcttgcgagtccttctcacatcaccactgccaacctgcctccccagatttcgtctatcatccagggccagctcgtgcagcagcagcaggtcttgcagggacccccactccctcggcctctgggatttgagagaacacccggtgtactgttgcccggagcagggggtgccgcaggcttcggcatgactagtcctcctcctcccacctctcctagtcgcaccgccgttccccctggactgtccagcctgcctctgacgtctgtggggaacacaggcatgaaaaaagtccccaagaaacttgaggagatccccccagcctcccccgagatggctcagatgcgaaaacagtgcctggactaccattaccaggagatgcaagcattgaaagaggtgtttaaagagtacctgatcgagctttttttcctccagcacttccagggtaacatgatggattttcttgctttcaaaaagaagcattatgcgcctctccaagcatatttacgacagaatgacttagacatcgaagaggaggaggaggaggaagaagaggaagaagaaaagtcggaagttattaacgatgaacaagcgttagccggatctttggtggctggagccggtagtacagtggaaactgatctctttaaacgtcaacaggctatgccctccacaggcatggccgagcaatccaagcggcctaggcttgaagtcggacaccagggagtggtgtttcagcatccaggggctgatgctggtgtccctctgcagcagctgatgcctactgcacaaggaggcatgccccctactcctcaagcggctcagctggcaggtcaacggcagtcccagcaacaatatgacccgagtaccggcccacccgtacagaacgccgcaagcttacatacccctctgccacaattgccagggcgattaccacccgcaggcgtgcctaccgcggcactatccagcgcactacagtttgcccaacagccacaagtcgttgaagcacagactcagttgcagattccagtgaagacccagcagccgaatgttccaatcccagcacccccttcatcccaactgccaattcctcccagccagcccgctcaattggccctgcacgtgcccactcctggcaaagtacaggtgcaggcttctcagctgagttccctcccacagatggtggcttcaactcggttgccagttgatcccgcaccaccatgccctaggcccctgccaacttcttccaccagttctctagcccctgtgtctggtagtggccctggcccttcccccgcacgatccagccccgtgaacaggccttcaagtgctacaaataaggccctttcccccgttacctccagaactccgggagttgtcgcttctgcccctacaaagcctcagtcccctgctcagaacgcgacatcaagccaggacagctcgcaggacacactgaccgagcagatcacattagagaatcaagtgcaccagaggatagcagaactacggaaggcaggattatggtcgcagagacggctgccaaaactgcaagaagctcccagacccaagtctcactgggattacctcttagaagagatgcagtggatggcaaccgattttgcacaggagcggaggtggaaggtggccgctgctaaaaagctggttcgaacagttgtgaggcatcatgaggagaaacagctccgcgaagagagaggtaaaaaggaagagcagtctagattgaggcgtatagcagcgtctactgctcgagagatagagtgcttctggtctaatattgagcaggtggtagaaattaagctccgtgtggaacttgaagagaagcgcaagaaagctcttaatctccaaaaggtgtccaggcgtggcaaggagttacggccaaaggggttcgatgcgctgcaggagtctagcctagactccggcatgagcgggcgtaaacgaaaggccagcatcagccttacggacgatgaggtcgatgacgaagaagaaacaatagaggaggaagaagccaacgaaggcgtggtggatcatcagaccgagctaagcaatctcgcgaaggaagctgagctgcctctgttagacctcatgaaactatacgaaggcgcattcctgccatcatcccaatggccaagaccaaaacctgacggagaagataccagcggagaagaagatgccgatgattgccccggagaccgagaaagcaggaaggatctggtactgattgactccctgttcattatggaccagttcaaagccgcagaacgaatgaacattggaaagccaaacgcgaaggatatcgccgatgtgaccgccgtagcggaggctattctgccaaagggttcagcacgagtcaccacctctgttaaattcaatgcacccagtctcctgtacggggctcttcgggactatcagaagatcggacttgactggctggcgaaattatacaggaaaaaccttaatggtattttagcagatgaggccggacttggaaaaacagtgcagataatcgccttcttcgcccacctggcttgcaacgagggaaattggggtccacacctcgtagtagtgaggtcatgcaatattctgaagtgggagctggagctcaagcggtggtgtccaggcctgaaaatcctgtcctacattggctcacatagggaactcaaggctaaaaggcaggaatgggcggagccaaactcctttcacgtctgtatcacctcctatactcaatttttccggggactcactgcattcaccagagtgaggtggaaatgtttggttattgacgagatgcagagggtcaagggcatgacagagaggcattgggaagctgtctttactctgcagtctcagcagaggctgctcctgatcgacagcccattgcacaatacttttctggaactgtggacgatggtgcacttcttggtccccggtatctctaggccttacttatcctcccccctgagggcacctagcgaggagtcacaggactactatcacaaggtcgtgattcgcctgcatcgggttacccagccctttattctgcgcagaacaaaacgcgatgttgaaaaacaactgaccaagaagtacgaacacgtgctgaagtgtagactaagcaaccgccagaaagccctgtacgaggacgttattctacagcccggtactcaggaagccctaaagagtggacattttgtgaatgtgttatccatcttggtgaggctgcagcgaatatgtaatcatccaggactggttgagccaagacacccagggtcatcttatgtcgccggtccactagaataccctagcgctagcctgatcctgaaggcccttgagagggacttttggaaagaggccgatctgtccatgtttgatctgattggactggagaataagataactcgccatgaggccgagctgctgagcaaaaagaagattccaagaaaactgatggaggaaatctccacgtccgcagcccctgcggctcggcctgctgctgcaaagctgaaagctagtcggctgttccaaccagtgcagtacggccaaaaaccagagggtaggacagtggcctttccatctacccatccaccacgcaccgctgcccctactaccgcctcagctgcgcctcagggacccctcagggggagacctccaatcgctacttttagtgctaaccccgaggccaaagcagcagcggcaccttttcaaacgagccaggccagcgcaagcgctccacgccatcagcctgcatcagcaagcagcaccgccgctagtccggctcatcctgcaaaactcagagctcaaactacagcacaagcaagcacccccggacagccacctccccagccacaagccccttcacatgcggcaggacagtcagctttacctcaacggctggtcctgccttcccaggcccaggccaggttgccgagcggcgaggtggtgaaaatcgcccagctggcctcgattactggcccacagagcagagtggctcagcctgagactcccgtcaccctacagtttcagggatccaagttcaccctgagccattcacagttgcggcagctcacagccggtcagcctcttcagctacaaggctcggtgctgcagatcgtgtctgcccctggacagccttacctgcgggctccgggtcctgtggtgatgcagaccgtgagtcaggctggcgctgttcacggagccctgggaagcaagcctcccgctggcggaccatcaccagccccactgactccacaggtcggtgtgccaggtagagtcgccgtcaacgctctggcggtgggcgagccaggcaccgcctccaagcccgcatccccaatcggcggaccgacgcaggaagaaaagacccgacttctcaaggaacgtcttgaccagatttatctcgtcaatgaaaggcgctgcagccaggccccagtctatggtagagacttgctgagaatatgtgccctcccctcacacggtcgcgtgcagtggcgtggtagtctggacggcaggcgaggtaaggaagccggaccggcacactcgtatacctctagcagcgaatctccctccgagcttatgctgaccttatgccgctgcggagaatcattgcaagacgtcatcgatcgcgtagccttcgtgattcctcctgtggttgccgcacccccttccctccgagtgccaagacctcctcctctgtatagtcaccgcatgaggatacttcgccagggactgagggagcatgccgcaccctactttcagcagctgcgtcagacaacagcccctagactgctacagttcccggagttacgcctggttcagttcgattccggaaagctggaggcactggctatattgctgcagaagctgaaatcagaaggaagaagggtgctgatcttgtctcagatgatcctcatgctggacatcctcgaaatgtttctgaattttcattatctaacctacgtccgcattgatgaaaacgccagctctgaacagaggcaggagctaatgaggagttttaacagggatagacggatattttgtgccattctgagtacccacagccgcaccaccggcatcaatctggtggaggcagatacggtggtgttctacgataacgacttgaacccggtaatggacgccaaggcccaggagtggtgtgatcggatcggccgttgtaaagacatccacatctacaggttggtttcagggaattctatcgaagagaagctgctgaaaaacggaaccaaagacctgatcagggaagtggccgcacagggcaatgattatagtatggctttcctgacacagcgtactattcaggagctttttgaggtgtattcccctatggatgatgctggctttccagtcaaggccgaggagttcgttgtccttagccaggagcccagtgtgaccgagacaatcgcccctaagatagcccgacctttcatcgaggccctgaaatccatcgaatatcttgaggaggacgcccagaaatccgcgcaggagggagtcctggggcctcacaccgatgctctctcttcagattcagagaatatgccgtgtgacgaggagcccagccaacttgaagagcttgccgattttatggagcagctgactccgatcgagaagtatgcattaaattacctggagctcttccacactagcattgagcaagagaaggaaaggaatagcgaggacgctgtcatgacagctgtacgggcttgggaattctggaatcttaaaaccctacaggagagggaggccaggctgaggctggagcaggaagaggcagaacttctaacatacacccgggaggatgcttactccatggagtatgtttatgaagacgtggatgggcagacagaggtgatgcccctgtggacccctcccacccctccccaggacgacagcgacatttatttggacagcgtaatgtgtctgatgtacgaagccacaccaatcccggaagccaagctgcctcctgtttacgtgagaaaggaacgcaagcgtcataaaaccgacccttcagcagcaggtcggaaaaaaaagcaacggcatggagaagctgtggtccccccaagatccctgttcgatcgcgctacgccagggttgctgaagatccggcgagaaggcaaggagcagaagaagaatattctactcaaacagcaagtgccgttcgctaaaccgctgccaacttttgccaagccaacggcagagcctggtcaggacaatccggaatggttgatcagcgaggattgggcgcttctacaagccgttaagcagcttctggagctacctttaaacctcactatcgtgtcccctgcccacacccctaactgggacctcgtctccgacgtggtgaatagctgctctcgtatctatcgatcgtctaagcagtgccgtaacagatacgagaatgtaattattcccagggaagaggggaagtctaaaaataacaggcctctacgtaccagccagatttatgctcaggatgagaacgcgacgcatacccagctgtacacttctcacttcgacctgatgaagatgaccgccggaaagcgatccccgcctatcaagcctcttctcggcatgaatcctttccagaagaacccaaagcacgcttccgtgcttgccgagtccggtatcaattatgataagcccctccccccaatacaagttgcatcccttagagctgagcgcatcgctaaggaaaagaaggccttggccgatcagcagaaagcccagcagccagcggtggcccagcctcccccacctcaaccccagccgccaccacccccacagcaaccacctcctccgctaccccagcctcaagcagcaggcagccagcccccagctggccctccggctgttcaaccgcagcctcagccacagccgcaaacccagccccagccagtccaggcccctgccaaggcacagcccgctattaccactggagggtcggcagctgtactggcgggaaccatcaaaacctctgtgacagggacttctatgcctactggagcagttagcggcaacgtgatagtaaacactattgccggagtgcccgcagcaaccttccagtcaatcaataagcggctcgcatcacccgtggcccctggcgctctcacaactccaggtggctccgcccctgcacaggtggtgcacacgcagccacctcctagggcagtgggatcaccggctactgcaacccccgatttggttagcatggccaccacgcaaggcgtgagagcagtgacgtcagtgacagccagcgccgtcgtgactaccaacctaaccccagtgcaaacgcctgcacgctcactagtgccccaggtgtctcaagccacgggggtgcaattgcctggaaaaaccatcactcctgcccactttcaactcctgcgccagcagcaacagcagcaacaacagcagcagcagcagcagcagcagcaacagcaacagcagcaacagcagcagcagcagcaacagcagactacaacaacttcccaagttcaggtaccacagatccagggtcaggcacagtcccccgctcagatcaaggccgtcggcaagctgactccagagcacctaattaagatgcaaaagcagaagctgcagatgcccccacaaccccctcctccacaggctcagtccgccccacctcagccaacagcccaggtgcaggtacagacgagccagcccccacagcagcagagcccccaactgacgacagtgacggcccctcgtcccggagccctcttgactggcactactgtcgccaacttgcaagtcgccagactgacccgggtcccgacctcacaactgcaggcacaggggcagatgcagacgcaggcaccccagccggctcaggtggccctcgctaaacctccagtcgttagcgtccccgctgctgttgtctcaagcccaggggtcacaaccctgcctatgaacgttgctggcatctcagtcgctattggccagccacagaaagccgcaggccagacggttgtcgcccagccagtccacatgcagcagctattgaaactgaaacagcaagcagttcaacagcagaaggccatccagccccaggccgctcagggtccagcagccgtccagcagaaaattactgctcagcagatcactacaccaggagcacaacagaaagtggcgtacgccgcacaacccgcactgaagacacaattcctgaccacacctatctctcaggcacaaaagctggccggtgctcaacaggtgcaaacccaaattcaggtcgcaaagctcccccaggtcgtgcagcagcagacacccgtagccagcattcagcaggttgcttccgctagtcagcaagcctctccccagactgttgctctgacacaggccacagctgcaggccagcaagtacagatgattcccgctgtgacggccaccgctcaggtggtacagcagaaactaatccagcagcaggtggtgacaaccgcttcagcaccattacagacccccggtgccccaaacccagcccaggtccccgcttcctccgattctccgagccagcagccgaaactgcaaatgagagttcctgccgtgagactgaagacgcctacaaaacctccttgccaatac

SEQ ID NO: 221604 - DNA, 2475 bp, synthetic construct
  misc_feature 1..2475: note = Description of Artificial Sequence: Synthetic coding sequence
  source 1..2475: mol_type = other DNA
atgcaccatggtaccgggcctcagaacgtccaacaccaactccaacggtcccgggcttgtcccggttccgagggagaggagcagccagcacaccccaatcctcctccttctcccgctgctccttttgccccaagcgcaagtccatctgcgccacagagccctagctatcagatccagcaattaatgaaccggagccccgctactgggcagaacgtcaacattacgctccagtccgtgggaccagtggtgggcggaaaccagcagatcacccttgcccctctccctctcccttccccgacaagtccgggattccagtttagcgcacaacctcgtagattcgagcatggcagtcccagctacatccaagtgacctcccctctgtcacagcaggtccagacccagagcccgacccaaccaagtccaggacccggtcaggcactccagaatgttcgcgctggcgctcccggaccgggactcgggctgtgtagctcctctccaaccggtggttttgttgatgcctctgtcctggttcgccagatcagcctctccccatctagtgggggtcacttcgtgttccaggacggtagcggacttacacagattgcccaaggcgctcaggtgcagctacaacacccgggtacgccaatcacagtccgcgagagacgaccctctcagccccacacacaatctggcggtacaatccatcacttaggtcctcagagtcctgctgctgcagggggagctgggttgcagcccctggcctctccaagccacataactaccgctaacctccctccccagatctcttctatcatccagggccagctggtgcagcaacagcaggtcctgcaggggcctcccctcccccgaccactcggctttgagaggacacccggagttctgctccctggggctgggggtgcagcaggcttcggaatgactagcccccctccacccacctccccatctaggacagcagtgccaccaggtctctcctccctaccgctgacatctgtcggtaacacaggaatgaaaaaagtcccgaaaaagctggaagagataccgcctgccagccccgagatggcccagatgcgaaagcagtgccttgattaccactaccaagaaatgcaagcgctgaaagaggtgtttaaggagtatctgatcgaacttttctttctgcagcatttccagggaaatatgatggacttcctggcttttaagaagaaacattacgctcccttgcaggcctaccttaggcagaacgatttggatatcgaggaggaagaagaggaggaggaagaggaagaagagaaaagcgaggtaattaacgatgagcaggctctcgctggttctctggtcgccggtgccggtagtactgttgaaaccgacctgttcaagagacaacaggcaatgccctcgacggggatggccggagggatgccacctaccccccaggccgctcagctcgccggacaacgccagtcccagcaacaatacgatcccagtaccggccctccggtgcagaatgcagcctcccttcacacacccttgcctcagctgccagggagactgccaccagcaggagtaccgaccgccgcactcagctcagcactccagtttgcacaacaaccccaggttgtggaggcacagacccagctccagattcctgtaaagactcagcagcccaacgtccctatccccgcacctcctagcagtcagctgcccatccctccctcacaaccggctcagctggcccttcacgtcccaaccccaggtaaggtgcaagtgcaagccagccaactgtctagtctcccacagatggttgcaagcacccgtttgccagtggaccccgctcccccttgccccaggccactgccaacctcctccacgtcaagtctggcacctgtgtctggaagcgggcctggtccatcaccagccaggtccagcccagttaatcgccctagctcagcaaccaataaggcgctgagccccgtcacatccagaacccccggtgtagttgcaagtgcacccactaaacctcagagcccagctcagaatgcaacttcgtcccaagacagcagtcaagataccttaacggaacagataacactggagaaccaggtccaccagcgaatcgctgagttacgtaaggctgggctctggtcccagaggcgtctacctaagctgcaggaggcccctaggccgaagtctcattgggactacctgctggaggaaatgcagtggatggctactgacttcgcacaagaaagaaggtggaaggttgcggctgcgaaaaagctggtgcggactgtggtacgacatcatgaggagaagcagcttagggaagaacggggaaaaaaggaggagcaatctcgcttgcggaggatagccgcttcgaccgcccgagagatcgagtgtttctggagtaatattgagcaggttgtcgagatcaaactgcgagtggaactggaatag

SEQ ID NO: 221605 - DNA, 9371 bp, synthetic construct
  misc_feature 1..9371: note = Description of Artificial Sequence: Synthetic coding sequence
  source 1..9371: mol_type = other DNA
atgcaccatggtaccggacctcagaatgtgcagcaccagctacaaaggtctagagcatgtcccggatccgagggcgaagagcaacctgcacatcccaaccccccaccctcgcccgcagccccttttgccccttccgcttccccatcagcccctcagtccccgtcttatcagatacaacaactgatgaataggtcccctgcgaccggtcaaaacgtgaatattacattgcagagcgtcggtccagtagtcggtggtaatcaacagatcaccttggccccacttcccctgccaagtcctactagccccggattccagttttcggctcagccacgacggttcgagcacgggagtcccagctacattcaggtgaccagtcccctgtcacagcaggtccagacgcaaagtcccactcagcctagtccaggcccaggacaggctcttcagaatgtccgggctggagcgcctgggcctggcctggggctctgtagttctagtcccaccggaggcttcgtggacgcctcggtgctcgtgcgacagatctcactatctccatctagtggaggccactttgtgtttcaggatggtagcggccttacccagatcgctcagggggcacaggtgcagctacagcaccccggtaccccaatcactgtcagagagcgtcgccctagtcagcctcacacccaatctggagggactatacaccacctcgggcctcagagccccgcagccgctgggggagccggtctccaaccattggctagccccagccacatcaccacggctaatctgccacctcaaatttccagcattatccagggacaactcgtgcaacagcaacaagtgctccagggtcctcccctgccacgaccactgggatttgaaagaaccccaggggtgctgcttcctggagccggtggagcagccggatttggcatgacaagcccaccccctccaacatccccatcacggacagccgttccgcctggattatcctccctcccccttacaagcgtggggaatactggcatgaagaaggtcccaaagaaactggaggaaatacctccagcctccccagagatggcccagatgcgaaagcaatgcctggattaccattatcaagagatgcaggccctcaaggaagttttcaaggagtatctcatagagctgttttttctgcagcatttccagggcaacatgatggatttcttagcttttaaaaaaaagcactacgctccccttcaagcatacttgaggcagaacgacctggacatagaggaagaggaggaggaagaggaggaagaagaggagaagagcgaggtgatcaacgacgaacagcaagcactagcagggagcctggtcgccggagccggttcaacagttgaaaccgacttgttcaagagacaacaggctatgccctcgactggaatggccgagcagtcgaagagacccaggctcgaagtgggccaccagggcgtggtgttccagcaccctggcgctgatgctggagtgcctctgcagcaacttatgccaacggctcagggaggaatgcctcctaccccacaagctgcccaactagccggtcagcgccaatcccaacaacaatacgacccctccactgggcctcccgtccagaacgcagcctctcttcataccccactcccccagctgcccggtagactccctcccgctggagtcccaacagccgcactgtcctcggcactgcagttcgcccaacagcctcaggtcgtggaggctcagacgcagctccagatccctgtcaaaacccagcaaccaaatgtccccatcccagctcctccctcatcccaactgcccatccccccttcccagccagcccaactggctctccatgtgccaactcctggcaaggtgcaagtgcaagcctctcagctgtcctcattgcctcaaatggtggcttcaactcggctgcccgtagatcctgccccaccttgcccacgtcccctccctacgtcttcaacaagctcactcgcccctgtgtctggctctggccctgggccatccccggcacggagctcccctgtgaacaggcccagttctgctacaaataaagctttgtcacctgtgacctccagaacccccggtgttgtggcctccgcaccaaccaagccccagtctcctgcccagaatgcaactagttcccaggactcctcccaggacacactgactgaacagattactcttgaaaaccaggtccatcagcgcattgctgaattgcggaaggcgggtttatggagccagcgcaggctgccaaaattacaggaggctccgcgaccaaaatcacactgggactatctgctcgaagaaatgcaatggatggcaacggatttcgcccaggagcgccgttggaaagtggccgcagctaagaagctggtgagaactgtcgttcgtcatcacgaggaaaaacagctgcgtgaggagagaggtaagaaggaggaacagtcgaggctgaggcgaattgccgctagtacagcgagggagatcgagtgtttctggagtaatattgagcaggtcgtggagatcaagctgcgcgttgagcttgaggagaagcgcaagaaggctttaaatctccaaaaggtttcccggaggggcaaggagctccgccctaaagggttcgatgcgttacaggaaagctctctggattccggaatgagtggcaggaagagaaaagcttccatttccctgacagacgacgaggtggacgacgaggaggagactatagaggaagaagaggctaacgagggcgtggtggaccatcagacagagctaagtaatctggcaaaagaagccgagctgcctcttctggacttaatgaagttgtacgaaggggctttccttccttctagccagtggccccgtcctaaaccagacggggaagatacatccggggaggaggacgccgatgattgtcctggggatcgggaaagtaggaaggatttagtcttgatagactccctgttcatcatggaccagtttaaggctgctgagagaatgaacatcgggaaaccaaacgccaaagatatcgcggatgtcacagccgttgccgaagctatcctgccgaaaggctccgcacgcgttacaacttccgtgaaattcaacgcaccatctttactgtacggagcgctgagggattatcagaagattggtctggactggctggccaagctgtacaggaagaacctgaacggaattctggccgacgaggctggattggggaagaccgttcaaatcatagcgttttttgcgcatcttgcatgtaacgaggggaattgggggcctcacctggttgtagttagatcttgcaatatactgaaatgggaattggagctgaaaagatggtgtcccggtttgaaaattctgagttacattggctcccatagggagctgaaagccaaacggcaggagtgggcagagcccaattctttccacgtgtgcattacgtcctatactcaatttttccggggtttgaccgctttcacgagagtgcgctggaaatgccttgtgatcgacgaaatgcagagggtgaaaggaatgacagaaagacactgggaagccgtgtttacactgcagtctcagcagagactgctgctcatcgattccccccttcataataccttcctggaattatggaccatggtccacttcttagtccctggtatatcccggccatatctgtctagcccattaagggctccaagcgaagaaagccaggattactatcacaaggtcgtcattcgcttacatcgagtgacccaacccttcatcctcagacgcactaaaagagacgtggaaaaacaactgaccaaaaaatatgaacatgtcttaaaatgcaggctctcaaaccgacagaaagctctgtatgaagatgtgatcctgcagcctggaacccaggaggccttgaaatccgggcattttgtgaacgttctcagcatcctggttcgcttgcagagaatctgcaatcaccctggtctggtggagccaaggcatcctgggagctcatatgtggccggtccactagagtacccgtccgcgtccctaatattgaaggccctggaacgggacttttggaaagaggccgaccttagtatgtttgacctgataggattggaaaataagatcactcgacatgaggcagaactcctgtctaaaaagaagatacctcgaaaactgatggaggagatctcaacatcagcagccccagcggctcgccctgctgccgcaaaactcaaagcatcgcgtctgtttcaaccagtgcaatacgggcagaaacctgaggggcgaacagtcgcctttcccagcacccaccccccaaggactgcagccccaacaacagctagcgccgcacctcaggggccattacgagggagacccccaatcgcaacgtttagcgccaatcccgaggctaaggcggctgccgctccgttccagacaagtcaggccagtgcatcagcacccagacatcagccagccagtgcaagctccactgcggcatcccccgctcatccagcaaagctaagagcacaaacaacggctcaagctagtaccccagggcagcctcctccgcagccgcaagccccaagccacgcggcaggtcagtctgcccttccacaaagactggtgttacccagccaggcccaagccagactcccatccggcgaagttgttaaaatcgcgcagctcgcttctattactggccctcaatcaagagtggcacagcctgagactcccgttacgcttcaattccagggatccaagtttactttgagccacagccaacttcgtcagctgacagctggtcagccactgcaactgcagggatccgttcttcagatcgtctcagcccctgggcagccatacctgcgcgcaccgggacctgtggtaatgcaaaccgtgagtcaggctggagccgttcatggggcactgggtagtaagcctcccgcaggagggcctagccccgctcccctcaccccacaggtgggtgtccctggacgggtcgctgtgaacgccctcgcggtcggggagccagggacagccagtaagcctgccagcccaataggcggtccgacccaggaagagaagaccagattgctgaaagagaggctagatcagatctatttggtgaacgagcgacggtgttcccaggcgccagtatacggacgggatctcctccggatctgcgcgctgccaagccacggtcgggttcagtggagaggatccctggatgggagaagaggcaaggaagcagggcctgcgcattcctataccagctcgtccgagtcgcctagcgaactcatgctgactctttgtaggtgcggggaaagtctgcaagacgtgatcgaccgggtcgcatttgtcattccccctgttgtggccgcacccccttcgcttagggttccccgtcctccacctctgtatagtcatcgcatgagaattcttagacaggggctgcgcgagcacgccgcaccttatttccaacagctccggcaaacgaccgctcctcgcctcctgcagtttcctgagctacggctggtgcagttcgactctggaaagttggaagcactggctatactcctgcagaaactaaaaagcgagggtagacgagtcctaatcctgtctcagatgatcctcatgctggatatcttggagatgtttctgaacttccactatctgacctatgtcaggattgatgagaatgcttccagcgagcagaggcaggaactgatgcgatcctttaatagagaccgcaggatcttttgtgcgattttgagcacacactcacggacgactgggattaacctcgtggaagccgatactgttgtgttctatgataacgatctgaatccagttatggatgccaaagcccaggagtggtgcgatcggattgggagatgcaaggacatccacatatatcggttagtctctggtaattcaatcgaggaaaaactgttgaagaacgggacaaaggatttgatcagagaagtagcagcccagggcaatgactattccatggcatttctgacgcagcggacaatccaagaattgttcgaggtgtactccccaatggacgacgccggttttccagttaaagccgaagagtttgtggtcctgtcacaggaaccaagcgttaccgaaactatcgccccaaagattgccaggccctttatcgaagcgctgaagagcattgaatacctcgaggaggacgcccaaaaatctgctcaagagggagtgcttggtccccatactgatgcccttagcagtgattctgagaacatgccttgcgacgaggagccgtcacagctggaggagctggcggacttcatggaacaactgacaccgatcgaaaagtatgccctgaactacttggagctcttccacactagcattgaacaagagaaagagcggaactccgaggacgctgtaatgaccgcagttagggcttgggaattttggaaccttaaaacactgcaggagagagaagcacgcctgaggctggagcaagaggaggcggagctgttaacgtacacaagagaggacgcttactccatggagtatgtgtacgaagatgtcgatggccagacagaggtaatgcctctctggacccctcccacacctccccaggatgactccgacatttatctggattccgtaatgtgcctcatgtatgaggcaacaccgatcccagaagcaaaattgccaccggtgtatgtgagaaaggagcggaaaagacataaaacggacccctccgcagctggacgtaagaaaaaacagcgtcatggggaggcggtagtgcctcccaggtcgctttttgaccgtgctacgcccggtcttctgaaaattaggcgagaaggtaaggagcagaaaaagaatatcctcctcaaacagcaggtgcctttcgcgaagcctctccctaccttcgccaaacccaccgccgagcctggccaagacaaccccgagtggctcatttcagaggactgggcactactgcaggctgtaaaacagctgttagaactgccgttgaacttaactattgtatctccagcgcacactcccaactgggatcttgttagtgatgttgtgaattcttgtagcaggatctacagaagttccaagcagtgtcgcaatagatatgaaaacgttatcatccctagggaggagggaaagagtaagaataatcggccactgcgtaccagtcagatctacgcacaggacgaaaatgcaacccacacacaattgtatactagccattttgacctcatgaagatgacagcaggcaaacgtagtccccctattaaaccactgctgggtatgaaccccttccagaagaatcctaaacacgcaagcgtactcgctgaatcaggtatcaactacgataaacccttaccacctatacaagtggcaagcctccgagctgaacgcattgcaaaggagaagaaggcattagctgaccagcagaaggctcagcaaccagctgttgctcaacccccaccgccacaaccgcaacctccccctccgcctcagcagcccccacccccactgccacagccccaggctgcgggaagccagcctccagcaggccctcccgctgtccaacctcagccacaaccccagcctcagacccagcctcagcccgtccaagccccagccaaagcccaacccgctatcacaacgggtggttctgctgcagtactcgctggcaccatcaagaccagtgtcaccggtacctctatgcccacaggagccgtttccggcaatgtgatcgtaaacactattgccggtgtccccgcagccacctttcagagcatcaacaaacggctggcaagccctgtggcgcctggtgcacttaccacacctggcggttccgctccagcccaagtcgtgcatacgcagccccctcccagggcagttggttctcctgctacagctacacccgacttagtgtcgatggccacgactcagggggttcgggcagtcaccagcgtcacagcttctgccgtggtcaccaccaacctcaccccggttcagacccctgcgcgttctctcgtccctcaggtgagtcaagcgaccggggttcagcttcctgggaaaacaatcacacccgcacacttccaactactcagacaacagcagcaacagcagcagcagcagcagcagcagcaacagcagcagcagcaacagcagcaacagcaacagcagcagcagcagcagacaactacaacatctcaggtgcaggtgccacaaattcaaggtcaagcccagtcaccagctcagattaaggccgtgggaaaattgactcctgaacatctgattaagatgcagaagcagaaactacagatgcccccacaacctccgcctccgcaggcacagtccgctcctccacaaccaacagcccaggtgcaggtccaaactagtcagccacctcagcagcagtctccgcagctgacgacagtcacggcaccaaggccgggagctctcctgaccggcaccacagtggcgaatttgcaggtcgcaaggctgacacgagtgcccacttctcagcttcaagcccagggacaaatgcagactcaggcccctcagcccgctcaggtggctttagccaaacctcccgtggtcagcgtgccggctgccgtagtcagtagccccggagttactactttgcccatgaacgtcgcaggcatatctgtggcgattggacaaccacagaaagcagcaggtcagaccgtggtagcccagcctgtccacatgcaacagctgctgaagctgaagcaacaagcagttcaacaacaaaaggccatacagccgcaggcggctcagggccctgccgcagtccagcagaaaatcacagctcagcaaatcactacacctggcgcacagcaaaaggtggcatacgccgctcagccagctcttaaaacccagtttttgaccaccccaatctctcaggcgcagaaacttgccggagcacagcaagtccagacacagattcaggttgccaaactgccccaagtagtgcagcagcagactcccgttgcttccattcagcaggttgcatccgcgtctcagcaggcaagcccccagacagttgctttaactcaggccaccgccgcaggccagcaggttcagatgatcccagctgtgacggccacagctcaggttgttcagcagaaactcatccagcaacaagtggttactaccgcttcagctccactccagacaccaggggctcctaaccccgctcaggttccggcatcatccgatagtcctagtcaacaaccgaaattgcagatgagggtccctgctgtgaggctgaaaacaccaaccaaaccaccttgtcagta

SEQ ID NO: 221606 - DNA, 1314 bp, synthetic construct
  misc_feature 1..1314: note = Description of Artificial Sequence: Synthetic coding sequence
  source 1..1314: mol_type = other DNA
atgctgcaaggccctagggcgttggccagtgctgccggacagacaccaaaagtcgtgcctgccatgtcaccgaccgaactgtggccctctggactgtccagcccacagctctgcccagccacagccacttactatacaccactgtatccacagacggccccacctgctgctgccccaggcacatgcctcgacgctacgccacacggacctgaagggcaggtggtgaggtgtctgcctgcgggtcggctcccagccaagagaaagctggacttggaaggaattggccgaccagtggtgcccgaattccctacccctaaaggaaaatgcatccgggtggacggacttccaagccccaaaacacccaagtcgccgggtgaaaaaacgaggtacgatacgtcgctgggactgctgaccaagaaatttatctacctgctttcagaaagcgaggacggggttctcgatctaaactgggccgcagaggttctggacgttcaaaaacggagaatatacgacataaccaatgtgctagaaggaatacagctcattcgaaagaaggctaaaaataatattcagtgggttggcaggggcatgtttgaagatcccactagaccgggaaagcagcagcagttgggtcaggagttgaaagagctgatgaacaccgaacaggcactcgatcaacttattcagagctgtagcctcagcttcaagcacctgaccgaagataaggctaacaaacgccttgcctatgtgacgtaccaagacattcgcgctgtaggaaattttaaggaacaaactgttatagctgtgaaagcaccacctcagactcggcttgaggtccctgatagaacagaagataacctgcagatttatctcaaaagcactcaggggcctatcgaggtctacctgtgccccgaggaggtccaggaacctgattcgccatccgaggaaccactcccttcgactagcactctgtgcccgagtccagactccgcccaaccctctagcagcactgacccatccatcatggagccgactgcttcatcagtcccggctcccgcacctacgcctcagcaggcgcctccgcctccctctctcgtccctctggaagcaaccgacagcctcttggagctgccccaccctctgcttcagcaaaccgaagatcagttcttgtcccctacactggcatgtagcagccctttgatttccttctccccctctctggaccaagatgactacctttggggcttggaggcaggggaagggatttcagaccttttcgacagttacgatcttggggatttgttgattaactag

SEQ ID NO: 221607 - DNA, 1398 bp, synthetic construct
  misc_feature 1..1398: note = Description of Artificial Sequence: Synthetic coding sequence
  source 1..1398: mol_type = other DNA
atgcgtaaaggcatacaaccggctttagaacagtacctggtgactgccggtgggggagagggtgccgcagttgtggctgctgccgctgccgcaagtatggataaacgcgctctactagctagtcctggtttcgcggctgcggctgccgcagccgctgcgccaggtgcttatatccaaatactgacaactaatacctccacgacctcttgttccagctcattgcagtcaggcgctgtggcagccggaccgttactgcccagtgccccaggagccgaacagaccgccggatctcttctgtacacaacaccacacggtcccagttcgagggcaggcctgctccagcagcccccagccttaggccgtgggggttccggcggagggggaggacctccggctaaacgcaggctggagctcggagagtccgggcatcagtatcttagcgatggactgaaaacacctaaagggaagggcagagccgcactgaggagcccagactctcctaagacacccaaaagcccttccgagaagactcgctatgacacaagcttgggcttgctgacgaagaagttcatccagctgctgtctcaatcacccgacggcgtgctggatttgaacaaggccgctgaggttttaaaagtacagaaacgcaggatctacgatatcaccaacgtgttagaaggaattcacctcataaagaagaaatctaagaataacgttcagtggatgggctgcagcctgtctgaggatggaggaatgcttgctcaatgccaaggactgtccaaagaggtgacagaattgtctcaggaggaaaagaagttggacgagctcattcaatcatgtactctcgatctgaaactcctcactgaggattcagagaatcagaggctggcatatgttacgtaccaggacatccgcaaaatatctgggctgaaggaccagacagtgatcgtcgtcaaagcaccccctgaaacgcgtctcgaggtgccggactccattgagtcattacaaatacaccttgcaagtacccagggccctatcgaggtttacctttgccctgaggaaaccgagactcactctcccatgaagactaacaaccaagatcacaatggcaatattcccaaacctgccagcaaggatctggcgtcaacaaatagcgggcattccgactgttccgtgagcatgggcaatctcagtcccctggcttctcccgcaaacctcctgcagcagacagaagaccaaatccctagcaacctggagggacccttcgtgaacctcctccctcccctgctccaggaggattatctccttagcctgggtgaggaggaaggaatatccgatctgtttgacgcgtacgacctggagaagttgccgttagtcgaagacttcatgtgttcctag

SEQ ID NO: 221608 - DNA, 387 bp, synthetic construct
  misc_feature 1..387: note = Description of Artificial Sequence: Synthetic coding sequence
  source 1..387: mol_type = other DNA
atggacaagcgggctctcctcgcaagtggagggggtggaggtccgcctgcaaagcgcagactggagcttggagagtccggccatcagtacctgagtgacggcctgaaaaccccgaaggggaagggcagggctgccctccgctcacccgattcccctaagaagaagacccgatatgacacatcgctcggtcttcttacaaaaaaatttatccagttgctgagtcagtctccggatggggtcctggacttaaacaaagcggcagaagtgctgaaggtacagaagcggcgaatctatgacatcaccaatgtgctcgaagggatcagtgacctgttcgatgcatacgatctggagaagcttccactggttgaggactttatgtgttcatag

SEQ ID NO: 221609 - DNA, 1005 bp, synthetic construct
  misc_feature 1..1005: note = Description of Artificial Sequence: Synthetic coding sequence
  source 1..1005: mol_type = other DNA
atgccactgcagcagcaggctaaaaggcggctagagttaggggagagcggccaccagtatttgtcagatgggctcaagacccctaaaggtaaggggagggccgcactgcgctcccctgatagccctaagaagaaaacccgctacgataccagcctcgggctgctgactaaaaaatttatccagctgctgtcccagagcccagacggggtactcgatttaaacaaggctgccgaggtgcttaaggtacagaaaaggcggatctacgacattaccaatgtactggagggaatccacctgataaagaaaaaatctaagaataatgtccagtggatggggtgttcgctgagcgaagacggaggcatgctggcccagtgccaagggctgagcaaggaggtaaccgagctcagtcaagaggagaaaaagctggatgagctaatccagagttgcactttagacctcaaactgctgactgaggattcagagaaccagagactggcctacgtcacatatcaggacattcggaaaatctcaggactcaaggaccaaaccgttatcgtggtcaaggcccctcccgaaacccgattggaagttcccgattcaatcgagagcctgcaaattcacctggcatcaactcaggggcctattgaggtttacttgtgccctgaggagactgagactcattctcccatgaagaccaacaatcaagaccataatgggaacatacctaagcctgcttctaaggatcttgcttctacaaattcaggccacagtgactgttcagtctctatgggcaacctgagccctctggccagtcccgcaaatcttctccagcagaccgaagaccaaatcccgagcaatttggaaggacctttcgtgaacctcctgcctcctttacttcaagaggactatctcttgtccctgggcgaggaagaaggtatctccgatctttttgacgcgtatgatctggagaagctacctctggtggaagactttatgtgctcctag

SEQ ID NO: 221610 - DNA, 2736 bp, synthetic construct
  misc_feature 1..2736: note = Description of Artificial Sequence: Synthetic coding sequence
  source 1..2736: mol_type = other DNA
atggaagtgaattgtctgacgctgaaagatcttatttcaccgagacagcccagactcgactttgccgtggaggatggggagaatgcgcaaaaggaaaacattttcgtggatagaagccggatggcaccaaaaactcctatcaagaacgaacccattgacctgtccaagcagaagaagtttactcccgaaagaaatcctatcactcccgttaaattcgtggacagacagcaagctgaaccctggaccccgacagccaatctcaaaatgctcatcagcgccgcatcaccagacatccgagatcgggaaaagaaaaagggcttgttcagacctatcgaaaataaagatgacgcatttacagacagcctgcagctggatgtggtgggcgacagcgcagtggatgagtttgagaaacagcgaccgagccggaagcagaagagcctgggcctgttgtgccagaaatttctcgcgagatatccatcataccccctgtctacagagaagacaactatcagcctagatgaagtcgccgtatccctcggtgtggagcggaggaggatttatgacatagttaatgtgctggagagtctccatctggtatccagggtagcaaagaaccagtatgggtggcacggtcgtcattcactacccaagaccctgcgaaacctgcagcgtctgggagaggaacagaagtacgaggagcaaatggcgtacctgcagcaaaaggagctagatttaattgactacaagtttggtgagcgcaagaaggacggtgatcccgattcccaggagcagcagttacttgatttttcagaacctgattgtccatccagttcagccaacagccgcaaggacaagtccctgagaattatgtcccaaaagtttgtgatgctcttccttgtgtccaagaccaaaatcgtgaccctggacgttgccgctaagattttgatcgaggagagtcaggatgctcccgatcatagtaagtttaagactaaggtcagaaggctctatgacatagcaaacgtcctaacatcgcttgcactaataaagaaggtgcacgtgacggaggagcgcggtcgcaaacccgcatttaagtggattggcccagtagatttcagttcttctgacgaagaattggtcgatgtgtctgcctcagtgctcccagagctaaaacgagaaacgtatggacaaattcaagtgtgtgccaagcagaagctggcacgacatggctcctttaatactgtccaggcttctgagcgcattcagcggaaggtgaacagtgaaccctcgtccccctatcgcgaggaacaggggtctgggggatactcacttgagatcggctctcttgctgctgtctaccgtcagaaaattgaagataattcccaaggaaaagcttttgcaagtaagagggtcgtgcctccgtcctcttctctggaccccgtggctcctttccctgtgctttccgtggatccagagtactgcgtcaatcctcttgcccaccccgtcttttctgtcgcacagaccgatctccaggctttttcaatgcagaatgggcttaatggacaggttgacgtgagccttgcctcagcagccagcgcggtcgaaagcttgaagccagccctgctggccggacagccacttgtctatgtcccaagtgccagtctgttcatgctgtacgggtcgctgcaagaagggcctgcatctggatccggctcagagcgggatgatcggagttcggaagcacctgcgacagtcgagctgtcgagcgccccaagtgctcaaaaacggctgtgtgaagaacggaagccccaagaggaagacgagcccgctaccaagcgccaatcaagggaatatgaggatgggccactgtccttggtcatgccaaagaagccttccgactctacggatctcgcaagtccaaagactatgggcaaccgggctagcatcccacttaaggatattcacgtgaacggacagctcccggcagcagaggaaatctccggtaaggcgactgccaactcactggtgtcatccgagtgggggaaccctagcaggaatacagatgtggagaagcctagcaaggaaaacgagtcaaccaaagagcccagccttctgcaatacctgtgcgtgcagtcccccgcagggctcaatgggtttaacgtactcctctcggggtcccaaaccccacctaccgtcggaccttcctccggacagctgccatccttttcggtaccttgtatggtgctgcctagccccccacttggcccatttcccgtgctctatagtccagccatgccgggtcctgtgtcatccactctgggggctcttcccaacaccggcccagttaatttctctctccctggacttggctcaatcgcgcagttgctggttggccctactgcggtggttaaccctaagagttccaccctcccttccgctgatcctcagctgcagtcacagcctagtttgaacctgagcccagtcatgagtcgctcgcattccgtggtgcagcagccagagagtccggtttacgtaggccacccggtttcggtggtgaaacttcaccagtcgccggtgcctgtgactcccaaatctattcaaaggacacaccgtgaaacatttttcaaaacgcccggtagcttgggggatccagttctcaaacgtcgggagaggaaccagtcacgtaacacttcctcagcacaacggagattggaaattccttcaggaggagccgactag

SEQ ID NO: 221611 - DNA, 1149 bp, synthetic construct
  misc_feature 1..1149: note = Description of Artificial Sequence: Synthetic coding sequence
  source 1..1149: mol_type = other DNA
atgcaaaacgggctaaatggccaggtggatgtcagcctagcatctgctgcttcagctgtggagtccttaaaaccggcattgctggccggacagcctctcgtgtatgtcccctcggcttcactctttatgctttatggatctctgcaggagggacctgccagtggttccggctctgaaagagatgaccgttcctctgaagccccagccaccgtggagctctctagcgcgccatcagcgcagaaaagattgtgtgaagagcggaagccacaggaggaggacgagccagcgacgaaacggcagtcacgggagtatgaggacggacctctttcgctggttatgcccaaaaaacccagcgattctacagatcttgccagccccaagactatgggtaatagggcttcaatccctctgaaagacatccacgttaacggtcagctccctgctgccgaggaaatcagtggaaaggcaactgcaaattccctcgtaagtagcgagtggggtaacccttcccggaacaccgacgtggaaaagccttcgaaggaaaatgaatctacaaaggagccaagtttgctgcaatatctgtgtgtccaatcaccggcaggcttgaacggtttcaacgtcctactctcaggatcgcaaaccccacccacagtgggcccatcttctggccaactcccttcttttagtgtgccgtgcatggtcctaccatcacctccactgggcccattccctgtactctacagccctgccatgcccggacccgtttccagtaccttgggctcaatagcccaactgttggtcggacctacagcggtggtgaatcctaagtctagcacccttccctcagctgatcctcagttgcagtcacaacccagcctcaacttaagtcccgttatgtcaaggagtcacagtgtcgtacagcaacctgaaagccccgtgtacgtggggcacccagtgtctgtagtcaaactccatcagagtccagtcccagtgacaccaaagtcaatccagaggactcaccgtgagacttttttcaaaacccctggttcactgggtgaccccgtgcttaagcggcgagagcggaaccagtcgagaaacacaagctcagctcagcgaaggctggagatcccctctgggggagcggactag

SEQ ID NO: 221612 - DNA, 2187 bp, synthetic construct
  misc_feature 1..2187: note = Description of Artificial Sequence: Synthetic coding sequence
  source 1..2187: mol_type = other DNA
atggaggtgaactgcctcactctgaaagacctgatcagcccacgccagcccaggttagattttgcggtagaggacggtgaaaatgcccaaaaggagaatatatttgttgacaggtcacgcatggctcccaagactcctataaagaacgaaccaatagaccttagcaagcagaaaaagtttacacccgaacggaatccgatcactccagtgaagttcgtggaccgccagcaggccgagccttggactccaacagcaaatctcaaaatgctaattagcgccgcttctccggacatccgggacagagaaaagaagaaaggcctgttccgaccaattgaaaacaaggacgatgcctttactgattccctccagctcgacgtggtcggcgatagtgccgtggatgaatttgagaagcagcgtcccagccgcaaacagaagtccctaggcttactgtgccaaaagtttttagctcggtatccgtcttaccccttgagcaccgagaagaccacgattagtctggacgaagttgccgtttcactgggagtggagcgtcggagaatctacgatatcgtgaacgtgctggagtcgctgcatcttgtgagtagagtcgcgaagaaccagtacggctggcacgggcgtcacagccttcccaagacactgaggaacctgcagagattgggagaggagcagaaatacgaggaacaaatggcctatcttcagcagaaggagttggacctcattgattacaaatttggggaaagaaaaaaagacggagacccagactctcaggaacagcagctgctggacttttcagaaccagattgtccatcctcatcggcaaattcccgtaaagataagtccctgagaatcatgagccaaaagttcgtgatgttgttcttagtttctaaaacaaagatcgtcaccctggatgtggctgctaagattttgatcgaagagtcgcaggatgccccagaccattccaaatttaagactaaagttcgccgattatacgacattgccaacgtacttacgtctctggcattaatcaagaaagtccacgtgacagaggagcgcggacgcaagcccgcattcaagtggatcggcccagtggacttctccagttcagacgaggaactggttgatgttagcgcctccgtcctgcctgagctcaaacgcgaaacttatggtcagattcaggtgtgtgccaagcaaaagctagctcggcatggctcgttcaatacagtccaggccagtgagagaatccagcgaaaggtcaactctgaaccttcgtccccatatcgagaggagcagggctcgggagggtacagtctcgaaatcggctctctggcagccgtctaccggcagaaaatcgaggataactctcagggaaaagcatttgcctccaagagggtcgttcccccaagcagctccctggatccggttgcgccatttcctgttttgagcgttgatccggaatattgcgtgaatcccttggcccatcccgtgttcagcgtggcccagaccgatcttcaggcattttccatgcagaacggcttgaacggccaggtggacgtttctctggcttcagccgcttctgcggtcgaatccttaaaaccagccctcctggccggacagcccctggtttacgtgccaagcgcatcactattcatgctgtacggcagcctccaggagggccctgcaagcggaagtggcagcgaacgggatgatagatcgtcagaggctcctgccactgtggaattgagttctgcccctagcgctcagaagcgcctgtgcgaggagagaaaaccacaggaagaggacgagccagcaactaagagacagtcccgcgaatatgaggatggcccattatccctcgtgatgccgaagaagccatctgactctactgacctggcctctcctaagacaatggggaaccgcgcatccatacccctgaaagacatccacgtaaatgggcaattacctgccgctgaagagattagcgggaaggccacagctaatagcctggtgagctctgagtggggaaaccccagcaggaatacagatgtcgagaagccctctaaggagaatgagagtaccaaggaaccatcccttcttcagtacctatgcgtccagtctccagccgtcacaagttcctccgatccccaggaacaccctactcacacatcctag

SEQ ID NO: 221613 - DNA, 348 bp, synthetic construct
  misc_feature 1..348: note = Description of Artificial Sequence: Synthetic coding sequence
  source 1..348: mol_type = other DNA
atggaggtcaactgcctcacgctgaaagatctgatcagcccacgacagcccaggttggatttcgccgtcgaggacggagaaaatgcccagaaggagaatatctttgttgatcgtagccggatggcccctaagactcccatcaaaaacgaacccatcgacctgtcaaaacagaagaaattcacgcccgagcgaaaccccatcacacccgttaaatttgtggataggcagcaggccgaaccatggacacccacggcgaatctcaagatgctgatatcagctgcttctcctgatatcagagatagagagaagaagaaggggctattccgcccaattgagaataaagactag

SEQ ID NO: 221614 - DNA, 2604 bp, synthetic construct
  misc_feature 1..2604: note = Description of Artificial Sequence: Synthetic coding sequence
  source 1..2604: mol_type = other DNA
atggaaaacgagaaagagaacctgttttgcgagcctcataagaggggcctaatgaagacccctttgaaggagagcacaacagcaaatatagtgctggctgagatacagcctgactttggacctcttactacacccaccaagccaaaagagggcagccagggcgagccctggacccccacggctaatctgaaaatgctgatctcagcggtttctcctgaaatacgcaaccgtgaccagaaacgcggtctgtttgataaccgctccggcctgcctgaagctaaagactgtatccacgaacatttgagtggtgatgagtttgagaaatcccagccgtcacgaaaagagaagtcattggggctgctgtgtcacaagtttctcgctcgctatccaaattaccccaatcccgcagtgaataacgatatctgcttggatgaagtcgccgaagagttaaacgtcgaacggcgacggatttacgatatcgtgaatgtgttggagtccctgcacatggtgagtcgactggccaaaaaccgttacacttggcacggtaggcataatctgaacaagactctgggcacactgaaatctatcggagaggaaaacaagtacgctgaacaaattatgatgattaaaaaaaaggaatacgaacaggaatttgatttcatcaagtcttactcaatagaggatcatattattaagtccaatacgggaccgaatggccaccccgatatgtgttttgtcgaactgcccggagtcgaatttagggcagcatcagtcaatagtcggaaggataagtccttaagagtgatgtctcaaaagttcgttatgctttttcttgtgtccacccctcagattgtctctttagaggtggccgcaaagatccttattggcgaggatcacgtcgaagatcttgacaagagtaagttcaaaactaagatccggagactttatgatattgccaacgtcttatctagtctggatctgatcaaaaaggttcatgtgaccgaggagaggggaagaaaaccagcatttaagtggacaggccctgagatctcccctaacacttctgggtcctcacctgttatccacttcacccccagcgatcttgaagtgaggcggagcagcaaagagaactgtgctaaaaacctattctccacacggggtaaacccaacttcactcggcacccatctctgatcaagctcgtcaagtctattgagtccgacagacggaaaattaattccgcaccttctagtccaataaagactaataaagctgagagctcccagaactcagctccctttccctcgaagatggcgcagttagccgctatctgcaaaatgcaactggaagaacagtcttctgagagccgccaaaaggttaaggtgcagctggctaggagtggaccttgcaaacccgtggctcctcttgatcctccagtgaacgctgaaatggagcttaccgctccaagcctcatccagccactgggcatggtccctctgataccatctcctttgagtagtgccgtgccccttatactgccccaggccccatcagggccttcatatgccatttatttacaaccaacacaagcgcatcagtcggtaacacctccgcagggcctgagtccaaccgtctgtacgactcattcatccaaagcaaccggatctaaggactccaccgatgccacgacagaaaaagctgcaaacgatacctccaaggccagtgcctccacacggcctgggagtctgctgcctgctccagaacgtcagggcgctaagagccggactcgggagcctgccggagagcgtggatcgaagagggctagcatgctagaagactccgggtccaaaaagaaatttaaagaggatctaaaaggcctggagaatgtgtcagcaacactgttcccaagcggataccttattccactgacccagtgttcttctctgggcgcagaatctatcctgagtggtaaggagaacagctcagccctgagtcctaatcaccggatctactccagcccaatcgcaggggttatacccgtgacatcaagtgaactgacagctgtcaactttccatctttccacgttactcctctgaaactgatggtgtcaccaacctcagttgctgcggtcccagtaggaaattccccagccttagcctcgagccatccagtaccaatccagaatccatctagtgccatcgtgaatttcacccttcagcaccttggtctaatctctcctaatgtgcaattaagtgcatcacctgggtccggcattgtgcccgtctcccccaggattgagtcagtcaacgttgcaccagagaatgcgggaacccaacaaggacgtgcaaccaactatgacagtcccgtccctggtcaaagccaacccaacggccagagtgtggcggtcacaggagcgcaacaacccgttcccgtgacccctaagggctcacagctcgtcgcagaatcattttttcgcaccccaggcggacctacaaaaccaacttctagttcctgtatggatttcgaaggagcgaataaaacttctttgggaacactgttcgtgccccaacgtaaattagaggtctccaccgaggacgtgcattag

SEQ ID NO: 221615 - DNA, 2604 bp, synthetic construct
  misc_feature 1..2604: note = Description of Artificial Sequence: Synthetic coding sequence
  source 1..2604: mol_type = other DNA
atgcagaagaaaaaggaaaacctgttctgtgagccccacaagcgcggacttatgaagacacctctgaaagagtccacaacagccaatattgtacttgcagagatccagcctgactttgggcctttaactactccgaccaaaccgaaggaaggttcacagggcgagccatggaccccaacagctaatttgaagatgctgattagtgcagtgtcacccgagatccggaatagagatcagaagcggggactgtttgataacagaagtggcctccctgaagccaaggactgcatccacgaacacctgtcaggggacgagttcgaaaaatcgcagccgtccaggaaagaaaagtcccttggtctattatgccacaaatttctggctcgctacccgaattatcccaacccggctgtgaataatgacatatgtttggacgaagttgcggaggagctgaacgttgaacgtcgcagaatttacgacattgtgaatgttttggagtctctgcacatggtctctcgcctcgccaagaacagatacacctggcatgggcgtcacaacttgaacaaaacactggggactctgaagagtattggcgaggaaaataagtacgccgagcaaattatgatgattaaaaagaaggagtacgaacaggagtttgacttcatcaaatcttactccatcgaggaccacataatcaagtccaatacaggcccaaacggccatcccgacatgtgcttcgtggagttgcctggagttgaattcagagcggcttctgtgaacagccgcaaggataagagcctgcgggtcatgagccagaagttcgtgatgctgttcctcgtgtctaccccccagattgtatctttggaggtggcagctaaaatactgatcggcgaggaccacgtggaagacctggataaaagcaagtttaaaaccaagatacgcaggctgtatgatattgcaaacgtacttagctcccttgatcttatcaagaaagtgcatgtgactgaggaaagaggacggaaacctgctttcaagtggactgggccagagattagcccaaatacatcaggctcttcccctgtcatccatttcacaccttctgatctggaagtgcgtagatcctccaaggagaactgtgcaaagaatctgttttcaacacggggaaaacctaactttacaaggcacccgagcctgattaagctggtcaaaagtatagaatcggatcggagaaagattaattccgcaccaagctcgccaatcaagactaacaaggccgagagtagccaaaacagtgctccatttccgtctaagatggcccagttagcagctatatgtaaaatgcaactggaggagcagagctcagaatcaagacaaaaggtgaaagtccagttggctaggtctggtccttgtaagccagtcgcccctctcgatcccccagtgaatgctgagatggagctgactgctccgagcctcattcagcccctcggcatggtccccctgattcccagcccactgtcctctgcagttccgctgattctgccccaggccccaagcggccctagttacgccatctatcttcaacctacacaggcccaccaatccgttactccccctcagggactgagtcctacagtgtgtacaacgcattctagcaaggctactggatcaaaggactctacagacgccaccactgagaaggccgctaacgacacttcaaaggctagtgcctccacccggcctggcagcctgcttcccgctcccgagagacagggagctaaatcaagaacacgggaacccgctggggaaaggggtagcaaaagagcttctatgcttgaggatagcggcagtaagaaaaaatttaaagaagatctgaaaggactggagaatgtctcggccacgctgtttccatcagggtacctgattcccctgacacagtgttccagcctcggagccgaatctattctcagcggcaaggagaattcatctgcgctgtcccctaaccataggatatattcttctcccatcgctggagtaatccccgttaccagcagtgaacttaccgcagtgaacttccctagctttcacgtcaccccactgaaattgatggtaagtcctactagcgtcgccgctgtcccggtggggaactctcccgcactggcttctagccacccagttcctattcagaatccaagcagtgctattgttaatttcaccttgcagcatctgggattaatcagtcctaacgtgcagttgagcgcatcccctggtagcggcatcgtgccagtgtctcctcgaattgaatcggtgaacgtggcaccagagaatgccggaacacaacaggggcgtgcaaccaactacgatagcccagtccctgggcagtcccagccaaatggccaatctgtggctgttacgggtgcccaacagccagtgcctgtaacacccaaaggctcgcaactcgtggcagagtcatttttccggactccaggcggaccgacaaagcctacctcatcctcatgcatggactttgagggcgcaaataagacctccctaggcacactattcgttccccagcggaagctggaagtttcgactgaggatgtccactag

SEQ ID NO: 221616 - DNA, 2604 bp, synthetic construct
  misc_feature 1..2604: note = Description of Artificial Sequence: Synthetic coding sequence
  source 1..2604: mol_type = other DNA
atggaaaacgagaaggagaacttgttttgtgagcctcacaagcggggactgatgaaaacccctctgaaggagagtaccacggccaatatagtcttggcagagatacagcctgacttcggaccactgaccaccccaactaaaccaaaagaagggtctcagggggagccatggacccccacggctaacctgaagatgctgatcagtgcagtctctccggaaatccgcaacagagatcagaagcgcggtctctttgacaataggagcggcttgccggaggccaaggactgtatccatgagcacctgtctggggatgagttcgagaagtctcagccttctcgcaaggaaaagagcctcggtttgctgtgccataaattcctggcaaggtatccaaactacccaaacccagctgtgaataacgatatatgtttggacgaggtggcggaagaactgaatgttgagaggcggagaatctacgacatcgtcaacgtcctcgagtccctgcatatggtctctcggcttgcgaagaaccgatacacgtggcacggaaggcataacctcaacaaaacactgggaacccttaagagcattggcgaagaaaacaagtacgctgaacagattatgatgattaagaagaaggaatacgaacaggaatttgacttcataaagtcctacagcattgaggaccatattataaaatcaaataccggacccaacggccatccagacatgtgcttcgtagagttaccaggggtggaatttagggccgctagtgtgaattcgcgcaaagataaaagcctgagggtgatgtcgcagaaatttgttatgctctttctcgtgtcaactcctcagattgtcagtctagaggtggccgcaaagattctgataggcgaagaccatgttgaagatctcgataaatccaagttcaaaacgaagattagaaggctgtatgacattgccaatgttctatcttcgctcgatctgattaagaaagtgcatgtgacagaggagcgtgggaggaagcctgcattcaaatggactggcccagagatatctcccaatacctctggctcgtccccggtgattcattttaccccttcagatttggaagtgcggcgttcctccaaagagaactgcgctaagaaccttttctccaccagaggcaagccgaactttacgagacacccttcacttattaagctggtcaagagcattgagtcagacaggcggaagatcaacagtgctccaagctcgcctatcaagactaacaaggctgagtccagccagaattctgcaccctttccaagtaagatggcccaactggctgcgatctgtaagatgcagttggaagagcaatcttcagagtctagacagaaggtgaaagtacagctcgccagaagcgggccttgtaaaccagtcgctccgctcgatccgcctgttaatgcagagatggaactgacagctccctcactgatccaacccctagggatggttccactgattccttcacctctgtctagtgccgtgccactgattctgcctcaggctcccagtgggccaagctatgcgatctacttgcagcccacacaggctcatcagtccgtgacacccccacaggggctgagtcctacagtgtgtacaacacatagcagcaaggctaccgggtctaaggattccaccgacgctacgaccgaaaaggccgctaacgacacctcgaaagccagtgcctcaactagaccgggatccctgctgccagccccagagcgccaaggcgcaaagtctcgaacccgcgaacccgctggagagaggggtagcaaacgcgcttctatgctggaggattcaggctcgaaaaaaaaatttaaagaagatctgaaaggactggaaaacgtctctgccaccctttttccttccggttatttgatccccttgacccagtgctcttccttgggagccgaatcaatactaagtggcaaggagaatagcagcgctctttcccctaaccacagaatttacagtagtccaatagcgggtgtgatccccgtgacgtcgtcagagctgacagccgttaacttcccctcgttccacgtcacaccactgaaactgatggtgagccccactagcgtggctgccgttccagtgggcaattccccagccctggccagtagtcatcccgttcccatacagaatccgagttccgccatcgttaatttcacattacaacatctgggcctaatcagcccaaatgtgcagctctccgctagtcctggtagtgggatcgtccctgtctcgccgcgtattgaatccgtcaatgttgccccagagaacgccggaactcagcaaggtagggctaccaactacgacagtcctgtgccaggtcaatctcagcccaatggtcagagcgtcgctgtgaccggcgctcagcaaccagtccccgtgacgcccaaaggatcacagctggtggcagagtctttttttagaacccctggtgggccaactaagccaaccagtagctcttgtatggattttgagggggctaataagacctctctgggcacactgtttgtgccgcagcgaaagctggaggtgtccaccgaggatgtgcactag

SEQ ID NO: 221617 - DNA, 2355 bp, synthetic construct
  misc_feature 1..2355: note = Description of Artificial Sequence: Synthetic coding sequence
  source 1..2355: mol_type = other DNA
atggagggcgcaatggccgtacgggtaacagcagcacacacagcggaggctcaagctgaggcgggacgagaagctggcgaaggagccgtggcagcagttgccgcagcgctggcgccttccggcttcctgggtctgcccgctcctttctctgaggaggacgaagatgatgtacaccggtgcggacgctgtcaggccgagtttactgcgttagaggacttcgtgcaacacaagatccagaaggcttgccagagagcgcctcccgaggcattacctgcgacacccgcaaccacggcgttgctgggacaggaggtcgtgcccgcagctccaggacctgaggaacccataactgtggctcacatagtggtcgaggccgctagccttgccgcagatatcagccacgcctccgatctcgtgggaggaggtcacatcaaggaagtcattgtggcggcagaagcggagctgggagatggtgaaatggccgaagccccaggctcaccgcgacaacagggactcgggctggccggtgagggtgagcaggcacaggtcaaactgctcgtcaacaaagatggtcgctacgtgtgcgccctttgtcacaagacctttaagacagggagtattctgaaagcccacatggttacccattctagtcggaaggatcatgaatgtaaactgtgcggagcaagcttccgcactaagggaagcttgatcaggcaccatcgccgacacactgatgaaaggccatacaaatgctcgaagtgtgggaagtcttttcgggaaagcggggcactgacacgccatctgaaatcgctgacgccctgcacagagaaaatcagatttagcgtatccaaagatgtcgtcgtctccaaggaggacgcgagagcaggatcaggggcaggggctgccggtctagggaccgcgacgtctagcgtaacaggagagcccatcgagaccagtccagtgattcacctagtgacagacgccaaaggcacagttatccatgaggtccatgtgcaaatgcaagaactgtcccttggcatgaaggccctcgcccctgaacccccagtgagtcaggagttgccttgcagctcagagggctccagagagaatctcctgcatcaggctatgcagaatagcggcatcgtactagagagagctgctggcgaggaaggcgcacttgagcctgcccctgccgcaggttcgtctccccaacctctcgccgtagccgctcctcaactgccggtcctcgaggtacagccgttagagacccaggtcgcctctgaggcatccgccgtacccaggacccatccatgtccgcaatgcagtgaaacttttcccacggctgccactcttgaggcacacaagaggggccacacaggtcccagaccctttgcttgcgctcagtgtgggaaagcttttcctaaagcatacctgctgaaaaagcatcaggaagtgcatgtcagggagcggagattcaggtgtggagactgtgggaagctctataagaccattgcccacgtacggggacaccggcgtgtacattctgatgagagaccttacccttgtcccaagtgtggcaagcgctacaaaacaaaaaacgcccagcaggttcactttcgcacccacctggaggaaaagcctcacgtgtgccagttctgttccagaggtttcagagagaagggatccttggtacgccacgtgcggcaccatacaggcgagaagcccttcaaatgctataagtgcggacgcggtttcgcagagcatggcaccttgaatcgccatctgaggactaagggaggctgccttttggaggtcgaagagttgctcgtatctgaagactctcccgctgcggcaaccaccgtgctgactgaagatccccatacagtgctcgtggagttctcctcagtggtggcagatacacaggaatatattattgaggccactgctgacgacgcagagacatcagaggctactgagatcatcgaaggcacccagactgaagtggattcccatataatgaaggtagttcaacagatcgtgcaccaagcttccgccggacaccagataatcgttcaaaatgttaccatggacgaggagaccgctctaggacctgaagctgccgcagctgataccatcactattgccacgcccgagtcactgactgaacaggtggcaatgacattagccagtgcaatctcagaaggcactgtccttgcagcaagagccggaactagcgggaccgaacaggccacagttacaatggtttctagtgaagacatcgaaattctggaacatgcaggagagctggtgattgcgagccccgaaggacagctggaagtacagactgtgattgtttag

SEQ ID NO: 221618 - DNA, 1047 bp, synthetic construct
  misc_feature 1..1047: note = Description of Artificial Sequence: Synthetic coding sequence
  source 1..1047: mol_type = other DNA
atggccgctacgtgcgagatttctaatatcttctccaattacttcagcgccatgtactcttctgaagattctacactggcaagcgtccctccagcggcaaccttcggcgctgatgacctggtgctgaccctctcaaacccacagatgtcattagagggcaccgagaaggcctcctggctaggggagcagccacaattctggtctaaaacccaggttctggattggataagttaccaggtggagaagaataagtacgatgccagtgctattgactttagcaggtgtgatatggacggtgctacattgtgtaattgtgcgcttgaggagctccggcttgtcttcggtcccctcggggatcagctccatgctcagctcagggacctgacttcatcctccagtgacgagctatcttggattattgagttgttagaaaaggacggtatggcctttcaggaggccctggatcctggaccatttgatcaggggagcccttttgcgcaggagctgttagacgatgtttcaacggccggaactggcgcatctcgttcttctcattctagtgatagtggaggttctgatgtagacctggaccccactgacgggaaactgttcccctccgatgggttccgggactgcaaaaaaggagacccaaagcacggcaaacgaaaacgcggacgccctaggaaactgtcaaaagagtattgggattgtctggagggcaaaaaatcaaagcacgctccccgaggcactcacttgtgggaattcataagagacatactaatccaccccgagttaaacgaaggacttatgaaatgggagaaccggcatgagggggtgttcaaatttctgcgctccgaagccgtcgcgcagctttgggggcagaagaagaaaaacagtaacatgacttatgaaaagctaagccgggcaatgcggtactactacaaaagggagattctggaacgtgttgacgggagacgccttgtctacaaattcgggaaaaattccagtggctggaaggaagaggaggtcttacagtccagaaactag

SEQ ID NO: 221619 - DNA, 1116 bp, synthetic construct
  misc_feature 1..1116: note = Description of Artificial Sequence: Synthetic coding sequence
  source 1..1116: mol_type = other DNA
atggccgcaacatgtgaaatctctaatatcttcagcaactatttttcagccatgtactcctcggaggatagtactctggcctcagtcccgccagcggctacctttggagcggacgatctggtcctgacactttctaaccctcaaatgtctctagagggtacggagaaggcatcctggctcggcgagcaacctcagttttggagtaagacacaggttctcgattggatctcttatcaggtcgaaaaaaacaagtatgatgccagcgccatcgacttcagccgatgcgacatggatggagctacgctttgtaattgtgccctcgaagagcttcggctggtgttcggaccactgggtgaccagcttcatgcccagctgagagatcttacgtccagttctagcgacgagctttcttggataatcgaactgctggagaaggacggcatggcattccaggaggctctggaccctggcccattcgatcagggcagcccttttgcgcaagagctgctcgacgatggtcaacaggccagcccataccatccaggcagctgtggggctggagctccaagcccaggaagcagcgacgtgtccaccgcaggaaccggagcatctcggtcgagccactctagtgacagtggcggatccgacgtggatcttgatccgacagacggcaaactgttccctagtgatggctttcgtgattgcaagaagggggatccaaaacatggaaagaggaaaagagggaggccaaggaagttgtctaaggaatactgggactgccttgaaggtaaaaaatcaaagcatgcccctagggggactcacctgtgggagttcatccgagacatcttgatccacccagaactgaatgaagggctcatgaaatgggaaaatcgtcatgagggggtgttcaaattcctgcgttccgaagccgtcgcacaactctggggccagaagaaaaaaaacagcaatatgacctatgagaaactttcccgggcaatgcggtactattacaaacgtgagatcttggagcgggtcgacggaaggcggctcgtatataagtttggcaaaaactcctccgggtggaaagaggaagaagtactccagagccgaaattag

SEQ ID NO: 221620 - DNA, 1116 bp, synthetic construct
  misc_feature 1..1116: note = Description of Artificial Sequence: Synthetic coding sequence
  source 1..1116: mol_type = other DNA
atggcagccacatgtgaaatttccaacatcttttccaactacttcagtgccatgtactcaagcgaggactccacactcgcatcggtgccaccggcagccacttttggcgctgatgaccttgtgctaactttatctaacccccagatgagtttggagggtacggagaaggcatcatggctgggcgagcagccacagttttggtccaaaacccaggtgctggactggatatcctatcaggttgagaagaacaagtacgatgccagcgccatcgattttagccggtgcgatatggatggtgctactctgtgcaactgcgctctggaggagctaaggctagtctttgggcctctgggtgaccagctgcacgcacagctgagggatctgacttcttcttcctccgatgaactatcgtggatcattgagttgttggaaaaggatggcatggcatttcaagaagcgctcgatcccggaccgttcgaccaggggtcccctttcgcccaggagttactggatgacgggcaacaggctagtccctaccaccctggctcttgcggggcaggtgctcccagtcccggaagtagcgacgtgtcaacagccggaacaggtgcgtcgcggtcgtcccattcctcagattccggtgggtcagacgtcgacttagacccaactgacggcaaattatttccaagtgatggcttccgagactgcaaaaaaggagaccccaaacacggaaaacgcaaacggggacgccctcgaaaactttccaaggaatactgggattgtctggagggaaaaaagagcaaacacgctccaagagggacacatctgtgggaattcattagggacattcttatccaccctgagcttaacgagggcctgatgaagtgggagaaccgccatgaaggtgtgttcaagttcttgcgctctgaggctgttgctcagctctgggggcaaaaaaagaaaaattctaatatgacgtacgagaaactttcccgggctatgcggtactactacaaaagggagattctggagagggtcgacggtcgcaggctggtgtacaaattcggcaagaatagctccggatggaaagaggaggaagtgctacagagccgcaactag

SEQ ID NO: 221621 - DNA, 1116 bp, synthetic construct
  misc_feature 1..1116: note = Description of Artificial Sequence: Synthetic coding sequence
  source 1..1116: mol_type = other DNA
atggcggctacttgcgaaatttctaacatcttttctaactacttcagcgccatgtattcctccgaggattctaccctcgccagcgtgcctccagccgctacattcggggctgatgaccttgtcctcactctctcgaatcctcaaatgtccctggaaggcactgagaaagcctcttggttaggggagcagcctcagttttggtccaagactcaggtgctcgattggatctcgtatcaggttgaaaagaataagtacgatgcctccgcaatcgatttcagtaggtgtgacatggacggtgcaacgttatgcaactgtgcgctagaggagctaagactggtcttcggccctcttggagaccagttgcacgcccagctgcgagatctaacgtcgtcttcaagtgacgagctttcttggatcattgaactcctggaaaaggacggaatggcgttccaggaggctttagatccagggcctttcgatcagggcagtcctttcgcacaggaactcctcgacgatggacagcaggcgtccccctaccacccaggcagctgtggcgcaggggctcccagcccgggaagtagcgacgtctcgacagctggaacaggagcttcgaggtcgagtcactccagtgactcaggaggcagcgacgtggatctggatccgacagatgggaagctgtttccaagcgacggcttccgggattgcaaaaagggggatccaaagcatggaaagcgtaagcggggtaggcccaggaaactgtctaaagaatactgggactgtctggaaggtaaaaaatccaagcatgcccctcgcggaacacatctttgggagtttatccgcgacatcttaatccatccggaactcaacgagggactcatgaaatgggagaataggcacgagggcgtgttcaaattcctccgaagtgaagccgtagcccaactatggggtcagaaaaagaagaacagcaacatgacttacgagaaactaagcagagctatgagatattattacaaacgtgagatactcgaacgggtggacggaaggcggctagtttacaagttcggtaagaattcttccgggtggaaagaggaggaggtgctacaatctcgtaattag

SEQ ID NO: 221622 - DNA, 699 bp, synthetic construct
  misc_feature 1..699: note = Description of Artificial Sequence: Synthetic coding sequence
  source 1..699: mol_type = other DNA
atggccgctacgtgtgagatttctaacatttttagtaactactttagtgctatgtactcttctgaggatagcaccctggcatcggttccacccgctgctacctttggcgctgacgatctcgtgctgaccctgagcaatcctcagatgtcgctggaagagaaggcatcctggctaggggaacagccccaattttggtccaagacccaagttctggactggattagctatcaggtcgaaaaaaacaaatatgacgcatccgctattgatttttctaggtgtgacatggacggggctaccctgtgcaattgcgctctggaggaactccgcctggttttcggccctctcggggatcaactccatgcacagctacgggatctcacctcatctagcagtgatgaactgtcctggataatcgagctgctggagaaggacgggatggcattccaagaggccctggaccctggacccttcgaccaggggtccccctttgctcaagaactgttagacgacggtcagcaggccagcccttaccaccccggatcttgcggagccggagctcccagccctggttccagtgatgtgagtactgctggtactggggcaagccgcagttcccattcaagcgacagcggcggtagcgacgtggatctggatccaactgacggcaagttgtttccctccgacgggttccgagattag

SEQ ID NO: 221623 - DNA, 1992 bp, synthetic construct
  misc_feature 1..1992: note = Description of Artificial Sequence: Synthetic coding sequence
  source 1..1992: mol_type = other DNA
atggccatcactctacagcccagtgatttaattttcgagttcgcctccaatggcatggacgacgatattcaccagctagaggaccccagcgtttttcccgcagtcattgtggagcaggttccttaccctgacctgttgcacctctactctggccttgaattggatgacgtgcataacgggataatcaccgatggaaccctttgcatgactcaggaccaaatccttgagggtagcttcttgctgacggatgataatgaggccacttcccatacaatgtcgaccgctgaggtgctgttgaacatggagagtccatcagacatactggacgaaaagcagatctttagtacctccgaaatgctcccagattccgatcctgcgcctgcagtgaccttacctaattacctgttccctgcatccgagcctgatgccttaaacagggctggcgatactagcgaccaggagggccacagcttggaagaaaaggctagtcgagaggaatcggccaaaaaaactgggaagtctaaaaaaagaataagaaagacgaaaggaaatcgaagcaccagcccagtcaccgatccctcaatacccatccgtaaaaaatctaaagatggcaaaggttccaccatatatctctgggaattcctgctggctctactacaggatcggaacacatgtccgaagtacatcaagtggacccaacgggaaaagggtattttcaagctggtggactcaaaagccgtctcgaagctttggggcaaacaaaagaataaacccgatatgaactacgaaactatgggcagagctctcaggtattattatcaacgtggtatcctggccaaggtcgaaggacagagattggtgtaccagttcaaagagatgcctaaagatttggttgtgatcgaggacgaagacgagtcctctgaggccaccgccgctccccctcaagccagtacagcctctgtcgcctcagctagcacaacccgacggacttcttcccgagtgtcctccaggtctgctcctcagggcaaaggatcctccagctgggagaaaccaaaaattcagcacgtgggactgcagcccagcgccagtctggagctgggaccatccttggacgaggagataccaaccactagcacaatgctggtctcccctgctgaggggcaggtgaagctcacaaaggcggtttccgcttcgagcgttccctctaacatacatttgggagtcgcgccagttgggagtgggtctgctctgaccctgcagacaattccacttaccactgtgctgaccaacggcccacccgcttctacaactgcgcctacacagctcgtgctgcagtcagtgcctgcagcgagcacctttaaggacactttcaccctgcaggcctcattcccattaaatgcgtccttccaggacagccaggttgcggctcctggagccccactgattttgtcgggcctgccacagctcttggcaggtgccaatcgtcccactaaccctgcaccgcctaccgtgaccggcgcagggcctgctggaccaagtagccagccacccggtactgtgattgccgctttcatccggacatccggtactacagcagctccacgcgtaaaagaaggtccgcttcgaagcagttcttacgttcagggcatggtgacgggagctcccatggaaggacttttggttccagaggaaacgttgagagagttgctccgagatcaagcacatctgcagccactacccacacaggttgtaagccggggaagccacaatccctctttgctcggaaatcagaccctgagtcccccaagcagaccaaccgtcgggctaacacccgtggctgaattggaactgtccagcgggtcagggtcattactcatggcggagccctccgtaaccacttctggcagtctgctgacaaggtccccaacccccgctcctttctcgccatttaatccaacgtctctgatcaagatggaaccccatgatatatag

SEQ ID NO: 221624 - DNA, 1992 bp, synthetic construct
  misc_feature 1..1992: note = Description of Artificial Sequence: Synthetic coding sequence
  source 1..1992: mol_type = other DNA
atggcaatcactctgcaacccagcgaccttattttcgagtttgcttcaaacgggatggacgacgacatccatcaacttgaagatccttcagtttttcctgctgtcatagtggagcaggtgccatatcccgatctgttgcatctgtattcagggttggagctagacgatgtccataatggcattatcactgatggtaccctgtgcatgacccaagaccaaattctggaaggaagtttcctgctgactgacgacaacgaagctacaagccacacgatgtcaacagccgaggtgcttcttaatatggagtccccctcggacatactggatgaaaagcaaatttttagcaccagtgagatgctgcctgatagtgatcctgcacctgcggtcaccctgccaaattacttgtttcctgcctcagaacctgatgccctcaatcgggctggggacacgtctgaccaggaaggccactccttggaggaaaaagcaagcagagaagagtccgccaagaaaacaggaaagagtaaaaaacgtattcgcaagaccaagggcaacagatccacatcacctgtcacagatccttcaatccccatacggaagaagtctaaggatggtaagggatctacaatttacctctgggagtttttgctggcccttctgcaggatcgtaacacgtgtccgaaatacataaaatggacccagagagagaaggggatctttaagcttgtggactctaaagccgtctccaagctatggggcaagcaaaagaataaaccagacatgaattatgaaaccatggggagggccttgcgctattactaccagaggggaatcttggccaaagttgaggggcaacgactggtgtatcaatttaaggagatgccgaaggatttggtcgttatcgaggatgaagatgaaagttcagaagccaccgcggctccacctcaagcatccaccgcatctgtcgcctctgcttccacaacccgcaggacctctagccgggtgagtagtaggtccgcccctcagggaaaaggctcctcaagttgggaaaagccaaaaatacagcacgtggggcttcaacccagcgcctcactggagctgggcccaagtctcgatgaagaaattccaaccacatctaccatgctggtgagcccagcagagggacaagtcaagctaaccaaggcagtctccgccagctctgtgccttctaacatccatcttggagtagcgcctgtcggatctgggagcgccttgaccctacagactattcccctgaccactgtactaacgaacgggcctccagcctctacaaccgcaccaacacaattggtgctacagtcagtgccagctgctagcacttttaaggataccttcactctgcaggctagcttccctctcaacgcctcattccaagactctcaggtcgccgctcccggagctccactgattctgtcagggctcccccagctactggcaggtgccaaccgtcctaccaaccccgctcctcccaccgtcacaggagccggacccgctgggccatcatcacagccccctggcacagtcatcgccgcattcatcaggacttccgggactacagctgctcctcgggtaaaggagggcccactgcgcagcagtagctatgtccagggaatggtaaccggagcacccatggagggcctgctcgtgcctgaggaaacgttgcgcgagctgctaagagatcaggcccatttgcagccactgccaacccaggtggtgagcaggggaagccataacccgtccctgctgggcaaccagaccttgtcacccccaagtcggcctactgtgggactaacaccggtggcggagctggaactctccagtggatccgggtcactgctgatggcagaacctagtgtgaccacctcagggagcctgctgacacggagtccgactccagccccttttagtcccttcaatcccacgagcctgataaaaatggagccacatgatatctag

SEQ ID NO: 221625 - DNA, 234 bp, synthetic construct
  misc_feature 1..234: note = Description of Artificial Sequence: Synthetic coding sequence
  source 1..234: mol_type = other DNA
atggacgatgatattcatcagctggaagaccccagcgtcttcccagccgtcattgttgaacaagtcccctaccctgaccttctacatctgtactcaggtctggaattagacgacgtgcataacggcattattaccgacggaaccctgtgcatgacacaggaccagattctagagggcagtttcctcctgacggacgacaacgaagccacttctcacacaatgagtacggcatag

SEQ ID NO: 221626 - DNA, 768 bp, synthetic construct
  misc_feature 1..768: note = Description of Artificial Sequence: Synthetic coding sequence
  source 1..768: mol_type = other DNA
atgctcgacagcgtcacccacagtacattcttacctaacgcgagcttctgtgatcccttaatgtcttggaccgaccttttttcgaacgaagagtactaccccgctttcgagcatcagacggcatgtgacagctactggacaagcgtgcatcctgagtattggacaaaacgacatgtgtgggagtggctacagttttgttgcgaccagtataagctcgatacgaactgtattagcttctgtaatttcaacatttcaggactccagctgtgctcgatgacgcaggaagaatttgtggaggccgcaggcctctgtggcgagtatctctatttcatactccagaatatccgcacccaaggttacagtttttttaatgacgcggaggagtccaaggcaacgatcaaggactatgccgactccaactgtttaaagacgtcaggtataaagagccaggactgtcattcacactcccgcacgtctctccagtcctcgcacctctgggagttcgtacgtgaccttttattatcccctgaagaaaattgtggcattctggaatgggaggatcgggagcagggtattttccgcgtcgtgaaatcagaggccctggccaaaatgtgggggcaacgcaaaaagaatgatcgcatgacttatgagaagttatcgcgcgcactgagatattactacaaaactggcatcttggaacgcgttgaccgacgcctagtgtacaagttcggtaagaatgcccacggatggcaagaagataagctctag

SEQ ID NO: 221627 - DNA, 798 bp, synthetic construct
  misc_feature 1..798: note = Description of Artificial Sequence: Synthetic coding sequence
  source 1..798: mol_type = other DNA
atgccctcgctcccacatagccaccgagtgatgctcgatagcgtgacacactcaacttttctgccgaatgcttctttctgcgatccattaatgagctggaccgacctcttctcaaacgaggagtattacccagcttttgagcaccagacagcctgtgacagctactggacttccgtgcacccagagtactggactaagaggcacgtgtgggagtggctacagttctgctgtgatcagtataaactagatactaactgtatttccttttgtaactttaacatatcaggtctgcaactgtgttctatgactcaagaagagtttgttgaggctgccggtttgtgtggggaatacctgtactttattctacaaaacatccgcacccagggctacagcttctttaacgatgctgaagagagtaaagctaccatcaaagactacgccgactccaattgcttgaagacctctggcattaagtcacaggattgtcatagccactccaggacctctttgcagtcctcccacttatgggagttcgtgcgcgatctgttgctcagtcctgaagaaaactgcgggatcctggaatgggaagatagagaacaagggattttccgggttgtcaaatccgaagctcttgccaagatgtgggggcagcgcaagaagaatgatagaatgacttatgagaaactgtctcgggctctgcgttactactataagaccggcatcctagaaagggtggacagacgcctggtgtacaaattcggtaaaaatgcgcacggctggcaggaagataaattatag

SEQ ID NO: 221628 - DNA, 483 bp, synthetic construct
  misc_feature 1..483: note = Description of Artificial Sequence: Synthetic coding sequence
  source 1..483: mol_type = other DNA
atgttagacagcgtcacccactctaccttcctgcctaacgcgtcattctgcgatcctttgatgtcatggaccgatttgttctccaacgaagaatattatcctgcattcgagcaccagacagacgcagattcaaattgcttgaagacgtctggcatcaaatctcaggactgccatagtcacagccgaaccagtctccaaagctcgcatctgtgggagtttgtgcgagacttgcttctaagcccagaggaaaactgcgggatcctggagtgggaagatcgggaacaaggaattttccgggtagtcaaatctgaagctctggcgaagatgtggggccagcgcaaaaagaacgacagaatgacttatgaaaaacttagcagagcattgcgctactactataaaactggcattttggaaagggtggatcggcgactcgtttataagttcgggaaaaatgctcacggctggcaggaagacaaactgtag

SEQ ID NO: 221629 - DNA, 1728 bp, synthetic construct
  misc_feature 1..1728: note = Description of Artificial Sequence: Synthetic coding sequence
  source 1..1728: mol_type = other DNA
atgttcgggattcaggataccctgggtcgcggaccaactctcaaagagaagagcctgggagccgagatggattcagttcgtagctgggtcaggaacgtgggtgtcgttgatgccaatgtggccgcacaatcaggggtcgctctcagcagggcacattttgaaaagcagccaccgagcaacctacgtaaatctaattttttccactttgttttggccttatacgatcgccaaggacagcctgtggaaattgaaagaactgcgtttgtagacttcgtggaaaacgataaagaacagggcaacgaaaagactaataacggaactcattacaaactgcagctcctctatagcaacggtgtgaggaccgaacaggacctgtacgtacgcctgatcgattccgtgacgaaacagcccatcgcctacgagggacagaataagaatcctgagatgtgcagggtgctgctgacacacgaagtgatgtgctctcgctgctgcgaaaaaaaaagctgcggaaaccggaacgagacacctagcgacccagtcattatcgacaggttcttccttaagtttttcctgaagtgcaaccaaaattgcctgaagacggctggtaaccctcgggatatgagacgattccaggttgtactgtccacaaccgtcaacgtggatgggcacgttttagctgtgtctgacaatatgttcgttcacaataactccaagcatgggagacgcgctagaagactggatccatcagaggccacaccctgcattaaggccataagtcccagcgagggctggacgacaggcggagcaatggtcataattatcggagataacttttttgacggccttcaagtggtatttggcactatgctggtgtggtcggagctgattactccccatgcaatccgcgttcagacccccccaaggcatataccgggagtcgtcgaggtgacactgtcctataaatctaaacagttttgcaagggagctcccggaagattcatctacacagccctcaatgagcctactatcgactatggtttccaacggctgcagaaagttatccccaggcacccgggagatcctgaacgcctggcaaaggagatgctcctgaagagagcagccgacctcgtcgaggccctatacggtaccccacacaataatcaggatatcatcctgaagcgagccgctgacatcgcagaggcgctgtattcagtcccccgtaacccttcccagcttccagcattgtcctccagtcctgcgcattctgggatgatgggaatcaacagctacggtagccagctgggggtcagcataagcgagtcgacccaaggtaacaatcagggctatatcagaaatacatccagtatctcaccgagaggctattcttccagctcaaccccacagcagtctaactattccacctctagcaactccatgaatggatattctaacgtgccaatggctaacctcggagtgccaggctcaccagggttcctgaacggttcccccacaggcagcccttacggcatcatgtcatcatccccaaccgtgggaagtagctccacaagcagcatcctgccgttcagcagttctgtttttcctgctgtcaagcaaaaatcagcatttgcaccagttatcaggcctcagggctccccatctcctgcatgttcctcgggaaacggcaatgggttcagagcaatgacgggacttgtggtgccccctatgtag

SEQ ID NO: 221630 - DNA, 795 bp, synthetic construct
  misc_feature 1..795: note = Description of Artificial Sequence: Synthetic coding sequence
  source 1..795: mol_type = other DNA
atggttataatcatcggagataacttcttcgacgggcttcaggtggtgttcggaactatgctggtgtggtctgaacttatcacccctcacgccatccgtgtgcagacgccccctagacatattcctggagtcgtggaggtgactctgagctacaagagcaaacaattttgtaagggggctccaggtagattcatctacacagctttgaacgaacccacaatagactatggattccagcggctgcagaaggtaatcccaaggcacccgggagatccagagcgtctggctaaggagatgcttctgaaacgcgctgctgacctcgtggaagccctctacggcacaccccacaacaaccaggatatcatcctaaaacgcgcagccgacattgctgaggccctgtattctgtcccacgaaaccctagccagctcccagccttgagcagcagccccgctcattctggaatgatggggatcaatagctacgggagtcagctgggcgtttctatctcagagagtacacagggaaacaatcaaggctacattaggaatacctcttcaatcagccctaggggttattcctcaagtagtacacctcagcagagcaactattccacgtcctccaatagcatgaacggctactcgaacgtccccatggccaatctcggagtgcctggtagtccaggatttctgaacggaagccctaccggctcgccttacggtaccggcttgtggcttacatggcttctgaaggccttttggggcaagaagagaatcgagaccatcccatttctttag

SEQ ID NO: 221631 - DNA, 1791 bp, synthetic construct
  misc_feature 1..1791: note = Description of Artificial Sequence: Synthetic coding sequence
  source 1..1791: mol_type = other DNA
atgtttggcatccaggaaaatattcccagggggggtacaaccatgaaagaagagccgctcggaagtggtatgaaccccgtgaggtcatggatgcacaccgccggagtcgttgatgctaataccgcagctcagtcaggcgtggggctggcccgagcacacttcgagaaacagccgcctagtaatctccgaaagtcaaatttctttcactttgtgctggccctgtacgataggcagggccagcccgtggagattgagaggaccgccttcgtggactttgtggagaaagaaaaggagcccaataatgagaaaaccaataatggaattcactataaactccaactgttgtactcgaatggcgtaagaacggaacaggatctctatgtgcggctgatcgactccatgacgaaacaggctatcgtttatgaaggacaggacaagaatccagaaatgtgccgagtgctgctaactcatgaaattatgtgttccaggtgctgcgacaaaaagtcttgtggaaacagaaatgagaccccaagcgaccccgtcatcatagataggttctttctgaaattcttcctaaagtgcaatcaaaactgtttaaagaacgccggaaatcccagagatatgaggcgcttccaggtagtggtgagcacgaccgtgaacgtcgacggacatgtgttggctgttagcgataacatgtttgtgcacaacaactctaagcacgggagacgcgcacggagactggatccttccgaaggcaccgccccttcttacctggaaaatgctaccccctgcatcaaagcaatttcaccgagcgaaggctggactaccggaggcgcaacagtcatcatcataggggacaacttcttcgatgggctgcaggtggtgttcggtactatgttggtctggtctgagctgattacaccccatgcaatccgggtccagacaccccctcggcacattcccggagtagtggaggttactctgtcctacaagtctaaacagttctgcaaaggagccccaggtcggtttgtgtacaccgccctgaacgaacctacaatcgactacggatttcaaagactccagaaggttattccacggcatccaggcgacccggagcggttacccaaagaagtgttgcttaaaagggccgcagacctagtcgaagcactgtatggaatgccacacaacaaccaggaaataatcttaaaacgagcagccgatatcgcagaggctctgtactctgtcccaaggaaccacaatcagattcctaccttgggtaataacccagcccatactgggatgatgggtgtgaactcttttagcagccaactggcagtcaatgtatctgaaacatcccaggccaatgaccaggtggggtattcgcgaaacacttcttcagtgtcacctcggggatatgtcccttcttcaacaccccagcaatccaactacaacacggtgagcacctccatgaatgggtatggttccggagcaatggcctccctaggtgtccccggtagcccaggcttcctgaatgggagcagtgccaattccccttatgggattgttcctagttctcccaccatggcagcgagctccgtcacacttccttcaaattgcagttccacacacggtattttttctttctcgcctgctaacgtgattagtgccgttaagcagaaaagcgccttcgcacctgtcgtgaggccgcaggcctccccccctcccagctgcacgtcagccaatggcaacggccttcaagccatgtctggtctcgtagtgcccccaatgtag

SEQ ID NO: 221632 - DNA, 1656 bp, synthetic construct
  misc_feature 1..1656: note = Description of Artificial Sequence: Synthetic coding sequence
  source 1..1656: mol_type = other DNA
atgtttggaattcaggagaatatccccagagggggtacaactatgaaagaggagcctctcggaagcgggatgaaccctgtgagatcgtggatgcatacggccggagtggtcgacgccaacacagcagctcaatccggagttggccttgctagagcccacttcgaaaaacagccaccatccaaccttagaaagtcaaatttcttccactttgttctcgcactctatgatcgacagggtcagccggttgaaattgaacgtaccgctttcgtggattttgtagaaaaagagaaggagccaaacaatgagaagacaaataacggtattcattacaaactgcaactcttgtactccaatggtgtgcgcacagaacaagacctctacgtcagactgatcgacagcatgactaagcaagctattgtatacgaaggacaagataagaatcctgaaatgtgtcgcgtattactcacccacgaaatcatgtgttcgaggtgctgtgacaagaagtcttgcggaaaccggaacgagacacccagcgaccccgtcattattgatagatttttcctcaagttcttcctcaagtgcaaccagaactgtctgaaaaatgctggcaatccaagagacatgcggagatttcaggtcgtcgtcagcacgactgtgaatgtcgacggacacgttctagcagtctctgataacatgttcgtgcataataattcgaagcatggtaggcgcgctagacgcctggaccctagcgaggcaaccccctgtattaaggctatatctccgagcgaggggtggaccacaggaggtgctacagtgattataattggcgataatttcttcgacggacttcaggtcgtgttcggaaccatgcttgtgtggtcagaacttatcacccctcatgccattcgcgtacaaactcccccacggcatattccaggtgttgtggaagttactctttcttacaaaagtaagcagttttgcaaaggcgctcccggtcggtttgtgtacacagccttgaatgaaccaactatcgactatggctttcaaaggctgcaaaaggtgatccctcgacatccgggagacccagagcggctcccaaaagaggtcctgctcaagagggccgctgacctcgtggaagccctgtacggtatgcctcataataaccaggaaataatattgaaaagagcagcggatattgctgaagcactgtatagtgtgcctcggaatcataaccagatacccactttgggcaacaaccccgcacacacaggcatgatgggcgttaattccttttcttcacagctggcagtgaacgtctccgagacgtctcaggctaacgaccaagttggctacagcaggaacacttctagcgtgagtcctagaggatatgtgccctcaagcacgccccaacaaagtaattataatactgtgagcacttctatgaatggctatggaagcggagccatggccagcctcggtgtgccagggagcccaggctttctcaatggcagttcagcaaattctccatatggcatgaaacaaaaaagcgcctttgccccagttgtgaggccacaggcttctcctccgccaagttgtacatctgccaatgggaacgggctgcaggccatgtcggggctcgtggtgcccccaatgtag

SEQ ID NO: 221633 - DNA, 576 bp, synthetic construct
  misc_feature 1..576: note = Description of Artificial Sequence: Synthetic coding sequence
  source 1..576: mol_type = other DNA
tagttttcctcacagttagctgtcaatgtgtcagaaacatcacaagctaacgaccaagtgggctactcaaggaacacatcatccgtgagcccccgtggctacgtcccgtctagcactccccaacaatccaactacaatactgtatctacctctatgaatggttacggcagtggggcaatggcctcactgggagtgcccggatcaccgggatttctaaatggcagcagcgcaaactctccttacgggatcgtaccctcttccccaacaatggcggcttcgagtgtcactttaccctctaactgcagttcaacacacggtatcttctccttttcacccgcaaacgtcatcagcgcagtcaaacaaaagtcagcatttgcacctgtggtacggccacaggctagcccccctccatcctgcacatccgccaatggaaacggcctgcaagggtccctgctaggggcagaagacgtggccgctgagaagaccaattggcctttttgcgaggtaggtggaatttttcatttcgacgagctgatgctgaaaaagggcactggcaagttatgcctggggtggtag

SEQ ID NO: 221634 - DNA, 1809 bp, synthetic construct
  misc_feature 1..1809: note = Description of Artificial Sequence: Synthetic coding sequence
  source 1..1809: mol_type = other DNA
atgttcccagcgcaagatgctctacccaggtctgggctgaatttaaaggaggaacccctgttgcctgccggattgggctccgtgagatcttggatgcaaggagccggaatcttggacgcttctactgccgcacagtctggagtaggactggccagagctcatttcgagaagcagcccccttcaaatctgcggaagtccaatttcttccacttcgtgcttgccatgtacgacaggcagggccagcccgtggaggtcgaacggactgcctttattgacttcgtggaaaaagaccgcgaacccggagccgaaaagacaaacaacggaatccactatcgccttcgactagtgtacaataatgggctgcggacagaacaggacctatatgtccggcttatagattcaatgtctaagcaggccatcatctacgagggacaggacaaaaacccagaaatgtgccgcgtactgctcacccacgagatcatgtgtagccgctgctgcgaccgcaaaagctgcggcaataggaacgagacgccatcagatcctgtgatcattgacagattcttcctaaaatttttccttaaatgtaatcagaattgtctgaaaaatgccggtaatcccagggacatgcgtcggttccaagtggtcgtctctaccacggttagcgtcgatggacacgtgctggctgtgagcgacaacatgttcgttcataataactccaagcacggaaggagggcacggaggctcgaccccagtgaggcagcgacaccttgtatcaaggcgatttcccccggagagggctggaccacgggaggcgcaaccgtgattgtaattggtgataatttttttgatggccttcaggtcgtgttcggaaacgtgctggtctggtctgaacttataaccccacatgctatcagggtgcaaacgccacctcggcacatccctggggttgttgaagtcactctttcttacaagtctaaacagttctgtaagggctgtccaggaaggttcgtgtatacagcactcaatgagccaaccatcgattatgggtttcagcggctgcaaaaagtaattccgcgacacccaggcgatcccgaacgactgcctaaagaggtgctgctaaagagggctgccgacttagccgaggccctgtacggtgtgccgggttccaaccaggagctgcttctgaaacgagccgctgatgtagcagaagccctgtacagcactcccagagctcctgggcctcttgcccctctggcgccaagtcacccgcacccggcagttgtcggcatcaacgccttctcgtcaccgcttgcaatcgcggtgggcgatgccactcccggtcctgaacctggatacgccaggtcctgttcaagtgcctctcctagggggtttgcacctagtccagggagccagcagtcaggatatgggggaggactgggagctggccttggcggatatggtgcacctggagtggccggattaggcgtgccagggtcccccagctttctaaatggaagcaccgccacaagcccctttgctattatgccatcctcacctccgctggctgctgcctcctcgatgtctctgcccgcagccgctcccaccacctcagtgttctccttctcgccagtgaacatgattagcgccgttaaacaacggtcagcgtttgcccctgtgctgaggccgccaagcagccccccacaggcatgccccagagcccatggagagggcctcccggaccaaagttttgaagattcagacaaattccattcaccagcccgtggcctgcaaggtttggcatattcctag

SEQ ID NO: 221635 - DNA, 1797 bp, synthetic construct
  misc_feature 1..1797: note = Description of Artificial Sequence: Synthetic coding sequence
  source 1..1797: mol_type = other DNA
atggacgccttaccccgaagtggactgaacctgaaagaggagcctcttctgcctgccggactaggctccgtacgaagctggatgcagggtgctggcattctggatgcttccacagctgcgcaatcgggcgtgggactggcaagagcccacttcgagaaacagccgccatccaatctgcggaaatcaaatttttttcatttcgtactcgcaatgtacgatcgccaaggccagcccgtcgaggtcgaaaggaccgctttcatagacttcgtggaaaaagatagagagcccggagccgaaaagacaaacaacgggattcattataggctgcgcctcgtgtacaataacggactcaggactgaacaagacttgtatgttcgcctcatagactcgatgtctaagcaagcaattatatacgaaggtcaagataaaaaccccgagatgtgtagagtgctgttgactcatgaaatcatgtgcagcaggtgctgcgaccgaaagtcatgcggcaaccggaatgaaacaccctccgaccctgtgataattgataggttcttcctgaagttctttctcaaatgcaaccagaattgcctgaaaaatgcaggcaatcccagagatatgaggcgcttccaggtggtggttagtaccacagtgagtgtggatggccacgttctcgctgtctccgacaacatgtttgtccataataattccaagcatgggagacgagcacgcagactagatccatcggaggccgctaccccgtgcatcaaggcaattagtcccggagaaggttggaccactggcggtgcgactgtcatcgtgatcggggataatttttttgacggcctccaagtggtgttcggcaacgtattggtttggtcagaactcattaccccacacgctattcgtgtgcagaccccccctcggcatatccccggagtagtggaggtcacactctcttacaagagtaagcagttctgtaaaggctgtcctggccgtttcgtttacaccgcgcttaatgagcccactattgattatggcttccagaggcttcagaaggtcattcctcgccaccccggtgatccagaacgactgcctaaggaagttcttttgaaaagagcagccgatctggccgaagcactgtatggagtgcccggaagtaatcaagaacttctgctgaagcgcgctgcggacgtggccgaagctctgtactctactccgagggcccctggacccctggctccactggccccatcccacccacatcctgcagtagtcgggatcaacgcgttctcatcccccctagcgatagccgtaggggatgcgactcctggcccagagcctgggtatgccagatcctgctccagtgcctcaccaagaggtttcgccccttcccctggttcccaacagtcaggttacggcggagggctgggggctgggcttggaggctacggagccccaggcgtggccggactgggggttccaggctcaccctctttcctgaacggtagcactgcaacaagcccttttgccatcatgccttcctctccacctttggcggctgcctcctcaatgtcgttgccagcagccgctccaacgacgagcgtcttttctttttccccggtgaacatgataagcgcagtcaaacagaggtccgcattcgccccagtgctgcgccctcccagctcacctccccaggcgtgtccaagggcacatggagagggtctccccgatcagtccttcgaagatagtgacaaatttcattcaccagcccgtggtctgcaagggctcgcctacagctag

SEQ ID NO: 221636 - DNA, 555 bp, synthetic construct
  misc_feature 1..555: note = Description of Artificial Sequence: Synthetic coding sequence
  source 1..555: mol_type = other DNA
agggggtcagtgcagcaccctccagttgtcggtattaatgctttttcttccccacttgcaatagctgttggcgacgcaactccgggtccagagcccggatacgcacggtcttgcagttccgcatctcccaggggctttgcaccttcaccaggatcccaacagtccggatatggcggaggccttggagctggcctggggggatacggtgcgcctggcgtggctgggttaggggtcccgggatccccctcatttctgaatggatcaacagccactagtccctttgccattatgccctcttcacccccactcgcagccgcttcatccatgtccctgcccgctgctgccccaaccacttctgtgttctctttcagcccggtgaacatgatctcagctgttaagcagcgcagtgcattcgccccagtcctgaggcccccttcctcccctcctcaggcctgtccccgtgctcatggagagggactgcccgaccaatcgttcgaagactccgataaatttcactctccagcaaggggtctccaggggttggcatattcgtag

SEQ ID NO: 221637 - DNA, 1632 bp, synthetic construct
  misc_feature 1..1632: note = Description of Artificial Sequence: Synthetic coding sequence
  source 1..1632: mol_type = other DNA
atggcagccgctaaagccgagatgcagcttatgtccccccttcagatctctgatccattcggatctttcccccactccccaacaatggacaattacccaaagctcgaggaaatgatgctgctgagtaatggcgctccccagtttctgggcgcagcgggtgccccagagggtagcggaagtaactcaagttccagttcttctggcggaggcggaggaggaggcggagggagtaatagtagttcctcttcgagcacatttaaccctcaggcagacaccggagaacagccttacgaacatctgactgcagagagttttcctgacatctccctgaacaatgagaaggtgctagttgagacgtcctacccctcccagacaacgaggctcccccctatcacctataccggaaggttctcgcttgagccggcacctaactcgggtaacactctgtggcctgaacccttattctcactggtttctggacttgtaagcatgacgaaccccccagcaagcagtagttccgctccctccccagcagcctcatcggcatccgcatctcagtcccctcctctcagctgcgcagttccctcgaatgatagcagccctatttatagcgcagccccaacgttcccaacacccaacacagatatctttcctgaaccccagagtcaggcatttcctgggagcgccggtaccgcattgcagtacccgccacctgcttaccccgctgctaagggaggcttccaggttcctatgatccccgattatctttttcctcagcagcagggggatctggggctgggcacgccggatcagaagccgttccagggtctggaatcaagaacccagcagcccagcctaacaccattatcgaccatcaaggcctttgcaacccaatctggttcccaagacctcaaagccctgaatacctcttatcagtcccagctgattaagccatcccggatgcgtaagtaccccaatcgcccatccaaaacgccgcctcacgaaagaccttacgcctgtcccgtcgagtcatgtgatcgtaggttttcccgatccgatgaactgaccagacatatccgaattcacacaggccagaaaccctttcagtgccgcatttgtatgcgaaacttctctaggtccgatcacctgacaacacacatacgcacacacaccggggaaaaaccattcgcatgtgatatttgtggcagaaaatttgcaagatccgacgagcgcaagcgccacaccaagatccatctgcgtcaaaaggacaagaaggctgacaaaagcgtggttgcctcaagcgccacctccagcctgtcctcatacccctcccctgtggcaaccagctacccatcacccgtgacaacttcctatccaagccccgctactacaagctaccccagccccgttcctacttcgttttcatccccaggctccagcacatatcccagccctgtccatagtggcttcccaagcccctcggtcgctaccacgtattcttctgtgcccccagctttccccgcacaggtgagcagctttccttcctcagccgtcactaattccttttcagcctccactggtttaagtgatatgactgctacatttagcccaaggacaatcgagatctgctag

SEQ ID NO: 221638 - DNA, 603 bp, synthetic construct
  misc_feature 1..603: note = Description of Artificial Sequence: Synthetic coding sequence
  source 1..603: mol_type = other DNA
atggctgccgcaaaggccgagatgcagttgatgtctcctctgcaaatctcagatcccttcggctcttttcctcattcccccactatggacaattaccccaagctcgaagaaatgatgctgctgtccaatggagcgcctcagttcctgggagctgcaggcgctcccgaaggctcaggctccaattcttcttctagctcgtctggcggtgggggtgggggaggaggcggatccaacagttcctccagctcctcaacgtttaatcctcaggctgacaccggcgaacagccctacgagcacctcaccgccgaatcctttccagacatctcactgaataacgagaaagttctggtggagactagttatccgtctcagactacaaggctgcctccaatcacctacactgggagattttcgctggaaccagcacctaattccgggttcccttctccatctgtcgctaccacttattcctctgtgccaccagcctttcccgctcaggtttctagcttcccctcatctgccgtgaccaactccttcagcgccagcaccgggctctccgatatgaccgctacattttcccctaggacgattgaaatatgttag

SEQ ID NO: 221639 - DNA, 699 bp, synthetic construct
  misc_feature 1..699: note = Description of Artificial Sequence: Synthetic coding sequence
  source 1..699: mol_type = other DNA
atggcagcggcaaaagcggagatgcagttaatgtctccactccagattagcgacccattcggatcatttcctcacagtcctacaatggacaactacccgaaactcgaggaaatgatgcttctgtcgaatggggcaccacagtttctgggggcagccggagcccctgaggggtcaggcagtaacagctcctcttcaagttccggcggtggtggaggagggggtggaggcagcaactcatcctcgagtagcagcaccttcaatcctcaggctgatacaggagaacaaccatatgagcatctgaccgccgaaagcttccccgatatttctctgaacaacgagaaagtcctcgtcgaaacgtcgtatccgtctcagaccactaggctccctccgattacgtatacaggtcggttctccctggaaccagctccgaattctggaaacactctgtggcccgaacctctgtttagccttgtgagtggactagtatcaatgacaaatcctccagccagctcctctagcgccccatctcctgccgcttcatccgcttctgcttcccagagccccccactcagctgcgcagtccccagcaacgacagctcccccatttatagcgcagcccctacttttcctacacccaataccgatatcttccccgaaacagccatgagcaagttctttacaagtatccaaaggacatag

SEQ ID NO: 221640 - DNA, 1431 bp, synthetic construct
  misc_feature 1..1431: note = Description of Artificial Sequence: Synthetic coding sequence
  source 1..1431: mol_type = other DNA
atgatgacagccaaagctgtggacaaaatccccgtcacactgagtgggtttgtacaccagcttagcgacaacatttacccggtggaggatctggcagcaacctccgtcacgatcttccctaacgctgaattgggtggtccatttgatcaaatgaatggggtggctggcgacggtatgatcaacattgacatgaccggggaaaagagaagtttggatcttccatatcccagcagcttcgcgcctgtgtccgcacctcgcaaccaaaccttcacgtatatggggaagttttccattgaccctcagtatccaggcgctagttgctacccggaaggaatcattaacatcgtgagcgcagggatattgcaaggggttaccagcccagcctccaccacagcctccagcagcgtgacatctgccagcccaaaccccctggccactgggcctctgggcgtctgtaccatgtctcagactcaacctgatctcgatcacttgtacagccccccaccgcctccaccaccctattcaggatgtgccggtgatctgtatcaagatccctcagccttcctgagtgccgcaactacttcaactagctcatccctggcataccctccgccacccagctacccatccccaaaacccgctaccgatcctggactgttccccatgattccggactaccctggtttcttccctagtcagtgccagagggacctacacggcacagccggaccagatcgtaagcctttcccgtgtcccctggatacccttagagtaccccctccattgaccccactatccaccatccgcaactttaccttgggtgggcctagcgccggtgtgacagggccaggagctagtggagggtccgagggccctcggctgcctgggtcctcttcagctgctgcagctgctgccgcagccgctgcctataatccccatcatttacctcttcggccaattcttcgaccgcgaaaatatccaaatcgcccttctaagacgcctgtacatgagaggccttacccttgtcctgctgaaggctgtgaccgacgattcagtaggagcgacgagctgacccgccacattcggatccacacgggccataagcctttccagtgcagaatttgcatgcggaacttttcgaggagtgatcatttaacaacacatattcgcacacacaccggcgagaaaccgtttgcttgcgattactgtggacggaaattcgcccgatcagacgagaggaagcgtcatacgaaaattcacttaaggcagaaggaacgcaagtcctcggcaccttcggctagcgtgcctgccccatctaccgccagttgctccgggggagtacagccagggggtactttatgttctagtaatagttcctctctgggagggggacccctggctccctgttctagccgcacccgtacgccgtag

SEQ ID NO: 221641 - DNA, 1281 bp, synthetic construct
  misc_feature 1..1281: note = Description of Artificial Sequence: Synthetic coding sequence
  source 1..1281: mol_type = other DNA
atgaacggtgtcgctggagacgggatgatcaacattgacatgacaggggagaaaaggtcgctagacctgccttacccatctagcttcgcccctgtatccgcacccaggaaccagaccttcacttacatgggtaaattctctatagatccacagtatcctggcgcatcttgctatcccgagggaatcattaacatcgtctccgcaggaatcttgcagggcgtgacatcacctgcctccacaacagcttctagtagcgttacgtcagcaagcccaaaccccctggctactggccctctcggcgtctgcactatgagccagacccagcccgatctggatcacctgtacagcccccctccccctcccccaccgtacagcggatgcgccggagatttgtatcaggacccttctgcttttctatcagctgctaccacaagcacgtccagtagcttagcataccctcctcctcctagttacccgagcccgaagcccgctaccgatcccggactatttcctatgatacccgactaccctggtttttttccaagccagtgccaaagagaccttcacggaactgccggaccagataggaagccgtttccctgtcctcttgataccctacgtgtaccgcctccgctcaccccactgtctacgattcgcaactttacccttggaggacccagcgctggggtgactggccctggggcatccgggggttccgagggacctcgtttacctggatcttcatccgcggcagccgcagcggcagctgccgctgcctataaccctcatcacctcccgctgcgtccgatcctgcggcctaggaagtaccccaaccgcccatcaaagacccccgttcacgagaggccgtacccctgcccggcagagggctgtgaccgccgttttagcaggagtgacgagctcacaaggcacattcggatccacacaggtcacaagcctttccagtgtaggatttgtatgagaaacttctcgcggagcgaccacttaacaacccacatccggactcacaccggtgaaaaaccatttgcatgtgattactgcggaaggaaatttgctcgcagcgatgagaggaaacgccacacaaaaattcatcttcgtcagaaggagcggaaatcatctgcccctagtgctagcgtgcctgcaccctcaacagcttcttgtagcggaggtgttcagcccggaggaacactgtgcagcagcaattcctcgagcctgggtggagggcctttggcgccatgctcatctaggaccagaacaccttag

SEQ ID NO: 221642 - DNA, 786 bp, synthetic construct
  misc_feature 1..786: note = Description of Artificial Sequence: Synthetic coding sequence
  source 1..786: mol_type = other DNA
atgagagtgggactgccctcagaagcctcatcctgcccctggagcgccaggggacccagagatcctcctgagcgcagacggtcgggactcgcccacgtgttatcggataatatttatccggtagaggatctagctgcaacgtccgtgacaattttcccaaacgcagaactagggggtccatttgatcaaatgaacggggtggcaggcgacgggatgatcaatattgacatgacaggagaaaaaagatccttggacctgccatacccctcctccttcgccccagtctcagcccctcgaaatcagacgtttacatatatgggtaagttctccatcgaccctcagtatcccggagcttcctgctaccctgagggcatcattaacattgtgtcagcaggtattttacagggcgtgacttccccagcgagcacaactgcatcctcttccgtgacgtccgcgtcccctaacccactagccacaggtccattaggggtgtgcacaatgagtcaaactcagcccgatctcgaccacttatatagccctccccctccaccccctccgtattcaggctgtgccggagacttgtaccaagacccctccgcctttctgtccgccgctactacaagcacgagcagcagcctggcctatccaccaccgccaagctacccaagtcccaaacctgtggaggcagccagggaccccggatgtctggttgccgcacagcagcaacagcagcctcctcccccacctcccatcacacacacaacttgtcactgcggtccattttag

SEQ ID NO: 221643 - DNA, 1431 bp, synthetic construct
  misc_feature 1..1431: note = Description of Artificial Sequence: Synthetic coding sequence
  source 1..1431: mol_type = other DNA
atgatgacggctaaagctgtcgataaaatcccggtgacactctctggatttgtgcaccagctcagtgacaacatctatccggttgaggatcttgcagcgacttccgtgaccatatttccaaatgccgagttgggagggccttttgatcagatgaatggcgtcgccggtgacgggatgattaacattgatatgacaggtgagaagaggagcctggatttgccctacccatcatctttcgccccagtatcagcacccagaaaccagacctttacttatatgggaaagtttagtatcgacccacaataccccggagcttcgtgctaccccgaggggattatcaatatagtatcagctggtattctccaaggagtgacaagtccggcatccaccacagccagctcctcagtgacaagtgcatccccaaatccacttgctaccggccctctcggagtgtgtactatgagccaaacacagcccgacttagaccacttgtacagtccacctcccccacctccaccctacagtgggtgtgcaggagacctttaccaggatcctagtgctttcctgagcgccgcaacaaccagcacatcctcaagtctggcatatccacctcctccatcataccctagtccgaaacccgcaacagacccgggtctgtttccaatgataccagattatcctggtttttttccatcacagtgccaaagggatttacatggtacggccggacctgaccgaaaacctttcccgtgcccactggatacgcttagagtccctccccctcttacccccctctccactataaggaatttcacacttggagggccatccgcaggcgtcaccggcccaggagcctccggaggcagcgaaggcccaaggctcccgggatcatctagcgccgcagcagcagcggctgctgccgctgcatacaatccgcaccatcttcctctccggcctatactccggcctcgcaagtacccaaataggcccagcaaaacccccgtacacgaaagaccttatccatgtcccgctgaaggatgcgaccgaagattctccagaagtgacgagctcacccgccatattcgtatccatacaggtcataagccatttcagtgtcggatatgcatgagaaacttctcacgaagtgatcatctgacaacacatattcgcacccataccggtgaaaaaccattcgcctgtgactactgtggcagaaagttcgcgaggagcgatgaaaggaagcgacatactaagatccacctgcgtcagaaggagcgaaagagcagcgccccttccgcctctgtgccagctccttcgaccgcctcatgtagtgggggagtgcaaccgggagggactctgtgctcatctaactcctcctcacttggcggaggtccgctcgctccttgctcttctagaactaggacgccttag

SEQ ID NO: 221644 - DNA, 1461 bp, synthetic construct
  misc_feature 1..1461: note = Description of Artificial Sequence: Synthetic coding sequence
  source 1..1461: mol_type = other DNA
atgctgcacctaagcgaattttctgagcccgacgccctgctagtcaagtcaaccgaagggtgctgcgccgagcccagcgcagaactccctagattgcccgcacgcgacgccccagccgcaaccggctacccaggcgctggggatttcctgagttgggccttgaatagctgcggagcaagtggtgacttggccgacagttgtttcctagagggtccagcccctaccccaccacctggtttgagctactcaggcagcttttttatccaggcagtcccagaacatccccatgacccagaagcgctttttaatttaatgtctggaattctgggtctggcccctttccccggaccggaagccgctgcttccagatcacccctcgatgcacctttccccgcaggatctgatgccctgttgcccggacccccagatctctatagcccggatttaggagctgcgccttttccggaggccttctgggaggcttcaccgtgtgccggtgccccttcccaatgcttgtatgagccccagttgtcacctccagatgtgaagccaggcctaagagccccacccgctagcccggctcttgacgccgtgtccgcatttaaaggaccctatgctccttgggagttgctgtccgtaggtgcccctggaaactgtgggagccagggcgattatcaagccgcacctgaggccagatttcccgtaatcgggacaaaaatcgaagatctgctctccatctcgtgccctgccgagttaccagccgtccccgctaaccgattgtatccatccggtgcatacgacgcttttcctctagccccaggggacctgggagagggggctgaagggctcccgggactgctgacaccaccctccggtgaagggggatcaagtggtgatggaggggaattccttgctagcactcagcctcaactatcgcccctgggactgagaagtgccgctgccgcagacttccctaaacctctcgtggctgatatccccggaagctctggagttgcagctcccccagttccacctccacctcccacccctttccctcaggcaaaagccaggcggaagggacgccgaggcggaaaatgctctacgagatgtttctgccctcgccctcatgcaaaggcttttgcctgcccagtggaaagctgcgtgaggtcttttgcacggagcgatgaacttaaccgccaccttcggatccacaccgggcataaacctttccagtgcaggatctgcctgcggaatttcagcagaagtgatcacctcacaacacatgtgaggacccatacaggcgaaaagcccttcgcctgcgatgtttgtgggagacgctttgccagatctgacgagaagaaacggcacagtaaagtccacttgaagcagaaagctcgtgcagaagagcggctcaaagggctggggttctactccttgggcttgtcctttgcatccctctag

SEQ ID NO: 221645 - DNA, 1770 bp, synthetic construct
  misc_feature 1..1770: note = Description of Artificial Sequence: Synthetic coding sequence
  source 1..1770: mol_type = other DNA
atggccgttgccaggggggttgggtcccctgagcccgcacccccacaactgtataagtggggcggatgtggcctaggagagcctggatctgccctagaaaggaggggagcagcagctcggggacgctgcggccgagctcgagcgcctaggctgcccgacagttttccccgaggagaatgccctaaacctggagcacgcgctccacgctcagtgcgctgtggtgagcccctgcccccagccagtcccccacccgcaagaccccaggcacagcgtgctcggcctagggctccacactcacgaaggcgagccatgcttcacctcagcgaattttccgaaccggatgcgcttttggtgaaatcaactgaagggtgctgcgcagaaccttccgcagaactccctcgcctgccagccagggatgccccagctgcaactggttatcccggtgcaggcgacttcctatcttgggctttaaacagctgcggtgccagcggagacttggcagactcttgctttctggaaggaccggcacctacaccaccacccggtctctcttacagtggatccttctttattcaggccgtcccagagcacccacacgaccccgaggctctttttaatctcatgtcgggaattcttggtctggcaccctttcccggacctgaagccgcagcgtccaggagcccgctcgacgctccttttccggctggatcggatgctttactccctggacctccagatctgtactcccccgatttgggagcggcaccattccctgaggccttctgggaagcaagtccctgtgctggggctccttcacagtgtctctatgaaccccagctcagcccacctgatgtcaaacccggactccgcgcaccaccagcgagccctgcgctcgatgctgttagcgcattcaagggcccttatgctccttgggaactgctttctgtcggcgcaccaggaaactgcggttctcaaggcgattaccaggctgctcccgaggccagattccccgtgataggcaccaagattgaagacttgctgtccatctcctgcccagctgaattgcccgcagtgccagctaatcgtctatacccctctggagcctacgacgccttccctctggcccctggcgacctgggggagggcgctgagggactgcccggactgctgacccccccatcaggcgagggcggatcctcaggtgatggcggagaatttttggcatccacgcaaccacagctttcccccctgggcctccgttctgcagccgcagcagattttcctaagccactggtggcagatatccccggaagcagtggggttgcggctccacctgtgcctcctcctcctcccactccttttcctcaggctaaggctagaaggaaaggccgtcggggtggaaagtgcagcactcgctgtttttgtccccgacctcatgctaaagcattcgcatgccccgtggagagttgtgtgaggtccttcgcaaggtcagatgaactgaaccgacatctccgcatccatacagggcataagcccttccagtgcaggatttgtcttagaaatttttcaaggtccgatcacctcaccactcatgttcggacacacacaggtgagaagccctttgcgtgcgacgtctgcgggcgtcgattcgctcgctctgatgagaaaaaacgccacagcaaagtgcacctgaagcagaaggcccgtgcggaggaaagactgaaaggactcggcttttactccctgggactctcctttgcctccctctag

SEQ ID NO: 221646 - DNA, 921 bp, synthetic construct
  misc_feature 1..921: note = Description of Artificial Sequence: Synthetic coding sequence
  source 1..921: mol_type = other DNA
atggacaccccaccactgtcagatagtgagagcgaatctgatgagtctctggtgacagaccgagaattgcaggacgccttctccagggggttgctcaagcccggattaaacgtcgtcctcgaaggcccaaaaaaggccgtcaatgatgtcaacgggttgaaacagtgcctcgctgaattcaagagagatctggagtgggtcgaaaggcttgatgtgaccctcggacctgtgcccgagatcggagggagtgaggccccagcccctcagaacaaagaccagaaggctgtcgacccagaagacgacttccagcgggagatgagtttttatcggcaggcgcaggcagccgtcctggcggtcctgccccgactacatcagttgaaagttccaactaagaggcccaccgattatttcgcagagatggcaaagagcgatctgcagatgcagaaaatacgccagaaactccagacaaaacaggccgctatggagcgatctgagaaggccaagcagttgcgggcactgaggaaatatggaaaaaaagtgcaaaccgaggtacttcagaaaagacagcaggaaaaggctcacatgatgaatgcaatcaagaagtaccaaaagggcttctcggacaagttagatttcttggagggtgatcagaaaccgctcgctcagcggaagaaggctggcgctaagggccagcagatgaggaaaggtcctagtgctaaacgccgatacaagaaccaaaagtttgggtttggagggaaaaagaaggggtcaaagtggaacaccagggaatcatacgacgatgtgtcaagctttcgcgctaagacagcccatggccgtggtctcaagcgtcctggtaaaaagggtagcaataagagacctggaaaacggacccgcgagaagatgaagaacagaacccattag

SEQ ID NO: 221647 - DNA, 1086 bp, synthetic construct
  misc_feature 1..1086: note = Description of Artificial Sequence: Synthetic coding sequence
  source 1..1086: mol_type = other DNA
atgtatccagaggctctccccgtgggcatccttagcaaccccgatacgttcaagcgcagatccggcagttactctaatgacaagcctgaggtgtggtttgcggcaggaagcggtagtccaaaccagaaactgtcatctagctgcgtcggcagggcctgtggtgaaatggacacacccccattaagtgattccgaatcagagtccgacgaatccctggttaccgatcgcgagcttcaggatgccttttcccgtgggctgcttaagccgggactcaatgtggttcttgaagggccaaaaaaggctgtgaacgacgtaaacggacttaaacagtgcctagccgagttcaagcgcgatttggaatgggtggagagactggatgtgactttggggcctgttccagagattgggggatccgaggcgccagcacctcagaataaggaccagaaagccgtggatccagaggatgactttcaaagggagatgtcattctacaggcaggcccaggcagccgtgctagcagtccttcctcgcttgcaccagctgaaggtgcctaccaagcggcctactgattattttgccgaaatggccaagtcggatctgcagatgcagaagatccggcagaaattgcagacgaagcaggccgcaatggagcgctcagagaaagcgaaacagctccgcgctcttcggaagtatgggaaaaaagtacagaccgaggtcctgcagaagagacagcaagaaaaggcacatatgatgaacgctattaagaagtaccaaaaagggttctcagataagctggattttttagagggcgaccaaaagccactggcccagcggaagaaggcaggcgcaaaaggtcagcaaatgcgaaaaggtccaagtgcgaagaggcggtacaaaaatcagaaattcggcttcggcggaaagaaaaaggggagcaagtggaacaccagggaatcgtatgacgacgtgtcttctttccgagcgaagacagcacacggacgagggctgaaacgcccaggaaaaaagggctcaaacaagagaccaggcaaaagaacgcgcgaaaagatgaagaacagaactcactag

SEQ ID NO: 221648 - DNA, 2448 bp, synthetic construct
  misc_feature 1..2448: note = Description of Artificial Sequence: Synthetic coding sequence
  source 1..2448: mol_type = other DNA
atggaggatggctttagcagctactcatccctgtacgacactagctctcttctgcagttttgcaacgatgatagcgcgtcagcagccagttcaatggaagtcactgatagaatcgcgtctctggagcaaagagtccagatgcaggaggatgatatccagctgctgaagtccgccctggcggacgtggtgaggcgcctgaatattactgaggagcagcaggccgtactgaataggaagggtcctaccaaggctcgcccactaatgcagacgttgccgctgcgaaccaccgtaaacaatgggaccgttctgcctaaaaagccaactgggtctctaccatcaccttccggtgtgaggaaggagaccgccgtacccgctacaaaatccaacatcaagagaacatcctcttcagagcgcgtctctcccggtggccgaagggaatctaacggcgattcccgcggaaatcggaataggactgggagcacgtcctcctcttcttctgggaaaaagaactctgagagcaagcctaaggaacctgtgttttcagctgaggagggctacgttaagatgttcttacggggtcgtcccgtcaccatgtacatgcctaaagaccaggtggattcttactcccttgaggccaaggtggaactccccaccaagcgactgaaactggaatgggtgtacggctaccgagggagggactgtcggaataatctttatttactccccaccggagaaacagtctatttcattgcctccgtggtggtgctctacaacgtggaagagcaacttcagcggcactacgccggtcataatgatgatgtaaagtgtctggccgttcatccagaccgaatcactattgctaccgggcaagtggcgggaactagcaaggatggaaagcagctgccaccgcatgtgcggatttgggatagcgtcacgcttaatacattacacgtgatagggataggcttcttcgaccgcgctgtgacttgtatcgcgttcagtaaatcaaatggagggacaaatctgtgtgccgttgacgactctaacgaccatgtgctgtctgtttgggactggcagaaagaagagaaacttgcggacgtgaaatgctccaacgaggccgtgttcgccgctgactttcaccccaccgatacaaatattatcgtaacgtgtggcaagagccatctgtacttctggacactggagggtagcagcctcaacaaaaaacagggactgttcgagaagcaagaaaagccaaaattcgtgctttgcgtcacatttagcgagaatggggacaccataactggcgacagcagcggcaacatcttggtgtggggcaaagggactaataggatcagttacgcagtgcagggggctcacgaagggggtatatttgccctgtgcatgctgagggacggcaccctggtgtccggaggcggaaaggaccgcaagctgatcagctggtcagggaattaccaaaaacttcggaaaaccgagatcccggagcagtttggaccgataagaacggtcgccgaggggaaaggcgatgttatccttattggcacgacacgcaatttcgttctacagggtaccctatccggagacttcacccctatcactcaggggcacaccgacgagctttgggggctcgccatccacgcttcaaaatctcagttcttgacctgcggacacgataagcacgctacactgtgggatgccgtcggccacagacccgtttgggacaagattatcgaagatcctgcgcagtcctctggctttcatccttctggaagcgttgttgcggtcggtaccctcaccggccgatggttcgtgtttgacacagagactaaagatcttgttacggtgcatactgacgggaatgagcagctgtccgtaatgagatacagcccggatggtaacttcctggccataggaagtcatgataattgtatctacatctatggagtgagcgacaatggaagaaagtatacccgcgtcggcaagtgctccggccactccagtttcattacgcacctcgattggtcagttaactctcagttcttagttagtaacagtggtgattatgagatcctgtattgggtgccatctgcctgcaagcaggttgtaagtgtggaaaccacccgtgacatcgaatgggccacctacacatgtaccttgggcttccacgtgttcggggtctggcccgagggttcagacggtaccgacatcaacgctgtctgtcgggcacacgaaaaaaaactattgagtaccggggatgactttggcaaagtgcacctcttttcttatccctgctctcagttcagggccccatctcacatctatgggggtcacagtagtcatgttacaaatgtcgattttttatgcgaggactcccatctgatttcgactggcggaaaggataccagtattatgcagtggcgcgtgatatag

SEQ ID NO: 221649 - DNA, 2505 bp, synthetic construct
  misc_feature 1..2505: note = Description of Artificial Sequence: Synthetic coding sequence
  source 1..2505: mol_type = other DNA
atggaagacggtttttcctcctatagctccttgtacgacacgagctccttactccagttttgcaacgatgatagtgctagcgccgcttcatccatggaagtcacggatcgaatagcatctctggagcagagagtgcaaatgcaggaggacgatatacagttgttaaaatccgctttagctgacgtcgtgcggcgactcaacattaccgaggaacagcaggccgttctcaacagaaaaggtcctacaaaagcccgacctttgatgcaaactcttcccctgagaaccacagtgaataacggaaccgtcctgccaaaaaagcctaccgggtcactgcctagccctagcggagtgcgtaaagagacagcagtgcctgcaaccaagaggctcaaccgatcagtgtctctccttaacgcctgcaagttgaacaggagtacaccgagcaatatcaaacgtacctcatcatcagagagggtcagccctgggggacgtcgcgaatccaatggggactccaggggaaacagaaaccggactggctccacctccagctcctcaagcgggaagaaaaatagtgagtccaaacccaaggaacctgtgttctccgccgaggaaggatacgtgaaaatgtttttgcgcggacggcctgtgaccatgtacatgccgaaggaccaagtggacagttactctctggaagctaaagtcgaattgccgactaagcgactgaagctggagtgggtgtacgggtaccggggacgggattgcaggaataacttgtaccttctgcccaccggcgagacagtgtactttatcgcatccgtggtggttctgtacaatgtggaagagcagctgcaaaggcactacgctggccacaacgacgacgtgaagtgtttggccgtacaccccgatcgcattacaatcgccacaggccaggtcgctggcacgtctaaggatgggaagcagctgcctccacacgtgagaatctgggactccgtcactctcaacaccctgcacgttatagggatcgggttttttgaccgggctgtaacttgtatcgcattctcaaaatcaaacggcggtaccaacctctgcgctgtggatgattctaatgaccacgtcctgtccgtgtgggattggcagaaggaagaaaagcttgcagatgtgaaatgctccaatgaggccgtgtttgccgctgactttcatcccacagatacaaacattatcgtgacctgcggtaagtcccacttatacttctggacactggaagggagctcgctcaataaaaaacagggactgttcgagaagcaggagaagccaaaattcgttctctgcgttaccttctcagaaaatggtgataccattacgggcgacagttccggcaacatcttagtgtggggcaagggaactaatcgaatttcctacgccgtgcagggagcacacgaagggggaatctttgcactctgcatgctgagagatggaactcttgtgagcggtggtggcaaagatcgcaagctgatcagttggagtgggaattatcaaaaactgaggaagacggaaatcccagaacagttcggcccaattaggacagtagctgaggggaagggtgacgtgatcctcatcgggaccacccgcaatttcgtccttcaaggtacgctgagcggagacttcaccccaatcacccaaggccacactgatgagctctggggcctcgcaatacacgccagtaagtcacagtttctcacctgcgggcacgacaagcacgcaaccctgtgggatgctgtcgggcaccgaccagtgtgggataagattatcgaggatccagcacagtccagcggctttcacccgagcggatcagtagtcgcagttggaacattaaccgggcgttggtttgtcttcgacactgagaccaaagacctcgtcaccgtgcacacggacggtaacgaacagttaagtgttatgagatactcccctgatggcaacttcctggccataggttctcatgataattgcatctatatctacggcgtgagcgacaatggaaggaaatacactagagtgggaaaatgctccggccacagtagttttattacacacctcgactggtctgttaattctcagtttctcgtgagtaatagtggggactacgagatcctatactgggtaccatcagcctgcaagcaagtcgttagcgtcgaaacaacacgggacatcgagtgggccacctacacttgcacactcggcttccatgtgtttggagtctggccggagggttccgacggtaccgatattaatgccgtgtgcagggcgcacgagaagaaattgctgagcaccggcgatgactttggaaaggtacacctcttctcatatccgtgctctcagttccgggctcccagccacatctatggcggacactcatcacacgtcacaaacgtggatttcctctgcgaggacagccatttaatcagcacaggcggtaaggacacctcaattatgcaatggagagtgatctag

SEQ ID NO: 221650 - DNA, 2505 bp, synthetic construct
  misc_feature 1..2505: note = Description of Artificial Sequence: Synthetic coding sequence
  source 1..2505: mol_type = other DNA
atggaggacggcttttcatcatatagttccctgtatgacacgagctctctgctgcagttctgcaacgacgattcagcaagtgccgcttccagcatggaggtgacggatcgcatagcgtccctggaacagcgggtccagatgcaagaagatgacattcagctgctgaagagtgctctggcggatgttgtcagacgtctgaacatcacggaggagcagcaggcagtcctaaaccgcaaaggccctactaaggcccgacctcttatgcagacgctccccttacgtacaacagttaacaatggaacagtgttgcccaaaaaaccaaccgggagtctgcccagcccgtctggcgtgcgcaaggaaactgccgtaccagcaactaaaagacttaatcgaagtgtctccttgctcaatgcctgtaaactgaatcgtagtacacctagcaacatcaagcgcacgtcttcttccgagagggtgagtcctgggggacgtagggagtctaatggcgacagtaggggaaatcgcaatcgtactggtagtacaagctctagctcttccggcaaaaagaactctgagagcaaaccaaaggaaccagtgttttctgcagaggaaggctatgtaaagatgttcttgagaggccgacctgtgaccatgtacatgcctaaggaccaggtggacagttattccctggaggctaaggtggaattgcctaccaaaaggctcaagctagagtgggtatacgggtaccgcggtagggactgcagaaacaacctctacctgctccccacaggagaaaccgtgtattttattgcttcggtcgtcgtcctgtacaacgtcgaagagcaactgcagcgccactatgctggccacaatgacgacgtgaagtgcttggctgttcatccagaccggatcacaatcgccaccggccaggttgcaggcacatctaaggatggtaagcagctacctcctcacgtgcggatctgggactccgttactttaaatactttgcacgtaatcgggatcggtttcttcgatcgggctgtcacctgtatagccttctccaaaagtaacggaggcacaaatctttgcgccgttgatgactccaatgaccatgtgttgagtgtgtgggattggcaaaaagaggagaaactcgcagatgtgaagtgctccaacgaggccgtgttcgccgctgactttcaccctaccgacaccaatattattgtgacatgtgggaaatcacacctttatttttggactctcgagggatcttctctcaataagaagcaagggctcttcgagaaacaggagaagcccaagtttgtactctgtgttactttcagtgagaatggagacaccatcacaggcgactcaagtggcaatattctggtgtggggtaaaggaaccaatcgaatctcttatgcagttcaaggcgcacacgaaggtgggatatttgctctgtgtatgctaagggacgggacgttggtgtcgggtggcggaaaggatagaaaactcatctcctggtctggaaattaccagaaactgcgtaagaccgagattccagaacaatttggccctattcgtaccgtggcagaaggcaagggtgatgtcatattaatcggcacaacacggaacttcgtgctgcagggaaccttatctggggactttactcctattactcaggggcatacagacgagttgtggggcttagcgatccatgcttctaaatcacaattcctcacttgcggacacgataaacatgctacgctatgggatgccgttggccataggcccgtgtgggacaaaatcattgaggaccctgcccagtcctccggcttccatccttccgggtcagtcgtcgccgtcggaaccctcacaggtcgatggttcgtgttcgacaccgaaactaaggacctggtgacggtacacaccgacggcaacgaacagttatcagtcatgcgatactcccccgacggaaactttctggcaataggatcacatgacaactgcatctacatctacggagtaagcgataacggccgaaaatataccagggttggcaagtgctctggacacagctcattcatcactcacctcgactggtccgtgaattcacagttcttggtgtccaatagcggtgactacgagattctgtattgggtcccttctgcatgcaaacaggtagtctccgttgaaacgacacgggatatcgagtgggccacttacacttgcacgcttggtttccacgtgttcggggtctggccagaggggtcagacggcacagatattaacgccgtgtgcagggcccacgaaaagaaacttctgtccacaggggacgatttcggtaaggtgcacttattctcctacccttgcagccagtttcgcgctccaagtcacatttacggtggccacagcagccatgtgacaaatgtggactttttgtgcgaggactctcacctcatcagcactggcggtaaagacacgtcaatcatgcagtggcgcgtcatctag

SEQ ID NO: 221651 - DNA, 2946 bp, synthetic construct
  misc_feature 1..2946: note = Description of Artificial Sequence: Synthetic coding sequence
  source 1..2946: mol_type = other DNA
atggatggcttcgccggatccctagatgacagcatatcagccgctagcacctctgacgttcaggatcgcctttcggcgttagagagccgcgtccaacaacaagaggatgagattactgtactgaaggcagcactggctgatgtcctacggaggctggccatttccgaagatcacgtggccagcgtgaagaagtcagttagttccaagggccagccctccccacgtgcagtcatcccaatgtcctgtatcacaaacgggtctggtgcgaataggaagccatctcacaccagtgctgtgtcgattgcgggaaaggaaaccctttccagcgcagctaagtctggcacggagaagaaaaaagagaagccccaaggtcagagggaaaagaaggaggagtctcacagcaacgaccaatccccccaaatccgagccagcccaagcccccagcctagtagccaaccgctacaaatacaccggcagacgcctgagagtaaaaacgctaccccgacaaagtccataaagcggcctagcccagctgagaagagccacaatagctgggagaacagtgacgactctcggaataagctctccaaaattccaagcaccccaaaactcatcccaaaggtgacaaagactgctgacaagcacaaagatgtgatcatcaaccaggagggggagtatatcaagatgttcatgcggggaagaccaatcacaatgtttatcccttcggacgtggataattatgacgacatccgcaccgaactgcccccagagaaactgaagcttgaatgggcttatggataccggggaaaggactgccgcgctaatgtgtacctccttcccactgggaagatcgtgtactttattgcatcagttgttgtcctctttaattatgaggagcgcacacaacgacactacttgggccatactgattgcgtaaagtgcttggccatacacccagacaagattaggattgctaccggccagatcgcaggcgtggataaggatgggagacctttacagccccacgtccgtgtgtgggattctgtgactctctccaccctccagataattgggcttggcacgttcgagagaggcgtaggctgtctcgacttctcgaaagccgactcaggagtccatctatgtattatcgacgactcaaacgaacacatgctgacagtgtgggattggcagaagaaggccaagggagccgaaattaagactaccaatgaagtcgtcttggcagtggagttccaccccactgacgcaaatactattatcacttgtggtaagtctcatatctttttttggacctggtccggtaatagcttaacaaggaaacagggaatcttcgggaagtacgaaaaacctaagttcgtgcagtgcttggcttttctaggtaacggcgacgtcctcacaggcgacagcggcggagtaatgctcatctggtctaaaaccacagtggagcctaccccagggaaaggccctaaaggcgtttatcagatttctaaacaaatcaaggcacatgacgggtccgtgtttacgttgtgccagatgagaaacggcatgctgttaaccgggggaggcaaagatcgaaagatcatcctgtgggaccatgacctcaatcctgagagagagatcgaggtcccagatcagtatggcacaatcagggccgtagcagagggaaaagctgaccaatttctagtcggaacgtcaagaaacttcatcctgcgtggtacattcaacgacggattccagattgaggtccaagggcatactgacgaactgtgggggttagcgacacacccctttaaagatcttctgttaacctgtgcccaggaccgtcaggtgtgtctttggaatagcatggaacacagactcgagtggaccagactggtggacgagcccggacactgcgccgatttccacccctctggtaccgtcgtcgcaattgggactcactccggcagatggtttgtgctggacgccgagacccgggacttagtgagtattcacaccgatggcaacgagcagctgtctgtgatgagatattccatagacgggacatttctcgccgttggttcacatgataacttcatttatctgtatgtcgtgtccgaaaatgggaggaaatattcccgctatggacgatgtactggacatagttcttacatcacacatctggactggtcgcctgataacaagtacattatgtccaattctggcgactacgagattctgtattgggacatacctaatgggtgcaaacttattcggaatcggagcgattgcaaggacatcgactggacaacctatacgtgtgtgcttggctttcaggtctttggtgtctggccggaaggatccgatgggacagacataaatgcactagtgaggtcccacaatagaaaagtgatcgctgtggcggatgatttttgcaaagttcacctctttcagtacccttgctctaaggctaaggcccctagtcacaaatactccgcccactcttcccacgtaaccaatgtcagcttcacccacaatgacagtcacctcatttccactggcggaaaagatatgtcaatcatccagtggaaattggttgaaaaactatcactgccccaaaacgagaccgtagccgacacaacattgaccaaggcgccagtcagcagtacagagagtgttatccagagcaacacccccacccccccaccatcccaaccattgaacgagacggccgaggaggaaagccgaataagttcaagccctacgctgttagaaaattcgctggagcagactgtcgagccctcagaagaccacagcgaggaagaatcagaagagggatccggcgacctgggcgagcccctctatgaggagccttgcaacgaaattagtaaggagcaggcaaaggccacactcctcgaggaccagcaggaccctagcccttcttcatag

SEQ ID NO: 221652 - DNA, 738 bp, synthetic construct
  misc_feature 1..738: note = Description of Artificial Sequence: Synthetic coding sequence
  source 1..738: mol_type = other DNA
atgtctaattcaggagactatgaaatcctgtactgggacattcccaatggctgtaaactgattcgaaaccgttcggactgcaaagatatcgattggactacctacacgtgcgtcttgggcttccaggtgtttggcgtgtggccagaggggagcgatgggaccgacataaatgcactcgtgcggagccacaacaggaaagtcatcgcggtcgccgatgatttttgcaaggtgcacctgtttcagtacccctgctctaaagccaaagcccctagccacaagtactcggcccacagcagccacgtgacaaacgtgagcttcacgcataatgactcccacttgatttctaccggagggaaggatatgtcgattattcaatggaagctcgtggaaaaactgagtctcccccaaaacgagaccgtcgctgacaccaccttgaccaaagctccagtgtcaagcaccgaatcggttatacagtctaacacgcctactcccccaccctcccagcccctgaacgagaccgcggaagaggaatcacgtatctcctcctcacccactctgcttgagaactctctcgaacagacagtggagccttctgaagatcactctgaggaagagtcagaggagggatccggcgatctgggagagcccttatatgaagaaccctgtaacgaaatttccaaagagcaagcaaaagccaccctgctggaggaccagcaggacccatcaccaagttcatag

SEQ ID NO: 221653 - DNA, 2772 bp, synthetic construct
  misc_feature 1..2772: note = Description of Artificial Sequence: Synthetic coding sequence
  source 1..2772: mol_type = other DNA
atggacggatttgccggatccttggacgactctatttctgccgcaagcactagcgatgtccaggatcggctgagtgcccttgagtctagggtacagcaacaagaggatgagatcacagtgctaaaagccgctttggccgacgtgctaagacggttggcaatcagtgaggaccacgtggcctctgtgaagaaaagcgtctcctctaaaggccagcctagccccagagcagtcatacctatgtcttgcatcactaatgggtccggagcaaatcgaaagccttcccatacctcagccgtttccattgccggaaaagaaaccctgtcgagcgcagccaaaagcatcaagaggccctctccggctgagaaaagccataactcctgggagaacagcgatgatagccgcaataagttgtcgaaaattccatccaccccaaaactgatccctaaggttaccaagactgctgataaacacaaggacgtgattattaatcaggagggggagtatataaagatgtttatgcgaggcagaccgatcactatgttcatccctagtgatgtcgataactacgacgacatccggacagagctacctcccgaaaagttgaagctggaatgggcgtacggataccggggaaaggattgccgcgcaaacgtgtacctgcttccaaccggaaagattgtatactttatcgcatctgtagtggtactgtttaattacgaggaaaggactcagaggcattatctgggtcacaccgactgtgtaaagtgtctggcaattcacccagacaaaatacggattgcaacaggccagattgccggagtcgacaaggacggaaggcctcttcagccacacgtcagagtttgggactcagtgacactaagcaccctgcaaataatcggccttggcactttcgaaaggggtgtggggtgtttagactttagcaaggctgactcaggcgtacacctgtgtattatcgacgattcaaatgagcatatgttaaccgtgtgggactggcagaaaaaagccaaaggggctgaaattaagacaaccaacgaagtggttctggcagtcgagtttcatccaacagacgccaacaccattatcacatgtggcaagtcccatatcttcttctggacctggagcggaaattcgttgacccgcaaacaaggcattttcggtaagtacgaaaagcccaaatttgtgcagtgcttggcttttctaggaaacggagacgtacttacaggagattccggcggtgtcatgctcatttggagtaagaccacggttgaacccacccctgggaagggccctaagggtgtgtatcagatctcaaagcagatcaaagctcacgatggttcagtgtttaccctctgccagatgagaaatggtatgctgcttacggggggtggcaaggaccgtaaaataatactgtgggatcacgaccttaacccagaacgcgaaattgaggtccctgaccaatatggcacaataagggcagtggccgaaggcaaggccgaccagttcctcgtgggaacatctcgtaatttcatcctgaggggtacttttaacgacggcttccagatcgaggtacagggccacacagatgagctctggggactggccacgcatccctttaaagatcttctgttgacatgcgctcaggaccggcaggtatgtctgtggaactccatggaacataggcttgagtggaccaggttagtggacgagcccggtcattgcgctgattttcacccttccgggaccgtggttgctattgggacgcattctggacgctggttcgtgctggatgcggagacaagggatcttgtatccatccatacagatggaaatgagcagctgagtgtcatgagatattcaatagacggtacgtttctggcggtaggcagtcacgataacttcatctacctttacgttgtcagcgagaatggaagaaagtactcccgatacggcaggtgcaccggccattcaagttatattacccatctcgattggtcgcccgataacaaatatattatgtccaattctggagattacgagattctgtattgggatattcctaacgggtgcaagttgataaggaatagatccgactgcaaggatatcgattggacaacctatacttgcgttctgggattccaagtgtttggcgtctggccagagggctctgacggcaccgacatcaacgctctggttagatcccataatcgcaaagtgattgccgtggctgatgacttctgtaaagtgcatctctttcagtacccctgctcaaaagcaaaagccccatcacataaatactcggcccatagctctcacgtgaccaacgttagctttacacacaacgactctcacctcatatccacaggaggcaaagatatgagcatcattcaatggaaactggtggaaaagcttagtctccctcaaaatgagactgtggccgatacgacactgacaaaggccccagtgtctagtaccgagtcagtcatccagagcaacacccctacgccaccaccaagccagccactgaatgagacggcggaagaagaatcacggatttcttcttcccctactctgttagaaaactctctggagcagaccgtggagccatccgaggaccattctgaggaggagtcagaggagggttcaggagatctcggagaacccttgtacgaagagccctgtaacgagatcagtaaggagcaggcaaaagcaaccctgctcgaggatcaacaggaccccagccctagttcatag

SEQ ID NO: 221654 - DNA, 780 bp, synthetic construct
  misc_feature 1..780: note = Description of Artificial Sequence: Synthetic coding sequence
  source 1..780: mol_type = other DNA
atgcttcttcggtcttggtttggaaacaaagacttccaagccttgcctatccttgcaaggctgccatctatgcctaccgacatggagcacactggacattatctgcaccttgcctttttaatgaccacagtgtttagcctgagccccggaacgaaggctaattacacacgcctgtgggcaaactcaacgagttcctgggacagcgtgatacagaataagaccggccgaaaccaaaacgaaaacataaacaccaatccgattacgcctgaagtggattacaaggggaactccaccaacatgcccgagacgtcccacatcgtcgcgcttacctctaagtcagaacaggaactttacatccccagcgttgtgtctaattcgccttcaaccgtgcagtccattgagaacacgtcaaagtcccacggagagatatttaaaaaagacgtctgtgccgagaataacaataacatggccatgctcatctgcctcattatcattgccgtgctgtttctgatttgtacctttctgttcctatctacagtggtgctggccaacaaggtgtcttccctgcggcgatcaaagcaggtaggcaaaagacaacctcgatccaatggcgacttcttagcgtccgggctgtggcctgcggaatcagatacctggaaaaggacaaaacaacttaccggccctaacttggtgatgcagtccactggggtgctcacagcgacgcgcgaacggaaggatgaagaggggaccgaaaaactgactaataagcaaatcggatag

SEQ ID NO: 221655 - DNA, 711 bp, synthetic construct
  misc_feature 1..711: note = Description of Artificial Sequence: Synthetic coding sequence
  source 1..711: mol_type = other DNA
atgcccaccgatatggagcataccgggcattacctgcacctggcctttttaatgactacagtcttttcactcagccccggaactaaagcgaactacaccagactgtgggcaaactctaccagctcctgggacagtgttattcaaaataaaaccggccgaaatcagaacgaaaatatcaacacaaatcccatcactccagaagtggactacaagggcaacagtacgaacatgcccgagactagtcacatcgtggcgctgacgtcgaagagcgagcaagagttatatatccccagcgtggtctcaaattcccccagcacagtccagagcattgagaacacgagcaagtcccacggggagatcttcaagaaagacgtttgcgctgaaaacaacaataacatggccatgcttatctgtttgataatcattgcagttctgtttctcatttgcactttcctgtttctgagcacggtggtgctagcgaacaaggtgtcctctctgcggagaagcaaacaagtaggtaaacgccagcctcggagtaacggcgatttcctggccagcggattgtggcctgctgagtccgatacctggaaacggaccaagcagctcaccggtccaaatctagtcatgcagagcacgggggtcctcacagccacaagggagagaaaggacgaggaggggaccgaaaagctcactaataaacaaattgggtag

SEQ ID NO: 221656 - DNA, 711 bp, synthetic construct
  misc_feature 1..711: note = Description of Artificial Sequence: Synthetic coding sequence
  source 1..711: mol_type = other DNA
atgcctactgacatggagcacaccggccactacttacacctagccttcctgatgactacggtgttcagtctgtcccccggtactaaggccaattatacacgcttgtgggccaatagcacctcatcttgggacagcgtgatccaaaacaaaaccggcaggaaccagaatgaaaatataaacaccaacccaattacccccgaagtggactacaaagggaattcaaccaatatgcccgagacaagtcatatcgtggctctcaccagcaagagcgaacaggaactctacataccaagcgttgttagcaacagccccagcacagtccagtcaatagaaaatacatctaagagccatggagagatattcaaaaaagacgtgtgcgcggaaaataacaacaacatggctatgctgatctgcctgatcatcatagccgttctttttctgatctgtacgttcctgttcctgtcaacggtcgtacttgcaaataaggtttcctccctgcgacgatccaagcaagtgggcaagaggcagcccagatccaacggcgatttcttagcctccggactgtggccagcggagagtgacacctggaagagaaccaaacaactgaccggtcctaacctggtgatgcagtcaaccggagttctgaccgcaacccgagagagaaaagacgaggagggcaccgaaaaactaacaaacaagcagatcggctag

SEQ ID NO: 221657 - DNA, 699 bp, synthetic construct
  misc_feature 1..699: note = Description of Artificial Sequence: Synthetic coding sequence
  source 1..699: mol_type = other DNA
atggagcatacggggcactaccttcacctcgcatttctgatgacaacggtgtttagcctttcacctgggacaaaggcaaactacacacgcctgtgggccaattccacctcttcttgggactctgtgattcaaaacaagaccggacggaatcagaatgaaaatattaacaccaatccaataacacctgaggtggactacaaggggaattctactaacatgcccgagacgtcacatatcgttgccctgacatccaagagcgagcaagagctttacattccctctgtggtgtccaactccccgtccactgttcaatcaattgaaaatacctctaagtcccatggcgagatttttaagaaggatgtgtgcgctgagaataacaataacatggccatgctgatttgccttatcatcatagcagtgctttttctgatttgcacatttttgtttctctctaccgtggtgcttgccaacaaagtgtccagccttagacgcagtaaacaggttgggaagagacagccccgttctaacggggacttcttggctagcggactgtggccagcggagtcagacacctggaagcgcaccaagcagttgacagggccaaacctggtcatgcagtcaacaggcgtgctgacagccactagagaaaggaaagacgaggagggaactgagaagctaactaacaagcaaattgggtag

SEQ ID NO: 221658 - DNA, 1347 bp, synthetic construct
  misc_feature 1..1347: note = Description of Artificial Sequence: Synthetic coding sequence
  source 1..1347: mol_type = other DNA
atggatcctaagtacttcatcctcattctcttctgtggccacctaaacaatacattcttcagcaagactgagacaatcactaccgaaaagcagagccagcctactctttttacatcatccatgagtcaggtcctggcgaattctcagaacactacaggcaatccgctgggtcagccgacccagttttcagacacttttagtggccagtccatttcgcctgctaaggtgaccgctggccaacctactcctgccgtctacacaagcagcgaaaaaccagaggcccacacatccgcgggacagccacttgcctacaacaccaaacagcctacaccgattgccaatacatcaagccagcaggccgtgtttaccagcgccagacagttgccctccgccagaacgagcaccacccagccgcctaaatcttttgtgtacacctttacacagcaatcctccagcgtgcaaattcccagccggaaacagataaccgtgcataacccctctactcaacctacatctactgtgaagaattctcctcgctctacaccgggttttatactggacacaactagcaataagcagactccccagaagaataactacaacagcatcgctgccatccttataggagtgttgctgacttcgatgctggttgccatcatcattatcgtcctgtggaagtgcctacgcaagccagtgctgaacgaccagaattgggcgggacgaagcccttttgccgatggcgaaactcccgatatctgtatggataacatacgggagaatgagatttctaccaaacggacttcaatcatttcccttaccccttggaaaccctctaaatctactttgttagctgacgacctcgagatcaaattgttcgaatcttcagagaatatagaggattccaacaatcccaaaacggagaaaatcaaggatcaggtcaacgggacctccgaggacagcgctgatgggagcacagtcggtactgccgtgtcgtctagcgacgatgcagacttgcccccacccccaccactgttggatctggaagggcaggagagcaaccagtctgacaaaccaacaatgactattgtgagccccctaccaaacgatagcacttcactgcccccatccctcgactgtttaaatcaggattgcggggatcataagagtgagattatccagtccttccccccacttgatagcctgaacttgcccctacccccagttgatttcatgaagaatcaggaagatagtaacctggaaattcagtgtcaggagttcagcattccacctaatagcgatcaggacctgaatgagtcgctgccccctccccctgccgagctgctgtag

SEQ ID NO: 221659 - DNA, 1392 bp, synthetic construct
  misc_feature 1..1392: note = Description of Artificial Sequence: Synthetic coding sequence
  source 1..1392: mol_type = other DNA
atgctgtttcgatacgccgagaagattacccgtaaatactcagagatggatccgaaatacttcattcttatcctgttctgcggccatcttaataacacgttcttctctaaaacggaaactatcacaacggagaaacagagtcagcccactctcttcacgtccagcatgagccaggtgctggcaaacagccagaacaccactggtaatcccctgggccaaccaacacagttctctgacacatttagcggccagtccatcagtcccgctaaggttacggctggccagcccaccccagctgtgtatacgtcctctgagaagccagaggcacatacatcagccggtcagcccctcgcttataatactaaacaacccacccctattgccaatacaagcagtcagcaggcagtcttcacttccgctagacagctgccctcagctagaacttctaccactcaaccgccaaaatcctttgtatacacgttcacacaacagtcaagctcagttcagatccccagccgcaaacagattacagtgcacaaccccagcacacagcctacctccacagtgaagaactctccgaggtcaactcctggatttatccttgacactacctcaaataagcaaacaccacagaagaataattacaattctatcgccgctattctcattggcgtgttactgacatctatgctggtggcaatcattataatagtgctatggaaatgcctgaggaaacctgtgctgaatgaccaaaattgggccggtcgcagcccattcgccgacggggaaactcctgatatatgcatggacaacattcgagaaaacgagatttctaccaaaagaacctccattatctctctcacaccctggaaaccctctaagtcaactctcctcgcagatgatctggagattaagttgtttgaaagcagcgaaaacatcgaggattccaataaccccaaaaccgaaaaaatcaaagaccaggttaatggcacgagtgaagactcggctgacggcagcactgtgggaacagccgtctcatcatcagacgacgcagacctgccaccaccccctccactgttagatttagagggtcaggaatcaaaccagtctgacaaacccactatgaccattgtatctccattaccaaatgacagcacctccttgcctccctcactggactgtctcaatcaggactgcggcgaccataaaagtgagatcattcagtccttccctcccctcgatagcctcaacttgccactgccccctgtagattttatgaaaaaccaggaagactctaatctggaaatccagtgccaggagttttccatcccacccaattccgatcaggatcttaacgagagccttcctccacctcctgcagaactattgtag

SEQ ID NO: 221660 - DNA, 924 bp, synthetic construct
  misc_feature 1..924: note = Description of Artificial Sequence: Synthetic coding sequence
  source 1..924: mol_type = other DNA
atgaaccaggcagagctcatgcagctagacatggaaggtatgttacagcactttcaaaaggttatcccccatcagttcgacggagtgcctgacaagcttattcaggccgcataccaggtaaagtataacagtaaaaagatgaagaagctggaaaaagaatacactactataaagaccaaggagatggaggagcaggtggaaatcaagaggcttcgcaccgagaatcggctccttaagcagcgcatagagaccttagaaaaagagtctgcatccctcgctgaccgcttaattcaggggcaagtgacccgagcccaggaggccgaagaaaactacttaattaaacgcgagctcgcgacaattaaacagcaatccgacgaagccagcgcgaagctggaacaggccgagaacactattcgtaaacttcaacaccagcagcagtggcacaaatgttctagcaactataacgaggatttcgtacttcagttggagaaagaactggtgcaggcacgactgtccgaagccgagtcccagtgtgcgcttaaagaaatgcaggataaggttctggacatcgagaaacggaataatagcctgcccgatgaaaataacatcgctcgactacaggaagagctgatagcagtcaagcttcgagaggctgaggccatcatgggactgaaggagttacggcagcaggtgaaggatctagaggagcattggcagcgtcacctggcccgaacaacaggtcgttggaaggacccaccgaaaaagaatgccatgaatgagctgcaagatgaacttatgacaatcagactccgggaggcagaaacacaggcagaaattcgcgagataaagcagagaatgatggagatggagacccaaagtggaacttgcggaccactgctgaaaatcattttcttcaacgcctag

SEQ ID NO: 221661 - DNA, 2433 bp, synthetic construct
  misc_feature 1..2433: note = Description of Artificial Sequence: Synthetic coding sequence
  source 1..2433: mol_type = other DNA
atggtgacaaacaagatgacagccgctttcagaaatcccagcggaaagcaggtcgccacggataaggtggcagaaaaactctcatctaccctctcttgggtcaaaaatacggtctcccacaccgtttcacaaatggctagtcaggtggcgagcccgagcacttctcttcacacaacgagtagtagcacaactctgtccacgccggctttgagcccaagcagtcctagtcagctgagccccgacgacctggaacttctcgcaaagctggaggagcaaaaccggctgctcgagaccgacagcaagtcacttcgtagtgtcaacggatctcggagaaactcaggtagctcactcgtcagctctagtagcgcatcctcaaacctgagccatctggaagaggacagctggatcttgtggggcaggattgttaatgagtgggaggatgttaggaaaaagaaggaaaagcaggtcaaagagctcgttcataaagggatcccacaccatttccgggcaatagtgtggcagttactgtgctcagcacagtcaatgcccatcaaggatcagtattccgaattgctcaaaatgacaagcccatgcgagaagttaattcggagggatatcgctagaacgtatcctgagcacaattttttcaaggagaaggacagcttgggacaagaggtgttattcaacgtgatgaaagcctactcgctggtggacagggaggtgggctattgtcaaggctcagcctttatagtgggtctcttgctgatgcagatgcctgaagaggaagctttctgcgttttcgtcaaactcatgcaggactatcgcctcagggaactcttcaaaccctccatggctgaactggggctgtgtatgtaccaatttgagtgtatgatccaggagcacttaccggagttgtttgttcactttcagagccagagcttccacaccagcatgtatgcttcctcctggttcttgacaatttttcttactacattccccttgcctattgccactcgcatttttgatatatttatgagcgaagggctagaaattgtgtttcgggtggggctagcactgctgcagatgaatcaggccgaactcatgcagctcgacatggagggaatgctccagcactttcagaaggtgattccacaccagttcgatggcgtgcccgacaaactcattcaggccgcttatcaagtgaagtataactctaaaaaaatgaagaagcttgagaaggagtacactacaatcaagactaaggagatggaggaacaggttgagataaaacggttacggactgaaaatcggctactgaaacagagaatcgaaacactggaaaaacacaaatgtagttccaactacaatgaagattttgttctgcaactggagaaagagttggtgcaggcgagactttccgaggccgaatcccagtgtgcactgaaggagatgcaggacaaggtgttagatatcgagaaaaggaataatagcttgccagatgagaataatatcgcgcgtctgcaggaggagctcatcgctgttaagctgcgtgaagctgaggcaatcatggggctgaaggagcttagacaacaggtgaaggacctggaagagcactggcagcggcacctcgcacggactaccgggagatggaaggatccccctaagaagaatgccatgaatgagttacaggacgagctgatgacaattcgccttagagaggcggagacccaggccgagatacgcgagatcaagcagcgtatgatggaaatggagacgcagaatcagatcaacagcaatcacctgaggagagcagagcaggaagtgatttctctccaggagaaggttcagtatctctcagcccaaaataagggcctgcttactcaactaagtgaggcaaagcggaagcaggccgagatcgaatgcaaaaacaaggaggaggtgatggctgtgcggctgagggaagccgacagtattgctgctgtcgccgaactgagacagcacatcgctgaattggagatccagaaagaagagggcaagctgcagggccagctcaataagtccgattctaaccaatacattggtgagttaaaggatcagattgcggagctaaatcacgaactgaggtgtctgaaggggcagcgtgggttttctggccagccgcctttcgacggaatccacatagtaaatcatctcatcggagacgacgagagtttccatagttcagatgaggactttatcgacaactccctacaagagacaggtgtgggcttcccgctgcatggtaaaagtggcagcatgtccctcgaccccgctgttgctgatggcagtgagtccgagaccgaggattcagtgctggagaccagggaatcaaaccaggtcgtgcagaaggagcgtccaccacgccgtagggagagctatagcacgactgtgtag

SEQ ID NO: 221662 - DNA, 2433 bp, synthetic construct
  misc_feature 1..2433: note = Description of Artificial Sequence: Synthetic coding sequence
  source 1..2433: mol_type = other DNA
atggtaacaaacaaaatgaccgcggctttcagaaatcccagcggaaagcaggtcgccactgacaaggtcgcagagaaattgtcttcaacactttcttgggtgaagaatactgtcagtcacacagttagccagatggcctcccaggtggcttcgccctcaaccagtctgcataccacgtcatcctccacaacacttagcacgcccgctttgagccctagctccccctcccagctttcccccgacgaccttgagctactggctaagttggaagagcagaacagactgctggaaaccgactccaaatctctcagatcagtgaacggatcacgccgaaactcaggttctagtttggtaagctctagctccgccagctccaatctctcgcatctcgaggaggattcctggatactttggggacggattgtaaatgaatgggaagatgtgcgcaaaaaaaaggaaaagcaggtgaaggaattagttcataaggggatcccacatcattttagagctatcgtatggcaattactctgttcggcccagagcatgccgatcaaggatcagtatagcgagcttctcaaaatgacaagcccgtgcgagaaacttatccgaagagatatagccagaacgtacccagaacacaatttctttaaagagaaggatagtctcggccaggaggtcttgtttaacgtgatgaaagcttatagcctggtagatagggaggtcggatactgccagggatcagcttttatagtcggccttttattaatgcagatgccggaggaagaggctttttgcgtgttcgtaaaactgatgcaggactatcggttgcgggaattgtttaagccttccatggctgaactggggctgtgcatgtatcaattcgagtgtatgattcaagagcacttacctgagttattcgtccacttccagtcccaatccttccacacctcaatgtatgcatcctcctggtttttgaccattttccttacaaccttcccgctgcccattgctacacggatctttgatatattcatgtccgaggggttagagatagtttttagagtcggccttgctttgttacaaatgaaccaggccgaactcatgcagctggacatggagggaatgctccagcacttccagaaagtcatcccacaccagtttgacggagtgcctgataagttgatccaggccgcttatcaggtgaagtataacagtaaaaaaatgaagaagctcgaaaaggagtacacaacgatcaagacaaaagaaatggaggagcaggtcgagattaagagacttagaacagagaatcggctgctcaaacagcggatcgagacactggaaaagcacaagtgctcaagtaactacaacgaggacttcgtgctgcagttagaaaaagaactggttcaagctagactgtccgaagctgagagtcaatgcgcgttaaaggagatgcaagacaaagttctagacattgagaagcggaacaattcattgcccgacgagaataacatcgcaaggttgcaagaggaactgatagccgttaagttaagggaagccgaggctatcatggggttgaaggagctgcgccagcaggtgaaagacttggaggaacactggcaaaggcatctcgcaaggactaccggtagatggaaggacccacccaagaaaaacgcaatgaatgagttgcaggatgaactaatgactatccggcttagagaggccgagacacaggcggagatcagggagatcaagcagaggatgatggagatggaaactcagaatcagatcaattccaaccatctaaggcgagcagagcaggaagtgatcagtctccaagagaaagtgcagtacctctcagcacaaaacaagggcctacttacccaactatctgaggcaaaaaggaagcaggcggaaatcgaatgcaagaacaaggaggaggtcatggccgttcggcttagagaggcggacagtattgccgctgttgcagagctgaggcaacacatcgccgaacttgaaatccagaaggaggagggaaaacttcagggtcagctcaataaatctgatagcaaccagtacatcggggaactgaaggaccaaattgctgagctcaaccacgagctgaggtgcctgaaagggcaaagggggttttctggacagcccccattcgatggaatacacattgttaatcatctgattggagacgatgaaagcttccattctagtgatgaagatttcattgacaatagcttgcaggaaaccggagttgggtttcccttgcacgggaaatcggggagcatgtcgctcgatcccgcagtggcagacggctctgaaagtgagaccgaggactctgtcttggaaacgagggagtcaaaccaagtagtccagaaggaacgcccacctcggaggcgagaaagctactccactactgtttag

SEQ ID NO: 221663 - DNA, 2466 bp, synthetic construct
  misc_feature 1..2466: note = Description of Artificial Sequence: Synthetic coding sequence
  source 1..2466: mol_type = other DNA
atggttactaataagatgacagccgcttttaggaatccgtcaggcaagcaagtggctaccgacaaagttgcggagaagctcagctccacactatcatgggtgaaaaacacggtgtcccacaccgtgagccagatggcatcccaagtcgcgtctccttccacatctttgcacacaacctccagttccaccaccctgtcaactcccgcactttccccatcgtcccccagccagcttagccccgatgaccttgagctgctcgctaaactcgaagagcagaatcgcctcctggagaccgattctaagagcctgcggtctgtcaacggctcacggaggaacagcgggtcctctctggtctcttcctcatcggcttcctccaacttgtcgcacctggaggaggactcctggatcctgtggggccgaatagtgaacgaatgggaagacgtccggaagaagaaagagaagcaggtgaaggaacttgtccataaaggcattcctcaccacttcagggccattgtgtggcagcttctctgctccgcccaaagtatgcctatcaaggaccagtatagcgagctgctaaaaatgacatctccttgcgaaaagcttataagaagagacattgcacggacgtaccctgaacacaactttttcaaagaaaaggacagtctcgggcaggaagttctgtttaatgtgatgaaagcatactcgctggtggatcgagaggtgggctattgccagggctccgccttcattgtagggctgctcctcatgcaaatgccagaggaggaagccttctgcgttttcgtgaaattaatgcaagactataggctccgcgagctgtttaaaccttccatggctgaattggggttgtgtatgtaccaattcgagtgtatgattcaggaacacctacctgaactgttcgtgcatttccagtctcaatctttccacacgagcatgtacgcaagttcttggttcttgaccattttcttgacgaccttccctctgcccatagccactcggattttcgacattttcatgtcagaaggtctggagatcgtgttcagggtgggtctggcactccttcagatgaatcaagcagaattaatgcagctcgatatggagggcatgctgcagcacttccaaaaggtgataccacatcagttcgatggtgtgcccgataagttgatccaggccgcttatcaggtcaaatacaattccaaaaaaatgaaaaagctagagaaggagtataccacaatcaaaaccaaggaaatggaggaacaggtggaaataaaaaggctccgcaccgagaataggctgttgaagcaacggattgagaccctcgagaaggaatccgcttctctggcagacaggctgattcagcacaagtgctcttctaactataatgaagactttgttcttcaactggaaaaggagctggtccaggcgaggctcagtgaggctgaatcacagtgcgccttaaaggagatgcaggataaagtgctcgacatcgagaagcgcaataactctctaccagatgagaataacatcgcacgacttcaggaggaactgatagcggtgaaactgcgcgaggccgaggcgattatgggactgaaggagctgaggcagcaagtcaaagatctggaggaacactggcagcgccatctggcgagaactactggacggtggaaggaccccccaaagaagaatgccatgaacgagttgcaggatgaattaatgactatcaggttgcgggaggcggaaacccaggctgaaattagggaaatcaagcagcggatgatggagatggagacgcaaaatcagatcaatagtaatcacctgagacgtgcggaacaagaagttatttccctccaggagaaagtgcagtacctgtccgcccaaaataaagggctgctgacgcagctcagtgaagccaagcggaagcaggccgagatcgagtgcaagaacaaggaagaggttatggccgtaagactccgcgaagcggatagtatcgcggctgtcgcagaactgagacagcacatcgcggagctggaaatccaaaaggaagaaggtaaacttcagggccaattaaacaagagtgactctaatcaatacatcggcgagttaaaagatcagatcgccgagcttaatcacgagctgaggtgtctgaaaggacaacgcggattctccggacagccaccattcgacggtatccacatagtgaatcatctgataggagacgatgagagctttcactcgagcgatgaagatttcattgacaattccctacaggaaaccggagttggcttccctctccatggcaagtctgggtccatgagcttggacccagctgtagcagacggatctgagtcggaaacagaggatagcgtgcttgagactcgagaatctaatcaggtagtgcagaaggagcggcctcccaggagacgcgaatcttacagcacaaccgtctag

SEQ ID NO: 221664 - DNA, 891 bp, synthetic construct
  misc_feature 1..891: note = Description of Artificial Sequence: Synthetic coding sequence
  source 1..891: mol_type = other DNA
atgagctgggtccaggcaacgttgctagctaggggcctttgccgggcttggggcggaacatgtggcgcagcgctgactggcacgagcatttcccaggtccctcgtagactcccacgcggtttgcattgctcagccgcagcccattcctcagagcagtcattggtgccctctccacccgagccgaggcagaggcctacgaaggctctggtcccattcgaggatctcttcggtcaagcgcctggcggagagcgggataaggctagtttcctgcaaaccgttcagaagttcgcagagcactccgttaggaagagagggcacattgacttcatttatttagccctgaggaagatgcgggagtacggagttgagcgcgacctggcggtgtacaatcagttgttgaatatcttccctaaagaggtttttaggcctcgcaacatcattcagaggatcttcgtacactatcctagacagcaggagtgtggaatcgctgtcctggagcagatggaaaatcacggcgttatgcccaacaaagagacggagtttctccttatccagatattcgggagaaaatcctatcctatgttaaagcttgtgagactcaaactctggtttcctaggtttatgaatgtaaaccccttccctgtcccaagggatctgcctcaggaccctgtggaattagcaatgtttgggctgcggcacatggagcccgatctttccgctagagtgactatctaccaggtgcccctgcccaaggacagcacaggcgcagccgatcctcctcagccacatattgttggcagcggacgggacgccggaggcgtagaacctctgctgcctgacgccgctggccctggtgtctgtgaggagtggctggggcagctgagggtttag

SEQ ID NO: 221665 - DNA, 1296 bp, synthetic construct
  misc_feature 1..1296: note = Description of Artificial Sequence: Synthetic coding sequence
  source 1..1296: mol_type = other DNA
atgagttgggtgcaggcgaccctgctagcgagaggtctgtgccgcgcatgggggggtacttgcggggcagctctgactgggaccagtattagtcaggttccaaggcggttgcccagaggcctccattgttcagcagccgcacactcctcggagcaaagtctggtgccctcccctcctgagccacggcaaaggcctactaaggcactggtgcccttcgaggatctttttggccaggcccctgggggtgaaagagataaggcctcatttttgcaaaccgtccaaaaatttgcagagcattctgtccgtaagcgaggccacatcgactttatctatttagccttacgaaagatgcgggagtacggggtagaaagggacctcgcagtatacaatcagctactgaacatcttccctaaggaggtgtttcgcccacgcaacatcattcagcggatattcgtgcattatcctcggcagcaggagtgcggcatagccgttcttgagcagatggagaatcatggggtcatgcctaacaaggagaccgagttcttgctcattcagattttcggtaggaagtcttatcccatgttgaagcttgtcagactgaaattatggttccctaggttcatgaatgtgaaccctttcccggttccaagggacctcccgcaggatcccgtggagctggctatgtttggtttacgacacatggaacctgatctgtctgcacgggtcacaatttatcaagtccccttgccaaaggactccacaggggctgcagacccgccacagccgcacatcgtgggcatccagagtcccgatcaacaagctgcccttgccagacacaaccctgcaagaccagttttcgtggaggggccatttagcctgtggttacgcaacaagtgcgtctattaccatatactgagagcagatctcttacccccagaggaaagagaggttgaggaaacgccagaggagtggaacctgtactaccctatgcagcttgacctcgaatacgtaaggtcgggttgggataattacgagtttgacataaatgaggttgaagagggcccagtttttgccatgtgcatggcgggagcacacgatcaagccacgatggcaaagtggatccaagggctccaggaaactaaccccacactggcacaaatccccgtcgtctttcgacttgctgggagcacgagggaattgcagacgtcctccgcagggctggaagagccacctcttcccgaagaccaccaggaggaggacgacaacctgcagagacaacagcagggacaaagctag

SEQ ID NO: 221666 - DNA, 654 bp, synthetic construct
  misc_feature 1..654: note = Description of Artificial Sequence: Synthetic coding sequence
  source 1..654: mol_type = other DNA
atgagttgggtgcaagccactctgttagctcgtgggctgtgccgagcctgggggggaacgtgcggcgctgcgttaacaggtacttcgatttcacaggtgccgctgccaaaggactctaccggagcagctgaccccccacagccacacatcgttggcattcaatcccctgatcaacaggccgctctggctcggcataaccctgcgcgacccgtttttgtcgagggcccattcagtttgtggctcagaaacaagtgtgtctattatcacattctcagggctgatcttcttccacccgaagagagggaagttgaggagacacctgaagagtggaacctgtactaccctatgcaattggatcttgaatacgttaggtccggttgggacaattacgaatttgatattaacgaggttgaggagggtccagtcttcgccatgtgcatggcaggcgctcatgatcaagccaccatggccaagtggattcagggcctccaggagacaaatccaacccttgcccagatcccagtagtgtttagattagccggtagcacccgagaactgcagacaagcagtgcgggactcgaagagcctcccttgcccgaggaccaccaggaagaagatgataatttacaacggcagcagcaagggcaatcttag

SEQ ID NO: 221667 - DNA, 891 bp, synthetic construct
  misc_feature 1..891: note = Description of Artificial Sequence: Synthetic coding sequence
  source 1..891: mol_type = other DNA
atgtcttgggtgcaggctacattactcgccaggggactttgtagagcttggggcggaacctgcggagcagcgctcaccggcacatccatctctcaagtaccacggagactgccccgaggcctgcactgctccgcagcagcccactcatcagaacagagtctggttccttccccaccagagcctcgccagcggcctaccaaagccctggtgcccttcgaggacctttttggccaggcaccaggtggcgagagagataaggccagctttcttcagactgtgcaaaagttcgctgagcactccgtgagaaaaagggggcatattgattttatctacctcgcacttaggaagatgcgggaatacggagttgagcgggacctcgccgtttataaccagctgctgaatatcttcccaaaggaggtctttcgtccacgtaatatcatccagcgaatctttgtgcattacccacgccagcaggaatgcggaatagcggtcctagaacagatggaaaatcatggtgtaatgccaaataaagagacagagttcctcctgattcagatctttggcagaaagagttatcctatgctcaaactcgttcggttaaagttgtggttcccccgatttatgaatgtgaatccgtttcctgtgcccagagatctgccccaagacccagtcgagctggctatgtttggtctgagacatatggagcctgacctctctgcccgtgttaccatttaccaggtgcccttaccgaaggattccacaggagcagcggaccccccacagccccacatcgtggagctgacgtgttgccccaggcggagaggaaagtggaagcggaggcggaggtccggcacatcaaccaccaggtgttcttggacttggagtatgtag

SEQ ID NO: 221668 - DNA, 1770 bp, synthetic construct
  misc_feature 1..1770: note = Description of Artificial Sequence: Synthetic coding sequence
  source 1..1770: mol_type = other DNA
atgagcgtctcggtgcacgagaaccgcaagtccagagcctcatcaggtagcataaacatatacctttttcacaaatcatcatacgccgacagcgtactcacccacctgaacctgttacggcagcagagactgttcaccgatgtcctgttacacgcgggtaatagaacattcccctgtcaccgagccgtgctggcagcttgctcccgatatttcgaggccatgttctccggcggacttaaagagtctcaggactcagaagtgaactttgacaattcaatccacccggaagtactggagctgctactggactatgcatatagttcaagagtgataattaacgaggagaacgcagagtctctactagaagccggagatatgctcgaattccaggatatacgagacgcttgtgcggagtttctagaaaagaacttgcaccctaccaattgtctgggaatgctgctgctgtccgacgcacaccagtgcacaaagctctatgaactcagttggcgtatgtgtttgtccaattttcagactatacgcaagaacgaggactttctgcagctcccccaggacatggtggttcagctgttgagctccgaggaactggagactgaggatgagcgcctggtatacgagtctgccatcaactggatttcttatgacctgaaaaaaagatactgttatctcccagagctgctgcagacagtgcgactcgccctactgcccgcaatctatttgatggaaaacgtggccatggaggaactcatcacaaaacaacgcaagtctaaagaaattgtcgaagaggcaattaggtgcaagctgaagatcctacagaacgatggtgttgtgacttccctgtgcgcccgtccaaggaagaccggccatgctttattcctgttaggcggtcagaccttcatgtgcgataaactctacctggtagaccagaaggccaaggaaattattccaaaagccgacataccttcaccaagaaaggagttttcagcatgcgcaatcggatgcaaggtctacattacggggggacgcggttctgagaacggcgtgtctaaagacgtctgggtgtacgatactttgcatgaggagtggtccaaagctgccccaatgctggtcgctagatttggacatggttcggcggagctcaagcattgcttgtatgttgtgggcggacacaccgctgccaccggatgtctcccagcctctccgtccgtgagtcttaagcaggtggagcattacgaccctactataaataagtggaccatggtggcccctctgcgggagggtgtcagcaacgcagccgtggtgagcgctaagctaaagctgttcgcctttggcggtaccagcgtcagccacgataaattaccgaaagtccagtgttatgatcaatgtgaaaatcgttggacggtgcccgctacttgcccccagccttggaggtacaccgccgcagccgtgctggggaatcaaatttttatcatgggtggagacacggagttttccgcctgtagtgcctataagtttaactctgaaacctatcagtggaccaaagtaggcgacgtgactgctaaacggatgagctgccacgcagttgcttctggcaacaagctttacgtggtgggcggttacttcggaatacagcggtgcaagactctggattgttatgatccgactttggacgtatggaactccatcactactgtgccttatagcctgatacccactgcttttgtgtccacttggaaacacctgccaagttag

SEQ ID NO: 221669 - DNA, 153 bp, synthetic construct
  misc_feature 1..153: note = Description of Artificial Sequence: Synthetic coding sequence
  source 1..153: mol_type = other DNA
atgagcgttagtgtgcatgaaaatcggaagtcccgagcaagctcagggtcaattaacatctatctgttccacaaatccagttacgccgattcggttctcacacaccttaatctgctgcgacagcaaagactgttcacagatgtccttctctag

SEQ ID NO: 221670 - DNA, 15 bp, synthetic construct
  misc_feature 1..15: note = Description of Artificial Sequence: Synthetic coding sequence
  source 1..15: mol_type = other DNA
atgtcggtgagttag

SEQ ID NO: 221671 - DNA, 1770 bp, synthetic construct
  misc_feature 1..1770: note = Description of Artificial Sequence: Synthetic coding sequence
  source 1..1770: mol_type = other DNA
atgagcgtctccgttcatgagaacagaaagagccgggcttcctcaggctcgattaatatctatttgttccataaatcgtcttatgccgacagcgtgttgacccatttgaacctcctgcggcagcagaggttattcaccgacgtcctgctgcatgctggtaacagaactttcccttgccacagagcagttttggccgcttgttctcgctattttgaagcaatgttctcgggcggtctgaaggaatcacaggatagcgaggtgaactttgacaactccatccatcctgaggtactggaactgttattagactacgcttattcaagtcgggtgataatcaacgaggaaaatgcagagtccctgctcgaggccggagatatgttggagttccaagatatcagggatgcatgcgccgagttcctggagaaaaatttgcaccctaccaactgtctgggaatgcttttattatcagatgctcaccagtgtaccaagctctatgaactatcgtggaggatgtgtctctccaattttcagactatccgcaagaatgaagactttttgcagttgcctcaagacatggtcgtgcagctcctaagtagtgaggagctagagaccgaggatgagagactcgtctacgagagcgcaattaattggatcagttatgacctcaaaaaacgctactgctacctccccgaactgttacagactgtgaggttagccctgttgccagcaatatatctaatggagaatgtggccatggaggaactaattaccaagcagaggaagtccaaggagattgtggaagaggccatcaggtgtaagctgaaaatcttgcagaacgacggagtagtgacaagtctgtgcgctcgccctagaaagacaggacacgcactctttctactgggaggccaaacattcatgtgcgataagctctatctggtcgatcagaaggccaaggagatcattccaaaagccgacatcccctcccccaggaaggagttcagcgcttgtgctatcgggtgtaaggtttacattacggggggaagaggatcagaaaatggtgtttctaaagacgtttgggtgtatgacaccctccatgaggagtggtctaaggctgctcccatgctggtagctcggtttggtcatggctccgccgaactgaagcactgtctgtatgtggtaggcggtcatactgccgctacggggtgtctcccagccagccccagcgtgagccttaaacaggtcgaacactacgacccaaccatcaataagtggaccatggtcgcgccactgagagaaggtgtgtcaaatgccgctgttgtatcagcaaaactgaaactgttcgccttcgggggaacatccgttagtcatgataaactgccaaaggtccaatgttatgatcagtgcgaaaacaggtggaccgttccagccacatgcccgcagccttggcgctatactgctgccgctgttctgggcaatcagattttcattatgggcggtgatactgaattttcagcatgtagcgcctacaagttcaactccgaaacgtatcagtggacaaaggtgggcgatgttactgcaaagaggatgtcctgtcacgccgttgcctctggaaacaaactgtacgtggtcggtggatatttcggaattcagcggtgcaagactctggactgctacgatccaaccttggacgtgtggaattccataactactgtgccttacagtcttattcctaccgcatttgtgagtacgtggaaacaccttccatcctag

SEQ ID NO: 221672 - DNA, 1551 bp, synthetic construct
  misc_feature 1..1551: note = Description of Artificial Sequence: Synthetic coding sequence
  source 1..1551: mol_type = other DNA
atgttctctggaggattaaaggagtctcaggatagcgaggtaaacttcgacaacagtatccatcctgaggtgctcgagctgctgcttgattatgcttattcttctagggttatcataaacgaggagaacgctgaatcactcctcgaggcgggagatatgctcgaatttcaggatataagagatgcctgcgccgagtttcttgaaaagaacttacacccaactaattgtctggggatgctgctgctgtcagacgcacatcaatgcaccaagctgtacgaactgagttggcggatgtgtctatccaatttccagaccatacgcaagaacgaagacttcttacagctgccacaagatatggtcgtccaactgcttagctctgaggaattagagactgaggatgagcgcctagtgtatgaaagtgctattaattggatctcgtatgacttgaaaaagcgatactgttacctccctgaactgctacagactgtacgcctcgcactgctccccgcaatctatctgatggaaaatgttgcaatggaagaactgatcacaaagcagcggaaatctaaagagattgttgaggaagcaattcgttgtaagctcaaaattttacagaatgacggcgtggtcacatcactttgtgccaggcccagaaagactggacacgctttgtttcttttaggcggacagacattcatgtgcgacaaactgtacttagtcgaccagaaagctaaggagatcatccccaaagctgatatcccctctccacgaaaagagttcagtgcctgcgcaatagggtgtaaagtgtatataactggcggaagaggaagcgagaatggggtgtcaaaagacgtctgggtatatgatactttgcacgaggagtggagcaaagctgctcctatgctggtcgcgaggtttggtcacggaagcgccgagctcaaacactgcctctatgtggtcggtgggcataccgctgccaccggctgcctgccagcctctccgtccgtctcgttgaaacaggtcgagcattacgatcccaccattaataaatggacaatggtggcccctctgcgggaaggcgtgagcaatgctgcagtagtgtcggcaaagctcaaactgttcgcattcggtggaacctctgtcagtcatgacaagttgcccaaggtgcagtgctatgatcagtgtgagaaccggtggactgtcccagccacctgcccacagccctggagatacaccgccgcagctgtcttgggaaatcagatctttattatgggcggtgacacggagttctctgcttgcagtgcttataaatttaattctgaaacataccaatggacgaaggtgggcgacgtaaccgcaaagagaatgtcctgccatgctgttgcttcgggaaataaactgtatgtcgtaggcggatatttcggcattcagagatgcaaaaccttagactgctacgaccctactcttgacgtgtggaactctataacaaccgtcccttactccctgatacccacagcgttcgtctccacttggaaacaccttccctcctag

SEQ ID NO: 221673 - DNA, 1932 bp, synthetic construct
  misc_feature 1..1932: note = Description of Artificial Sequence: Synthetic coding sequence
  source 1..1932: mol_type = other DNA
atggtggacgcagggggagttgagaacattacacagttgccccaggagttgccccaaatgatggcagccgcagccgacggcttagggagcattgccattgatacgactcagctgaatatgtccgtgaccgaccctaccgcatgggccacggcgatgaacaacttaggaatggttccggtgggtttgcccggtcaacagctcgtatctgatagtatctgcgttcccggttttgatcctagcctgaatatgatgaccgggattactccgataaaccctatgatccctggcttaggactggtgccgccaccccctcccacagaggtcgccgtggttaaggaaatcattcactgtaagtcatgcactctgtttccacagaaccctaatctgccccctccatccaccagggagagaccaccgggatgcaagacagtctttgtggggggactgcccgaaaacgccaccgaggagataatccaggaagtgttcgagcaatgcggagatatcacagccattcgaaagtccaaaaaaaatttctgtcacatcagattcgctgaggagtttatggtggacaaggctatttaccttagtgggtatagaatgcggctgggcagcagcaccgataaaaaggattcaggtagactccacgttgatttcgcccaggctcgcgacgacttctatgaatgggaatgcaaacagcggatgcgagccagggaggagcgccacagaaggaagctcgaggaggaccgactgaggccaccctctcctccagcgataatgcactattccgaacacgaagccgctcttctcgcagaaaagctcaaggatgactcaaagttctctgaggcgattactgtgctgttgagttggatagaaagaggagaagtgaatcggcgatcagctaaccaattctattccatggtacagtctgcgaacagccatgtgcggagactgatgaacgagaaagctacccatgagcaggagatggaggaagcaaaagaaaattttaagaacgcactcactggcatcctcactcagttcgagcagatcgtggcagtgtttaatgcgtccacaaggcagaaagcttgggaccatttttccaaagcacagcgaaagaacattgacatctggcgaaagcactcagaggaactaagaaacgcccagagcgagcagcttatgggaatacggcgtgaggaggagatggagatgagtgatgacgaaaattgtgactccccgactaaaaagatgcgggtcgacgagagcgccttagcagcacaagcctacgcactcaaggaagaaaatgactctctccgctggcagttagacgcttaccgcaacgaagtcgaactcctgaagcaggaaaaagagcagctgttcaggaccgaggaaaacctgacaaaggatcaacagctgcagttcttacagcaaactatgcaaggcatgcaacagcagcttctgaccatccaggaagagcttaacaataagaaatctgaacttgaacaggccaaagaggagcaaagtcacactcaggccctgcttaaggtgctccaagaacagctgaaaggaaccaaagaactggtggaaactaacggtcactcacatgaggattcaaacgaaataaacgttctcaccgttgctctagtgaaccaggaccgtgagaacaacatcgaaaaacggtcccagggcctcaaaagcgagaaggaggccctgctgatcggcattatttctactttcctgcatgttcacccgtttggagccaacatcgagtacctgtggtcatatatgcagcaacttgatagtaaaatctcagcgaacgaaattgagatgctcctgatgaggttgcctcgcatgttcaagcaggagtttacaggagtcggagctacactggaaaagaggtggaagctatgtgcctttgaaggcatcaagactacctag

SEQ ID NO: 221674 - DNA, 1932 bp, synthetic construct
  misc_feature 1..1932: note = Description of Artificial Sequence: Synthetic coding sequence
  source 1..1932: mol_type = other DNA
atggtggacgccggtggcgtcgaaaatattacccagctccctcaggaactaccccaaatgatggccgctgcagccgacgggctcgggtcaatcgctatagatacgacccagctcaatatgtccgttactgaccccactgcgtgggccacggccatgaacaacctggggatggtcccagtagggctccctggccaacagctagtgagtgacagcatctgcgtacccggatttgatccctccctcaacatgatgaccggcataactcctatcaacccaatgatccctggcctggggctggttccccctccccctccaacagaggtcgcagtcgtgaaggagatcatccattgcaaatcatgcactttatttccccagaaccctaatctgcctcccccatcaacgagggagcggcctcctggttgtaagaccgtctttgtgggcggactcccggagaatgcgacagaggaaatcatccaggaggtgttcgagcagtgcggggacatcacagcaattagaaaatccaaaaaaaatttttgccacatccgctttgccgaggagtttatggttgacaaggccatctatttaagcggctataggatgcggctagggagctcaaccgacaagaaggattccggacggcttcacgtggactttgcacaagcacgggatgatttctacgagtgggagtgtaaacagcgcatgcgggcaagagaagaaagacataggcgaaagctggaggaggatagacttcgccctccttcgccgccagccattatgcactattcagagcacgaggctgcactgcttgccgaaaagctgaaggatgacagcaagttttctgaggccattactgttctgctcagttggatagagaggggtgaggtgaaccgtcgttctgcaaatcagttctattcaatggtccagagcgccaacagtcacgtgagacgactgatgaacgaaaaggctactcacgaacaagaaatggaagaggcaaaggagaacttcaaaaacgccttgacaggaatccttacccagttcgagcaaatagtagctgttttcaacgcttccacacgccaaaaggcctgggatcacttttccaaagcccagaggaagaacattgatatttggcggaaacacagtgaagaactcagaaacgcgcagtctgagcagttgatgggcatcaggagagaagaagagatggagatgtcggacgacgagaactgtgactcacctaccaaaaagatgagagtggacgagtctgccctggctgcccaggcttacgccctaaaagaagagaatgattctctgaggtggcaactggatgcttataggaatgaagtggaacttcttaagcaggaaaaggagcagttgttccgaaccgaggaaaatctcaccaaagaccaacagctccaattcctgcagcagactatgcaaggaatgcagcagcagctcctcactatccaggaagaactgaacaacaagaaatccgaactcgagcaagccaaggaggaacagtctcatactcaggctctcctaaaagtactgcaggagcaactaaaaggaaccaaagagctggtggagacaaacggccattcacatgaagacagtaacgagattaacgtcttaacagtggccctagtgaaccaagaccgcgagaataatatcgagaagcgtagccaaggtctcaaatctgagaaagaggctctactcattggtataatcagtacgttcctgcacgtccacccctttggcgcaaatatcgaatatctatggagttatatgcagcagctagattctaagattagcgctaacgaaatcgaaatgctcctgatgcgactgcccaggatgtttaagcaggaatttaccggtgtgggagctacactcgagaaacgatggaagctgtgcgctttcgaaggaatcaagacaacttag

SEQ ID NO: 221675 - DNA, 708 bp, synthetic construct
  misc_feature 1..708: note = Description of Artificial Sequence: Synthetic coding sequence
  source 1..708: mol_type = other DNA
atggtggacaaggccatctacctctctggataccgcatgaggctaggctccagcactgacaaaaaggatagcggacggttacatgtagactttgcccaagcccgtgatgacttctacgagtgggagtgcaagcagcggatgagagcccgagaggaacgccacaggagaaaacttgaagaagacagattgcgccctccttcaccacccgcaatcatgcactactcagagcacgaagccgcactgctcgctgagaaactgaaggacgattccaaatttagtgaggccatcaccgtgctcttgtcctggatagaacgaggtgaggtgaaccgacggtccgccaatcagttttactccatggtccagtccgctaacagtcacgtgaggcgccttatgaacgaaaaggccacccacgagcaagagatggaggaagcaaaggagaattttaagaatgcgctgacgggcatactcacacagtttgaacagattgtcgccgtctttaacgcatctacacggcagaaggcctgggaccatttcagcaaagcccaacggaaaaatatcgacatttggagaaaacactccgaggaattgcgtaatgcccagtctgaacaactgatggggatccggagagaagaggaaatggagatgagtgacgatgaaaattgcgacagtcctactaagaagatgagagtggatgaatccggggcatag

SEQ ID NO: 221676 - DNA, 1833 bp, synthetic construct
  misc_feature 1..1833: note = Description of Artificial Sequence: Synthetic coding sequence
  source 1..1833: mol_type = other DNA
atgcaacgagatttcaggtggctgtgggtgtatgagataggttacgcagctgacaattccagaactctgaatgtcgactctactgctatgactctgcctatgtcagaccctaccgcctgggccacggcaatgaacaacctcggaatggcccctcttggtatcgccggacagccaattcttcccgatttcgaccctgctttggggatgatgactggcatcccccctattaccccaatgatgcctggtctcgggatcgttccaccacccatcccccctgatatgcccgtcgttaaggagatcatacattgcaaatcctgcaccctgttcccacccaaccccaacctcccgcctcctgccacgcgggagaggccacccggatgcaagaccgtgtttgtcggagggctccctgaaaacggcactgagcagatcatagtggaggtattcgaacagtgcggagagattatcgctattagaaaatccaaaaaaaacttttgccacatccggttcgcagaggaatacatggtggataaggcgctgtacctgagcggctaccgcattcggcttggctcttcaacagataagaaggataccggcagactgcatgtggacttcgcccaagcccgtgacgacctgtatgagtgggaatgtaagcaacggatgcttgctcgggaggagcgtcatcgtcgacgaatggaagaggaacgtcttcggccacctagccccccacccgtggtgcactacagtgatcatgagtgttctatcgtggcggagaagctgaaagatgatagtaagttttcagaggccgttcaaacgttgctgacctggatcgaaagaggagaggtaaatcgcagaagcgcaaacaacttctactccatgatacagagcgccaactcacacgttcgacgcctagtgaacgaaaaagctgcccatgagaaggacatggaggaagctaaagagaagttcaagcaggcgctgtctgggatcctgatccaattcgagcagattgtggccgtataccacagcgcaagtaaacagaaggcatgggatcacttcactaaggcccagcgcaaaaatatttccgtctggtgtaaacaagccgaggaaattaggaatattcataatgatgagcttatgggcattcgaagggaggaagagatggaaatgagtgatgatgagattgaagagatgaccgagacaaaggaaacggaagaatcggctctggtgtctcaggccgaggccctgaaggaggaaaacgattctctaaggtggcagctggacgcctaccgaaacgaggtggaactgcttaagcaggagcaaggcaaagttcaccgcgaggatgacccaaataaagagcaacagctcaaactgctacaacaggcactgcagggcatgcagcagcacctgctgaaggtccaggaggagtataagaagaaggaagccgaactagagaagctcaaggatgacaagttacaggttgagaagatgctggagaatctgaaagagaaggagagctgcgcctccagactgtgcgcttccaatcaggatagtgaataccctctggaaaaaaccatgaattcctcaccgattaaatctgaacgcgaggccctcttggttgggattatatcaacatttttgcacgtgcatccgtttggtgcatccatcgaatatatctgctcatacttacatagactcgacaacaaaatttgtacatcagatgtcgaatgcttgatgggaagactccaacacacctttaagcaggaaatgactggggtgggggctagtctggagaagagatggaaattctgtggatttgaggggctgaagctgacatag

SEQ ID NO: 221677 - DNA, 1917 bp, synthetic construct
  misc_feature 1..1917: note = Description of Artificial Sequence: Synthetic coding sequence
  source 1..1917: mol_type = other DNA
cttccattcgaccccgcaaataacaatgagccactgcagttcggctccgcttccggaccgctggtaactgaaggattgattgagaacggtggggaatcttcaaaaaagcgtaaacgtacaaacacacctagcgcagacaactctcgcacactgaatgttgacagtaccgcaatgactttgcctatgtccgatccaacggcatgggcaacagccatgaacaatctgggaatggcccctctgggaatcgctggccagcctatcctgcctgacttcgacccagccctgggaatgatgactggtatccctcctatcactcccatgatgccaggcctcggaatcgtaccgcctcctatccctcctgatatgccggtagtgaaagaaatcatccactgtaaatcatgtaccttgtttccccctaatcccaatctgcctccccctgccacccgagaaagaccccctggctgcaagacggtgtttgtcggaggtctacccgaaaatggcacagagcaaataatagtcgaggtgtttgagcagtgcggggagatcattgccattagaaaatctaagaagaacttctgccacatccgtttcgccgaagaatacatggtggacaaagccttgtatctcagtggatatcgcatccgcctgggctcgagtacggataaaaaagataccggcagactgcacgtagacttcgcccaggccagggacgacctgtatgagtgggaatgtaagcagaggatgctcgcccgtgaggaacgccatcggagaagaatggaggaggaacggttacggccaccgtcccctccaccagttgtccactacagtgaccatgagtgctctatcgtagctgagaaactaaaagatgacagcaagtttagcgaagccgtgcagaccctcttaacctggatagaacgcggtgaggtgaaccggcgatctgctaacaatttctattccatgatccagtcagccaactcgcatgtgcggagattagttaacgaaaaggctgctcacgagaaggacatggaggaagccaaagagaaatttaagcaagccctgtcaggtatcttgatccagttcgaacagatcgtggccgtgtatcactctgctagcaagcagaaagcctgggatcacttcactaaagctcagcgcaagaatatttctgtgtggtgtaagcaggccgaagaaatccggaacatacataatgatgaactgatgggcattcggagagaggaggagatggaaatgtctgacgatgagattgaagaaatgacagagaccaaagagaccgaggagagtgctttggtgagtcaggccgaggccctgaaagaagaaaacgattctctccggtggcagctggacgcctacaggaacgaggttgagttgctcaagcaggaacagggcaaagtacatcgtgaggacgaccctaacaaagaacaacagctgaagctgctgcagcaagccctgcagggaatgcaacagcatctgctgaaggttcaggaagaatacaaaaagaaggaggccgagctggagaagctgaaagatgataagttgcaagtagaaaagatgctggagaatctcaaggaaaaagagagctgcgctagtagactctgcgccagtaaccaggatagtgaatatccgttggaaaaaaccatgaactccagccctattaagtctgaaagggaagcacttttggtgggaatcatcagcacattccttcatgtccaccctttcggagccagcatcgagtacatttgttcctacctccatcgcctggacaataagatatgtacctccgatgtggaatgcctcatgggcaggttgcagcacacttttaagcaggagatgacaggcgttggcgcttccctggagaagcggtggaaattttgtggctttgagggcctgaagctcacatag

SEQ ID NO: 221678 - DNA, 1833 bp, synthetic construct
  misc_feature 1..1833: note = Description of Artificial Sequence: Synthetic coding sequence
  source 1..1833: mol_type = other DNA
atgcaacgtgatttcagatggctgtgggtgtacgaaattgggtacgccgctgacaattcacggacgctgaacgtcgacagcaccgccatgacactcccaatgtcagatccgacggcctgggctaccgctatgaacaatttgggaatggcaccactcggcattgctggccagccaatcctcccagattttgacccggcactgggaatgatgaccggtattcccccaatcacacccatgatgcctggtcttggcattgtacctcccccaattccacctgatatgcctgtagtaaaggaaattatccattgcaaaagctgcaccttattccctcctaatcctaacctcccacctcccgcaacccgtgagaggcccccaggctgcaaaacagtgttcgtcggcggactgcccgaaaacggtacagagcagatcatcgttgaggtgttcgagcaatgtggcgagataatcgctattcgaaagtcaaagaaaaacttttgccatattcggttcgccgaagagtatatggtggataaggcactttatctgagtggatatagaatcagacttggatcaagtaccgacaaaaaagacactggcaggcttcacgtggattttgcccaggctcgagacgacttgtatgagtgggagtgcaaacaaaggatgctcgcgcgtgaggaacgccatagaaggaggatggaagaagaacgattgcgcccaccgtcgcccccacctgttgtccattattcagaccacgaatgttcgattgtggcagagaaacttaaagacgattccaaattctctgaggccgtccagacactcctgacttggatagagagaggcgaggtgaataggcgatcagcaaataatttctatagtatgattcagtctgcaaattctcacgtccggaggctagtgaacgaaaaggcggctcatgagaaggacatggaggaagcaaaggaaaagttcaaacaggccctatctggaattttgattcagtttgagcagatagtcgctgtctatcactccgcatccaaacaaaaggcctgggaccacttcactaaagcccagcgaaagaacatttcagtttggtgcaagcaggccgaggaaattcgcaacattcacaatgacgagctgatgggcatcagaagagaagaggaaatggagatgagcgacgatgagatcgaagaaatgacagaaacaaaggaaacagaggagtcagctcttgttagccaagcagaagccttaaaggaggagaacgatagcctaagatggcaacttgacgcctaccggaacgaagtagagctcctaaagcaggaacaaggtaaggtccatagagaagacgatcccaataaggaacagcagctgaaactcctgcaacaagccctgcaaggtatgcagcagcatcttctgaaagtgcaggaagagtataaaaagaaggaggctgaactcgagaaactcaaagacgataagttgcaggtggagaagatgctcgaaaacctgaaggaaaaggagtcctgtgcaagcagactgtgtgcttccaaccaggacagcgaataccctctggagaagaccatgaattcctctcctattaaatcagagcgtgaggcattgttagttggcattattagcacgttcctccacgttcaccccttcggggcatctatcgagtatatctgctcctacctgcacagacttgataataagatttgtactagcgacgttgagtgtctgatgggacgcctccagcacacctttaaacaggaaatgactggggtcggtgcttcactggagaagagatggaaattttgcggcttcgaaggactgaagttaacttag

SEQ ID NO: 221679 - DNA, 1746 bp, synthetic construct
  misc_feature 1..1746: note = Description of Artificial Sequence: Synthetic coding sequence
  source 1..1746: mol_type = other DNA
atgaccctccccatgagtgatccaaccgcctgggccaccgctatgaacaacctaggaatggctcccttagggatcgctggccagccaatccttcctgactttgatcccgcactgggaatgatgactgggatacctcctattacccccatgatgccagggttaggaattgtgcctccccctatccccccagatatgcccgtcgttaaggaaatcatacattgcaagtcatgcacgctatttccacctaaccctaatttgccaccaccagctacgagggagcgtcccccagggtgcaagactgtattcgtgggaggccttcctgaaaatggcaccgagcagatcattgtcgaggtgtttgaacagtgcggtgagatcatcgctattagaaagagtaagaaaaatttttgtcacatacgcttcgcggaagaatatatggttgataaagccctctatttgagtgggtaccgaatcaggctagggtcatcgacagataagaaggacactggcaggctgcatgtggactttgcacaggctcgtgatgatctttatgagtgggaatgtaaacagcgtatgcttgcacgggaagaacgccatcgtcgcagaatggaagaggagaggctgagaccaccttcacctccgcctgttgtgcactactcagaccacgagtgctccatcgtggcagaaaaactaaaagatgactccaaattttctgaagcagtgcagacactgttgacctggatcgagcggggtgaagtgaatcggaggtctgccaataacttttactccatgattcagagcgcaaactcgcacgtcagacgcctggttaacgagaaagccgcacacgagaaagacatggaggaggcaaaagaaaaatttaaacaggccctgtctggcatcctgatacaattcgaacagatcgtggctgtgtaccattccgcgagtaaacagaaagcctgggaccattttaccaaggcccaacggaaaaatatctccgtatggtgtaagcaagcagaagaaatccgcaacatccacaatgacgagctaatggggatccgcagggaggaagaaatggaaatgtccgacgacgaaattgaggagatgaccgaaaccaaggagactgaggaatcggcgctcgtctcacaggcagaagccctcaaggaggagaacgacagcttaaggtggcagttagacgcttacaggaacgaggttgagctgctgaagcaggaacagggcaaagtgcacagagaggacgatcccaacaaagagcaacagctgaagttacttcagcaagcactgcagggcatgcagcagcacctccttaaagtacaggaagagtataaaaagaaagaggctgaactggaaaaactcaaggatgataagctgcaggtggaaaagatgttggaaaacctgaaggaaaaagagagctgcgcgagccgactctgcgctagcaatcaagatagtgaatatcccctggaaaagacaatgaatagctccccaatcaagtcggagcgggaggccctgttggttggaataatctctacgtttctccacgtccacccctttggagctagtatagagtacatctgctcctacctccacagattggacaacaaaatttgcactagcgatgtagagtgtctcatgggacgattacagcacacattcaaacaagagatgactggggtgggcgcaagtctagagaaaaggtggaagttctgcgggttcgaaggactcaaactcacctag

SEQ ID NO: 221680 - DNA, 1746 bp, synthetic construct
  misc_feature 1..1746: note = Description of Artificial Sequence: Synthetic coding sequence
  source 1..1746: mol_type = other DNA
atgactctgcccatgtccgaccccacagcttgggccacggccatgaacaatctgggcatggccccactggggattgcagggcaacccattctcccagactttgatcctgcactcgggatgatgaccggtatcccccctataacaccaatgatgccgggtttggggatcgttccaccccctattcctcccgacatgccagtggtcaaagagataattcattgcaaatcctgtacgctgttccccccaaatcccaacctccccccacctgccactagggagcggccacccggttgtaagactgtgttcgtcggcggattgcctgagaacgggaccgaacagattatagtggaggtgtttgagcagtgtggggaaatcattgccatccggaagagcaagaaaaacttttgtcacatcaggtttgccgaggagtatatggtggacaaggcgctgtacctcagcgggtaccgaatcaggcttggaagctcgacagacaagaaggatacagggcgtctccacgtcgactttgcgcaggccagagatgacctctacgaatgggagtgcaagcagaggatgcttgcccgagaggagagacaccggagacggatggaagaagagcggttgcggccaccatcaccacctccagtcgttcattatagcgaccacgagtgttccatagtggctgagaagctgaaggacgacagtaagtttagtgaagcagtacagaccctgctgacctggattgagcgaggcgaggtgaaccggcgttcagccaacaacttctactccatgatccaaagtgcgaactcccatgtcagaagattagtgaatgagaaggcagcgcacgagaaggatatggaagaggctaaagagaagtttaagcaggctttatctggaattttgatccagtttgagcaaatcgtggccgtttaccactcagccagcaagcagaaagcctgggatcacttcacaaaggcacagcgcaagaacattagcgtgtggtgcaagcaggcggaggagattcggaatattcacaatgacgagctgatgggaattaggagagaggaggagatggagatgtcagatgacgagatcgaagaaatgacagagacaaaagagactgaagagagcgctctagtttcccaagcagaggcgctgaaagaggagaatgatagccttaggtggcagctcgatgcttacaggaacgaagtggagctcctgaagcaggaacagggcaaggtccatcgagaggatgatcccaataaagagcagcagctcaagctgctacagcaagccctgcaggggatgcagcagcacctcctgaaagttcaagaagagtataaaaagaaggaagctgaactcgaaaagcttaaggacgacaagctgcaggtggagaagatgctggaaaacctcaaggagaaggagagctgtgcaagtcggctgtgcgccagtaaccaagattccgaatatccgctggagaagaccatgaattcttctcctattaagagcgagcgcgaggccctccttgtaggcataatctcaactttccttcacgtgcatccatttggagcctcaattgagtatatctgttcatatctacatcgcctggataacaagatttgcacaagtgacgttgagtgccttatggggagactgcagcacacttttaagcaggagatgacgggggtgggcgcaagcctggaaaaaagatggaaattttgcggctttgagggccttaaactgacatag

SEQ ID NO: 221681 - DNA, 1131 bp, synthetic construct
  misc_feature 1..1131: note = Description of Artificial Sequence: Synthetic coding sequence
  source 1..1131: mol_type = other DNA
atgacacttcctatgtccgacccaactgcctgggctaccgctatgaacaatctgggaatggcccctctgggcattgcgggtcagcccattcttccagactttgatccagcccttgggatgatgacggggattccacccatcaccccgatgatgccgggtctcggcattgttccacccccaatacccccagatatgcccgtcgtgaaggagattatccactgtaagtcttgcacactgtttcctcctaaccccaacctaccccctccagccactcgagagcgcccacctggctgtaagaccgtgttcgtagggggtctgccggagaatggcactgagcagatcatcgtcgaggtgtttgaacaatgcggcgaaattatcgctatcaggaagagcaagaagaacttctgtcacatccgcttcgctgaagaatatatggttgacaaggcactgtacctcagcggatataggataaggctggggtctagtaccgacaagaaagatactggtcgactgcacgtcgattttgcccaggccagagacgatctgtacgagtgggagtgcaagcagaggatgctggccagggaagagcggcaccggagacggatggaggaggaaaggctgagaccaccatctccaccgcctgtggttcattacagcgatcacgaatgctctatcgtcgccgaaaaattgaaggacgatagcaagttttccgaggccgtgcagacccttctgacatggatcgaacgcggtgaagtgaatagaagaagcgccaacaatttctactcaatgatacagtctgccaactctcatgtgcggaggctggtgaacgaaaaggccgcacatgagaaagacatggaagaggctaaagagaaattcaaacaggccctcagcggcattctgatccaattcgaacagatcgtggcagtttaccactctgcgtcaaaacagaaggcttgggaccactttacaaaggcgcagcgaaagaacatttccgtgtggtgtaagcaggccgaggaaatcaggaatatccacaacgacgagctcatgggtattcggagagaagaagagatggaaatgtctgatgatgaaatagaggagatgactgagacgaaagaaaccgaggagagctag

SEQ ID NO: 221682 - DNA, 1407 bp, synthetic construct
  misc_feature 1..1407: note = Description of Artificial Sequence: Synthetic coding sequence
  source 1..1407: mol_type = other DNA
atgacactgcccatgagtgatcctactgcatgggccacagctatgaataatctcggcatggcccctttggggattgcaggacagccaattttgccagatttcgaccccgcactgggtatgatgactggtattccgccaattacccccatgatgcctgggcttggaattgtgccccctcccatcccaccagacatgccagtcgtgaaagagataattcactgcaagagctgcacgctgttccctccaaatcccaatttgcctccacctgctacacgggaaagaccccctggctgtaaaacagtgtttgtcggcggactgcctgagaacggaaccgaacagataattgtagaggtcttcgagcagtgtggggaaatcattgccatcagaaagtccaaaaagaatttttgtcacatcagatttgccgaagagtacatggtggacaaggccctatatctgtcgggctatcggatccgtttgggatcatctaccgataaaaaagatacagggaggcttcacgtcgactttgcccaggcgagagacgatctgtatgaatgggagtgcaaacagcgtatgttggccagggaggagcggcacagacgcaggatggaggaggagagacttcggcctccatcaccccctcctgtggtgcattattcagaccatgagtgttcaatagtcgccgaaaaactgaaagatgactcaaagttcagtgaggctgtgcagaccctattgacctggattgagcgcggtgaagtcaatagaaggtcggctaataacttttatagcatgattcaaagcgctaactcacacgttagaagactcgtcaatgagaaggcggcacatgagaaggatatggaagaggctaaagagaagttcaaacaggccctgagcggcatccttatccaatttgagcagatcgtggctgtttaccattccgctagcaagcagaaagcatgggaccattttaccaaggctcagcgaaaaaacatctcggtatggtgtaagcaggccgaagaaatccgcaacatccataatgacgaactcatgggaatccgtagagaagaggagatggaaatgtccgatgacgagatcgaggagatgaccgaaaccaaggagaccgaagaatcagcccttgtgagccaggctgaagccctgaaggaggagaacgactcattaaggtggcaactagatgcataccgcaacgaggtggaactgctgaagcaggaacagggaaaggtgcatagggaggacgaccccaacaaggaacagcagctgaagcttctgcagcaggccctgcaaggaatgcagcaacatctgttgaaagtgcaagaagagtacaagaaaaaggaagcagagctcgagaaactgaaagatgacaagcttcaggtggaaaagatgaagaagtag

SEQ ID NO: 221683 - DNA, 1119 bp, synthetic construct
  misc_feature 1..1119: note = Description of Artificial Sequence: Synthetic coding sequence
  source 1..1119: mol_type = other DNA
atggaatccgaagagcttgcagaccgtgtgctcgacgtggtagagaggtcactctccaattatccattcgacttccagggcgcaaggattattacaggccaagaggagggagcatacgggtggatcacaataaattatttgcttggcaaattctcccagaaaacccggtggttctctatagtgccttatgagactaacaatcaagaaacatttggggcactggatttgggaggagcaagcactcaggtgacctttgtccctcagaatcagactatagagagcccagataatgctctccagtttaggctgtatggcaaagactataacgtgtatacccactccttcctgtgctacggcaaagaccaggccctgtggcagaagttagcgaaggatatacaggttgcaagcaacgagatattgagagacccctgcttccatcctggttataaaaaggtagtgaacgtgagtgacctttacaagacaccctgtaccaagcgcttcgaaatgacactgcctttccagcagttcgaaatccaggggataggtaattaccagcaatgtcatcaatctatcctggaacttttcaatacaagttactgtccttattctcaatgtgctttcaacggaatcttcctcccgcctcttcagggtgactttggggcattctccgctttttatttcgtcatgaagttcctgaacctgacatcagagaaggtgtcacaggaaaaggtcacagagatgatgaaaaagttctgcgctcagccatgggaagagataaaaacgtcatacgccggagtgaaggagaagtacctgtctgagtactgcttctccggaacctacatcctatcactgctcttgcagggctatcacttcacggctgattcttgggaacacatccatttcatcggtaaaatccaaggctctgacgcgggatggacactgggttatatgttaaatctgacaaacatgattcctgctgaacaaccccttagcactcccctcagtcattcaacctatgtcttccttatggtgcttttctcactcgtcctgttcactgtggcaattatcggtttgctgattttccataaacctagctacttctggaaagacatggtatag

SEQ ID NO: 221684 - DNA, 1533 bp, synthetic construct
  misc_feature 1..1533: note = Description of Artificial Sequence: Synthetic coding sequence
  source 1..1533: mol_type = other DNA
atggaagatacaaaggagagtaacgtcaagacattctgtagtaagaacatcctggccattcttggcttttcatcaatcatagctgtaattgctctgctcgccgtggggctcactcagaataaggccctgcccgaaaatgtgaagtatggtatcgttcttgatgctggctctagccatacctctctttacatttataagtggccagccgaaaaagagaacgatacaggagttgtgcaccaagtggaagaatgccgggtgaaaggtccgggtattagcaaatttgtacagaaagtgaacgaaattggcatttacctgactgattgcatggagcgtgctcgcgaggtgattcctcgtagtcagcaccaggagacccctgtctatctgggggctactgctggtatgcgcctcttgcgtatggaaagtgaagaactggctgaccgcgtgctggacgtggtcgagcggtccctttctaactatccttttgatttccaaggtgctcggatcattaccgggcaggaggagggggcttacgggtggattactataaactatctgttggggaaattttctcagaagactcgctggttttcgattgttccctacgaaacaaataatcaagaaactttcggtgccctggacctgggcggagccagtacacaggttactttcgtgcctcagaatcagacaatcgaaagccctgacaacgctttacagtttagactctacggaaaagattacaacgtatatacccactccttcttgtgctacgggaaggaccaggccctatggcagaaactcgccaaagatatccaggtcgcctcgaatgaaatcctccgcgacccttgctttcatcctgggtataagaaagttgtcaatgtgtctgacctttacaagacaccttgcaccaagaggttcgagatgactttgcccttccaacagttcgagatacagggtattggcaattaccaacaatgtcaccagtctatactagaactcttcaacacgtcttactgcccttactcccagtgtgctttcaatggcatcttcctcccacctctgcagggagatttcggagcattcagcgccttttattttgtgatgaaatttctgaatctgactagcgaaaaagtgagtcaggagaaggttacggaaatgatgaagaagttctgcgcgcaaccatgggaggaaataaaaaccagctatgccggagtgaaggagaagtacctaagcgaatactgcttttccggcacgtacatcctgagcttactgttacagggctatcattttacagcagatagttgggagcatattcatttcataggtaagatacaggggagcgatgctggctggacacttggatatatgttaaaccttacaaacatgattcctgccgagcagcctctttcaactcctctctctcactctacctacgtttttcttatggtactctttagccttgtactgttcacggtcgctataattggtctgctgattttccacaaaccatcttacttctggaaggatatggtgtag

SEQ ID NO: 221685 - DNA, 921 bp, synthetic construct
  misc_feature 1..921: note = Description of Artificial Sequence: Synthetic coding sequence
  source 1..921: mol_type = other DNA
atgaaggggaccaaggatctaactagtcagcagaaggaatcaaatgtgaaaactttctgctcaaaaaacattttggctatcctggggttcagttcaattatagccgttatcgccctgctggctgtgggtctgacgcagaacaaggccctccccgagaatgtgaagtatggcatcgtgttggacgctggaagctcacatacctctctttacatttacaagtggcccgctgaaaaggaaaacgataccggagtcgttcaccaggtggaggagtgtcgagttaaaggtccaggaatcagcaaattcgtgcagaaggtgaacgaaattggcatctatctgaccgattgcatggaaagggcgagagaggtcatccctcgatctcagcaccaagagacgccagtctatctcggggctactgctggaatgcggttactcaggatggagtccgaagaactggccgacagggttctagatgtggtcgaacggtctcttagtaattacccgttcgactttcaaggagccagaattattaccggacaagaggaaggggcatacggctggattacgataaactacctgttgggcaaatttagtcagaagacacgatggtttagtatcgtgccatacgagacaaataaccaggagacttttggggcattggacctgggcggagccagcacacaggtcacattcgtgcctcagaaccagacgatcgagtccccggataatgccctgcaatttcgcctgtacggaaaagactataatgtgtacacacactcgttcctgtgttacggcaaggatcaggccctctggcaaaagctcgccaaggacatccaggcgtccatcacacagtcccgcccagcaccattcacatctgcgcctcctgcacccacatcttgttgcttccttttccagatccagtag

SEQ ID NO: 221686 - DNA, 1569 bp, synthetic construct
  misc_feature 1..1569: note = Description of Artificial Sequence: Synthetic coding sequence
  source 1..1569: mol_type = other DNA
atgggaagggaagagcttttcctcaccttctctttctctagcgggtttcaggagtccaacgtgaaaaccttctgctcgaagaatatattagccatcctcggcttttccagcattatagcagtaatagcgttacttgctgtaggactgactcagaacaaagcactgcctgagaatgtgaagtatggcatagttctggatgctggctcgtcacacacgtctctctacatttacaaatggcccgctgagaaagagaacgataccggagtggtgcaccaggtagaagaatgccgcgtaaagggccctggaatcagtaagtttgtacagaaggttaatgagattgggatctatcttaccgactgtatggaaagggccagagaagttatcccaaggtcacagcaccaggagacccctgtgtatttaggcgcaaccgcagggatgcgcctcctgaggatggaaagtgaagaattggctgatcgggtactggacgtggtcgagaggtccctgagcaattatccattcgatttccagggggcaaggattataaccggtcaggaggaaggagcatacggatggattaccattaattatttgctggggaaattctcacaaaagacccgctggttctccatcgttccttacgagactaataaccaggagactttcggggcactggacttaggaggcgcatctacccaggtaacttttgtgccgcagaatcagactattgagtcacccgacaatgctctccaatttagactctacggcaaggattacaatgtctatacacactctttcctgtgctacggcaaggaccaggctttgtggcagaagcttgccaaggatattcaagtggcttcgaacgagattctcagagacccatgcttccatccaggctacaagaaagtggtaaatgtgtcggacctttataaaaccccttgtaccaaacgatttgagatgacactaccgttccagcaattcgagattcagggcatcggtaattaccagcagtgtcaccagtccattcttgagctgtttaatacctcctattgcccatacagccagtgcgccttcaacggaattttcttgccgcctttgcaaggtgatttcggggcatttagcgccttttacttcgtcatgaagttcctgaatttaacttccgagaaagtttcacaagagaaagtaacagaaatgatgaagaaattctgcgcccagccttgggaggagataaagacctcctatgcaggggtcaaggaaaagtacctctcagagtactgttttagtggaacatacattttatctttgttgctccagggctaccactttaccgctgacagctgggagcacattcacttcattggaaagatacagggctcagacgctgggtggactctcgggtacatgcttaacctgacgaacatgattccagcggaacagcctctgagcactcccctatcacactctacctacgtctttttgatggtcctgttcagtctagttttattcaccgtcgcaattatcggcctactcatcttccacaaaccgtcctatttctggaaagacatggtttag

SEQ ID NO: 221687 - DNA, 1554 bp, synthetic construct
  misc_feature 1..1554: note = Description of Artificial Sequence: Synthetic coding sequence
  source 1..1554: mol_type = other DNA
atgaagggcacaaaagaccttacaagtcaacagaaagagtccaacgtgaagaccttttgctctaagaacatactggccattctggggttctctagtatcatcgctgtgatcgcactgttggccgtgggactcactcaaaacaaagcactgcctgaaaatgtgaaatacgggatagtcctggacgctggatcttcacacacgagcttgtacatctacaaatggccagccgagaaggagaatgacactggcgttgtgcatcaggtcgaggagtgccgggtcaaaggacccggtatctcgaagttcgtgcaaaaggtcaacgagattggtatttacctgactgactgcatggaacgagcccgagaagttattccacgaagccagcaccaggaaactccggtatacctgggcgcaactgccggaatgcgcctcctgcggatggaatctgaagaactcgctgacagggtgctggatgtggtggagagaagtctgagtaactaccccttcgattttcagggcgctcgtattattacagggcaggaggagggtgcgtatggctggattacaattaattatctactggggaagttctctcagaaaactaggtggttctctattgtgccctacgaaactaataaccaggaaacgtttggggctctggaccttggcggagctagcacccaggtgacctttgtccctcaaaaccagacgatagaatccccagacaacgctctgcagtttaggttatatggcaaggattataacgtgtatacccacagtttcctatgttatggaaaagaccaggccctctggcagaaactcgctaaagatatccaggtggcctctaatgagattctgagagatccttgtttccaccccggatacaagaaagtggtgaatgtctctgatctctataaaactccatgtaccaaaaggttcgagatgaccctcccttttcaacagttcgaaatccaaggaattggcaattatcagcagtgccaccaaagcatattggagctgtttaacacatcctattgtccctatagccagtgcgcttttaatgggattttcctccctcctttgcagggcgattttggcgctttcagtgcgttctacttcgtgatgaagtttctcaatcttacctcagagaaagtaagccaggaaaaagtgactgaaatgatgaagaaattctgcgcccaaccatgggaggagatcaagacctcttatgctggggtcaaagagaaatacctcagtgagtattgcttcagcggaacatatatcctgagtctgctcctacaggggtaccactttacagccgattcctgggagcacatccacttcatcggaaaaatccaggggagcgatgcaggctggactctgggatacatgctgaacctcaccaatatgattcccgcagaacaaccactatcgacgccactctctcacagtacatacgtgtttctgatggtcctgttcagcctggtcctgtttaccgtagccattataggccttctgatatttcacaagccctcttacttttggaaggatatggtgtag

SEQ ID NO: 221688 - DNA, 1119 bp, synthetic construct
  misc_feature 1..1119: note = Description of Artificial Sequence: Synthetic coding sequence
  source 1..1119: mol_type = other DNA
atggaatccgaggaattggctgatagagttctggacgttgtcgaacgtagtctcagtaattaccccttcgatttccaaggtgcacggataattactggccaggaagagggggcttacggctggatcactataaactacttactgggcaagtttagccaaaagacacgctggttctctatcgtgccctacgagaccaataaccaggagacctttggtgccctggatctgggtggtgccagtacacaggtcacatttgtgcctcagaatcaaacaattgaatcccctgacaatgcgctccagttcaggctctacgggaaggattacaatgtatatacacactcgttcctctgctatggcaaggatcaggccctatggcagaagctagccaaggacatacaggtggcatcgaacgagatccttagagacccgtgtttccatcccggttataagaaggtcgtgaacgtatccgacctgtacaaaaccccctgcaccaaacggtttgagatgacgctgccttttcagcagttcgagattcagggaatcggaaactaccagcaatgtcaccagtccatccttgaattgttcaatactagttattgcccctacagccagtgtgcttttaacgggatattcctgcctcccctgcagggggatttcggagcgttttccgccttctactttgttatgaaattcctcaatctgactagcgagaaggtgtcacaggagaaagttactgagatgatgaaaaagttctgcgcccagccctgggaggagatcaagacctcctatgccggagtgaaggaaaagtacctctcggaatactgcttcagcgggacatacatcctcagcctactcttacaaggttatcatttcacagccgatagttgggagcatatccacttcatcggcaagatccagggttctgacgccggatggactttgggctatatgctgaacctcacaaatatgatacctgccgaacaacccctgagcacccctttaagccatagcacctatgtgtttctcatggtcctattttccttggttcttttcactgtggccatcatagggttactgattttccataagcccagctatttctggaaagacatggtttag

SEQ ID NO: 221689 - DNA, 1209 bp, synthetic construct
  misc_feature 1..1209: note = Description of Artificial Sequence: Synthetic coding sequence
  source 1..1209: mol_type = other DNA
atggagcgcgctagggaagtgatccccaggtcccagcatcaagaaacaccagtgtatctgggtgccactgccggtatgcgcctgctccggatggaaagcgaggaactcgccgatcgggtcctggatgtcgtggagcgatcactgagtaattacccctttgactttcagggggctaggatcataaccggtcaggaagagggcgcttacggctggattacaatcaactacctgcttgggaagttcagtcagaagacacgttggttctcgatcgtgccctatgagacgaataatcaagagacgttcggagccctggatctcggtggcgcatccactcaggtgaccttcgtcccccagaatcagactatcgaatcacccgataatgcattacagttccggctttacgggaaagactacaacgtgtatacacacagttttctttgctatggaaaggatcaggctttgtggcagaagctcgctaaggacatccaggtcgcctcaaacgagatactacgggacccctgttttcaccctggatacaaaaaggttgtgaacgtgagcgacctgtacaagaccccctgcactaagaggtttgaaatgactttgccctttcagcagtttgagatccaggggatcgggaactaccagcagtgtcaccaaagtattctcgagttgtttaacactagttattgcccatattcgcaatgcgccttcaacggaatctttctcccacctctccaaggcgatttcggggctttctctgcattctacttcgttatgaaatttttgaacttgacaagcgagaaagtttcccaggagaaggttacagagatgatgaaaaagttctgcgcccagccttgggaagaaatcaaaacgagctatgctggggtgaaggagaaatacctttctgaatattgtttctctggcacgtacatcctcagcctcctgctccaaggatatcatttcacagcagactcgtgggagcatattcatttcattggaaaaattcagggcagcgatgccggatggacactgggatacatgcttaaccttaccaatatgattcccgcagaacagccgctgtcgacccccctttctcattctacgtacgtgttccttatggttctgttcagtctggtgctcttcaccgtcgccataatcggcttactaatattccacaagccttcctatttttggaaagatatggtgtag

SEQ ID NO: 221690 - DNA, 1419 bp, synthetic construct
  misc_feature 1..1419: note = Description of Artificial Sequence: Synthetic coding sequence
  source 1..1419: mol_type = other DNA
atggccggtaaggtcaggtctctcctccctccgctcttacttgcagccgctgggcttgctggcctactgctgctatgtgttcccacccgcgatgtgagagagcctcctgcccttaagtacggtattgtgctcgacgcaggctcttcccacacctctatgtttatttataagtggccagccgacaaggagaacgacaccgggatcgttgggcaacatagctcctgtgacgtgccagggggtggtatttcgagctacgcagacaacccgtccggtgctagccagtcactggttggttgtctggagcaggctctgcaggacgtacccaaggagaggcatgcaggcacaccactctacttaggagccactgcaggcatgagactgctgaatctgacaaatcccgaggcaagcaccagtgtactgatggcagtgacacatactctgacgcagtaccccttcgattttagaggcgctcgtatcttgagcgggcaagaggagggcgttttcggttgggtgaccgcgaactatctcttggaaaatttcattaaatatggttgggtgggtagatggtttagaccaagaaagggaaccctgggagccatggacttgggaggcgctagcacccagattacgtttgagacaaccagtcccgctgaggatcgggcatctgaggtgcaactgcacctgtacgggcaacactaccgagtgtatacacactcatttctatgctatggcagggatcaggttttacagcgcctcctggccagcgccctgcagacccatggattccacccatgttggccacggggattctccacacaagtgctgctgggcgatgtgtatcagtccccttgtactatggcccaacggcctcagaacttcaactctagtgccagagtttctctgagtggatcctcagatccccatctatgccgggatctagtgagcgggctgttcagtttctcaagctgtcccttctctcggtgttccttcaatggggtgtttcagcctccagtggccggaaactttgttgccttctctgcttttttctatacagtggacttcctgaggacctctatgggtcttcctgtggccacattgcagcagctcgaggcagccgcagtgaatgtgtgtaaccagacttgggctcagcagctcctgtcaagaggatacggattcgacgaacgggcatttggaggtgtgatctttcagaagaaggccgcagacacggcagtcggttgggcccttgggtatatgttgaacctgaccaacctcatcccagctgaccccccaggcctgagaaaaggtactgacttcagttcctgggttgtcttgctcctcttatttgcctccgcgctgttggcagctttggttcttttgttaaggcaggtgcacagcgctaagctgccgagtactatttag

SEQ ID NO: 221691 - DNA, 1488 bp, synthetic construct
  misc_feature 1..1488: note = Description of Artificial Sequence: Synthetic coding sequence
  source 1..1488: mol_type = other DNA
atggctggcaaagtccgatccttactcccgccattgttacttgccgcagctggactggcaggactgttacttctatgcgtccctacgcgggatgtaagagaaccgcctgctcttaagtatggcatcgtgctggatgccggatcctcacacactagcatgtttatctacaagtggcccgcagacaaggaaaatgatacaggcatcgtgggtcagcatagcagttgcgatgtgccaggaggcggaattagtagctatgcagataatccttctggggctagtcaaagcctcgtgggctgcctggagcaagcactccaggatgtccccaaggagagacacgcaggcacacccctttacttaggtgctactgctgggatgcggcttttaaacctcactaatcctgaggcgagtacatccgttcttatggccgtgacccataccctgactcaatatccgttcgatttccgaggggcacgtatcttatcaggccaggaggagggcgtgttcggatgggtcacagcaaactacctgctggagaatttcattaagtacgggtgggtaggacgctggtttaggccaaggaaggggaccttaggtgctatggacttaggcggagcgtccacacagattacatttgagactaccagtccggctgaggacagggcctctgaggtccagctacatctgtacggacagcactaccgcgtatatacccactctttcctctgttacggcagggatcaggttctacagcggctgctggcttcagcactgcaaacgcatggatttcatccctgctggccgagagggttttctacacaggtgctgctaggagatgtgtatcagagtccctgtactatggcccagcgcccacaaaacttcaacagcagcgcgagggtgtctctttccgggagcagcgacccccatctttgtagggatttggtctccggcctcttttcattttcttcctgcccattcagccgctgttcctttaatggcgtttttcagccccctgtagccggtaactttgtagctttttcagcgtttttttataccgtagactttctacgaacttcgatgggactgccggtcgcaacacttcagcaactggaagcggctgcggtgaatgtatgtaaccagacctgggctcagctccaggcgagagtgcctggccagcgtgctcgcctggctgattattgcgctggggctatgttcgtacagcagttgttgtctcgaggctacgggttcgacgagcgggcatttggaggcgtaattttccagaaaaaggccgcagacactgcagtcgggtgggccctgggctatatgctgaacttaactaacttaatccccgcagatccaccgggattgcgcaagggtaccgacttctcaagttgggtggttttgttgctcctttttgccagcgctcttctggccgcactggtactgctgcttaggcaggtccacagcgcaaaactgccctccacaatttag

SEQ ID NO: 221692 - DNA, 1590 bp, synthetic construct
  misc_feature 1..1590: note = Description of Artificial Sequence: Synthetic coding sequence
  source 1..1590: mol_type = other DNA
atgtttacagtcttgacccggcagccctgtgaacaggccggactgaaggctctgtataggacccctactattattgctctggtggtcctcttggtgagcattgtggtcctggtctcgatcacagttatacagatacacaagcaagaagtcctgccacctggtctaaagtacgggattgtcctcgatgccggttccagcagaactacagtgtacgtttatcagtggcctgcagagaaagagaataacaccggcgtggtctcgcaaacgttcaagtgtagcgtcaagggcagcgggatatcttcctacgggaacaatccccaggatgtccctcgtgccttcgaggagtgtatgcagaaggttaagggccaagtgccttcacatctgcacggcagcacgcctattcatttaggggctacggctggcatgagactgttgcgcctgcaaaacgaaacggccgcaaatgaggtcctggaatctatccaaagctacttcaagtcccagccattcgacttccggggtgcccaaatcatctctggccaggaggaaggggtctatggctggattacagctaactatctgatgggtaacttcttggagaaaaacctgtggcatatgtgggtacacccccacggagtggagactacaggcgctttagatctcggaggggcttctacacagatcagttttgtggccggagagaagatggaccttaatacatccgacattatgcaggtcagtctgtatggctatgtctataccttgtacacacattccttccagtgctacggacggaatgaagccgaaaaaaagtttctggctatgctactccagaactctccaaccaagaatcacctgaccaatccatgttaccccagggactattctatatcatttacaatggggcacgtgtttgattcactgtgcaccgtcgatcagaggccagaatcttataatcccaatgatgttataacatttgaaggaacaggcgatcctagcctttgtaaggagaaggttgcatccatctttgactttaaagcctgtcacgatcaggagacttgcagctttgacggagtctaccagcctaaaattaaaggccctttcgtcgcgtttgccggtttctattacaccgccagcgcgttaaacctgtctggaagttttagcctggacacattcaatagctctacttggaacttttgttcccagaattggtcacaactgccgcttctactacctaaatttgacgaggtgtatgcacggtcttattgcttctccgcaaattatatctaccatctattcgtgaacgggtacaagttcacagaggagacgtggccccagattcactttgagaaggaggttggcaatagctcgattgcatggtctctcggctacatgctatcccttaccaatcagattccagctgagtcccccttgatccgcttgcctatcgagccaccggtctttgtagggacgctggcttttttcaccgcagctgccttgctgtgtcttgcctttttggcatacctctgttccgctacgagaaggaagaggcatagtgagcatgcgttcgatcatgctgttgactctgactag

SEQ ID NO: 221693 - DNA, 1590 bp, synthetic construct
  misc_feature 1..1590: note = Description of Artificial Sequence: Synthetic coding sequence
  source 1..1590: mol_type = other DNA
atgttcacggtcctgaccaggcaaccttgcgaacaagccggtttgaaggcattgtaccggacgcctaccattatagccttagttgtgctgctggtctccatagttgttctcgtgagcatcacagtcatccaaatacacaagcaagaggtgctgccacctggcttgaagtacggtatcgtgctcgatgctgggtcttcacggaccaccgtgtacgtgtatcagtggccagcggagaaggagaacaacactggagtcgtttcccaaacattcaaatgcagtgtgaagggctcaggcattagtagctatggcaacaacccccaggatgtgccacgtgctttcgaagaatgtatgcagaaggtgaagggacaagtgcccagtcacctccacggttctaccccgattcatctcggcgctactgctggaatgagactgcttcgactgcagaacgagactgctgcaaacgaagtgctcgagagcatacaaagctattttaaatctcagcctttcgattttaggggagcccagatcattagcggacaggaagagggggtctacggatggattacagcaaactacctgatgggaaacttcctggaaaaaaatctttggcatatgtgggtgcatccccatggtgtcgagaccacaggcgctctcgacctggggggagctagcacccagatatcctttgtggccggtgagaaaatggacctgaataccagcgacatcatgcaggtgtcattgtatggctacgtatatactctgtacactcacagctttcagtgctacggccgaaacgaggcagagaagaagttcctcgctatgctgctgcagaattcgccaactaagaaccatctcaccaatccctgctacccacgagactacagcatttcctttaccatgggccacgttttcgactccttgtgcaccgtggatcaacgtcctgagagttacaatccaaatgatgttataacgttcgaggggactggggacccaagtctgtgtaaagagaaggtggccagcatctttgacttcaaggcctgtcacgaccaggaaacatgctcctttgatggcgtataccaaccgaaaatcaagggtccattcgtcgccttcgctggcttctattacacggcctctgccctgaacctcagtggcagtttctccctcgatacatttaatagcagcacgtggaacttttgctcccaaaattggtcccagttgcctctacttcttcccaagtttgatgaggtgtacgctcggagttattgcttttccgccaattatatctaccatttattcgtcaacggctataaattcaccgaagagacctggccacaaatccacttcgagaaagaggtgggcaattcctcgattgcatggtcattgggctacatgcttagcctgactaatcaaattccagctgagagtcccttgatcaggctccctattgagcctccagttttcgtggggaccctagctttcttcaccgcagctgccctgctgtgcctggcttttctcgcttacctatgttccgctacaagacgcaaacggcactctgagcatgcatttgatcacgcagtcgattcagactag

SEQ ID NO: 221694 - DNA, 1287 bp, synthetic construct
  misc_feature 1..1287: note = Description of Artificial Sequence: Synthetic coding sequence
  source 1..1287: mol_type = other DNA
atggctacttcttggggcactgttttttttatgcttgtggtaagctgtgtctgtagtgcagtttcccaccgtaatcagcagacctggttcgagggcattttcctgtcatccatgtgccccattaatgtcagcgcatccacattatacgggattatgtttgacgccggatccaccggcaccagaatccatgtctatacttttgtgcagaaaatgccagggcagctcccaatcctggaaggggaggtctttgattctgtgaaaccgggactttcagcttttgtggaccagcccaagcagggagccgaaacagtccaagggctgcttgaagtggcgaaggactccatccccagatcgcactggaaaaaaactcctgtggtgctgaaggctaccgctggattacgcctcctaccagaacataaagccaaagccttgctgtttgaagtgaaggagatcttccggaaatctccatttctggtgcctaaaggaagcgtgagcatcatggacggaagcgacgagggcatactggcatgggtcaccgtgaacttcctcaccggtcagctgcatgggcatcggcaggagaccgtgggcacgctggacttgggaggagcatcgacacagatcacttttctgccccaattcgaaaagaccctggagcaaactcctagaggctacctgactagcttcgaaatgttcaatagtacctataaattgtacacccattcttacctgggctttggcctcaaggctgccaggctcgcgacacttggagccctggagactgagggtacagatggccacaccttccggtcagcttgcctgccgagatggttagaagccgagtggattttcggcggtgtgaagtaccagtacgggggaaaccaggagggcgaagtgggcttcgaaccatgttacgccgaggttctgcgtgttgtgagaggtaaactccatcagccagaggaggttcagagaggttcattctacgcctttagttactattatgacagagctgtcgataccgacatgattgattacgaaaaaggcggaatactcaaagtcgaggacttcgagcgcaaagctagggaggtgtgtgacaatctggaaaacttcacctcgggtagtccgtttctgtgtatggatctgtcttacatcacagccctgcttaaggatggcttcggctttgcagattctaccgtcttgcagctgactaaaaaagtcaacaacatagagaccggatgggcacttggagctacctttcacttgctccagtctctcgggatcagccactag

SEQ ID NO: 221695 - DNA, 1404 bp, synthetic construct
  misc_feature 1..1404: note = Description of Artificial Sequence: Synthetic coding sequence
  source 1..1404: mol_type = other DNA
atgcagccacagcatgggccatggcagacccgtatgagaaaaatcagcaaccacggaagccttcgggtcgccaaagtcgcatatccgctgggcctctgtgtaggggtttttatatatgttgcttatatcaagtggcaccgcgctacggctactcaggcatttttctctattacccgtgccgcaccgggtgcaaggtggggccagcaggctcatagtccattgggcaccgctgccgacgggcacgaagtcttctacgggattatgtttgatgccggtagcactgggacgagggttcatgtcttccaattcacacggcctccgagggaaacacctaccctgactcatgaaacctttaaggctctaaaaccaggactgagtgcttacgctgacgatgtcgagaagtctgcccagggaatacgggagctactcgacgtggcgaagcaggacattcccttcgatttttggaaagcgacccctcttgtgttaaaggccactgccggattgaggctgttacctggcgagaaagcacaaaagctgctgcagaaggtgaagaaagtgttcaaggcctcccccttcctcgttggggacgactgtgttagcataatgaacgggactgatgaaggagtgtccgcctggattaccattaattttttgacagggagcctcaaaacacccggagggtcatctgtgggaatgctggacctgggtggcggatctacccagatagcctttctccctcgagtcgaaggcactctccaagcctcccctccaggctacctaaccgcccttagaatgtttaataggacatataaactgtactcctatagttacctgggactgggactgatgtccgctagattagccatccttgggggagtggaaggccagccggcaaaagatggaaaagagcttgtctcgccctgcctgtctccctcatttaaaggggagtgggagcacgcagaagtgacataccgcgtgtctggacaaaaggctgccgcttcactccacgaactttgcgctgctagggtgtccgaggttctccagaatcgcgtacaccggactgaggaagttaaacacgtagacttttatgctttttcttactattacgatctggccgcaggtgtcggactaattgatgccgagaagggcggttccctggtggtgggggattttgaaatcgcagcaaaatatgtgtgtcgcaccttggagacccagccccagtcttccccctttagttgtatggaccttacttacgtgtctttactactgcaagaatttggctttcccaggtcaaaggtgctcaagctgaccagaaaaattgacaacgtggaaacatcgtgggccttaggcgctatcttccactacatcgatagcctcaatcgtcaaaagtcgccggcttcctag

SEQ ID NO: 221696 - DNA, 1452 bp, synthetic construct
  misc_feature 1..1452: note = Description of Artificial Sequence: Synthetic coding sequence
  source 1..1452: mol_type = other DNA
atgaaaaaaggcatcaggtatgagaccagccgaaagacatcctacatatttcagccccagcatggcccttggcagactagaatgcgtaagatcagcaaccatggatctctcagagttgccaaagtcgcttaccctctgggcctgtgtgtaggggtctttatctacgtggcatatatcaagtggcacagagccactgctacccaggcctttttcagcataactcgagcagcaccaggtgccaggtggggacagcaggcccatagccccctgggaactgccgcagacggtcatgaagtgttctatggcattatgtttgatgcaggatcgacagggaccagggtgcacgtatttcagttcacgagacccccaagggaaacccccaccctgactcacgagactttcaaggcactgaaacccggactatcagcatatgccgatgacgtcgagaagagcgcacagggaatccgagagctgttggacgtggccaaacaggatatcccttttgatttttggaaggctacacccctggtgctcaaggctacggccggtcttcgcctgctgcctggggagaaagcgcagaagttgctgcaaaaagttaaaaaagtgttcaaagccagtcctttcctggtcggcgacgattgcgtgtcgattatgaacggaacagatgaaggggtttctgcatggataactatcaattttctcacgggatctctcaagacccctggagggtctagtgtaggtatgctcgacctcgggggaggcagtacacaaatcgccttcctacctcgcgttgaaggcaccctacaggcatctcccccaggctacttgacagccctgagaatgttcaaccggacctataagctgtattcctacagttacctggggctgggattaatgagcgccagactggctatcctgggaggtgtagaggggcagcctgctaaggatggaaaggagcttgtttccccgtgcctgagtcccagctttaagggagaatgggaacatgccgaagtgacctacagggtcagtggccagaaagccgctgcaagcctccacgaattatgtgccgcaagggtctcagaagtgctgcagaacagagtgcatagaactgaggaggtcaaacacgtggatttctatgcctttagctactattatgacctggcggctggagttggcctgatcgatgccgagaaggggggaagcctggtggtgggagacttcgagatcgcggctaaatacgtgtgcaggaccttagaaacacaaccacagtcttcaccgttcagttgcatggacctcacctatgtcagcttactactgcaggagtttggctttcctcggagtaaagtgttgaagctaacccgtaagatcgataacgtggagacctcttgggccctcggagcaatttttcattacattgactcactgaaccggcagaaatcccccgcatcctag

SEQ ID NO: 221697 - DNA, 1104 bp, synthetic construct
  misc_feature 1..1104: note = Description of Artificial Sequence: Synthetic coding sequence
  source 1..1104: mol_type = other DNA
atgtttgatgcaggatccacaggcacccgggtgcacgtgttccagtttacacgcccacccagggaaactcccacgttgacgcacgaaactttcaaggctctcaagcctggactgagcgcctacgccgacgatgtggaaaaaagcgctcaggggatcagggagctgctcgatgtcgctaaacaggatatcccattcgatttctggaaagcgactccacttgtgctgaaagcaacggctgggttgaggctgctaccaggtgaaaaggcccagaagctgctccaaaaagttaaaaaggtgttcaaagcttccccatttctggtgggggacgactgtgtaagcataatgaacggcactgatgagggcgtatctgcctggattactatcaactttctgaccggtagtctgaagacgccaggcggtagcagcgtcggaatgctggatctgggaggaggcagcacgcagatcgcttttctgccacgggtcgagggcactctccaggccagcccaccaggctacctaactgctctgagaatgtttaatcgcacatacaagctctatagctacagttatttgggcctcgggttgatgagtgcaaggctcgccatcctgggcggagtggagggccagccggcaaaagacgggaaggaactggtgtccccttgcttatcacctagttttaaaggcgaatgggaacacgcagaggtcacatatcgggtgtcaggccagaaggctgccgcttcccttcatgagctttgtgcggcaagagtgtccgaggtactgcagaacagggtacaccggactgaagaggtaaaacacgtagacttttatgcattttcctattactacgatctcgccgcaggcgtgggactgattgatgctgaaaagggaggctcactggtggtgggcgacttcgagatcgcggctaaatacgggggaagtcatctcgagagagaaggcacgtgtctcatccccagcgtgagtgatcccggtgacacagcagctgaacaacctctgttgatgcatgggccacacctgcgccagccggcaaccccaggcgtccgcctcagtcaagagcagagcgcagaggctcactcagagaattag

SEQ ID NO: 221698 - DNA, 1455 bp, synthetic construct
  misc_feature 1..1455: note = Description of Artificial Sequence: Synthetic coding sequence
  source 1..1455: mol_type = other DNA
atgaagaaagggatcaggtatgaaacatccaggaaaactagctatatttttcaacagccgcaacatggcccatggcagaccaggatgagaaagattagcaatcacgggagcttgagggttgccaaagtggcataccctttggggctgtgtgttggcgtttttatctacgtggcttacattaaatggcacagggcgacagccacacaggctttctttagtattacacgcgctgcccctggagctcgctggggccagcaggcacatagtcctttgggaacagctgccgacggccacgaggttttttacggcataatgttcgatgccggatcgaccgggactcgtgtgcacgtatttcagttcaccaggccacctcgcgaaacgcccacactgacacatgagacattcaaagccttgaaacccggtctgagtgcttacgcggacgatgtggagaagagcgctcagggaataagagagctcctggacgtggccaagcaagacatccccttcgacttttggaaagccactcctttagtgttaaaagccaccgctggcctccggctgctgcctggcgaaaaagcgcagaaactgctacaaaaggtgaagaaggtgttcaaagcctctccatttctcgtcggggatgactgcgtcagcattatgaacggcacggacgaaggcgtcagtgcctggatcaccatcaatttcctgaccgggagcctcaaaacaccaggcggttcctccgtgggcatgttagacctgggtgggggatctacgcaaatcgcgttcctgccaagagtggaagggacattacaggcttcccctcccggatatctgaccgcgctgcgcatgtttaatcgtacctacaagctgtactcctattcctacctagggctcggactcatgagcgcgagactggctattcttggcggtgtcgaaggtcagcccgcaaaggatggtaaggaattagtgtcaccttgtctcagtccaagcttcaaaggcgagtgggaacacgccgaagtgacttaccgggttagcggacagaaggccgctgcctctttacacgagctgtgcgcagccagagtttccgaggtgttgcaaaatagggtgcatcggacggaggaggtgaagcatgtggatttctacgcatttagctattactacgacctcgccgctggcgttgggttgatcgacgccgagaagggaggtagtctggtcgttggcgattttgagattgccgctaagtatgtatgcaggacgcttgagacacagccccagtcctcccctttctcttgtatggacctcacttacgtcagcctgttgctgcaggaattcggatttcccaggtccaaggtcctcaaactgacccgaaagattgacaatgtggaaactagttgggccctgggcgctatttttcattatatcgactctctgaacagacagaaaagtcccgctagctag

SEQ ID NO: 221699 - DNA, 888 bp, synthetic construct
  misc_feature 1..888: note = Description of Artificial Sequence: Synthetic coding sequence
  source 1..888: mol_type = other DNA
tgagtgctcaaagcaactgcagggttgaggctcttgcccggagaaaaggcccagaaattgcttcagaaagtgaaaaaagtgtttaaggcatccccgtttcttgtgggcgacgactgcgtgagtatcatgaatggcacggatgaaggggtctccgcctggataaccattaacttcctgactggaagcttgaagaccccaggcggtagctctgtgggcatgcttgatctgggcggaggatctacgcagatagccttcttacctcgcgttgagggaaccctacaggctagtcctccaggctacctgacagccctgaggatgtttaatcgcacgtacaaactgtattcttactcgtacctggggctgggcctgatgagcgctcggctggcaatactaggcggtgtggagggacagcccgctaaagatggcaaggagctagtgtccccctgtctctctccctcttttaaaggggaatgggagcacgccgaagtcacataccgggtctcgggtcagaaggctgccgcttcgttgcacgaactctgtgcagcacgcgtttctgaggttcttcagaaccgcgtccacaggaccgaagaggtaaagcacgtcgacttttatgccttttcctattactacgatctggccgctggtgtcggcctgatagacgcagaaaaggggggtagcttagtggtcggtgatttcgagatagcggcaaagtacggcggttctcatttggaacgggaggggacctgcttaatcccgagcgtgtcggatccgggtgatacagccgcagagcagccgctgcttatgcatggccctcacctgagacagcctgccacacctggggtgcggttaagtcaggaacagtccgcggaggcacactctgaaaactag

SEQ ID NO: 221700 - DNA, 681 bp, synthetic construct
  misc_feature 1..681: note = Description of Artificial Sequence: Synthetic coding sequence
  source 1..681: mol_type = other DNA
atgcctcagcacggcccttggcagacacgcatgcgcaagataagtaatcatggatctttgagagtcgccaaggtggcctatccactgggcctctgcgtcggcgttttcatttatgtggcgtatatcaagtggcaccgggcaaccgctacacaggctttcttcagcatcacaagggccgcacccggtgcgcgatggggccagcaggcccactctcctctcggcactgccgctgacggccacgaagtgttttatggcatcatgttcgacgctggctctaccgggacccgcgtccacgtcttccagtttacaagacctcctcgggaaaccccaaccttgacccatgagacattcaaagccctcaagcccggattatctgcctacgcggacgatgtggagaaagttaagaaagttttcaaggctagcccttttttggtgggtgatgattgcgttagcatcatgaacggcacagatgagggagtgagcgcctggatcacaatcaactttctgaccggttccctgaaaacaccaggcggaagcagcgtcgggatgctcgatctcggcggagggtccactcaaatagcctttcttcccagggtggaaggaactctgcaggctagccccccagggtaccttaccgcactcaggatgttcaatcgaacatacaagctgtactcatactag

SEQ ID NO: 221701 - DNA, 588 bp, synthetic construct
  misc_feature 1..588: note = Description of Artificial Sequence: Synthetic coding sequence
  source 1..588: mol_type = other DNA
atgcagccgcagcacggaccctggcagacaaggatgagaaagatttctaatcatggatccctgcgagtggctaaggtggcttaccctttgggactgtgtgtgggcgtgttcatatacgtggcatatataaagtggcaccgggcaacggcaacgcaggcctttttctctattacaagagcggcaccgggagctcggtggggtcaacaggcccacagcccgcttggaacggccgcagacggccacgaggtcttctatggtattatgtttgatgctggctctaccggaacccgagttcacgttttccagttcacaaggccgcctagagaaacgcccacactgacccatgagacatttaaggccctcaaacccggactgagcgcttacgcagacgacgtcgagaaggtaaaaaaggtgtttaaagcatctccttttttggtcggggatgactgtgtctctatcatgaacgggactgatgagggcgtgtccgcttggatcacaatcaactttttgaccggttcactcaaaactccaggaggatcgtccgtgggcatgctggatctcggtggcggatcaacacagatcgcgtag

SEQ ID NO: 221702 - DNA, 903 bp, synthetic construct
  misc_feature 1..903: note = Description of Artificial Sequence: Synthetic coding sequence
  source 1..903: mol_type = other DNA
atgaaaaaggggattcggtatgaaacttctcgtaagacctcttatattttccaacagcctcagcacggaccctggcagacacgaatgcgaaagattagtaaccacggtagtctccgggtggccaaggtggcttatcccctggggctctgcgtcggagttttcatctacgtggcttacatcaagtggcacagggcgaccgcgacacaagccttcttcagcatcactcgcgcagcgcctggcgcacgctggggtcagcaggcccactccccgctcgggactgccgcagacgggcacgaagtgttttatggaattatgtttgacgccggttccaccggcactcgggtccatgtgtttcagttcacacggccacctagagagacaccaactctgacccacgagacctttaaggcactaaagccgggtctgtctgcctatgcggacgacgttgaaaaagtaaagaaggtctttaaggcaagtccatttctcgttggcgatgattgcgtctctattatgaacgggacagatgaaggggtgtccgcctggattacgattaactttttaacggggtcgttaaaaacccccggaggcagtagcgtcggcatgctggacctggggggaggttctacccagatcgcctttctgccacgggtggagggcaccctgcaagccagccctcccggatacctgacggccctgcggatgtttaatcgaacctataagctgtattcatatagttaccttgggctcggtctgatgtccgcccgtttagctatactaggtggggtagagggtcagccagccaaggacggcaaagaattagtgagtccatgtctgtccccgagtttcaaaggggaatgggaacacgccgaagtaacttatcgggtcagcggtcagaaggcgtag

SEQ ID NO: 221703 - DNA, 453 bp, synthetic construct
  misc_feature 1..453: note = Description of Artificial Sequence: Synthetic coding sequence
  source 1..453: mol_type = other DNA
taacccggacggggatctcccaaggaccggctgcctccagcccctcgcaagagggccctcgttagcgttggcgtggccgagagggccgtccatgagactcccaccctcacacacgagaccttcaaggcacttaaacccggtctatctgcatacgctgacgacgttgaaaaagtgaagaaagtattcaaagctagtcctttcctggtcggagatgattgtgtctccattatgaatggcaccgatgagggggtgtctgcctggataactataaacttccttactgggtctctgaagacgcccggaggctcatcagtcggaatgctcgatctggggggtggcagtacgcaaatcgcgtttctgccacgcgttgagggcaccctccaggcatcgcctccaggctacctgactgctctcagaatgttcaacagaacctataaactgtatagttattag

SEQ ID NO: 221704 - DNA, 1314 bp, synthetic construct
  misc_feature 1..1314: note = Description of Artificial Sequence: Synthetic coding sequence
  source 1..1314: mol_type = other DNA
atgaaaaagggcattcggtacgaaacttcgcggaagacttcctacatattccagcagcctcagcatggcccttggcagactcggatgcggaagatctccaaccatggttccctccgagtggccaaagttgcatacccgctggggttatgcgttggggtgttcatctacgttgcctatatcaaatggcatcgggcaacagcgacgcaagcgttcttctcaatcaccagggccgctcctggagccaggtggggacagcaggctcactctccccttggaaccgctgcagacgggcacgaagtattttacggtatcatgtttgacgcaggctcgacgggaacacgagtgcatgtctttcagttcacacggccaccgagagagacccctaccctcactcacgagaccttcaaggccttgaaaccgggactctccgcttatgccgatgacgtcgaaaaatctgcacagggcattcgggaacttcttgatgtcgcaaagcaggacattccatttgatttttggaaggctacacccctcgttcttaaggccactgcgggactgcgactcctgcccggtgagaaagcccagaagttgttacaaaaagtgaagaaggtctttaaggcctcaccgtttctggtcggcgatgattgtgtcagcatcatgaacggtactgatgaaggcgtgtccgcttggattaccatcaattttcttaccggctcactgaaaacgcccggtggcagtagcgtcggcatgctggacttggggggaggaagtacccaaattgcctttttgcccagagtggagggcactctgcaggcaagccctcctggctacctcaccgccctccggatgttcaatcgcacttacaagctgtacagctactcatacctgggactagggctgatgtcagctcgtctggccattctgggaggggtggaggggcaacctgctgcttctctacacgaactgtgtgccgcaagagtttcggaggtgctccaaaatcgggtgcaccgcaccgaagaggtgaagcacgtagatttttacgcttttagttactactacgacttggccgcaggtgtgggccttattgatgccgaaaagggcggttccctagtcgtgggggacttcgaaattgctgccaaatacgggggttcacacctggaacgggagggcacctgccttattccctcggtgtctgaccctggagacacagccgctgagcagccccttctgatgcacggacctcacctaaggcagcccgcaacacccggagtacgcctcagccaggaacagagtgctgaggcccatagcgagaattag

SEQ ID NO: 221705 - DNA, 945 bp, synthetic construct
  misc_feature 1..945: note = Description of Artificial Sequence: Synthetic coding sequence
  source 1..945: mol_type = other DNA
taaaacagaggtgttgtgagccggggatggaggcccggatggcgccgtccagggagagggtcccctaaggatcgactgccgcctgctccacgaaagcgggcactagtatctgtaggcgtggccgagcgtgccgttcacgaaactccaactcttactcatgaaacatttaaagcgctgaagccgggactgtccgcgtacgcagacgacgtcgaaaaatccgcccagggtattagagaacttcttgacgttgccaaacaggacatccctttcgacttctggaaagccacacctctcgtgctgaaagccaccgctggtctgcgcttactaccaggcgaaaaggcccagaagctccttcagaaagtcaaaaaggtatttaaagcttcccccttcctcgtgggcgacgactgcgtgtctatcatgaacggcacggacgagggagtgagtgcgtggatcactatcaacttcttaactggatcgctcaaaacccccggagggtctagtgtcggtatgctggacctgggcggaggctctacgcagattgccttcctcccccgtgttgagggtactttgcaagcaagcccgcctgggtacctaactgctctgcgaatgttcaatagaacttacaaactttattcatattcctatttggggctgggcttgatgtctgcacgactcgccattctcggcggtgtggaaggacagccagcgaaagatggtaaagagctggtctctccatgcctgtcacctagtttcaagggcgaatgggaacacgccgaggtgacatacagggttagcgggcagaaggcggctgcctctttgcacgagctgtgtgctgccagagtgtcagaagtgttacaaaaccgggtacacaggacggaagaagtgaagcacgtggacttctacgccttctcttattactatgatttggctgcgggagtgggatag

SEQ ID NO: 221706 - DNA, 567 bp, synthetic construct
  misc_feature 1..567: note = Description of Artificial Sequence: Synthetic coding sequence
  source 1..567: mol_type = other DNA
atgaagaagggtatccggtatgagaccagcaggaagacctcctatatctttcagccacaacatggcccttggcagactcggatgcgcaaaatcagtaatcacggctcccttagggtggccaaagtcgcctaccccctcggcctgtgcgtaggtgtctttatttacgttgcttatataaagtggcacagggcaacggctacccaggcctttttcagcataaccagagctgcccctggggcaagatggggccaacaagcccactcccctctcggtacagccgctgatggccatgaggtgttttacggtattatgttcgacgcgggttcaacagggacgcgggttcacgttttccaattcactcgtccacctcgagagactcctacactgacacacgagacattcaaagcgttaaaaccaggtctttctgcctatgccgatgacgtcgagaagagtgcccaggggatccgtgagctgctcgacgtcgctaagcaggacatacctttcgatttttggaaggcaacccccctcgttctgaaggccacagcgggactgcgcctcctcccctag

SEQ ID NO: 221707 - DNA, 891 bp, synthetic construct
  misc_feature 1..891: note = Description of Artificial Sequence: Synthetic coding sequence
  source 1..891: mol_type = other DNA
atgcctcagcacggaccatggcaaacgagaatgcggaaaatatctaatcatgggtctcttcgtgtcgcaaaagttgcttacccgttaggcctgtgcgtaggggtgttcatttacgtagcctacatcaaatggcaccgtgctactgctacccaggccttcttctcaataacaagagccgctcccggtgctaggtggggccagcaggcacattcgccccttgggactgcggcagacggacatgaggtgttctacggtatcatgttcgacgcaggttctacaggaacgcgggtccatgtcttccaattcaccaggccaccgagagaaacccctacactcacacacgaaacctttaaggccctgaagcctggcctgtcagcctacgcagacgatgtcgagaagtccgcccaggggatccgcgagctgctcgacgtcgccaaacaggatattccatttgacttctggaaggctacacctctggtactgaaggccactgctggactacgcctcttacccggagagaaggcgcaaaagctgttgcagaaggtcaagaaggtgttcaaagcatccccgttcctggttggcgatgattgtgtgagcatcatgaacggcacagacgaaggtgtgagtgcttggatcacaataaattttttgacaggctccctgaaaacccccggagggagcagtgtggggatgctcgatctagggggtgggagcactcagatagccttcctccccagagtggaaggaacattgcaagccagccctccgggatatctgaccgcgctgcggatgtttaatagaacctataaactgtatagctactcctatctgggcctgggcctgatgagtgccaggctcgccattttggggggtgttgagggtcagccatag

SEQ ID NO: 221708 - DNA, 936 bp, synthetic construct
  misc_feature 1..936: note = Description of Artificial Sequence: Synthetic coding sequence
  source 1..936: mol_type = other DNA
tgaggctcgaccggcacacgcgtgcatgtgttccaatttacccggccaccacgggagactccgactctgacccatgagacgttcaaagcccttaagccagggttgtcggcatacgcagatgatgtggagaagagcgcgcaaggcatccgcgaacttttagatgtggctaagcaggacataccatttgacttttggaaagctactcccctggtcctgaaggcaaccgcaggactgcgcctgctgcccggagaaaaggcgcaaaagctgctccaaaaagtgaaaaaggttttcaaggcttccccattcctggttggagacgactgtgtgagcattatgaacgggactgatgaaggggtgtccgcctggattacaatcaatttcttgacagggagcctgaagacccccggtggcagcagtgtaggcatgctggatctgggcggaggctccactcaaattgcatttctgcctagagttgaagggacccttcaggcctcccctccagggtacctgactgctctccgtatgtttaaccggacctataaactatacagctattcttaccttggtctcggcctcatgagcgcgagacttgctattcttggcggtgtggaggggcaacctgccgctagtctgcatgagctgtgcgctgctagagtttccgaagtgttgcagaatcgggttcatcgcaccgaagaagtgaagcacgtggatttttacgcttttagttactactatgaccttgcagctggtgttggcctaatcgatgccgagaagggtggatcattagtggtgggagattttgaaattgccgctaagtatgtgtgtcgcaccctggagactcaacctcagtccagccctttctcctgcatggacctaacttatgtgagcctgctgctgcaggagttcggcttccccaggagtaaggtgcttaagtag

SEQ ID NO: 221709 - DNA, 942 bp, synthetic construct
  misc_feature 1..942: note = Description of Artificial Sequence: Synthetic coding sequence
  source 1..942: mol_type = other DNA
aacagaggagttgtgtcacgcggttggcgccctgggtggagacgccctggtcggggaagccctaaagatcgtctgccacccgctcctcgcaagagggctctggtatctgtgggagtggcagagcgcgcagtgcacgagactcctaccttgacacacgagacatttaaggccctgaagcccggacttagcgcatatgccgatgatgtggagaaatctgcccaggggattagggagctgctggatgtggccaaacaggacataccattcgacttctggaaagccaccccgttggtccttaaggctaccgcaggattacggctcctcccaggagaaaaggcccagaagctcctgcagaaggtgaaaaaagtttttaaagcatctccttttcttgtgggggatgactgtgtttcaatcatgaacggcactgatgagggggtgtccgcttggataactattaatttcttgaccggatctctcaagactcctggcggatcatcggtgggtatgttagatttgggagggggatctacccagatagcctttcttccacgcgttgagggaacactgcaggcttccccgcctggctacctgaccgcattgagaatgtttaataggacctacaagctttacagttatagctatctcggcctaggcctgatgtccgccaggcttgcaattctgggcggtgtcgagggccagcccgctaaagacggcaaggagttggtgtctccctgtttgagtccaagctttaagggagaatgggaacacgctgaggtgacataccgggtgagcggtcagaaagcagcagcatccctgcatgagctttgcgccgctagagtctccgaggtactccaaaatagggtgcaccgaacagaggaggttaaacacgtcgatttttacgccttcagttattactacgacctggcagctggagtcggatag

SEQ ID NO: 221710 - DNA, 2778 bp, synthetic construct
  misc_feature 1..2778: note = Description of Artificial Sequence: Synthetic coding sequence
  source 1..2778: mol_type = other DNA
atggaaagggatggatgtgccggagggggaagtcgaggtggggaggggggacgggcaccaagagagggtccagccggaaacggacgcgatagagggcgaagccacgccgctgaagcgcctggagaccctcaagccgctgcctcgctccttgccccaatggacgtgggggaggaacctctagagaaggcggcaagggccaggaccgctaaagatccgaatacatacaaggtattgtctctcgtactcagtgtgtgcgtgctcacaacaattttaggatgcatttttgggttgaagccttcctgtgccaaggaggtgaagtcatgtaaaggccgttgcttcgagagaactttcggaaattgcaggtgtgatgctgcctgtgtggagctgggcaattgctgcctcgattaccaggagacctgtatcgagccagaacacatttggacatgcaataaatttagatgcggtgagaagcggttgacaagaagcctgtgtgcctgctccgacgattgcaaagataagggggactgctgtataaattatagctcagtatgtcaaggagagaagagttgggtcgaggagccctgtgagtcaattaatgagcctcagtgtcctgcaggcttcgaaacaccccctactttgctcttctccctggacggctttcgagccgaatatctgcacacttggggcggacttctccctgtgatttcaaagctgaagaaatgcggcacctacacaaagaacatgcggcctgtgtacccgactaagacatttccaaatcactactccattgtgaccgggctctatccagaatcacatggaattatagataacaaaatgtatgatcccaagatgaacgctagcttttcccttaaatcaaaggagaaatttaatccagagtggtacaaaggcgagcccatttgggtgactgcaaagtaccaaggtctgaagagtggtaccttcttctggcccggatctgacgtcgagattaacggcatctttcccgacatttataagatgtataatgggtccgtaccattcgaggagagaatactcgcggtgcttcaatggttgcagttacccaaagacgaacggcctcatttctacacattatatctcgaagagcccgatagttcagggcattcttacggcccagtttcttcggaagtcattaaggctcttcagagagtcgacgggatggtgggtatgctcatggacggcctgaaagagctcaacttacaccgttgcctgaaccttatcctgattagcgatcacgggatggaacaaggctcctgcaagaaatatatatatttaaacaagtatctgggggatgttaaaaatatcaaggtaatctatggtccagccgcaaggctgcggccttccgacgttcctgacaagtactacagtttcaattatgagggaatagcccgaaatctgtcctgccgtgagccgaaccaacatttcaagccatacctaaagcacttccttcccaagcgactccattttgccaagtcagatcgcatcgagccattgaccttctatctcgatccgcagtggcagttagctctcaacccaagtgagagaaaatactgtgggtccggattccacggaagcgataatgttttttccaacatgcaggccctgttcgttggttatggtcccggatttaaacacggcatcgaggcggacacctttgaaaacattgaagtgtataatctcatgtgcgatttgcttaatcttacccctgcgccaaataatggcacccatggttccctcaatcaccttctcaaaaaccctgtgtataccccaaagcatccaaaggaagtgcatcctcttgtgcagtgtccattcactcgcaatcccagagataatctggggtgctcatgcaatccatcaatcctgcctatcgaagacttccagacacagttcaatctgaccgtcgctgaagagaaaatcataaaacacgagactctgccttacggccgtcccagggtcctacaaaaagagaacacaatctgcctgctgagccagcaccagttcatgagtggctattctcaggacattctgatgcccctgtggaccagttacactgtggaccgaaatgatagtttcagcaccgaagatttttcaaactgcttgtaccaggatttcagaattcccctcagccccgtgcataagtgtagtttctataaaaacaatacgaaagtgtcttacggttttctgtcccctccacagcttaacaagaattcatccgggatttatagcgaggccctattaaccacgaacatcgtgcctatgtatcaatcttttcaggttatttggcgttacttccacgatacactgttgcgcaaatacgctgaggaacgcaatggagtgaatgtcgtttccggacccgtgtttgactttgattatgatggtcggtgtgactctctggagaatctgaggcagaagagacgggtcatacgcaaccaggaaatcctgatccccacacacttttttattgtcctgacaagctgcaaagacacttcccagacacctctgcattgtgagaacctggataccctggcgtttatattgcctcacaggaccgataacagcgagagctgtgtgcacggcaaacatgacagttcatgggtggaagagctgctcatgttgcaccgagcacgcattaccgatgttgagcacattacgggtttatccttctatcagcagcgcaaggaacctgttagtgacatccttaagctgaagacacacttacccaccttctcccaagaagactag

SEQ ID NO: 221711 - DNA, 2592 bp, synthetic construct
  misc_feature 1..2592: note = Description of Artificial Sequence: Synthetic coding sequence
  source 1..2592: mol_type = other DNA
atggcaagacggagtagtttccagagttgtcaaattatcagcctattcaccttcgcagtgggcgtgaatatctgtttggggtttacagcccacagaatcaagcgcgctgaaggatgggaagaggggcctccaaccgtactgtctgacagcccgtggaccaacatttctggatcttgtaaggggaggtgcttcgaactgcaagaagctgggcctcccgattgccgctgtgataacctctgcaaaagttataccagctgttgccacgattttgatgaattatgcttgaaaaccgctcgaggctgggaatgcaccaaggacaggtgtggcgaggtgcggaacgaagagaacgcatgccactgttccgaggactgtctcgccaggggcgactgttgcactaattatcaggtcgtatgtaaaggggagtcacattgggtggacgacgactgtgaggagattaaagcagccgagtgcccggctgggtttgtgcgccctcctctgataatattttccgttgatgggtttagggccagctacatgaagaagggctctaaagtgatgcctaacatcgagaagctgcgctcttgcggcacacacagcccttacatgaggcctgtttatcccaccaagacctttccaaacttatataccttggctacaggcttatatcctgaaagtcacggtattgttgggaacagcatgtatgaccccgtttttgacgcaacctttcacctgcgcggtcgagagaagttcaatcacagatggtggggtggccagcccctgtggattacagctacaaaacagggagttaaggccggaacattcttctggagtgttgtaattccccatgaacggaggatcctcaccattctgcagtggctgactctgcctgaccatgaacgcccttcagtgtatgccttttactccgagcaacccgacttcagcggccacaagtatggccctttcggcccagagatgacgaatcctctgcgcgagatcgacaaaatcgtgggtcagttaatggacggcctcaagcaactgaaactgcatagatgtgtgaatgtcatcttcgtcggtgaccatggcatggaggacgtgacttgtgaccgtaccgaatttctgtctaactacctgactaatgttgacgacataactctggtccctggcaccttgggcagaatccggagtaaatttagtaataatgccaagtatgatcccaaagcgatcatcgctaacctgacctgcaagaagccagaccagcactttaagccttatttaaaacagcacctgccaaaacggctgcattatgcgaataaccggagaatcgaagacatccatctgctggttgagaggcggtggcacgtggccaggaaaccactggacgtgtacaagaagccctctggaaagtgcttttttcagggggaccacggatttgacaacaaggttaattcaatgcagaccgttttcgtaggatacggctcaaccttcaagtacaaaacaaaagtgccacctttcgaaaacatcgagctgtacaacgtcatgtgtgatttgctgggcctcaagcccgcacctaacaatggtacccacggctccttgaatcatctcctgagaactaatacttttagaccaacaatgccagaagaggttacaagacccaattatcctggcatcatgtatctccagagcgactttgaccttggctgcacttgcgatgataaggtcgagccgaagaataagctagatgagttaaataaacggctgcatacaaaaggttccaccgaagaacggcacttgctgtatgggagacctgcggtgttgtatcggacaaggtatgacattctgtaccacacagatttcgagtccgggtactccgaaatcttccttatgccactgtggacctcttataccgtttctaagcaggccgaagtgagtagtgttcctgatcatctaacgagctgcgttagacctgacgttagagtgtcaccatcctttagtcagaattgcctggcttacaaaaacgacaagcaaatgagctacgggtttctcttcccaccctacctgagcagctcgcccgaggcaaaatacgacgccttcttagtcaccaatatggtgcccatgtatcctgcttttaaacgagtttggaactatttccaacgggtcctggtcaagaaatatgcttctgaaagaaatggagtgaatgtgatcagtggcccaatttttgactacgattatgatggacttcatgatacggaggataagatcaagcagtacgttgaggggagttctatcccagtcccaactcactactactccatcatcacaagctgcctggacttcacccagccagctgacaagtgcgatggaccgctgtctgtgtcatccttcatcctgccgcaccggcctgacaatgaagagtcgtgtaacagtagcgaagatgagagcaagtgggtcgaggaactcatgaagatgcacactgcgagggtgagagacatagagcatcttacctcgctggacttcttccgaaagaccagtcgttcttatcctgagatcctgacgttgaaaacatacttgcatacatacgagagtgagatctag

SEQ ID NO: 221712 - DNA, 2748 bp, synthetic construct
  misc_feature 1..2748: note = Description of Artificial Sequence: Synthetic coding sequence
  source 1..2748: mol_type = other DNA
atggcacgacgcagcagctttcaaagctgtcagattatttccctgtttaccttcgcagtcggcgtgaatatatgtctgggcttcaccgctcaccgcatcaaacgggcagaggggtgggaagagggccctcctactgtcttatcagatagtccttggaccaacattagtggcagctgtaaagggcgatgctttgagctgcaggaagccggtcccccagactgtagatgtgacaatctgtgcaagtcttacacaagttgttgccatgattttgatgaactgtgtcttaaaacggctcgcggatgggaatgcaccaaagataggtgcggcgaggtgcgaaacgaagaaaatgcctgtcattgctccgaggattgtcttgctcggggagattgttgcaccaactatcaagtagtgtgtaaaggcgagtcacattgggtggatgatgattgcgaggagatcaaggccgcagaatgccccgctgggttcgttcgacccccactcatcatctttagtgtggatggatttcgggcaagctacatgaagaaggggtctaaggtgatgccaaacattgaaaagttgcgctcttgtggcacccacagtccctatatgaggccagtgtatcctactaaaacctttcctaatttgtatacactggctacagggctctacccagagtcacacggcatcgtcgggaactccatgtacgatcccgttttcgacgcaacttttcatctgaggggcagggagaagttcaaccaccgttggtggggaggtcagcccctctggatcacggccaccaagcaaggtgtcaaagctggcacttttttctggagcgtcgtgatcccccatgagagacgcatcctcactatactgcagtggctaacactgcccgaccatgagaggcctagcgtctacgctttttattcggagcagcctgacttcagtggacacaaatatggtccatttggacctgaggaatcaagttacggctctcccttcacccctgcaaagcgccctaaaagaaaagttgcacccaagcggagacaggagcgtcccgtggcgcctccaaagaaaagaaggcggaagattcatagaatggaccattacgctgccgagacccggcaagataaaatgaccaaccctctgcgcgagatagacaaaatagttggacaactcatggatgggcttaagcagctgaagctgcatcgctgtgtcaacgtcatttttgtgggtgaccatggaatggaagacgtgacctgtgataggacagagttccttagtaattacctgaccaacgtggacgacatcacactggtgcctggcacgctgggcagaatcagatctaagttctcaaacaatgccaaatatgatcccaaagccatcattgcaaatcttacctgcaagaaaccggatcaacactttaagccctacctgaagcagcatttacctaagcggctgcattatgccaacaatcgacgtattgaagacatacatttactggttgaaagacgctggcacgttgcgaggaagccattggatgtgtacaaaaaaccaagtggcaagtgtttttttcagggagaccatggatttgacaacaaagtaaactcaatgcagactgtcttcgtgggttatggcagtacctttaagtataagacaaaggtgcctccgtttgaaaatattgaactatacaacgtcatgtgcgaccttttgggcctgaaaccggctccaaacaatggcacacacggctccctgaaccatctgctacggacgaacacctttaggcccacaatgcctgaagaagtcacccggcctaattatcccggaattatgtacctgcagagtgacttcgatctgggttgtacttgcgatgataaagtagaacccaagaataagttagatgaacttaataagcggttacacacaaaggggagcacagaggagcgccacctgctctacggaagaccagcagtgctctataggacccgatacgacattctctaccacactgacttcgagtcaggatacagcgagattttcctcatgccactgtggacctcgtacactgtgtcaaaacaagccgaggtttcatcggttcctgatcatttaacaagttgtgtcaggccggacgtcagagtgagtccttcgttttctcagaattgcttggcctacaaaaacgataagcagatgtcttacggtttcttgttccccccttatctttctagcagccccgaggcaaagtacgatgcattcctggtgacaaacatggtcccaatgtaccctgccttcaagagagtgtggaattatttccagagagtactggtcaaaaaatacgcaagcgaaaggaacggggttaacgttataagtggccctatctttgactacgattacgacggactccacgatacagaggacaaaatcaagcaatacgtggaaggctcctctatcccagtgccaactcactactattccatcatcactagctgtctcgacttcacacaacccgctgataaatgtgacggtccactgtctgtcagctctttcattctgccgcatagacccgacaacgaggagtcttgcaacagctcagaagacgaatccaagtgggtggaggagctcatgaaaatgcatactgccagggtgcgggatatagagcatttgacttctcttgactttttcagaaaaaccagcagaagttacccggaaattttaaccctgaagacttacttgcacacttacgaatctgagatctag

SEQ ID NO: 221713 - DNA, 2667 bp, synthetic construct
  misc_feature 1..2667: note = Description of Artificial Sequence: Synthetic coding sequence
  source 1..2667: mol_type = other DNA
atggctcgacgaagtagtttccagagctgccaaatcattagcctgttcacattcgcagtgggggtcaacatttgcctgggtttcaccgctcatagaattaagagagccgaaggttgggaggagggccctccaacggtgctgagcgattcgccttggactaacatttccgggagttgcaaggggcgatgcttcgaactgcaggaagctgggcctcccgactgtagatgtgacaatctttgcaagtcatatacctcttgttgtcatgattttgatgaactttgtctcaagacagctcggggatgggagtgtactaaggataggtgcggagaggtgcgcaatgaggagaatgcttgtcactgttcagaggattgcctcgcccgaggcgattgttgtaccaattaccaggttgtctgtaagggtgagagccactgggtggacgacgattgcgaggagatcaaagcggctgagtgtcctgctggtttcgtcagacctcccctgattatattctcagtggacggattcagagcatcgtacatgaaaaagggatccaaggtcatgcctaatatagaaaaactgaggtcatgtggcacccattcaccatacatgcggccagtttatcccactaaaaccttcccgaacctctatacactggctaccggattgtatccggaatcccatgggatagtgggtaactcaatgtacgatcctgtttttgatgctacgttccacctgcgcggtagggaaaagtttaatcacagatggtggggtggccagcctctgtggatcacagctaccaagcaaggagttaaagccggaacgtttttctggtctgtggtaattcctcacgagagaaggatccttacgatcttgcaatggctcacacttccggaccatgagcggccatctgtctatgcgttctactccgagcagccggatttctccggccacaagtatggaccttttgggcctgaaatgaccaacccccttcgggagatcgacaagatcgttgggcaattgatggacggcctgaagcagctgaagctccataggtgcgttaacgttatttttgtcggcgatcacggcatggaggacgtcacatgcgaccgtaccgaatttctgtcaaactaccttacaaacgtagatgacatcacgctcgtacctggcacactgggcagaatcagaagtaagttcagcaataacgccaagtacgatcctaaagccattattgcgaatctaacgtgcaagaagcctgatcaacatttcaagccctacttaaaacagcatctccctaaaagattgcactacgccaacaatcggaggatagaggacatccacttactggttgagcgcagatggcatgtcgccagaaaaccactggacgtctacaaaaaacccagtggaaagtgttttttccaaggcgaccacgggtttgataataaggtgaatagtatgcagacggtctttgtgggatacgggagcacctttaaatacaagactaaggtgcctccgtttgagaacatcgagttatacaacgtcatgtgtgatttgctcggcctcaagccagctccaaacaacggcacgcacggatccctcaatcacttacttagaacaaacaccttccgccctactatgccagaggaggtgactagaccaaactaccccggtataatgtatctgcagtcagatttcgatctcggctgtacatgcgatgacaaggtggagccaaaaaacaagctcgacgagctgaataaaagactgcacacgaaaggtagcaccgaagcagaaacgcggaaattccgtgggagccgtaacgagaacaaagagaacattaatggaaattttgaacccaggaaggaacggcacctactttatggccgtccggctgtcctctatcgcacaaggtatgatatcttgtaccacacagacttcgagtccggatactccgaaattttcctcatgccgttatggacctcgtacactgtgtctaaacaggctgaggtgtccagcgtccccgaccatcttacctcatgcgtgcgacccgatgtgcgggtcagtccaagcttttctcaaaactgtttagcctacaaaaacgataagcaaatgtcctacggattccttttcccaccatacctcagcagctcccccgaggcaaaatacgacgcttttttggttactaatatggtcccgatgtaccccgcatttaaacgtgtctggaattactttcagcgagttctggtcaagaagtacgctagcgagcgcaacggtgttaacgttatcagcgggcctatcttcgattacgactatgatggacttcacgataccgaggacaaaataaaacagtatgttgagggcagcagcataccagtgcccacacattactacagcatcattacatcgtgtctcgattttacccagccagctgacaaatgcgacgggccactgtcggtatcttcctttattttgcctcatcggccagacaacgaggagagctgtaactcctctgaggacgagagcaagtgggtcgaagagctaatgaagatgcataccgcaagggtccgcgatattgaacacctgaccagcctggatttcttccggaagacctctcggtcctacccagagattttaactctaaagacatacctgcacacctatgaatccgaaatctag

SEQ ID NO: 221714 - DNA, 2628 bp, synthetic construct
  misc_feature 1..2628: note = Description of Artificial Sequence: Synthetic coding sequence
  source 1..2628: mol_type = other DNA
atggagagcactctgactcttgctacagagcagcccgtgaaaaagaacaccttaaagaagtacaagatcgcatgcattgtacttctcgccctcctcgtcataatgtctctgggactggggctgggcctggggctccgaaagctggaaaagcaggggtcttgcagaaaaaagtgcttcgacgccagttttcgcggtctcgagaactgccgatgtgacgtggcttgtaaagataggggggattgttgctgggactttgaggatacatgcgtagagagtacaagaatttggatgtgtaataagttcagatgcggtgagacccggttagaagcctctttgtgcagctgctctgatgattgtctgcagcggaaagactgctgtgctgattacaagtctgtatgccagggagagacctcttggttagaggaaaattgcgatactgcgcaacagtctcagtgcccagaagggtttgacttgccaccggtcattctgttttcaatggatggattccgcgcagaatatctgtatacatgggacaccttgatgcctaacattaataagctgaagacctgtggcattcattcgaagtacatgcgagccatgtaccccactaagacatttcccaatcactacaccatcgtgaccggattgtatccagagtcacacggaattatcgacaataacatgtacgatgtaaatcttaacaaaaactttagcctgtcttccaaagagcagaataaccctgcctggtggcacggacagccgatgtggctgaccgctatgtatcagggactcaaagcagccacatatttctggcccggttctgaggtagccattaatgggagcttcccatctatctacatgccatacaatggtagcgtaccttttgaagagcggatctctactctacttaagtggctcgatctgcctaaagccgagcgacctcgcttttatacgatgtattttgaggagccagattcctcagggcacgctggcggtcccgtgagtgcaagggtcatcaaggctttgcaggtggtggaccacgcctttggtatgctgatggaaggcttaaagcagcggaacctgcacaattgcgtcaatatcattctgctggcagatcacggaatggatcaaacatactgtaacaagatggagtatatgaccgactacttccccagaatcaacttcttttacatgtacgaaggacctgcacctagaatccgggctcataacatcccacacgactttttttctttcaactcggaagagatcgtgcgcaatttgagttgtaggaaacccgaccaacactttaaaccctacctcacacctgatttgccaaagcggttgcattatgctaagaatgtgcgcatcgacaaggtgcatctatttgttgaccagcagtggctggcagtgaggtcaaaaagcaacactaactgtggaggtggtaaccacggttataacaatgagttccgatctatggaagctatattcttggctcacggtcctagcttcaaggagaagacagaggtggaaccattcgagaatatcgaggtctacaaccttatgtgtgacctgctgcgaattcagcctgcccctaataacggtactcacggtagcctgaatcacctgcttaaagtacccttctacgaacctagtcacgcagaggaggtgagtaagttctccgtgtgtggattcgccaatcccttgcccactgaaagtctggattgcttctgtcctcacctgcagaactcaacccagctggaacaggtgaatcagatgctgaatcttacacaagaagagatcacagcaaccgtgaaggtaaatctcccattcggccgtcccagggttttacaaaagaatgtagaccactgcctgctctaccaccgcgagtatgtgtctgggttcggcaaagcaatgaggatgcctatgtggagttcctacacagtcccccaattgggcgacacctctcccctgccacccacagttccagactgtttgcgcgcagacgtgcgggtccccccaagcgagtctcagaagtgcagtttctatcttgccgataaaaatatcacacatggttttctttacccaccggcatcgaaccgcacaagcgactcccaatatgatgcgctgatcacctccaacctagtccctatgtacgaggagttccgaaagatgtgggattacttccattcagtcttgctgataaagcatgcaacggagcgtaatggagtcaacgtggtcagtggtcccatctttgactacaactacgatggacatttcgacgcacccgatgaaatcacaaagcacttagccaataccgacgtccccatcccaacccactactttgttgtgctgaccagctgcaaaaacaagagccacacacctgaaaactgtccaggctggctggatgttctgccctttatcattccgcaccgacctaccaacgtggagtcctgcccggaggggaagccagaagctctgtgggtcgaagagcggttcaccgctcatatcgctcgcgtccgagacgtagaactcctaactggccttgatttttaccaagataaggttcagcctgtttccgaaattttacagctgaaaacgtaccttccaaccttcgagaccaccatctag

SEQ ID NO: 221715 - DNA, 1992 bp, synthetic construct
  misc_feature 1..1992: note = Description of Artificial Sequence: Synthetic coding sequence
  source 1..1992: mol_type = other DNA
atggagagcaccctgactctggccaccgagcagcccgtgaaaaaaaacacattgaaaaaatacaagattgcctgcatcgtcctgttagccttactcgtcatcatgtccctaggactgggcctgggcctggggctgcgaaagctagagaagcagggttcctgcagaaagaagtgttttgatgcctcatttaggggtctcgagaactgccggtgcgacgtggcttgcaaggacaggggcgattgctgctgggactttgaagacacatgcgtcgagtcaacacggatttggatgtgcaacaagtttcgctgcggagagacgaggcttgaagctagtctgtgctcatgctccgacgattgtctccagagaaaagactgttgtgctgactataagtctgtatgccagggggagacaagctggttggaagagaattgcgacaccgctcagcagtcacagtgccccgagggattcgacctgccgccagttatactgttcagtatggacggctttagggcagagtacctatacacttgggacactctgatgcctaatatcaacaagcttaagacctgtggcatccacagcaagtacatgcgggctatgtatccgacaaagacattccccaatcattatacaattgtaacaggtctgtaccctgagtcccatggaatcatcgacaataacatgtacgacgtgaacctgaacaagaattttagcctttcctccaaagagcaaaacaatccagcatggtggcatgggcagccaatgtggcttaccgcaatgtaccagggcctgaaagctgccacatatttctggccaggctcggaagtcgcgattaacgggtcattcccctcaatctatatgccctacaacggatctgttccttttgaagaaaggatttccactttactgaagtggctggatctaccaaaggccgaacggccaagattttacaccatgtacttcgaggaacctgattccagcggacacgccggtggcccagtgtccgccagggtaatcaaagcgctgcaggtggtagaccacgcctttggcatgttaatggagggcctaaagcagcgaaatctacacaattgcgtgaatatcattcttctggcagaccacggcatggatcaaacctattgtaacaaaatggagtatatgacagattattttccaaggatcaatttcttctacatgtatgaggggccagctcccaggatacgtgcacacaatatcccccacgacttcttcagtttcaactcagaagaaattgtcaggaacctgtcatgcaggaaaccagaccagcattttaagccatatctgacccccgatctgccaaagcggcttcactatgctaaaaatgtaagaattgataaagtgcaccttttcgtcgaccagcagtggctcgccgtgcgatctaaatctaatacaaactgcggcggtggaaatcacggttacaacaacgagttcagatccatggaggctatcttccttgctcatgggccttccttcaaagaaaaaaccgaggtggagccattcgaaaacattgaggtatacaacctgatgtgcgacctcctaagaatccaaccggctcctaataacggcacgcacggttctctgaatcatcttctgaaggttccattttatgaacctagccatgccgaggaggtgagtaaattctcagtgtgcggcttcgctaacccgcttcccaccgaatctttagactgcttctgcccacacctacagaattctacccagttggagcaggtgaatcaaatgctcaacctgactcaggaagagatcacagccaccgtcaaggtcaatttgccctttggacgcccaagggtgctgcaaaagaatgtggaccactgccttctgtaccacagggagtatgtgagtggtttcggcaaggctatgaggatgccaatgtggagtagctacaccgttccgcaactgccagccatcgagcaccagatagcaaacatgatgttgtag

SEQ ID NO: 221716 - DNA, 2628 bp, synthetic construct
  misc_feature 1..2628: note = Description of Artificial Sequence: Synthetic coding sequence
  source 1..2628: mol_type = other DNA
atggagagtaccctcactctggctaccgaacagcctgtgaagaagaatacactgaagaaatataagatagcatgtatagtccttttggccttgctcgtgattatgagtttagggctcggactgggcttggggctgcgtaagcttgaaaagcaaggctcgtgtaggaaaaagtgctttgatgcctctttcagaggattggaaaattgtaggtgcgatgtagcgtgcaaagaccggggtgactgttgctgggatttcgaggacacatgtgtggagagtactcgaatatggatgtgcaacaagttcaggtgcggcgaaacaaggctggaggccagtctgtgctcttgttccgatgactgcctgcaacgcaaggattgttgcgcagattacaagtctgtctgccagggtgaaacaagctggctcgaggagaactgtgatacagctcagcagtcgcaatgccctgaaggtttcgatctgcctccggtaatccttttttcaatggatggatttcgagccgagtatctgtacacctgggacaccctgatgcctaatatcaataaactgaaaacctgtggcatccatagcaaatatatgcgagccatgtaccccacaaagaccttccccaaccactacactatcgtgacagggctctatccagaaagccatgggatcatcgacaataatatgtacgatgttaatctgaataagaacttttccttgtcatctaaagaacagaacaatccggcatggtggcacggtcagccaatgtggctgactgccatgtatcagggcttgaaggcggcaacctacttttggccaggaagcgaagtagccatcaatggcagtttccccagcatctacatgccttacaatgggagcgtaccttttgaggagcgcatatccacactgttgaagtggctcgatttgcctaaagccgaacggcctagattctataccatgtactttgaggaacctgactcctcaggacacgctggcggtcctgttagcgccagggtcattaaggctctccaggtcgtggaccatgccttcggcatgctcatggagggcctgaaacagagaaacctacacaattgcgtgaatattatcttgctcgccgaccatgggatggaccaaacatattgcaacaagatggagtacatgaccgattattttccgaggatcaactttttttacatgtacgaagggcctgccccaagaattagagcccataacatacctcatgactttttctctttcaatagcgaagaaatcgtccggaacttgagttgcaggaaacctgatcagcacttcaaaccctaccttacacccgatcttcctaaaagactgcattacgctaaaaatgtgagaatcgacaaagtccacctgttcgttgaccaacagtggctggctgtgaggtctaagagcaacacgaattgcggcggaggtaatcacggttacaacaatgagtttcgctctatggaagccatattcctggctcatgggccatcatttaaggaaaagacagaggttgagccctttgagaacattgaggtttacaacctcatgtgcgatctgctgagaattcagcccgctccgaacaacggaactcatggatccctcaatcatctgctcaaggtgcctttctatgagcctagccacgcagaggaggttagtaagttttccgtatgtggcttcgctaaccctctccctaccgagtccctggactgcttttgccctcacctccagaactccacacagctggagcaggtcaatcagatgctgaacttaactcaggaggaaataaccgcaacagtgaaggtcaacctgcccttcggtcggcctcgggtcctgcagaaaaacgtcgatcactgcttgctgtatcaccgggaatacgtcagcggttttggaaaggctatgcggatgcccatgtggtcttcgtatactgtcccacagttgggtgatacttcacccctgccacccaccgtgccagactgtcttcgcgctgatgttcgcgtgcctccatcggaatcgcaaaaatgttctttttatctggctgacaagaacattactcatggtttcctgtacccacccgcttcgaaccgcaccagcgactctcagtatgatgccctgataacgagcaatcttgtgccaatgtatgaagagtttaggaaaatgtgggactacttccacagtgttttactgattaaacatgcgacggagcgaaacggcgtgaacgtggttagcggcccaattttcgattacaactacgatggccacttcgacgcccctgacgaaatcactaagcatctggctaacactgatgtaccgattccaacccactatttcgtggtgcttacatcttgtaaaaataagagccacacacctgagaactgcccaggttggctggacgttttgcccttcatcattccccaccgtccgacaaacgtggagagttgtccagaggggaagccggaagctttgtgggtggaggaacggttcaccgcacatattgcaagagtcagagatgtggaacttcttacaggattagacttttaccaggacaaggtacaaccagtctcagagatcctgcagttgaagacttaccttcctacctttgagactactatatag

SEQ ID NO: 221717 - DNA, 765 bp, synthetic construct
  misc_feature 1..765: note = Description of Artificial Sequence: Synthetic coding sequence
  source 1..765: mol_type = other DNA
atgtctcttggtctaggcctgggcttaggacttcgaaagctggagaagcaggggtcttgtagaaagaagtgtttcgacgcctcatttaggggcctcgagaactgtcgatgtgatgttgcttgcaaagataggggtgactgctgttgggatttcgaagacacatgcgtggagtcaacccggatctggatgtgtaataagttcaggtgcggagagacaagattagaggcctcattatgttcctgttccgatgattgtttgcaacgcaaagactgctgcgcagattataagtcggtttgccaaggcgaaacatcctggttggaggagaattgtgataccgctcagcagtctcagtgtccggagggttttgacttaccacctgtcattttattctcaatggatgggtttagggccgagtacctatacacttgggacacccttatgcccaatataaacaagctgaagacgtgcgggatccattctaagtacatgagggcaatgtatccgaccaagacatttcctaaccattatactatcgttaccggtctgtatcccgagtcacacggcataattgacaataacatgtacgatgttaaccttaacaaaaacttttcattaagctccaaagaacagaataaccctgcctggtggcatggacagcccgtgtgcagtattctgcatgtagcaaccgaggtgacatccatatcacagtgcgacagacggaccttattctccttatcaggggcttcaagtatgtcacctatttag

SEQ ID NO: 221718 - DNA, 774 bp, synthetic construct
  misc_feature 1..774: note = Description of Artificial Sequence: Synthetic coding sequence
  source 1..774: mol_type = other DNA
atgagccttggcctgggcctcggtctcggcttacggaaactagagaagcaggggagttgtagaaagaaatgttttgacgcgagttttcgtggcctcgagaactgtagatgtgacgtagcctgtaaggacagaggagattgctgctgggacttcgaggacacctgcgtggagtccacccgaatttggatgtgtaataagttcaggtgtggtgaaacccgccttgaagcatctctgtgcagctgcagcgatgactgtctgcagcggaaagattgttgcgctgattataagtccgtgtgccagggtgagacaagttggctggaagaaaactgcgataccgcccaacagagccagtgtccagaaggattcgatctaccgccagtgattctgttctctatggacgggtttagagccgaatacctttacacctgggatactttgatgcccaatatcaacaagctgaagacatgtggcattcacagtaaatatatgcgggctatgtacccaactaagacctttccaaaccactataccatcgtaaccgggctgtatcccgaaagtcacggtatcattgacaacaatatgtatgatgtgaacttgaacaagaacttttccttgagcagcaaagagcagaataacccagcctggtggcacggacagccgatgtggctaactgcgatgtaccaaggcttgaaggccgctacatatttttggcctggatccgaagtggccattaatggcagtttcccttccatctatatgccctacaacggttag

SEQ ID NO: 221719 - DNA, 1200 bp, synthetic construct
  misc_feature 1..1200: note = Description of Artificial Sequence: Synthetic coding sequence
  source 1..1200: mol_type = other DNA
atggccagccctggaaaacctggcgcagacgaggctcaggaagaagagggcgagctcgaaggaggctccgccggtcctcgggcagccattttagagcaggctgaggagctcttccttttgtgcgataaagaggccaaggggttcatcacaaagcacgacctccaaggactgcagtcagacctgcctctaactccagagcagctggaggccgtcttcgagagtttggatagagctcacacaggctttctcactgccagagaattctgcctgggcctcggtatgttcgttggggtcgctagcgcccagggggcaaacccttgccgtacaccggaggaaacatttgaaagcgggggtttagacgtccaaggcaccgcaggctcattggacgaggaggaagaagaagaagagaggttccacaccgtcctcgagcagctgggtgtggcccctgtgttgggcaaacaacgggcagtcagaaccctgtgggccagattgcaaagagagcggcctgaactcctcggcagcttcgaagatgtcttaattagggcttccgcctgtctggaggaggccgcacgcgagagagacggtctggaacaggccctgcggaggagagaaagtgagcatgaaagagaggttcgtgctctctatgaggagacagaacaactccgtgaacaaagtcggcgtcccccaagtcaaaactttgcacggggagaacgccgaagtcggttggagttggaacttcagtcccgggagcaagacctcgagcgcgcagggcttcggcaaagagaactcgaacagcagctgcatgcccaggccgctgaacatctggaggcacaggcccagaacagtcagctctggagagcgcatgaagcactgagaacccagcttgaaggtgctcaagaacaaatcaggaggcttgaaagcgaggccagaggacgccaggagcagactcaaagggacgtagtggcggtgagccgaaatatgcagaaggagaaggtgagtcttctgcggcagctcgagctgctccgggagctcaatacacggctaagggacgaccgggatgcctgcgaagccagaagagccggatcatcttgtcggaaggctttaactaccgctcggctcccagggccaacctgctgttgctgctgctgctgggcacgaccccctaggaggggaagcgggcacctgcccagcgctcgctag

SEQ ID NO: 221720 - DNA, 885 bp, synthetic construct
  misc_feature 1..885: note = Description of Artificial Sequence: Synthetic coding sequence
  source 1..885: mol_type = other DNA
atggcaagtcccggaaagccgggagcagatgaagcccaggaggaggaaggggagttggagggaggctccgcgggacctcgcgctgccattttagaacaagctgaggagctctttttgctctgcgacaaagaggccaagggatttattaccaagcacgatttacaggggcttcagtctgacctgcccttgacaccagaacaactggaggcagtctttgagagtctggatagagctcatacaggttttctcaccgccagagagttctgccttggcctcggtatgtttgtgggcgttgcttctgcgcagggggctaacccctgtcgaacaccagaggagaccttcgagagcgggggattggacgttcaaggcacagccggttcacttgatgaggaggaggaggaggaagagcggttccacactgtcctggaacagctcggggtggcacccgttcttggtaaacagagagcagtgcgaactttatgggcgcgtttgcagagggagcggccagaactcctgggatctttcgaggacgtcctgatcagggccagcgcttgtttggaggaagcggctagggaaagggatggactggagcaggccctgcgtaggcgggagtccgagcacgagcgggaggttcgcgcactgtacgaggaaaccgaacaactacgggaacagtcacgaagaccgccatcccagaacttcgcgagaggggagaggaggtccagactggaactggaactgcagtcccgggagcaggacctggaacgggcaggtctgcgtcagcgggaaaggcgagggagacgtctgcaggagcacgcagagagagagagccagcctgctaccgccacaggagctgctcagggagccgagtacaccgccgctggctag

SEQ ID NO: 221721 - DNA, 267 bp, synthetic construct
  misc_feature 1..267: note = Description of Artificial Sequence: Synthetic coding sequence
  source 1..267: mol_type = other DNA
atggcgtcaccgggaaaacccggagcagacgaagctcaagaggaggaaggggaactggagggcggatcagccggacccagggctgcaatcctggagcaggcagaagagcttttcctcttgtgtgataaggaggctaaaggattcataacaaagcacgatctccagggcctgcagtccgatctcccgctgacgccggaacagttggaggccgtgttcgagagtttggaccgagcgcatacgggctttttaacagcccgagagttttag

SEQ ID NO: 221722 - DNA, 105 bp, synthetic construct
  misc_feature 1..105: note = Description of Artificial Sequence: Synthetic coding sequence
  source 1..105: mol_type = other DNA
atggccagccccggaaaaccgggagccgacgaagcacaggaggaggaaggagaacttgaaggtggtagcgcaggtccccgtgctgcaattttggagcaggcgtag

SEQ ID NO: 221723 - DNA, 885 bp, synthetic construct
  misc_feature 1..885: note = Description of Artificial Sequence: Synthetic coding sequence
  source 1..885: mol_type = other DNA
atggcttccccaggcaagcccggagctgatgaggcacaggaagaagagggcgaactcgaggggggatccgcagggcctcgtgccgctatccttgagcaggcagaggagcttttcctgttgtgtgataaagaggcaaagggattcattaccaagcatgacctacagggccttcagtctgacctgccattaacacccgagcagctggaagcagtgttcgaaagcctggatcgggctcacacaggtttcctgacagccagggagttctgcctcgggctcggcatgtttgtgggggtcgctagtgcacagggcgctaacccctgccggaccccagaagaaactttcgagtcaggagggttggatgtacaggggactgccggttccctggatgaagaggaggaggaggaagaaagattccacactgtgctggaacagcttggcgttgctccagtgctggggaagcagagagctgtccgaacgttatgggcgagactgcagagagagagaccggagctgctaggcagcttcgaggatgtgctgatccgggcttccgcatgcctggaagaagccgcacgagagcgtgacgggttggagcaggccctccgcagaagagagagcgaacacgagcgagaagtgagggcattatacgaagagacagaacagctgcgtgagcagtctcggaggcccccttctcaaaattttgccaggggcgaaaggcggagtaggctggagctggaactgcagtctcgcgagcaggatttagaacgagctggacttagacagcgggagcgcagaggcagacggcttcaagagcacgccgagcgcgagtcccaacctgctacagcgacaggcgctgcccagggcgcagaatataccgccgctggatag

SEQ ID NO: 221724 - DNA, 162 bp, synthetic construct
  misc_feature 1..162: note = Description of Artificial Sequence: Synthetic coding sequence
  source 1..162: mol_type = other DNA
atggcctcccctggcaaaccgggagcagacgaggcacaagaggaagagggagagcttgaaggcggaagcgcaggcccacgcgcagctatcctggagcaggcagaggaactgttccttttgtgcgacaaggaggccaaaggcttcataactaaacacgactag

SEQ ID NO: 221725 - DNA, 246 bp, synthetic construct
  misc_feature 1..246: note = Description of Artificial Sequence: Synthetic coding sequence
  source 1..246: mol_type = other DNA
atggcaagcccaggcaagccaggagcagatgaagcccaggaggaggaaggtgagctcgagggcggaagtgcgggacccagagccgcaatccttgagcaagccgaggagcttttcctcctgtgcgataaggaagctaagggtttcatcactaagcacgatctacagggcttacaaagtgacttgcccctcactccagagcagctcgaagcagtattcgaatcactagacagagcccatactgggtag

SEQ ID NO: 221726 - DNA, 1188 bp, synthetic construct
  misc_feature 1..1188: note = Description of Artificial Sequence: Synthetic coding sequence
  source 1..1188: mol_type = other DNA
atggctgcgcctgatggaagggtggtgagccgaccgcagagactggggcaaggaagtggccaaggcccaaaaggcagtggcgcatgcctacatcctctggatagcttggaacagaaggaaactcaggagcaaacatctgggcaactggtaatgctgagaaaggcccaagagtttttccagacatgcgacgccgagggcaaagggttcattgcaaggaaagacatgcagaggttgcataaagaactccctttaagcctggaagagctcgaggacgtgtttgatgcactcgacgctgatggaaatggatatctgactcctcaagaattcactactgggttctctcatttctttttcagccagaacaatcccagtcaagaagacgccggagagcaggtggcccagaggcacgaggagaaggtctatctgtccagaggggacgaggacctcggcgacatgggcgaggacgaggaggcacagttccgtatgttgatggaccgactgggagctcagaaggtgcttgaagatgagtcagatgtgaagcaattgtggctgcagttaaagaaagaggaaccccatttgctgtctaactttgaggacttcttaacccgcatcatctcacaactccaggaggctcatgaagaaaaaaatgaactggaatgcgcactcaagaggaagattgcagcatacgacgaagaaattcagcacctatatgaggagatggagcagcagattaaatctgagaaggaacaattcttactgaaagatacagagcgattccaagcacgcagccaagagttggagcagaagcttttgtgtaaagaacaggaactcgagcagctcactcagaaacagaagcgcctggagggtcagtgcaccgcactgcatcacgacaaacacgaaacaaaagctgagaacaccaaactgaaattgacaaatcaggaactggcccgagagctagaaagaacctcatgggagctgcaggacgcccaacagcagcttgaaagtctccaacaagaggcctgtaaattgcatcaggagaaggaaatggaagtgtatagggtaactgaatctctacagagagaaaaagccggtctgctgaagcagctggactttctgaggtgtgtgggcggtcattggcctgttctcagagctccccctcgcagcctggggtctgaaggtcccgtgtag

SEQ ID NO: 221727 - DNA, 2196 bp, synthetic construct
  misc_feature 1..2196: note = Description of Artificial Sequence: Synthetic coding sequence
  source 1..2196: mol_type = other DNA
atggcagctcccgatggcagggtcgtgtcccggccacaaagactcggccaaggttccggacagggtccaaaaggctcaggcgcttgcctgcatccccttgactccctcgaacagaaggagacccaggaacagaccagtggccagctggtgatgctcagaaaggcccaggagtttttccagacctgcgatgccgaaggaaaaggctttatcgcccgtaaggatatgcagcggctgcacaaggagttaccacttagtctggaagagctggaagacgttttcgatgcactagacgctgacggcaacggatatcttacaccccaagagtttactactggattctcacactttttcttttcccagaacaatccttcacaggaggacgctggcgagcaagttgcccagcgccacgaagagaaggtatatctcagtcgcggtgacgaagacctgggtgatatgggtgaagacgaggaagcccaattcaggatgctgatggaccggctgggggcacagaaagtgctcgaagacgaatccgacgtaaaacagttgtggctgcaattgaagaaagaagagccacatctattgtccaacttcgaagattttcttacgcgaattatatctcagttgcaggaggcgcacgaggagaaaaacgagttggagtgtgctcttaagcgcaagattgcagcatacgatgaagagatccaacacctgtacgaagaaatggagcagcaaatcaaatccgagaaagaacagttccttcttaaagatacagaacgttttcaagcccgaagccaggaactggagcagaagctgctgtgtaaggagcaagagctggaacagctcactcagaagcagaaaagactggaaggccagtgcacagctctccaccatgataagcacgagacgaaggccgagaataccaaactcaaacttaccaatcaggagcttgccagggagttagagagaacgagctgggagctgcaggatgcccagcaacagctggagtctctccagcaggaggcttgtaagcttcatcaggagaaggaaatggaggtgtacagagtcaccgaaagcctgcagagggagaaggccggtctcctgaaacagttggacttcctccgcgagagaaataaacacctcagagacgagcgggacatctgctttcaaaagaataaggcagcaaaggcgaacacggccgctagtcgcgcaagttggaagaaaagatcgggatcagttattgggaagtacgttgattctcgaggaatccttcggtcccaatcagaggaagaggaagaagtcttcgggatcccgcgacgttcttcactgggcctgagcggttacccacttactgaggaggaacccggaaccggtgaacccggacctgggggtccgtatcccagaccgctccgccgaatcatttccgtcgaggaagacccactcccacaactcctggacggtgggtttgagcagcccctgtcaaaatgctcagaggaggaagaggtgagcgatcagggcgtccagggacagatccctgaagcaccacccctcaagctgacacccacttcccccagggggcagccggtgggcaaagaggcactctgcaaagaggagagctctccctccgcacccgacagattgtttaaaatcgtattcgtcgggaatagcgcggtgggcaaaaccagcttcttgaggcggttttgtgaggatcgattcagtcccggtatggccgcaaccgtaggaatcgactacagagtgaaaacactcaatgtggataactcacaggtggccttgcagctctgggacacagcaggtcaggagcgatacaggtgcatcacccagcaattcttccgcaaggccgacggagtgatagtcatgtacgacttaacagataaacagagcttcctgagcgtgcgcaggtggttatccagtgtggaggaagctgttggagaccgcgtgcctgttctgcttcttggcaacaagctcgacaatgagaaagaaagggaagttccccgaggactgggggagcaactggccaccgaaaacaatctgattttctacgaatgctctgcttatagtgggcataatacgaaagagagcctgctccatcttgccagatttctcaaggagcaggaagatacagtaagggaggatactatccaagtaggtcatcccgcaaagaaaaaaagctgttgcgggtag

SEQ ID NO: 221728 - DNA, 1389 bp, synthetic construct
  misc_feature 1..1389: note = Description of Artificial Sequence: Synthetic coding sequence
  source 1..1389: mol_type = other DNA
atggctgcccctgacggccgagtcgtgtctcgtccacagcgccttgggcagggcagtggacaggggccaaagggaagcggagcctgcttgcaccccctagattctctggaacaaaaggaaacacaggaacagacatccggccagctggttatgttacgcaaggcacaggaatttttccagacatgtgatgcagaaggcaagggcttcattgcgagaaaggacatgcagaggctacataaagagctgccactgtcacttgaggagctagaagacgttttcgatgctctggatgccgacgggaacggctacctgacccctcaggagtttactactggcttcagccatttcttctttagtcagaacaacccaagccaggaagatgctggcgaacaggttgcccagcgtcatgaggagaaggtctacctctcccggggtgacgaagatctcggagatatgggcgaggacgaagaggcacagtttcgaatgctcatggacaggctgggcgctcaaaaggtactagaagatgaaagcgacgttaagcagctttggctgcagctcaagaaagaggagcctcaccttctcagcaacttcgaggacttcctcactaggatcatttcccagctccaggaggcacatgaagagaaaaatgagttagagtgcgcgctgaagagaaaaattgcagcgtatgacgaagaaattcaacacctgtatgaagagatggagcagcagattaaaagtgagaaggagcaattcctattgaaagatacggaacgcttccaagcacgcagccaggagctcgaacagaaactcttgtgcaaggagcaggaactggagcagttaacacagaaacagaagaggctcgagggccagtgtaccgctcttcaccatgacaagcatgaaacaaaggctgaaaacaccaagctgaagctgactaaccaggagctggccagagaattagagaggacttcctgggaactgcaggacgcccagcagcaattagaatctctgcaacaggaggcttgtaagttgcaccaggagaaggagatggaggtgtatcgggtgaccgagtctctacagagggagaaagccggtctcctgaagcagttggattttctgcgcgaacggaataaacaccttagggatgagcgagatatctgcttccaaaagaacaaggcagccaaagccaatactgcagcctcccgggcaagttggaaaaagcggtcaggctcagtcattggcaagtatgttgattcccggggaatactgaggcgatggccacagagagacagaggaatccctactctccaatatcagacacagcgggatctggaagattgcaagcatgaaatgaagaaaatctgcaaagcggaggtaacattggagatgtag

SEQ ID NO: 221729 - DNA, 357 bp, synthetic construct
  misc_feature 1..357: note = Description of Artificial Sequence: Synthetic coding sequence
  source 1..357: mol_type = other DNA
tgagagaaggaaatggaggtctacagggtgaccgagtccctacagcgggaaaaagcaggcttactcaaacagctcgacttcctgagagagcgtaataagcatctgcgtgatgaaagggatatttgcttccagaagaacaaagccgctaaagcgaacaccgcagcctcacgggctagctggaagaaacggtctggatctgtgattggaaaatacgtggactcccggggtatactgcggaggtggccccagcgcgacagaggcattcctactcttcagtatcaaacccaaagggacctcgaagattgtaaacacgagatgaagaaaatctgcaaggccgaggtgacattagagatgtag

SEQ ID NO: 221730 - DNA, 1923 bp, synthetic construct
  misc_feature 1..1923: note = Description of Artificial Sequence: Synthetic coding sequence
  source 1..1923: mol_type = other DNA
atggtgagcaaccctgtacacgggctgcccttccttcccggaacctcatttaaggactcgacgaaaacggccttccaccgctctcagacactgtcataccgaaacggatatgccatcgttcggaggcccaccgtcggcatcggcggagaccgcctgcaattcaatcagctgtcccaagcagagttagacgaactggccagcaaggcgcctgtactgacatacggtcagcctaaacaggccccacctgccgacttcattccagcccatgtagcgtttgacaagaaggtcttgaaatttgacgcgtatttccaagaggacgtaccaatgagtaccgaagaacagtaccggattcggcaggtcaacatctactattatctcgaggacgattctatgagcgtcatcgaaccggtcgtcgaaaatagtggaattctgcagggtaagctcatcaagagacaaaggctggctaagaacgaccggggtgaccactaccactggaaggatcttaatcggggaatcaacattacaatttatggcaaaaccttccgtgtcgtggactgcgaccagttcacacaggtgtttttggagagccaggggattgagctgaaccctcccgaaaagatggcgctggacccttacaccgaactgcgtaaacagcccctgcgtaaatacgtcacaccaagcgacttcgaccaactgaagcagtttctgacctttgacaagcaggtgttacggttttatgcaatctgggatgatactgactctatgtacggtgagtgccgcacctatattattcactattatctgatggatgacaccgtcgagataagggaagtccatgagcgcaacgacggtagggatcccttcccactgctgatgaacaggcagcgggtgcctaaggtcctggtcgaaaatgccaagaattttccacagtgcgtcttggagatttccgatcaggaagtccttgagtggtacaccgcaaaggattttattgttggtaagtctctaacgatattgggaagaacattttttatctacgattgtgacccgtttactcgtcgctattacaaggaaaagtttgggataacagatctgccacgcatcgacgtttctaagagagaacctccacccgttaagcaagagctccccccttacaatggcttcggtttggtggaggacagtgctcagaactgttttgccctgataccaaaggcccctaagaaggatgtgattaagatgctggtcaacgacaacaaggtcctgcggtatctggctgtgctggagtcacctattcccgaggacaaagacagaagattcgtcttcagctacttccttgctacggatatgatatccatcttcgaacctccagtgcggaattccggcataatagggggtaaatatttgggacggaccaaagtggtgaagccatacagcaccgtcgataatccggtctattacggaccttcggatttttttattggagccgttatcgaggtctttggtcaccggttcattattctggacacagacgaatacgtgctaaagtacatggagtcaaacgccgcacagtactcgccagaagctctggcgtcgatacagaatcacgttaggaagcgcgaggcgccagctcccgaggcggaatcaaaacagaccgagaaggatcctggcgtgcaggaactggaggcacttattgatactatacagaagcagctgaaagatcactcctgcaaggacaatatcagagaagcattccagatatatgataaagaggcctctggctatgtggatagagacatgtttttcaagatttgtgagtctctaaatgttcctgtggatgatagcttagtaaaggagctgatcaggatgtgttcacacggtgaggggaaaatcaattattacaacttcgttagggcattctccaactag

SEQ ID NO: 221731 - DNA, 1653 bp, synthetic construct
  misc_feature 1..1653: note = Description of Artificial Sequence: Synthetic coding sequence
  source 1..1653: mol_type = other DNA
atgtcctggcctgtcctcaagttcgacgcatacttccaggaggacgtgccaatgtccactgaggagcaatatcggatccgacaggtgaatatctattattacctcgaagacgattccatgagtgtcattgagcccgtggtggagaactcagggatcctgcagggaaaactgattaagcgccagcgtctcgctaaaaatgataggggggaccactaccattggaaggaccttaatcgaggtatcaacattaccatttatggcaagaccttccgcgttgtcgactgtgatcagtttacacaagtgtttctggaatcacagggtatcgagctgaatccccctgagaaaatggctttagacccatacactgagctgcggaagcagccgctccgaaagtacgtgacaccttcggatttcgaccagctgaagcagttcctgactttcgacaagcaagttctgcgcttctacgctatttgggacgataccgacagtatgtatggagaatgtagaacttatattatccactactatctgatggacgataccgtggagataagagaagtccacgagaggaacgacggacgggaccctttcccattattaatgaaccggcagcgggtcccaaaggttcttgtggagaatgctaagaactttcctcaatgcgtactggaaatttctgaccaggaggttcttgagtggtataccgcaaaggatttcattgtcggtaagtctctgacaatcctgggaagaactttttttatatacgactgcgacccttttacacggcgatactacaaagagaagttcgggatcaccgatttacctcgaattgatgtgtccaaaagggagccaccccctgttaaacaggaactccccccatacaatggctttggactcgttgaagattcagcacaaaattgctttgctcttataccaaaagcccctaagaaagacgtgattaagatgctggtgaatgataataaagtcctacgatacctggccgtgctagagtcccctatacctgaagacaaggatcgcagattcgttttttcgtactttcttgccaccgacatgatcagcatcttcgaaccaccggttcgcaatagtgggattattgggggaaaatatctaggcagaaccaaggtggttaagccctattccaccgttgataaccccgtgtactacggacccagtgattttttcattggggcagtaatagaggtctttggccacaggtttataatcctcgatacggacgagtacgtactgaaatacatggagtcaaacgctgcgcaatactctcccgaagccctcgctagcatccagaaccatgtcaggaaacgcgaagcgccagctcctgaagcagaatcaaagcaaactgagaaagatccgggtgtacaggagttagaagctttaattgatactattcaaaagcagttaaaggaccactcgtgtaaggacaatattcgcgaagcctttcagatttatgacaaggaagcatctggttacgtggaccgagacatgtttttcaaaatctgtgagagcctaaatgtccctgtggatgactcgctggttaaggaggtgacttgcaagaggctcctgctgcccgcattcacttttccaagtccagtttggattcccctgtgcggtctgtag

SEQ ID NO: 221732 - DNA, 1866 bp, synthetic construct
  misc_feature 1..1866: note = Description of Artificial Sequence: Synthetic coding sequence
  source 1..1866: mol_type = other DNA
atgttgaaaactgcatttcataggtcacagacactctcttaccggaacggctatgctattgtgagaagacctaccgtgggcatcgggggtgatcgcctgcagtttaatcagctctcccaggcggagctggacgagctcgcctctaaggccccagtgttaacctacggccagcctaagcaggcgcctcccgctgatttcatccctgcccacgtggccttcgacaagaaagtgctgaagttcgatgcttactttcaggaagatgtgccaatgtctactgaagagcagtacagaatcagacaagtgaatatatactactatctggaagacgactccatgtccgttattgagccggtggttgaaaatagcggtattctgcagggtaagcttatcaaaagacagcgtttagcaaagaacgatcggggagatcactaccactggaaagatctgaaccggggaattaacattactatttacggaaagaccttcagggtggttgactgcgaccagtttacacaagtctttctggagtcccagggaatcgagctgaatcctcctgagaagatggccctggacccctacactgaactgaggaagcagcctctccgtaaatatgttaccccctctgactttgatcagctgaaacaatttctgacgttcgacaaacaggtgctacggttttatgcaatttgggacgacaccgactccatgtacggcgagtgccgcacatacataattcactattacctgatggacgacaccgtggaaataagagaggtgcacgagcgcaatgatggtcgcgatccattccctctattgatgaacagacaaagagtcccaaaagtgctcgttgaaaacgctaagaactttcctcagtgtgtgttggaaatcagtgatcaggaagtcctggaatggtacactgccaaagactttatcgtggggaaaagcctgaccatcctagggcgtacctttttcatatacgactgcgaccccttcacacgcaggtactataaggagaaatttgggatcacagacttgccgaggatcgatgtctcgaagagggagccaccccctgtgaagcaggagctgcctccctacaacggatttggcctggttgaagactctgctcaaaactgttttgccttgatcccgaaggcccctaagaaagatgtgattaaaatgcttgtcaacgacaataaggtgctgcgctacttagccgtcctggaatcccccattccagaagataaggacaggcgcttcgtgtttagttattttctcgccaccgatatgatatccatctttgagcctccagtgcgcaattctgggattattggaggcaagtacctcggacgtaccaaggtggtgaagccttactctaccgtggacaaccccgtgtattacggaccttcagatttctttataggggcagtaattgaggtttttggacatcgattcatcatcctcgatacagacgagtacgtcttaaaatatatggagtcaaacgccgctcagtactccccagaggcgctggcctctattcagaaccatgttaggaagagagaggctcccgctcccgaggcagaatcaaaacagacggagaaggatccgggagttcaggagctggaggctctgatcgataccattcaaaagcaactcaaagatcattcctgcaaggataatatacgcgaagccttccaaatctacgacaaggaagcatcaggctatgtggacagggacatgttttttaagatctgtgagagcctgaatgttccagtggacgattcgctcgtgaaagaactgatccgtatgtgttcacatggcgaggggaagatcaactactataatttcgttcgtgctttttccaactag

SEQ ID NO: 221733 - DNA, 2250 bp, synthetic construct
  misc_feature 1..2250: note = Description of Artificial Sequence: Synthetic coding sequence
  source 1..2250: mol_type = other DNA
atggcccttcctctgctaccgggtaattctttcaatagaaacgttgggaaggagaagttccacaagagccaacactgggggttttgtaataacgtaatgatgctggtgtccgatgagaagccagggattggaggggaaccgcttttgggtcagaaaatcaaacccaaatgtagcatatatcctaaaggtgacggctctgatgtccccagttgggtcgccttcgataagcaggtgctctcttttgacgcctatctcgaagaggaagtgcttgataagtcacagacaaactatagaatcaggtactataaaatttatttctaccccgaagacgataccatacaggtgaacgagcccgaagttaagaactctggcttgctgcaaggaacgtctatacgcagacaccgcattaccttgcctcctcccgatgaagaccagttctataccgtttaccacttcaacgtggggaccgaggtcgtgttctacggcagaacatttaaaatttacgattgcgacgctttcacccgcaattttctgcggaaaattggcgtgaaggtaaatcctcccgtccagtgcccagaggatccttatatgaaaattcgtagggaggtagtagagcatgtcgagccgctccgaccttatgagagcctggacaccctcaagcagtttctgcaataccatggcaagattctatgcttcttttgcttatgggatgacagcgttagcatgttcggggataggagggagcttatcctccattatttcctgtgcgacgacaccatagagatcaaggagcttctgcctcattccagcggtcgggatgctctgaagatgtttttgaggcgttcaaagctgcctaaaaactgcccaccaagagtgtaccagcctggacagatcacggatagggcagtcctgaattcgtacggcgacttcattaaaaaccaggccgacgggtacctgttcgacagatataaactaggtaaggtggatcaggaattctacaaagactctgatttatccttaggcgttactattaatgtctggggaaggaaggtgttgttatacgactgcgacgagttcactaagagttactacaagagcaagtatgggatcgaaaacttcacttccgtgagctgcaagccccctagtcccccaccaaaaatcgagcggaagttccctccgtataatggatttggctccgaagaagacagcctgcgcaactgcatcgatttaaagccaaccccacatcggaggaactttaagaaatttatggagaaagatagctacggctcgaaaagtaacatactcagattttttgccaaactggtgaccgataaatgtgttgatctggacagaatgttcgtaatttcttactatctaggagacgatacaatttcggtatttgaaccaattgaacgcaatagcggtattgctggcggtatgttccttaagcgatcgagagtgaagaagccaggtcaggaggtgttcaaatctgagctgagtgagtacatcaaggccgaggaattgtatattggagttaccgtaaatgttaacggatacctcttccggctactgaacgccgatgagtatacactgaattacatggagcagaataccgataaatacccattttctaatttgaagctcgctttacaaaaactaaaacaggaggaaggcaagagtcgagagctaaagcaggtctttaaagcggcagattctaagcatacaaacatggtggactacaacacattccgagacatcctgatgagtcttaccgtcggtaaccttgctgagcaggagttcgtgactatcgctcgccactatagagtacctgaggggacttgttctgatatggacttcctgattgctttggctcacgaaaagtttaagaagaacatgtttgagaactttgacacatttatttatagctgtgtgtatgaggatcgcgaaaaaaagaatgtcctccccaccaaggatatcaaacggctgtgcaagtccagcagattgcctttaagcgacgatttgttggaatccctgctgtctcgatttgaggattcggagaaacagattgactacaaatccttcttttcagctcttaactggagaaagaatccagttcctgaactgcagccagcctcttacctgaaggagcgctgcgaagacgtgtggctcggcatgccaagccctatccctgcaaaatacatagactactggacatttctcaaggatgcttttgggttggaggaggagtag

SEQ ID NO: 221734 - DNA, 489 bp, synthetic construct
  misc_feature 1..489: note = Description of Artificial Sequence: Synthetic coding sequence
  source 1..489: mol_type = other DNA
atgtctttaaccgtgggaaatctggcagaacaggaatttgtgacaatcgccagacactacagagtccctgagggaacgtgctctgacatggattttttgattgcactggcacacgagaaattcaagaagaatatgtttgaaaattttgatacattcatatattcttgcgtctacgaagatcgcgagaaaaagaacgtgctgccaacgaaagatataaagaggctgtgcaagagtagtaggctgcctctgtccgacgacctgctggaatccttactctctagatttgaggactccgagaagcagattgattataagtcatttttcagcgctctgaactggcgcaaaaatccggtccctgagctgcagcccgcaagctacttgaaggagcggtgcgaagacgtatggctgggcatgccgagtcccataccagcaaaatacattgactattggaccttcctgaaggatgcctttgggctcgaagaagaatag

SEQ ID NO: 221735 - DNA, 753 bp, synthetic construct
  misc_feature 1..753: note = Description of Artificial Sequence: Synthetic coding sequence
  source 1..753: mol_type = other DNA
atgaaaattcgtagagaagtggtggagcacgtcgaaccccttaggccatacgagagtctcgacacccttaaacagttcctccagtaccatgggaaaatattgtgttttttttgtctttgggatgacagcgtctccatgttcggggaccggagggagctcatcttgcactacttcctctgtgacgacaccatcgaaatcaaagagttattaccacactcttcgggcagagatgctctcaaaatgttcttgagaagaagcaagctgcccaaaaattgcccgcctagggtctaccagccaggccagattaccgatcgggctgtgctgaacagttacggagatttcattaagaatcaggccgatgggtacttgttcgaccggtacaagcttggaaaagtcgatcaggaattttacaaagactctgatctgagcttgggagttacaatcaacgtctgggggcgtaaggtcttgctctacgattgcgacgagttcacaaagtcatactataaatccaaatatggtatagaaaacttcacttcagtcagctgtaaaccgccttctcctcctcccaaaatcgaaagaaagtttcccccatacaatggattcggctcggaggaggactccctgcgcaactgtatcgacttgaaacccaccccccatcgccgtaattttaaaaaatttatggagaaagattcctatggctcaaagtcaaatatactgtttttttgcaaaacatcccatcgtcagatgtgttag

SEQ ID NO: 221736 - DNA, 2334 bp, synthetic construct
  misc_feature 1..2334: note = Description of Artificial Sequence: Synthetic coding sequence
  source 1..2334: mol_type = other DNA
ggcggtcagactacccgaccaggcggagcagccgcatgccgcgcactctcctcgggaaccctggactttcgcaccctgtctgctatggcactccccctgctccctggcaatagtttcaatagaaacgtagggaaggagaagttccataagagtcagcattgggggttttgcaacaatgtgatgatgctcgtgtctgacgaaaagccagggattggcggtgaacccctactgggccagaagatcaaaccaaaatgcagtatttatccgaaaggggatggaagcgatgttccatcatgggtggctttcgataagcaggtactgagttttgacgcctatctggaggaagaagtacttgacaaaagtcagacaaattatcgcatcaggtactacaagatttacttttatccagaggacgatacaatccaggtgaatgagcctgaagtcaagaatagcggtctcctgcagggtacctcaatccggcgacacaggatcaccctgcctccaccagatgaggatcagttctacactgtgtatcactttaacgtgggtacagaggtggttttttatggcagaacctttaagatctacgattgcgatgctttcacccgaaactttcttcgtaaaatcggggtaaaagtgaatcctcctgttcaatgcccggaggacccctatatgaagatccgacgcgaagttgttgagcacgtggagccactgcgaccatacgagagcttagacactttgaagcagttccttcaatatcatggcaaaattctgtgttttttctgtttgtgggatgactcggtctcgatgtttggggaccgcagggagctgatcctgcactactttctctgcgatgacacgatagagattaaagagctattgccacacagttctgggagggacgcgctgaaaatgtttctgcgaaggagtaaactccccaagaactgcccaccaagagtataccagccaggtcagattactgatagagccgtgctgaactcttatggcgatttcattaaaaatcaggccgacggctatctctttgatcgctataagctcggaaaggtggaccaggaattttataaagattccgatctatcacttggcgtcacaatcaacgtttggggtcgaaaagtgctgctgtatgactgtgacgaattcacaaagtcatactacaaatcgaagtacggaattgaaaattttacaagcgtctcttgtaagcctccctcccctccccctaagatagagaggaagtttcccccttacaatgggttcggttcagaagaggattctttgcgaaattgcatcgacctgaagcccaccccacaccggaggaattttaaaaagttcatggaaaaagactcctacggtagtaagagtaacattctgcggttcttcgcgaagcttgtcactgacaaatgtgttgatctggatagaatgttcgtcatttcctattatctcggcgacgatactatctcagtgtttgagccaatcgaacggaactctggtatcgcgggtggtatgtttctgaaaaggtcaagggtgaagaaacctggtcaagaagtgtttaagagtgaactatccgagtacatcaaagctgaagagctgtatatcggagtgacggtaaatgtcaatgggtacttatttcgattgctgaacgcagacgagtatacactgaactacatggagcagaacactgataagtatccatttagtaacctgaaactggccctgcagaagttgaaacaggaggagggtaagtcgagggagctgaaacaggtgtttaaagccgctgacagcaagcatactaatatggtggactacaacacatttcgcgacatacttatgagtcttacggtggggaacctagccgagcaggagtttgtgactatcgccagacattacagagtccccgagggcacatgtagtgatatggacttcctaatcgccctggctcatgagaagtttaagaagaatatgttcgagaatttcgataccttcatttactcttgcgtatacgaggatcgcgaaaaaaagaacgttctgccaacaaaggacatcaaaagactgtgcaagtcatctaggctacctctaagtgatgatttactcgagagcttattgtcaagatttgaagatagtgaaaagcagattgactataagtcgtttttttccgctctcaattggcggaagaatcccgtgcccgagctccaacctgcatcttacttgaaagagaggtgcgaagacgtgtggctaggaatgccctcgccgattcccgctaaatacatcgactattggacatttcttaaggatgcttttggactcgaggaggagtag

SEQ ID NO: 221737 - DNA, 2193 bp, synthetic construct
  misc_feature 1..2193: note = Description of Artificial Sequence: Synthetic coding sequence
  source 1..2193: mol_type = other DNA
tgaaacaacaccgccggtcgtagacggtgcctgccgggacccctattttgggatcctggcttttccgacaccgagaggcatggaccggctagcgctgccggacaacagctacaacctcaacgggagaaaggagacggttctgacgttcccagttgggtggccttcgacaagcaggtattgtcgtttgacgcctacttggaggaagaggtcctggacaaaagccaaacaaactacagaattaggtactataagatctatttttatcccgaagatgatacaatacaggtgaacgaaccggaggtaaagaattctgggcttttgcagggcacttctattcgtcgccatcgaattacgctaccccctcccgacgaagaccagttttacactgtgtaccattttaatgttgggacagaggtagtcttttatggaagaacatttaaaatatacgactgcgacgcttttactcgcaatttcttacgcaaaattggcgtaaaggtgaaccctcccgttcagtgtccagaggatccctacatgaaaatccgcagggaggtcgttgagcatgtcgaacctttgcgcccatatgaatcactggacaccttaaagcaattcttgcagtaccacggaaagattctgtgcttcttctgcctgtgggatgacagcgtgtctatgttcggggatagaagagagcttatcctgcattattttctctgcgatgacacgattgagataaaggaacttctaccccacagttccggaagggacgccctcaaaatgttcctcaggcggagtaagctgccaaagaattgcccccctcgagtctaccagcccggacagatcaccgatagggcagtcctcaacagttacggagattttataaaaaatcaggccgatgggtatttgtttgaccgttataagttgggaaaggtagatcaggagttttacaaggattcagacctgagtctaggggtgacaattaatgtctgggggagaaaagtgctcttgtatgattgtgacgagtttaccaagtcttactacaagtctaagtacgggatcgaaaatttcacatcggttagctgtaaaccaccaagcccccctccgaagatcgagcggaaatttcccccatataacgggtttggaagtgaagaagacagcttacgaaattgtatcgacctgaaaccaacaccacataggcgcaattttaagaagttcatggagaaggactcttatggtagcaaaagtaacatactgcggtttttcgctaagctcgtgactgacaaatgcgtcgatttggaccgcatgttcgtcatctcatactaccttggtgatgataccatatctgtctttgaacccatcgagcgcaactctggcatcgctgggggtatgtttttaaaacgttctagagttaagaagccaggccaggaggtcttcaaaagcgagctcagtgaatatatcaaagcggaagaactttacattggagtaaccgtgaacgtgaacgggtacttgttccgcctcctgaatgccgatgaatatacattgaattatatggaacagaataccgataagtatcctttctccaacttgaagctcgccctgcagaagctcaagcaggaagaggggaagtcgagagaactcaagcaagtttttaaggcggctgattccaagcataccaatatggtcgattacaacacatttcgggacatcctcatgtcactgactgtaggaaatttggccgagcaagagtttgtgaccatcgcacggcattatcgcgtgcccgaagggacctgcagtgatatggattttctgatcgccctggcacatgaaaaattcaagaagaacatgttcgagaatttcgatacatttatttatagctgcgtctacgaagatcgcgaaaaaaaaaacgtgctgcctaccaaggatataaagaggctgtgcaaatccagccgtctgccactgtctgatgaccttctggaatctctgctgagccgcttcgaggattccgaaaagcagatcgattataaaagtttcttcagcgccctgaattggcgcaagaatcccgtgcctgagctgcaaccagctagctacttaaaagaacggtgcgaggacgtgtggctggggatgccctctccaatcccagccaaatatatcgattactggacctttctgaaggacgccttcggcctcgaggaggagtag

SEQ ID NO: 221738 - DNA, 720 bp, synthetic construct
  misc_feature 1..720: note = Description of Artificial Sequence: Synthetic coding sequence
  source 1..720: mol_type = other DNA
atggcgtccgaggagctggcctgcaaactggagagacggctacgtagagaggaagctgaggaaagtggtccccagttggcccctctcggcgcacccgctccggaacctaagccagagccagaaccccctgcaagagcccctaccgctagcgccgatgcagaactcagcgcacaactctcgcgccgactggacatcaatgagggcgctgccagaccccgacgctgtagggtgtttaacccatatacggagttccccgaattcagccggagactcataaaggatctggagagtatgttcaaactgtatgacgccggacgagacggattcatagacctgatggagctcaagctcatgatggaaaaattgggagccccacaaacccatctcggtctgaaaagcatgattaaagaggtcgatgaggactttgatgggaagttaagcttccgcgaatttctactgatttttcataaggccgctgctggagagctgcaggaggattcaggtctcatggccctcgctaaattaagcgaaatcgacgttgcactggaaggagtgaaaggggctaagaatttctttgaggctaaggtccaggccctgtcaagcgcctctaagttcgaagcggagctaaaagccgagcaggacgagcgaaagcgggaggaagaggaacgcaggctgagacaggccgcttttcagaagctgaaggccaacttcaacacatag

SEQ ID NO: 221739 - DNA, 432 bp, synthetic construct
  misc_feature 1..432: note = Description of Artificial Sequence: Synthetic coding sequence
  source 1..432: mol_type = other DNA
atgggggagctccagtatgatgccggtcgggacgggttcatcgacctcatggaactgaagctaatgatggagaaactcggcgctccccagactcatctgggtctgaagtctatgattaaggaggttgacgaggacttcgatggcaagctgagctttagggagttcttattgatttttcacaaggccgcagccggagagttgcaggaggacagtggtctgatggcccttgccaagctgagtgaaattgatgtggctctggagggagtcaaaggcgcaaaaaactttttcgaggcaaaggtgcaggctttgtcgagcgcgtccaagttcgaggccgaactgaaggctgaacaagatgaacgcaagcgagaggaggaggagagacgtttgcgccaggcagctttccaaaagcttaaggcaaattttaacacctag

SEQ ID NO: 221740 - DNA, 384 bp, synthetic construct
  misc_feature 1..384: note = Description of Artificial Sequence: Synthetic coding sequence
  source 1..384: mol_type = other DNA
atggaactcaagctcatgatggaaaagctcggcgctccacagacccacttgggcctgaagagtatgattaaagaggtggacgaggattttgatggcaagcttagttttagagagtttctacttatttttcacaaagcagcagccggagagttgcaggaggatagtggcctgatggccttagccaaattgtccgagatcgatgtagcactggagggagtaaagggtgccaaaaactttttcgaagccaaagtccaggccttgtcaagcgcttcgaaattcgaggctgaattaaaggccgagcaagatgagcgtaagcgagaagaagaggaaagacgcttacggcaagccgctttccagaagctgaaagcaaactttaatacttag

SEQ ID NO: 221741 - DNA, 384 bp, synthetic construct
  misc_feature 1..384: note = Description of Artificial Sequence: Synthetic coding sequence
  source 1..384: mol_type = other DNA
atggagctgaagctgatgatggaaaaactcggcgcacctcagacacacctgggtctaaaatccatgattaaggaggttgacgaagattttgatggaaaactgtcgttcagagagtttctgctgatctttcataaggccgctgcaggtgagctacaggaagactctgggctaatggctctagccaaactgtccgagatagacgtggccctcgaaggggtcaagggagccaagaatttcttcgaggctaaggtacaggcactctcttctgcttctaagttcgaagccgaactaaaggctgagcaggatgagcgcaaacgcgaagaagaagaacggagactgcgccaggccgcatttcagaagttaaaagctaactttaacacttag

SEQ ID NO: 221742 - DNA, 429 bp, synthetic construct
  misc_feature 1..429: note = Description of Artificial Sequence: Synthetic coding sequence
  source 1..429: mol_type = other DNA
atgttcaaattgtacgacgcagggcgagatggattcatcgacctcatggaactcaagctgatgatggagaaattaggagcaccccagacacacctcggccttaaaagcatgatcaaagaagtcgacgaagacttcgacgggaagctgagctttcgtgaatttctcctaatttttcacaaagccgctgctggagagctgcaggaagatagtgggctgatggccctggcaaagctttccgaaattgatgtcgccctcgaaggcgtgaagggtgccaagaacttcttcgaagccaaagtccaggctctgtccagtgctagtaaattcgaggccgaacttaaggccgaacaggatgagcggaagcgcgaggaagaggagcggaggctgcggcaggcggcatttcagaagctcaaggctaatttcaatacttag

SEQ ID NO: 221743 - DNA, 2466 bp, synthetic construct
  misc_feature 1..2466: note = Description of Artificial Sequence: Synthetic coding sequence
  source 1..2466: mol_type = other DNA
atgcccacacgcgtttgctgctgctgcagcgccctgagacctcgctacaagcgcttagtcgacaacattttccccgaagacccgaaggatggactcgtgaagaccgacatggagaagctgacattctacgctgttagcgcacccgagaaactggatcgtatcggatcttacctggctgaacgcctttcgcgggacgtagttcggcatcggtccggctatgtcctgatcgctatggaagccttagatcaactgctgatggcatgtcatagccagtctataaagccattcgtggaaagcttcctccatatggtggctaagctactagagagcggggagccaaagcttcaagtcctggggaccaactccttcgtcaagtttgcgaacatcgaggaggacaccccaagctaccatcgacgttacgatttctttgtttctagattcagtgccatgtgtcattcctgccactccgatcccgagatcagaacagaaattcgcatcgctggcattcgcggtattcagggcgtcgtgagaaagaccgttaatgatgagctacgcgctactatttgggagccccaacacatggacaagatcgtgcctagcctgctgttcaatatgcaaaagatcgaggaagtcgacagccggataggtccaccatcatcacccagtgccacagacaaagaggagaacccggctgtactcgctgaaaactgcttcagggagttgctgggcagagcaacgttcggcaacatgaacaatgcagtccggccagtgtttgctcacctggaccaccataaattgtgggaccctaatgagttcgctgtgcactgctttaagattattatgtattccatacaggcacagtacagccatcacgtaatccaggagatccttgggcacctggatgccagaaaaaaggatgcacctcgggtccgggctggtatcatccaggtgctcttggaagcagtcgcaattgctgccaaaggatccatcggaccgacagtcctggaggtcttcaacacactgctgaagcacctcaggctgtctgtggaattcgaggcaaatgacctgcagggaggatcagttgggagcgtgaatcttaacaccagtagcaaggacaatgacgagaagattgttcaaaatgccattatccagacaatcggctttttcggaagtaacttacctgattaccagaggagcgagatcatgatgttcataatggggaaggtccccgtgtttggcacctcaactcacacactggacatatcccagttaggcgatttaggcacaaggagaattcagattatgctacttagatctctcctgatggttacatccggatataaggcgaagactatcgtgacagctctccctggcagtttcctcgatcctttgttgtctcccagtctgatggaggattacgagctgcgccagcttgtgctggaagtgatgcacaatttgatggatcgccacgacaacagggctaaactcaggggcatccgcattattccagatgttgcagatctgaagatcaagagggagaaaatatgccggcaggacacaagttttatgaaaaaaaatggccagcaactctataggcacatttatctcggatgtaaggaagaggataacgtgcagaaaaactacgaactgctgtataccagtctcgccctgataactatcgagctggcgaacgaagaagtggtgattgacttgataaggttagccatcgccttgcaggactcagccatcattaatgaggacaaccttccaatgttccacagatgcgggatcatggcactggttgctgcctatctgaacttcgtgtctcagatgatcgcagtgccagccttttgtcagcacgtctctaaagtgatcgagatcagaaccatggaggctccatattttctgcctgagcatattttccgtgataagtgcatgctgcctaagagcctggaaaagcacgagaaagacctgtacttcctgaccaacaaaatagccgagagcctagggggatcaggatacagcgtagaacggctgagcgtgccatacgtgccccaggtgactgatgaggacagattgagccgccgtaagagcatcgtggacaccgtttccatccaggttgatattctatcaaataacgtcccttccgatgacgtggtctcgaataccgaggagattacctttgaggcgttgaaaaaggccatagatacaagcggcatggaggagcaggaaaaggagaagcggcgactcgttattgaaaagttccaaaaagcccctttcgaagagatcgccgcacagtgcgaatctaaggcgaatttgctgcacgacagactagcccagatcctggaactgaccattaggcctccacccagtcctagcggcaccttgaccattacctccgggcacgcacagtaccagtcggtgcctgtatatgagatgaaattcccggatctgtgcgtctactag

SEQ ID NO: 221744 - DNA, 2466 bp, synthetic construct
  misc_feature 1..2466: note = Description of Artificial Sequence: Synthetic coding sequence
  source 1..2466: mol_type = other DNA
atgaagagtagggtatgctgctgttgtagcgctctgcggccacggtataaaaggctcgtcgacaacatctttccagaggaccctaaggacgggctggtgaaaacagacatggaaaagctgacattctacgcagtgagcgctccggaaaagttggatcggattggaagctacctggctgaaaggctgagccgtgacgtggtgcggcacagaagcggatatgtgctgattgctatggaagcgctggatcagctactgatggcttgtcacagtcagagcataaaacctttcgtagaatccttcttacacatggtagccaaattgctggagtccggggagcccaaactacaggtgctgggcacaaactcattcgtgaagttcgccaatatcgaagaggatactccaagctaccacagaaggtacgacttctttgtttcccgtttctcagcaatgtgtcactcttgccacagtgacccagaaatcagaacagagattcgtattgcaggcatccggggaattcagggggttgtgaggaaaactgtcaacgacgagctgagagccacgatttgggaaccacagcacatggacaaaatcgtaccaagccttctgttcaacatgcagaagattgaggaggttgatagtcgaataggcccacccagttctccctcagccaccgataaggaagagaacccagcagtactcgctgagaactgcttcagagaactgctgggacgagctaccttcggaaacatgaacaatgccgtgcgaccagtcttcgcacacctcgaccaccacaaattgtgggaccctaatgaatttgctgttcattgcttcaagattatcatgtactccattcaagcccagtatagccatcacgttatccaagaaattttaggtcacctcgatgcgaggaaaaaagacgctccgagggtgcgagcagggatcatccaagtgttactggaagcggttgctattgctgccaaagggtcaatcggacccactgtgctcgaggtgttcaataccctcctgaaacatctgagactatccgtagaattcgaggccaacgatctgcagggcggttccgtcggctccgtgaacttgaacacctctagcaaggacaatgatgagaagattgttcagaatgctataattcaaactatcggattctttggctcaaatctgcccgactaccagcggtcggaaattatgatgtttatcatgggaaaagtgcctgtgttcggcacttctactcataccctcgacatctcccagctgggggatctaggcacgagacggatacagatcatgctcctgcgttctctgctgatggttacatcgggatacaaggccaagaccatcgtgaccgctctgcccggttctttcctggatcctcttttgtctcctagtttgatggaagactacgaactcaggcaactggttctggaagtgatgcataacttaatggacagacacgacaaccgcgctaagctgcgaggcataagaatcattcccgacgtagccgatcttaaaattaagagagagaagatttgccggcaggacaccagctttatgaaaaagaacggacagcaactctatagacacatctacctcgggtgtaaggaggaagacaatgtgcagaagaactatgaactgctctatacgtccctggccctgattacaattgagttggctaatgaggaggtcgttatagacctgatcaggttggcaatcgccttgcaggactccgcaatcatcaatgaggataatctgcctatgttccataggtgcgggataatggccctcgtggccgcttatctgaacttcgtttcacagatgatcgccgtccccgctttctgccaacacgtctctaaagtcatcgagattagaaccatggaggccccatatttcctacctgagcacatattccgagacaagtgcatgctgcctaagtccctcgagaaacatgagaaggacttatactttctaaccaataagattgcagagtcactagggggtagcggttattccgtggaacgcttgagcgtgccctatgttcctcaagtgacagacgaggaccgcctaagccgacgtaaaagtatcgtcgacacagtgagcatccaggttgacatcctctcaaataacgtcccaagcgacgacgtggtttcgaatacagaggagatcacatttgaggcgctgaagaaagccatagacacttcaggcatggaagagcaggagaaggaaaaaaggagactcgtgattgaaaaattccagaaggccccattcgaggagatagccgcacagtgcgagagcaaggcaaacctgctgcatgatcggcttgctcagatcctggaacttacgattaggccaccccctagtccatcaggcaccctgaccatcacgagtggccacgcccagtaccagtcagtccctgtgtacgaaatgaaattcccagacctgtgcgtgtattag

SEQ ID NO: 221745 - DNA, 2334 bp, synthetic construct
  misc_feature 1..2334: note = Description of Artificial Sequence: Synthetic coding sequence
  source 1..2334: mol_type = other DNA
atgcccaagggggtgtgctgctgttgcagtgccctcaggccacgctacaagagactagtggacaacatattccccgaagaccctaaagacggtctggtgaaaactgatatggagaaactcacattttacgctgtctcagccccagagaaactcgaccgcattggttcctacctagccgagaggctcagccgggatgtggtcaggcaccgcagtggctacgttttaattgctatggaagcacttgatcagttactcatggcgtgtcattcccaatctatcaagccattcgtcgagagcttcttgcacatggtcgctaagcttttagaatccggggagccaaagctgcaagtccttgggacaaatagctttgtgaagttcgccaacatagaggaggatacccccagttaccatcgcagatacgattttttcgtgtcgcgattctccgccatgtgtcacagctgccattctgatccggagattcggactgaaatccgcattgccggtattcggggtatccaaggagtcgtgcggaaaaccgttaacgacgaactgcgggcaaccatttgggagcctcaacatatggacaaaatcgtacctagcctactctttaacatgcagaagattgaagaggtggattccaggatcggccctccctcgtcccccagtgctaccgataaagaagagaatcctgcagtgcttgcggaaaactgcttccgcgagctgctgggccgagccactttcggcaacatgaataatgccgtaagacccgtcttcgctcatctggaccatcacaagctgtgggacccgaatgagtttgcagtccactgctttaagatcatcatgtacagtattcaagcacagtacagccaccatgtgatacaggagatcctgggtcacctcgacgctcgtaaaaaggacgctcccagagtgagggctggcatcatccaggttttactggaagcagtggcaatcgccgctaagggatccattggccctacggtgctggaagtgttcaacaccctgcttaaacatctgcgcttaagtgtagagtttgaagcaaatgacctccagggaggaagcgtcgggtcagtgaatctgaatacatcctccaaagataacgatgaaaagatagtccagaacgctataatccagacaatagggttttttggttctaatctgccggactatcagagaagcgagattatgatgtttataatgggcaaagtaccagttttcggcacatccactcatactctggacatcagtcaattaggggacctgggtacaaggcgcattcaaataatgcttctgcgaagcctgttgatggtgacgagcggctacaaagcgaagacaatcgttactgccttgccagggtccttcctggatcccctgctttctccaagccttatggaagattacgagctcaggcagctggtgcttgaagtgatgcataacttgatggatcgtcacgacaaccgggcaaaactgcggggtatacgcattatccccgatgtggctgacttgaagatcaagagagaaaagatatgcaggcaggatacctcgtttatgaaaaaaaacggccagcagttgtacagacacatctacttaggctgcaaagaagaggataatgttcagaagaactacgaactgctgtacacttcactagccctgatcaccatcgagcttgccaacgaggaagttgttattgaccttattcgccttgctatcgcactacaggattctgctataatcaacgaagacaacctcccgatgttccaccgttgcgggattatggcccttgttgccgcttatctcaatttcgtcagccagatgattgccgtgccagctttttgccacaaaatcgctgagtctctgggaggcagtggttacagcgtggagcggctgagtgtgccctatgtcccacaggtcacagatgaggacagactgagtaggcgcaaatcaattgtggatacggtctccattcaggtcgatatcctgtccaacaacgtcccctctgacgacgtagttagtaacacagaggaaatcacttttgaggctctgaagaaggccatcgataccagcggcatggaagagcaagaaaaagaaaagcgcaggctagttatagagaagtttcagaaagcgcctttcgaggaaattgctgctcagtgcgagtcaaaggctaatctgctacacgatcggttagcacaaatcctcgagttgaccatccgaccacctcccagcccctccggcacgctgaccattacttcagggcatgctcagtatcagagtgtaccagtctatgaaatgaagttccctgatctgtgcgtctactag

SEQ ID NO: 221746 - DNA, 603 bp, synthetic construct
  misc_feature 1..603: note = Description of Artificial Sequence: Synthetic coding sequence
  source 1..603: mol_type = other DNA
atgctcgcccgactgctgaaatttgaagaggctccatactttctgccggaacatatttttcgcgacaaatgtatgctgcctaagtccctcgagaagcacgaaaaggatctctacttcttgaccaataagatcgccgaaagccttggcggttcgggttacagtgtggagcgcctgagtgttccctatgtgcctcaagtgacagatgaggacagactgtccagacgcaagtctatcgtggatactgtctcaatccaggtagacatattgtcgaacaacgtgccttctgatgacgtcgtgtctaacacggaggagattaccttcgaagcacttaaaaaagctatcgacactagtggtatggaagaacaggaaaaggaaaagcgacggcttgtcatcgagaagttccagaaagccccatttgaagagattgcagcccagtgtgaaagtaaagccaacctgctccatgaccgcctcgctcaaattctcgagctcacaatccgccctccaccctccccgagcggaaccttgactatcacctccggacacgctcagtaccagtcagttcccgtgtacgaaatgaagttcccggacctgtgcgtatactag

SEQ ID NO: 221747 - DNA, 2358 bp, synthetic construct
  misc_feature 1..2358: note = Description of Artificial Sequence: Synthetic coding sequence
  source 1..2358: mol_type = other DNA
atggagaagctcacattttacgctgtgtcggctccagaaaagctggacagaataggttcttaccttgccgaacgcctgagccgggacgtggtcagacataggagcggctatgtgctcatagcaatggaagccttggaccagctgttaatggcttgtcattctcagtcgatcaagccttttgtggaaagttttctgcacatggtggccaagttgctcgagagtggtgaacccaaactgcaagtgcttggcactaattcgtttgtgaaattcgcaaatatagaggaagatacccctagttatcatcgcaggtacgacttctttgtgtccaggttctctgccatgtgccacagttgtcatagtgaccctgagattagaaccgagatccggattgctggaatcagggggatacaaggcgtggtgcgcaagacagttaacgacgagttacgcgctaccatctgggagccccagcatatggataaaatagtacccagcctgctcttcaatatgcagaagattgaggaagtcgacagccgtatcgggcctcctagttcaccatccgcaacagacaaagaagagaaccctgccgttctggcggagaattgtttccgggaactgcttggtcgggctaccttcgggaacatgaacaatgctgtgcgaccagtttttgctcatctagaccaccacaaactgtgggatcctaacgaatttgctgtccactgcttcaaaatcataatgtactccattcaggcccagtacagccatcacgtgatacaggaaatcctggggcacctagacgcccgaaagaaggacgccccaagagttcgcgcaggcataattcaggtcctgctggaggctgtcgctatcgcagcaaagggcagtattggcccaactgtgttagaagtgtttaacaccttgctcaaacatctcagactgagcgtggagttcgaggccaacgacctgcaggggggatccgtcggcagcgtaaacctgaataccagttccaaggataatgatgagaaaattgtgcagaatgctataatccagactatcggttttttcggctctaaccttcccgactaccaacgatcggaaattatgatgtttatcatgggaaaggtgccagtgttcggaacctcgacacatactctagacatatctcaactcggagacttgggtactaggagaatacagatcatgctgctgcgcagtttgcttatggtgacgtccggctataaggccaaaaccatcgtgacggcactacccggatccttcttagaccccttgctgtctccaagccttatggaagactacgagctgagacagctggtgctcgaagtgatgcacaatctgatggatcggcacgataaccgcgcaaagttacggggtattcgcataatacctgatgttgccgatttgaagatcaaaagggaaaaaatctgtaggcaagatacgagcttcatgaagaaaaacgggcaacagctttaccgccacatctacctgggatgcaaagaggaggataacgtgcagaagaactacgaactattgtatacgagcttggcccttattacaatagagttagctaatgaggaagtggtaatcgacctcatccgtctagccatcgctcttcaggacagtgccatcataaatgaggataacctacctatgttccaccgttgtggcataatggcactcgtggccgcatatcttaactttgtgtctcagatgatcgccgtgccagctttctgccagcacgtgtctaaggtgatagaaatcagaaccatggaagcgccatacttcctgcccgagcatatattcagagacaagtgcatgctacctaagtcactggaaaagcatgagaaagatctgtacttcttgactaataagatagcggaaagtctgggaggatcaggttacagcgttgagcgcctgagcgttccctacgttccacaggtcaccgatgaggatcgtctgtctcgcagaaagagtatcgttgatacagtgtctatacaggtggacatcctttccaacaatgtgccatccgatgacgtcgtctctaacaccgaggagataacgttcgaggcattgaaaaaggccatcgatacatcaggaatggaggaacaagagaaagagaaacgcaggttggtaatcgaaaagttccagaaggccccatttgaagagatcgcggcacagtgtgagtccaaggccaacttactccatgataggctggctcaaatcctagagctcaccattcgacccccaccctctccatctgggacactgaccataacttcaggccacgcccagtaccagtccgtgccagtctacgagatgaagtttccagacctgtgcgtctactag

SEQ ID NO: 221748 - DNA, 1482 bp, synthetic construct
  misc_feature 1..1482: note = Description of Artificial Sequence: Synthetic coding sequence
  source 1..1482: mol_type = other DNA
atgttgaaagcactgtttttgaccatgctcactcttgccctggtgaagagtcaggacaccgaggagaccattacatacactcaatgtaccgatggttatgagtgggatcccgtgcgccaacagtgcaaagatattgacgaatgcgacattgtgccggacgcttgcaagggtgggatgaagtgtgtgaaccactatggcggttacttgtgcctaccaaaaacagctcaaattatcgtcaataacgagcagccccagcaggaaacacagccagcagagggaaccagtggggcaacaacgggcgttgtggccgctagttccatggccacgtcgggtgtcttgcccggtggaggctttgttgcttctgcagcagccgtggccggacctgaaatgcagactggacgcaacaattttgtgattagacgcaatcccgctgacccccagagaattccctcaaatccatcccatcgtattcaatgcgctgctggttacgagcagtccgagcacaacgtatgtcaggatatcgatgagtgcacggccggaacacataactgccgagcagaccaggtgtgcattaacctgcgtggcagttttgcctgtcagtgccccccaggctatcaaaagcggggtgaacagtgtgtggacatcgacgagtgcaccatcccgccttactgccaccagcgctgtgttaatactcctgggtctttctactgtcagtgctccccaggctttcagctagcggctaataactatacctgcgtggatatcaatgagtgcgatgccagtaaccagtgcgcgcagcagtgttacaatattctgggaagctttatatgtcagtgtaatcagggatacgaactcagttcagaccgtctgaattgcgaggacatagatgagtgcaggacatctagctacctgtgccaataccaatgcgtgaatgaacccggaaaattcagctgcatgtgtccacaaggctatcaggtagtacggagcagaacttgtcaggatattaatgaatgtgagaccaccaatgaatgcagagaagatgagatgtgctggaactaccacgggggttttcgctgttacccgcgaaacccgtgtcaggacccgtacattctgacacccgagaatcggtgcgtgtgtcccgtgtccaacgccatgtgtcgggaactcccacagtccatcgtgtataaatatatgtcaataagatcagatcgctccgttccctctgacattttccagatccaagccacaacaatctatgctaacacgatcaacacctttaggataaagagtgggaacgaaaacggtgaattctacctgcgccaaacgagtcccgtcagtgcgatgcttgtgctggtaaagagcttaagcgggcctcgggaacatatcgtagatctcgagatgctgactgtttccagtatcgggactttccgcaccagctctgtccttcgacttaccatcatagtcggcccttttagcttctag

SEQ ID NO: 221749 - DNA, 1482 bp, synthetic construct
  misc_feature 1..1482: note = Description of Artificial Sequence: Synthetic coding sequence
  source 1..1482: mol_type = other DNA
atgctcaaggccctctttcttacaatgttaacgctcgccttggttaagagtcaggacacagaggaaacgatcacatatacccaatgcaccgacggatatgagtgggacccagtccgacagcagtgtaaggatatcgatgaatgcgatatagttccagatgcatgcaaagggggtatgaagtgcgtcaatcactatggcggatatctgtgtttacccaaaacagcccaaattatcgttaacaatgaacaacctcaacaggagactcagccagccgaaggtacttccggggctaccacgggcgtggtggcggcttccagtatggccacatcgggagttctaccaggcggtggattcgtggcaagcgccgcagccgtggccggaccagagatgcagacggggaggaataacttcgtgatcagacgtaatccagcagatcctcagagaatcccaagcaatccatcccaccgcattcaatgcgcagcgggatatgagcagagcgagcataatgtttgtcaggacatcgacgaatgcacagcgggtacccacaactgtcgagcggatcaagtgtgcattaatctacgagggtcttttgcctgccagtgtccaccgggatatcagaaacggggagaacagtgcgttgacatcgacgagtgtacaatcccaccttattgtcatcagcgttgcgtgaacaccccagggagtttctactgccagtgttcaccaggctttcagctcgctgctaacaattacacttgcgtggacatcaatgagtgcgacgcctccaaccaatgtgcccagcagtgctataatatcctcggatctttcatatgtcaatgtaatcaggggtatgagctctcgtccgaccggttgaactgcgaggacatcgacgagtgccgcacgtcatcttatctatgtcagtaccagtgtgtgaacgaacccggaaagttttcctgtatgtgtcctcaggggtaccaggtcgtgagatcccgtacctgtcaagatattaatgagtgcgagaccacaaacgaatgcagagaggatgaaatgtgttggaactatcatgggggatttcggtgttacccaagaaatccatgccaagacccttacattctcaccccggagaatcggtgcgtatgtccagtgagcaacgccatgtgcagggaactcccacagtcaattgtgtacaagtacatgagcataaggtcagaccgatccgtaccatccgacattttccagatccaggcaacaaccatctatgccaacactatcaatacctttcgtatcaagtccgggaatgagaacggtgagttttatctccgccagactagccctgtgtctgccatgctggtccttgtgaagagtctcagcgggcctagagagcatatcgtggacctggagatgctgaccgtttcttctattgggacatttcggacatcgtccgtcttgcggctgacaatcattgttggcccattttcgttttag

SEQ ID NO: 221750 - DNA, 1482 bp, synthetic construct
  misc_feature 1..1482: note = Description of Artificial Sequence: Synthetic coding sequence
  source 1..1482: mol_type = other DNA
atgcttaaggctctgttcctcacaatgctcacccttgctctagttaaatctcaggacacggaggaaaccattacgtacacgcaatgcaccgatgggtacgagtgggatccggtgagacagcagtgtaaagatattgatgagtgtgacatcgtgcccgacgcctgcaagggcggaatgaagtgcgtcaatcattacgggggatatctgtgcctaccgaaaaccgcccagatcattgttaataatgagcagccacagcaggagacacagccagccgagggcacctctggggcaaccactggagtggtggctgccagctcgatggcaaccagcggcgtgttacctggcggaggctttgtagcctccgctgccgcagtagccggacctgagatgcagacgggacgcaataacttcgtgatccggagaaacccagccgatcctcagagaatcccttctaacccgtctcatcgtatccagtgcgccgcagggtacgaacagagcgagcataatgtgtgccaagatatagacgaatgtaccgcgggaacacacaactgccgcgctgaccaggtttgtatcaacttacggggaagtttcgcctgccagtgccctcccggttatcagaagagaggcgaacagtgtgtggacatagatgaatgcacaatcccaccttactgtcatcagcgctgcgtcaatactcccggatcattttactgtcagtgcagccctggatttcagcttgcagctaacaactatacttgcgtggacatcaacgagtgcgacgcctctaaccagtgcgctcagcagtgttacaatatacttgggagtttcatttgccaatgcaatcaaggctacgagcttagttctgaccggctgaattgcgaagacattgacgagtgtcgcacctcatcctacctgtgccagtaccaatgtgttaatgagccaggaaaattctcttgtatgtgcccacaggggtaccaggttgtacgctcaaggacttgccaggatataaatgaatgtgagacaacaaacgagtgccgggaagacgaaatgtgttggaactatcacggaggcttcaggtgttatccacgtaatccttgtcaggacccctatatcctcacaccagagaatcgttgcgtgtgtccagtttctaatgctatgtgccgcgagctccctcagtcaatagtctacaagtacatgtctatcaggtctgaccgaagtgtgcctagcgacattttccagattcaggccaccaccatatatgccaacaccatcaatacatttcgaataaaatcgggaaacgaaaacggagaattttacttacgccagacttcacccgtgtccgccatgcttgtccttgtaaaatctctgtccggtccccgtgagcacatagtagatctggagatgctgacggtgtccagcatagggacatttcggacctcctccgtacttcggctaacaattatagtcgggcctttttccttttag

SEQ ID NO: 221751 - DNA, 1050 bp, synthetic construct
  misc_feature 1..1050: note = Description of Artificial Sequence: Synthetic coding sequence
  source 1..1050: mol_type = other DNA
atggaggataccagcgcctttcgcaagcagcccagattgttgtccatcatgaactccttgagtagcgaacataatgtttgtcaggacatcgacgagtgcacggccggaactcataactgtagggccgaccaggtgtgcataaatctgcggggttcatttgcttgccagtgtccacccggttaccaaaagagaggagagcagtgtgtcgacattgacgaatgcactattccaccctactgtcatcagcggtgtgttaatactccgggaagcttttattgccagtgtagccccggtttccaactagctgccaacaactacacctgcgtcgatatcaatgagtgcgacgcgagcaaccagtgcgctcaacagtgttacaacatcctcgggtccttcatttgtcagtgcaaccagggttacgaactgagcagtgacaggcttaattgcgaagatattgatgagtgccgcacttcttcctacttatgccagtaccagtgtgtcaatgagccgggaaagttctcttgcatgtgcccacagggctatcaggtggtgcggtcccggacatgccaggatattaacgaatgtgagaccacaaatgagtgtagagaagatgaaatgtgctggaattaccacgggggttttcgttgctatcctcgtaatccttgtcaagacccctacatactgacacccgagaataggtgtgtgtgccccgtgagcaatgcaatgtgcagggagctcccccagagcattgtgtacaaatatatgtcgatccggtcagatcggagtgtgccatcggacattttccaaatccaggcgaccaccatttacgctaataccataaatacttttcggattaagtcgggtaacgaaaatggagaattctacttgaggcaaacctcacctgtgagcgccatgcttgttttagtaaaaagtttgtctggtcccagagagcacatcgtggacctggaaatgctgacggtgtcatcaatcggcacgttccggaccagctccgttctgcgactgactataatagttggcccattctccttttag

SEQ ID NO: 221752 - DNA, 159 bp, synthetic construct
  misc_feature 1..159: note = Description of Artificial Sequence: Synthetic coding sequence
  source 1..159: mol_type = other DNA
atgctgaaggcgctcttcctcacaatgttaactctcgcactggtgaagtcccaggatacagaggaaacgatcacctacacacagtgtaccgacggatatgagtgggaccccgtgcggcagcagtgcaaggacattgacgaatgtgacatcgtgccatag

SEQ ID NO: 221753 - DNA, 84 bp, synthetic construct
  misc_feature 1..84: note = Description of Artificial Sequence: Synthetic coding sequence
  source 1..84: mol_type = other DNA
atgcttaaagcgctgtttcttaccatgctaaccctggctcttgttaagagtcaggacacagaggaaactatcacgtatacatag

SEQ ID NO: 221754 - DNA, 1068 bp, synthetic construct
  misc_feature 1..1068: note = Description of Artificial Sequence: Synthetic coding sequence
  source 1..1068: mol_type = other DNA
atgaaatgtgtcaatcattatggaggctatctgtgtctgccgaagactgctcagatcattgtgaataacgaacagcctcaacaggagactcaaccagctgaaggcacatccggggcaacgactggtgttgtggccgcaagcagtatggctacctccggagtcttacctggaggaggatttgtggcctctgccgctgccgtcgctggccctgaaatgcaaactggacggaacaatttcgtgattcggaggaaccctgctgatccacaacggatcccctctaatccaagccaccggattcaatgcgcagctgggtatgaacagtccgagcacaacgtctgtcaagacattgacgagtgcacagccggaacacacaattgccgagcagatcaggtttgcataaacctccgcggaagcttcgcgtgtcagtgcccaccaggctaccagaagaggggagaacagtgcgttgatattgatgagtgtcgaaccagtagctatctatgccagtaccagtgtgtgaatgaacctggtaagttcagctgcatgtgccctcaaggctaccaagtggtgaggtcacgcacatgtcaggatatcaacgaatgtgagaccacaaacgaatgtagagaagatgagatgtgttggaactatcacggcggattcaggtgttatccccgaaatccatgccaggatccatatattttgacgccggagaaccggtgcgtgtgtcccgtgagtaatgctatgtgtcgtgagctcccccagtccatcgtctacaagtacatgagcatcagatccgaccgtagcgtgccgtcggacatctttcagattcaggctacgactatttatgcaaataccatcaacactttcagaatcaaaagtggcaatgagaatggcgagttctacttaagacagacaagcccagttagtgctatgctggtactggttaagtcgctgagtggtccaagagagcatatcgtggacttggaaatgctgacagtatcatccatcggtacctttcgcactagctccgtgctgagattgaccatcatcgttgggcctttttctttctag

SEQ ID NO: 221755 - DNA, 264 bp, synthetic construct
  misc_feature 1..264: note = Description of Artificial Sequence: Synthetic coding sequence
  source 1..264: mol_type = other DNA
atgctcaaggccttatttctcacgatgctgacattagctttggtaaaatcacaggataccgaggagaccattacatatactcagtgcacggacgggtacgagtgggatcccgtccggcagcagtgtaaggacattgatgagtgcgatattgttcccgatgcctgtaaaggcggaatgaagtgtgttaatcactacggcggttatctctgcctccccaaaactgcccagatcatcgtcaacaacgaacagccacaacaggagtag

SEQ ID NO: 221756 - DNA, 519 bp, synthetic construct
  misc_feature 1..519: note = Description of Artificial Sequence: Synthetic coding sequence
  source 1..519: mol_type = other DNA
atgttgaaagccttgtttctgacaatgctgaccctcgcactcgttaaatctcaggatactgaagagactataacatatactcagtgcacagacgggtacgagtgggatcccgtgcgccagcagtgcaaagatattgacgaatgcgacattgtacccgatgcctgtaaggggggaatgaagtgcgtgaatcattacggcggatatctgtgcctgccgaagacggcccaaataatcgtcaataacgaacagccccaacaggaaactcagccagcagaaggcacaagcggcgctacgaccggggtggttgcggcttctagtatggccacgtcaggcgtgttacccggtggcggttttgtggcatcggcagccgcagtcgcaggtcccgagatgcagactggacgtaacaactttgttatccgccgaaaccctgctgacccacagcggattccatctaatccatcccaccggatccagtgtgccgctgggtacgagcagagcgaacacaacgtctgccaatag

SEQ ID NO: 221757 - DNA, 360 bp, synthetic construct
  misc_feature 1..360: note = Description of Artificial Sequence: Synthetic coding sequence
  source 1..360: mol_type = other DNA
atgctaaaagccttgtttttaacaatgttgacgttggcattggtgaagtcacaggacacagaggagaccattacttatacccagtgtactgacggctatgaatgggacccggttagacagcagtgcaaggacatcgacgaatgcgacattgtgcccgacgcctgcaaaggtgggatgaaatgcgttaaccactacgggggttacctgtgtctgccaaagaccgcccagataattgttaacaatgaacagcctcagcaggaaactcaacctgctgaaggaactagtggggctaccacgggcgtcgtggctgcatcgtctatggctacgagcggagtgctccctggaggaggctttgtctag

SEQ ID NO: 221758 - DNA, 321 bp, synthetic construct
  misc_feature 1..321: note = Description of Artificial Sequence: Synthetic coding sequence
  source 1..321: mol_type = other DNA
atgttgaaggctctattcctgacgatgttgactctggccttagtaaagtctcaagacacggaagagactatcacctacacgcaatgcacagatggatacgaatgggaccccgtgcggcagcagtgcaaggacatagatgagtgtgacatcgtgcctgacgcctgtaagggaggaatgaagtgcgtgaaccattatgggggttacctgtgcctcccaaagacagcccagatcatagttaacaacgagcagcctcagcaagaaactcagcccgctgaggggactagcggagcaaccactggcgtggtggcagcgtcctcatag

SEQ ID NO: 221759 - DNA, 189 bp, synthetic construct
  misc_feature 1..189: note = Description of Artificial Sequence: Synthetic coding sequence
  source 1..189: mol_type = other DNA
atgttaaaggcactgttcctcactatgctgactcttgcccttgtaaagtcacaggataccgaggaaactatcacgtacacacaatgtaccgatggatacgagtgggaccctgtccgccagcagtgtaaggatatcgacgagtgtgatattgtccctgatgcttgtaaagggggtatgaagtgtgtctag

SEQ ID NO: 221760 - DNA, 1332 bp, synthetic construct
  misc_feature 1..1332: note = Description of Artificial Sequence: Synthetic coding sequence
  source 1..1332: mol_type = other DNA
atgctgccatgcgccagctgtctgcccggatcactccttctttgggcgctgctcctgctgctccttgggtcagcatctccacaagactctgaagaaccagattcatacaccgagtgtacagacggctacgagtgggaccctgacagtcagcactgccgggacgtgaacgagtgtctgacgattcctgaagcatgcaaaggggagatgaaatgcattaatcattacgggggttatctgtgtctacccaggtctgccgcagtaattaatgacctccatggagaaggtccccctccccctgtgccacctgcgcagcacccaaacccttgtcctcctgggtacgaacccgacgatcaggatagttgtgtcgacgtggacgagtgcgcccaggcactccatgattgccgtccctcacaggactgtcacaacctgcctggctcataccagtgtacctgcccagacggctacagaaagatcggcccagagtgcgttgacatcgacgaatgccgctaccggtactgtcagcaccgttgtgtgaacctgcctggcagtttccgatgccaatgtgagccagggttccagctgggccctaataacaggtcctgcgtcgacgtcaatgagtgcgacatgggtgccccttgtgaacaacggtgctttaattcctacggtacctttctttgccgttgccatcagggatacgaattacatcgcgatggattttcatgttcggatatagatgaatgctcatacagtagctatctatgccagtatcgctgcatcaatgaaccaggcagattctcctgccattgtccgcaggggtatcagcttctcgctacccgactctgccaagacatcgatgagtgtgagtccggcgcacaccaatgttccgaggctcagacgtgcgtgaactttcatggaggttacaggtgtgtggacactaatagatgcgtcgagccatatattcaggtatctgagaataggtgcctgtgccctgcttccaatccactgtgccgggaacagccaagctccattgttcatcggtacatgaccatcacctctgagcgctctgtgcccgcagacgtcttccagatccaggccacaagtgtctacccaggagcttacaatgcctttcaaattcgcgctggcaactctcaaggagacttctatattagacagataaacaacgtatctgctatgctggttctggccaggcctgtgacaggacctagggaatacgtgttggacctagagatggtcacaatgaactcattaatgtcatatagagcaagttcagtgttgcggctgacagtgttcgtgggcgcatacacgttctag

SEQ ID NO: 221761 - DNA, 609 bp, synthetic construct
  misc_feature 1..609: note = Description of Artificial Sequence: Synthetic coding sequence
  source 1..609: mol_type = other DNA
atgctcccatgtgccagctgtctgccaggctcgctcctgctttgggcacttctcctgttgcttctcggctccgcaagtcctcaggactcagaagagcctgactcatacactgagtgcaccgatggctatgagtgggaccctgactcccaacactgtagagatgtgaatgaatgtctgacgataccggaagcatgcaagggagagatgaagtgcattaaccactacgggggttacctatgcctcccgagatccgccgctgtgataaatgatctccatggcgaagggcctccgccacctgtccctcccgcacagcatccgaacccctgccctcccggatacgagcccgacgatcaggactcctgtgtcgacgtggacgagtgtgctcaggccctgcatgactgccgcccttcccaggattgccataacctcccgggaagttaccagtgcacttgtcccgacggatatagaaaaatcgggccagaatgcgtagacatagacgaatgcaggtaccgctactgccagcacaggtgtgttaacctgcctggttcttttagatgccagtgcgaaccaggctttcaactgggacctaataatcggagctgcgtctag

SEQ ID NO: 221762 - DNA, 552 bp, synthetic construct
  misc_feature 1..552: note = Description of Artificial Sequence: Synthetic coding sequence
  source 1..552: mol_type = other DNA
atgttgccctgtgctagctgcctccccggatctctgcttctgtgggcactcctactactgctgcttggctcagcttcgcctcaggattcagaggagcctgactcctataccgagtgtactgacggttacgaatgggatccggactcacagcactgtcgcgacgtgaatgaatgcctgaccatccctgaggcttgcaaaggagaaatgaagtgcattaaccactacggcggttacctgtgtcttccccgttcggcagccgtgattaacgacctgcatggggagggtcccccaccccctgtgccaccagcccagcaccctaatccttgcccccctggatatgaaccagatgatcaggacagctgtgtggatgtggacgagtgtgcacaggccctacacgactgcagaccatcgcaagactgccacaacctgccaggttcctaccagtgtacctgtcccgatggttatagaaaaatcggaccagagtgcgtagatatcgacgagtgcaggtacagatactgtcagcacaggtgtgtcaacctccctgggagttag

SEQ ID NO: 221763 - DNA, 1332 bp, synthetic construct
  misc_feature 1..1332: note = Description of Artificial Sequence: Synthetic coding sequence
  source 1..1332: mol_type = other DNA
atgctgccatgcgcaagttgtctgcccggatccttattgctctgggctctgctgctgcttctgcttggcagcgcttctccacaggacagtgaagagccagattcctacaccgaatgcacggacggatacgaatgggatccagatagccagcattgccgggacgttaacgaatgtttgaccatccccgaagcttgcaagggcgagatgaagtgcatcaatcactatggaggctatctctgtttaccaaggagcgcagccgtcattaacgatctacatggtgagggcccaccccctcctgttccacccgctcagcaccctaacccctgtccccctggatatgaacctgacgaccaggatagctgcgtcgatgtggacgagtgcgctcaagccttgcacgactgtaggccctcacaggactgccataaccttccaggctcttatcagtgcacctgcccagatggatacaggaagatcggacccgaatgcgtcgatatcgacgaatgccgctatagatattgtcaacaccggtgtgtgaacctgccaggatcgttccgctgccaatgcgaacctggatttcagctaggtcctaataacaggtcctgtgtggatgtcaatgaatgtgacatgggtgcgccatgtgaacagcggtgctttaactcatatggaaccttcctgtgcagatgtcaccaaggttatgaactgcatagagacgggttctcctgctctgacattgacgagtgcagctattcctcttacctgtgtcagtataggtgtatcaatgaacctggcaggttttcttgccattgcccacagggatatcaattgctggccactcggctgtgccaggacatcgacgagtgtgagtcaggtgcccaccagtgcagcgaggcccagacctgtgtcaacttccatggcggatacagatgcgtcgacaccaaccggtgtgtggagccttatatccaggtgtccgaaaataggtgcttatgtcccgcaagcaatccgctgtgcagagaacagccatcttccatcgtgcatcgttacatgaccatcaccagcgagagatccgtccctgcagatgttttccagatccaggcaacaagcgtctatccgggagcttacaacgcctttcaaattcgagcaggtaactcgcagggagatttttacattcgtcaaatcaataacgtgtcagccatgcttgtgctggcccgacctgtgaccggcccaagagagtacgtgctggatttagaaatggtgaccatgaacagtcttatgagctatcgcgcatcttccgtgctcaggctgacggtgtttgtcggggcatataccttttag

SEQ ID NO: 221764 - DNA, 2466 bp, synthetic construct
  misc_feature 1..2466: note = Description of Artificial Sequence: Synthetic coding sequence
  source 1..2466: mol_type = other DNA
atgcggggatttaatctgctgctgttttggggctgttgcgtgatgcacagttgggaaggtcacatcagaccaacacgcaaacccaataccaagggaaacaactgtagggacagtactttatgcccggcttatgccacctgcactaatactgttgactcctactattgtgcttgtaaacaaggctttctctccagcaacggacagaaccacttcaaagatcctggggtgcgctgcaaggacattgacgaatgcagccagagtccgcaaccctgcggacctaacagctcctgtaaaaacctgagtggcaggtataagtgctcctgtttagacgggttctcatcccctaccgggaacgactgggtccctggaaagcctgggaacttctcatgtacagatataaatgaatgcttgactagtagcgtgtgtcctgagcactcagactgcgtcaattctatgggatcttacagttgttcgtgtcaagtcgggtttatctcgaggaacagtacatgcgaggacgtcgacgaatgtgcagaccctagagcgtgtcctgagcacgccacctgcaataatacagtgggcaattactcgtgtttttgtaacccagggttcgagagcagctctggacatttgtctttccagggactgaaggccagctgtgaggatattgacgaatgcactgagatgtgcccaataaattcaacttgcaccaatactccaggaagctacttttgtacgtgccacccaggatttgcgccttctaacggtcagctaaacttcactgatcagggagtggagtgccgcgacatcgatgagtgcagacaggaccctagtacttgtggaccgaacagtatttgcacaaatgccttgggcagctacagttgtggatgcatagccggtttccatcccaatcccgaaggcagccagaaggacggaaattttagttgccagagagtcctctttaagtgcaaggaggatgtgatccccgacaataaacagatccagcagtgtcaggagggcacagcagttaagcctgcttacgtgtctttttgcgcccagataaacaatattttctctgttcttgacaaagtctgtgagaacaaaactactgtggtgagccttaaaaacactactgagagctttgtgccagtcctaaaacagatttcaacctggacgaagttcacgaaagaggagacttcctcactcgcgaccgtattcttagaatccgttgaatctatgacacttgcaagcttctggaagccgtccgccaatattactccagccgtgaggaccgaatatctcgacatcgagtccaaagttataaataaggagtgcagcgaggaaaacgtcacactcgatctcgtggccaagggcgataagatgaagatcggttgcagtaccatagaggaatcagagtctactgagactaccggggtggcattcgtcagttttgtggggatggagtcggtcctcaatgaacggtttttcaaggaccaccaggcccctctgaccacatctgaaatcaagcttaaaatgaactccagagttgtgggaggtataatgacaggggagaagaaagatggcttttcagacccaattatttataccttagaaaacatccagcctaagcagaaattcgaacgtcccatctgcgtgagttggagtacagatgtaaagggcggacggtggacctctttcggatgtgtgatcctcgaggcctcagaaacatacaccatatgcagttgcaatcagatggctaatctagccgtgataatggccagcggcgagctaacaatgggctgtgctatcatcgccggattcctccattatctgttccttgcatgtttcttctggatgctagtggaagccgtaatcctgtttttaatggtgcggaacctgaaagtggtcaactacttttctagcagaaacataaaaatgcttcatatatgtgcctttggctatgggctgcctatgctggtggtcgtaattagtgcatccgtgcagccccagggatacggtatgcataacagatgctggctcaacactgaaaccggatttatatggtcgttcctggggccagtctgcacagtcatcgtcatcaactcgctgctcctgacatggacgttatggatactgaggcagcgtctttcctcagtgaatgctgaggtgagcactcttaaggacacccgactcctgacctttaaggcattcgcacaactctttatcctcgggtgttcttgggtgctgggaattttccagatcggaccggttgccggagtgatggcatatctgttcactataatcaactcactccagggggctttcatctttctgatccactgcctattgaatggccaggtccgcgaggaatacaagaggtggattaccgggaaaaccaaaccgtcttcacagtctcagacctcgcggatcttattgtcttctatgccctcggccagcaaaaccggttag

SEQ ID NO: 221765 - DNA, 2661 bp, synthetic construct
  misc_feature 1..2661: note = Description of Artificial Sequence: Synthetic coding sequence
  source 1..2661: mol_type = other DNA
atgaggggatttaatctcctgttattctggggatgctgcgttatgcactcttgggaagggcatattaggcccacacggaaacctaatactaagggtaataattgccgcgacagtacgctgtgccccgcttacgcgacttgtaccaataccgtcgacagttattactgcgcttgtaaacagggctttctctcgtctaacggccaaaaccattttaaggacccaggggtcaggtgcaaagatatcgatgagtgctcacagtctccccagccctgtggaccgaattcttcgtgcaaaaatctgagtgggagatacaaatgcagttgcctggacggtttttctagccctacaggtaatgactgggtcccgggtaagcccggaaacttcagctgcaccgacattaacgaatgtctgacaagctctgtctgccccgagcactccgactgcgttaactctatgggctcctattcatgctcatgccaggtgggcttcatctcacggaactccacctgtgaggatgtggatgaatgcgcagatccgcgagcctgccccgagcatgcaacttgtaataacaccgttgggaactacagctgtttttgcaatccgggtttcgaaagttcaagtggccacctgagctttcaggggctgaaggcttcctgcgaggacattgatgagtgtactgagatgtgtccaattaattccacctgcaccaacacacctgggtcctacttctgcacttgccacccaggcttcgctccctccaatggccagctgaacttcactgatcagggagtggagtgccgggatattgacgagtgcaggcaggatccttccacttgcgggccaaatagcatttgtaccaacgcattggggtcgtattcatgcggatgcatcgccggattccaccctaatcctgagggatcacagaaagacggcaatttttcatgtcagcgagtgcttttcaagtgcaaggaagatgtgatcccagacaacaagcagatccagcagtgccaggagggcacagcggtgaagcctgcttacgttagtttctgcgcgcagataaataacatattctctgtgctggataaagtctgtgaaaataagactacagtagtgtccctcaagaacactaccgaaagcttcgtgcccgtcctgaagcaaatttccacctggactaagttcaccaaggaggagacttctagcctggcgaccgtatttttagagtctgtggagagcatgacgttagcgtcgttctggaaaccatccgctaacatcacacccgcagttcgcaccgaatatttagatatcgagtcaaaggtgatcaacaaagagtgctcagaagagaacgtgacactagatttagtggcaaaaggagataagatgaagatagggtgtagtactatcgaagagagtgaaagcaccgagacgaccggggtggcctttgtaagcttcgtaggcatggagtcagttttgaatgagagatttttcaaggatcatcaggccccactaacaacgagtgaaataaagctcaaaatgaactcacgggtggtcggagggatcatgacaggagagaaaaaggacggattctctgatcccatcatctacacacttgagaacattcaaccgaagcagaagttcgaacggcctatttgcgttagttggagtacagatgtaaagggagggagatggacatcctttggctgcgtgatcctggaggcatccgagacctacaccatatgctcctgtaatcaaatggccaatttggctgtgataatggcttctggcgagctgaccatggatttctcactgtatattatctcccacgtgggcataatcattagcttagtgtgtctcgttttggccattgctacctttttgctgtgcaggtccatccgtaaccacaatacctacctgcacctgcacctctgtgtgtgcctgttactggcaaagactctgttcctagcgggaattcataaaacggacaacaagatggggtgtgccatcatcgctggtttcctccattaccttttcctggcctgctttttttggatgctcgtggaggccgtgatactttttttgatggtgagaaacctgaaagtggtgaattattttagctctagaaacattaaaatgctccacatatgcgctttcggatacgggctcccaatgcttgttgtcgtgatatctgccagtgtccagccccaggggtacggtatgcacaaccggtgctggctcaatactgaaactggcttcatctggtcctttttgggacctgtttgcacggtgattgtgataaactccctccttctgacatggaccctttggattctccgccagcgtttgagctccgtaaatgctgaagtgagcacgcttaaggacacgcgcttgctcacctttaaagcctttgcacagctattcattttaggctgtagctgggtgcttgggatctttcagataggccctgtggctggagtcatggcatatctgttcaccatcataaactctctccagggagcatttatatttctcattcactgtctattgaacggacaagtacgagaggaatataaacggtggattaccggaaagactaagccttcgtcgcagtctcaaacatcacgcatcctcctgagtagcatgccttccgcctcaaagaccggatag

SEQ ID NO: 221766 - DNA, 2604 bp, synthetic construct
  misc_feature 1..2604: note = Description of Artificial Sequence: Synthetic coding sequence
  source 1..2604: mol_type = other DNA
atgaggggctttaatctcctgcttttttgggggtgttgtgtgatgcatagttgggagggacacatccggccaaccagaaaaccaaacactaaaggaaataattgtagggactctaccctgtgcccagcttatgctacctgtaccaacaccgtggacagctactactgtgcctgcaagcagggcttcctttcttctaatggccagaaccacttcaaggaccccggagtgaggtgtaaggacatcaatgagtgcctgacctcctctgtgtgccccgagcacagtgactgcgtcaactcaatgggaagctactcttgcagctgccaagtgggttttatcagccgaaatagtacttgtgaggatgtggacgaatgcgctgatccccgagcatgtcccgaacatgcaacgtgcaacaatactgtaggaaactactcctgcttttgcaaccccggatttgaatcaagctccgggcacttgagcttccagggactgaaggcatcatgcgaggatatagatgagtgcacagaaatgtgtcctattaacagtacatgcactaacacccctgggagctacttttgcacctgccatccaggatttgcaccgtccaatgggcagcttaatttcaccgatcaaggagttgagtgtagggacatagatgagtgtcgccaagatcctagtacatgtggcccaaactccatatgcactaacgcgctgggaagctattcctgcgggtgcattgcgggattccatccaaatcccgaaggcagccagaaggacggaaatttttcttgtcagagggtcctgttcaaatgtaaggaagacgtgatacctgacaacaagcagatccaacagtgtcaggagggcacagccgtaaagcccgcttacgtgagtttctgtgcccagatcaataatatcttttccgtcctcgacaaggtatgtgaaaataaaacgaccgtggtgtcccttaagaacaccacagagagcttcgtgccagtacttaagcagatcagtacgtggacaaaatttactaaagaggagacttcttccctcgccacagtcttcctagaaagcgtggagagtatgaccctcgcaagcttctggaagcctagtgccaatatcaccccagccgtcagaaccgagtacctggatatcgaaagcaaggtgatcaataaagagtgttctgaagagaacgtgactctggacctggtagcgaaaggagacaagatgaagattggatgcagcacgatcgaagagtctgagtcgacagaaaccaccggcgtcgcatttgtatcttttgtggggatggaatctgttctcaatgagcgcttttttaaagaccaccaggcaccactgacgacaagcgagatcaagctcaagatgaattcaagggtggtggggggaatcatgactggcgagaagaaagacgggttctcagatcctattatctacaccttggagaacattcagccaaagcaaaagttcgagcgcccaatttgtgtcagttggagcacagacgtgaaaggaggcagatggaccagcttcggctgtgttattcttgaggcatcagaaacctatactatctgctcttgcaaccagatggcgaatttggcagttattatggcttctggcgaactgaccatggacttctccctttacattatctcacacgtcggtataattattagcctggtgtgcctggtgctcgcaatcgcaacttttttgctgtgccgctccattaggaaccacaacacatacctgcatctccacctgtgtgtttgcctgttgttagccaaaacactgtttttggcaggtatccataagactgataacaaaatggggtgtgccataatcgccggtttcttgcactatctgttcctggcctgttttttttggatgttagtggaggccgtcatcctttttctgatggtacgcaaccttaaggtggtcaattacttcagcagcaggaatatcaagatgctgcacatttgcgcctttggttacggcctacctatgttagtcgttgtaataagtgctagcgtgcagcctcagggctacggaatgcataaccgatgttggctgaacaccgagaccgggtttatttggtctttcctgggcccagtgtgcacggttattgtcgtgagcaagtactataactccctagcaaaatgcgtactcaaagaggagcagggcgacctgagagatctagaattcccagggacatgcgcagcggaaaggataaacagcctgcttttgacctggactctctggattttgagacagagactatcaagtgtcaatgcagaagttagcacattaaaggatacccgtctactgacattcaaagcctttgcccagctattcatcttgggctgctcatgggtgttggggatttttcagatcggccctgtggccggtgtgatggcatacctcttcaccattatcaactcactacagggggcattcatctttctgattcattgtctgctgaatgggcaggttcgcgaggagtacaagaggtggatcaccggcaagacgaaaccctcttcccaaagccagacgtcccggattctgctgtctagcatgccgtccgcaagcaagaccggatag

SEQ ID NO: 221767 - DNA, 2238 bp, synthetic construct
  misc_feature 1..2238: note = Description of Artificial Sequence: Synthetic coding sequence
  source 1..2238: mol_type = other DNA
atgcggggattcaacctgctgctcttttgggggtgctgcgtcatgcacagctgggaaggccatattcgcccaacaaggaaacctaacactaagggtaacaattgtagggacagtacactatgtcccgcatacgccacatgtactaacacagtggattcctattattgcgcctgcaagcaaggatttctatctagtaatggacaaaaccatttcaaagatccaggcgtccggtgtaaggatattgatgaatgcacagagatgtgccccataaactccacttgtactaatactcccggatcttacttttgcacatgtcacccaggttttgcccctagtaatggtcagctgaattttacggaccagggagttgaatgccgtgacatcgatgaatgcagacaggatcccagtacatgtggccctaacagtatatgcaccaacgccctgggcagctacagttgcggctgcatcgccggttttcaccccaaccccgagggtagccagaaggatggcaatttttcttgtcagcgcgtgctctttaaatgtaaagaggacgtgattcctgacaacaaacagatccagcagtgccaggagggaactgcggtcaagccagcatatgtgagtttttgcgctcagattaacaatattttcagcgttctggataaagtctgcgagaataagaccactgtcgtgagcctgaagaacaccacagagtccttcgtgcccgtactaaaacaaatatcgacttggaccaaattcacaaaagaggagacgtcaagtcttgccactgtcttcctcgaatctgtggagtctatgactctagcatccttttggaaacctagtgccaacattactcccgcagtgcgtaccgagtacttggatatcgaaagcaaggtgattaataaagagtgcagtgaggagaacgtcacacttgaccttgtggccaagggcgataagatgaaaatcggatgttccacaatcgaggaatctgaaagtactgagaccactggggtcgcctttgtatccttcgttggtatggagagcgtgcttaacgagcggtttttcaaagatcatcaggccccacttaccaccagcgagatcaaactcaagatgaactcacgggtggtaggtgggattatgaccggagaaaagaaagacggcttctctgaccccattatctacaccctcgaaaatatccaaccaaagcagaagtttgaacgaccaatatgcgtgtcatggagtacagatgtgaaagggggacgatggacctctttcggctgcgtgatattggaggcgtccgagacatatactatatgctcctgcaaccaaatggcgaatctggctgttattatggcaagtggggagctgaccatggattttagtctgtatattatcagccatgtgggcataataataagcctggtctgcctggttttagctatcgccaccttcctcttatgcaggtccatacgaaaccacaacacatacctccatttacacttgtgcgtgtgtctactcctcgccaaaactctgtttcttgccggaatccacaagactgataataagatggggtgcgccataatcgccggttttctgcactatctgtttctggcttgctttttctggatgctcgtcgaggctgtgatactctttctgatggtgcggaatctcaaagttgttaattacttctcttctagaaatatcaaaatgctgcacatttgtgccttcgggtacggcctccccatgttggtggtggtaatttccgcctccgtgcagccacaggggtatggaatgcacaatcgctgttggctaaatactgagaccgggttcatctggagttttttaggaccagtgtgtacagttatcgttatcaacagcctcctgctcacatggacattgtggatactgcggcagaggctctcgtcggtcaacgccgaagtttccaccctcaaagatacgagactgttgacctttaaggcattcgcccagcttttcatcttggggtgttcctgggttctcggtattttccaaatagggcctgtggctggagtgatggcataccttttcaccatcattaactctctgcagggcgctttcattttcctcattcattgcttattgaacggtcaggtccgggaggagtacaagcgctggataaccgggaaaacgaaaccaagcagtcagtcccagactagccgaatcctgttaagcagcatgcccagtgcttctaagacaggctag

SEQ ID NO: 221768 - DNA, 2130 bp, synthetic construct
  misc_feature 1..2130: note = Description of Artificial Sequence: Synthetic coding sequence
  source 1..2130: mol_type = other DNA
atgcgcggtttcaatctgctgctattctggggttgctgcgtcatgcatagctgggaagggcacatccgcccaactagaaaaccgaatacaaagggaaataattgtcgggactcaacgctgtgtcccgcatatgctacatgtacaaacactgtggactcatattactgtgcttgtaaacagggcttcctgtctagtaatggtcaaaaccactttaaagaccctggcgtccgctgtaaggacatcgacgagtgctcccagagtcctcaaccctgtgggccaaatagcagctgcaaaaacctgagcggacgttataaatgctcatgcctcgatggcttctcctctcctacagggaatgattgggtcccgggaaagcccggtaatttctcctgcaccgatatcaatgagtgtctcacatcaagggtgctctttaagtgtaaagaagacgtgatacctgacaacaagcagattcaacagtgtcaggagggcactgccgtgaagcccgcttacgtatccttctgcgcccagatcaataatatcttctccgtccttgataaggtgtgcgaaaataagactaccgtcgtgtccctgaaaaataccaccgaatcattcgtgcctgtcttaaaacagatctccacttggacaaagttcacaaaagaggaaacttctagtctcgcaacagtgtttcttgagtccgtcgagagtatgacacttgcctcattctggaaaccatctgctaatatcacgccagcggtgaggaccgagtatctggatatcgaatccaaggttataaacaaggagtgttccgaggagaacgttaccctggatctggttgcgaaaggggacaagatgaagatcggttgctcaaccatcgaggagtccgagtccaccgaaacaactggggtcgccttcgtaagtttcgtggggatggagtccgtccttaacgagcgctttttcaaagaccaccaggctcctctcaccacctctgagatcaaactgaagatgaacagcagggtggtggggggaattatgaccggcgagaagaaagatggattctccgaccccattatttacaccttggagaatatacagccaaagcagaagttcgaacggcctatctgtgtgtcctggtcaacagacgtcaaaggtggccgttggacaagttttggatgcgtgatcctggaggcctcagagacgtataccatctgtagctgcaaccaaatggcgaatctggctgtgattatggctagtggtgagctgaccatggacttcagtctttatataatctcccacgttggaatcatcattagcttggtctgtctagttctcgcgattgccacattcctgctgtgcagatctatccggaatcacaacacatatctgcatttgcacctttgcgtgtgccttttattagccaagaccctttttctggcaggcatacataagaccgacaataaaatggggtgcgcaatcattgccggattcctgcactacctgtttctagcatgcttcttctggatgctagtggaggctgtcatcctattcctcatggtgaggaacctgaaagtagtaaactacttctcatccaggaatatcaagatgttacacatttgcgccttcggttatggacttcctatgctcgtcgttgttatctcggcctccgttcagccccaaggctacggcatgcacaaccggtgctggttaaatacagagaccgggttcatctggtcgttcctcggtccagtgtgtacagttatcgtgatcaactccctactgctcacatggaccttgtggatactcagacagaggctatcatccgttaacgccgaagtgtctactttaaaagacacccggttgctcacatttaaagcttttgcacaacttttcattctcggctgctcatgggtcttgggcatctttcagattggcccagtggccggagtgatggcctacctctttacaattattaattcactccagggcgctttcatcttcctaatccactgcctgctcaatggtcaagtgagagaggaatacaaaagatggataacaggcaaaacaaaaccatcctctcagtcgcagaccagccggatcctattaagtagcatgccgtctgcctccaaaaccggatag

SEQ ID NO: 221769 - DNA, 2466 bp, synthetic construct
  misc_feature 1..2466: note = Description of Artificial Sequence: Synthetic coding sequence
  source 1..2466: mol_type = other DNA
atgaggggtttcaatctgctgctgttttggggctgttgcgtgatgcatagttgggaagggcatatccggcctacacggaaaccgaatacgaaggggaataactgcagggactctacgctctgtccagcctatgccacctgcacgaataccgtcgacagctattattgcgcctgcaagcaaggctttttaagctctaatggccagaaccatttcaaggacccgggtgtgcggtgtaaagacatcgatgagtgcagccaatctccccagccatgtggcccaaattctagctgcaaaaacctaagcgggaggtacaagtgttcttgtctggatgggttttcatcacctaccgggaatgattgggtacccggaaaaccaggaaacttctcttgtaccgacatcaatgaatgcctcacctcgagtgtgtgtcccgagcactcggattgcgtcaacagcatgggatcctacagttgttcctgccaagtaggattcatctcccgcaactctacgtgcgaagatgtcgacgagtgtgctgatccgagagcctgtcccgaacatgctacctgtaacaatacagtgggaaattattcttgcttctgcaatcccggtttcgagagttcttccggacaccttagctttcaagggctgaaagccagctgcgaagacattgacgagtgtactgaaatgtgtcccatcaactccacctgtaccaacacccccggatcctatttttgcacttgccatccaggctttgcaccttctaacggtcagttgaactttaccgaccagggggtggagtgcagggatatagacgaatgtcgccaggacccaagtacttgtggccctaacagcatctgcactaatgcactcgggagttactcctgtggctgcattgcagggtttcatcccaaccctgaaggttctcagaaagatgggaatttcagttgtcagagggtgttatttaagtgtaaggaagacgtgattcctgacaacaaacaaatccagcaatgccaggaaggtaccgcagtgaaacccgcttacgtatctttttgtgcacagataaataatatatttagcgttctggacaaggtgtgcgaaaataagaccaccgttgtgagcctcaagaacacaactgagagcttcgtacccgtgctcaagcaaattagtacgtggacaaaatttactaaggaagaaacgagctccctagcgacggtctttttggagtctgtagaaagtatgaccctggcctccttttggaagccatcagccaatataacaccagcggtgaggacagagtaccttgatatcgaatctaaggtcattaataaagagtgctccgaggaaaacgtgacactagacctcgttgccaaaggcgacaaaatgaaaatagggtgtagtaccattgaggaaagtgaatcgaccgaaactactggggtggcatttgtgtccttcgtgggaatggaaagcgtgctaaatgagcggttcttcaaagatcatcaagctcctctgacaacctctgagatcaaacttaaaatgaactcccgagtggtgggagggattatgaccggcgagaaaaaggatgggttctccgatcctattatttacactttggagaacatacagcctaagcagaagttcgagcgtccaatttgcgtcagctggtccacagatgttaaaggaggacgttggacaagcttcggatgcgtcatcctggaagcctccgaaacttacactatttgttcatgtaatcagatggctaatctcgcagttatcatggccagcggagagctgaccatgggttgtgcaattatcgcgggtttcctacattacctgtttcttgcatgctttttttggatgctcgtggaggctgttatcctgttcctgatggtgagaaatctcaaagttgtcaactacttcagttcaaggaacatcaagatgctccatatctgcgctttcggctatggcctacccatgctcgtcgtcgttatatcagcttctgtgcaacctcaaggctacgggatgcacaataggtgctggctgaataccgagacaggattcatctggtcttttctcggacccgtgtgcaccgtcatagtgatcaattctctcttgctcacttggacactctggattttgagacagagactgtcttccgtgaacgcggaggtttcaacgctcaaagacacgcggctactaacttttaaagcatttgcccagcttttcatcctgggctgcagctgggtccttggaatattccagattgggccagtagccggagtgatggcctacttattcactatcatcaatagtctccagggtgcatttattttcctgatccattgtctgctcaacggccaggtccgggaagagtacaaacgctggattacagggaaaacaaagccatcaagccaaagccagacttctagaatacttttgtcctccatgcctagtgcgtctaaaaccggatag

SEQ ID NO: 221770 - DNA, 1662 bp, synthetic construct
  misc_feature 1..1662: note = Description of Artificial Sequence: Synthetic coding sequence
  source 1..1662: mol_type = other DNA
atgcctctgccatggagtttggctctcccactgttacttagttgggttgccggtggattcggcaatgctgcctctgccagacatcatggcttactagcctcagccaggcagccaggcgtttgccactacggaactaaactggcttgttgttacgggtggaggcgaaactcaaagggtgtttgcgaggccacctgcgagcccggttgcaagtttggggagtgcgtggggcctaataaatgcagatgttttcctgggtataccggcaagacctgcagccaggacgtcaatgaatgcggaatgaagcccagaccatgtcagcaccggtgtgtgaatacccatggatcctacaagtgcttctgcttgagcggacacatgctgatgcccgacgccacttgtgtgaactctcggacctgcgctatgatcaattgccaatattcatgcgaagacactgaagaaggccctcaatgcctgtgtccatcttctgggttgcgactggcacctaatggcagagattgtctggatatcgacgaatgcgctagcggcaaagttatttgcccctataatcgcaggtgtgtgaacacgtttggctcatactattgcaagtgtcacatcggtttcgaactgcagtatatatccggaaggtacgactgcatagatattaacgagtgtacaatggattctcacacatgtagtcaccacgcaaactgtttcaacacccaggggtcgtttaaatgcaaatgcaagcaaggctataaagggaacggcttgagatgtagcgccatcccagaaaattcggtaaaagaagtattgagggcccctgggactatcaaggacagaataaagaaactgcttgctcataagaattccatgaagaaaaaagcgaaaattaaaaatgtcacccctgagcctaccagaacccccacccctaaagtgaacctgcagccatttaattacgaagaaatcgtgtcacggggtggaaacagtcatggcggaaaaaagggaaacgaagagaagatgaaagaggggctggaagacgaaaaaagagaggaaaaagcccttaagaatgacattgaggagcggtctctccgtggggacgtttttttccctaaggtgaatgaagctggtgagttcgggttaatactagttcagcggaaggcactgaccagtaagctggagcacaaagacttgaacatctctgtcgactgcagcttcaaccacggtatatgtgactggaaacaggacagagaagatgacttcgattggaacccagccgacagggataatgccattgggttctacatggcagttcccgctttggccggacacaagaaagacatcggaagactaaaactcttgttgcccgacctgcagccgcagtccaacttctgtctcttatttgactaccgtttagcgggagacaaagtaggtaaactgagggtgttcgtaaaaaactccaataacgcattggcatgggaaaagaccactagtgaggacgagaagtggaagacggggaagatccagctgtaccagggcacagacgcgaccaagagtattatttttgaggctgagcgaggtaaggggaaaacgggcgaaattgctgtggacggagtgttgctcgtaagcggactatgccccgactccctgttgtctgtggacgattag

SEQ ID NO: 221771 - DNA, 1665 bp, synthetic construct
  misc_feature 1..1665: note = Description of Artificial Sequence: Synthetic coding sequence
  source 1..1665: mol_type = other DNA
atgcctttgccatggtcgcttgctttgcccttgctgctatcgtgggttgccggagggtttggcaacgcagcctctgctaggcaccatggattgctggcgtctgcacggcagccaggcgtgtgtcactatgggaccaaactcgcctgctgttacggctggaggagaaactctaagggcgtgtgcgaggcaacttgcgaacctggttgtaaattcggggagtgtgttgggcctaataaatgccgctgtttcccaggctacacaggaaaaacatgctcacaagatgtgaacgagtgcgggatgaagccaagaccctgtcagcatcgctgcgtgaacactcatgggagctataagtgtttttgtctcagcggacatatgttgatgcctgacgcgacatgcgtgaattctcgcacatgtgctatgatcaactgccagtattcctgcgaagacacagaggaagggcctcagtgcttgtgcccctcgagcgggctgcggttggcgcctaatggaagggattgtctggacatcgatgagtgtgcctccggcaaagtcatttgcccctacaaccgcaggtgcgtgaacacgtttggcagctactactgcaaatgtcacattggtttcgaactacaatacatctcaggacgttacgactgcatcgacatcaacgagtgcaccatggatagccatacttgttcacatcacgctaattgttttaatacccaaggttcctttaaatgtaagtgtaaacagggttataaggggaatgggctgaggtgtagcgctatccccgagaactctgttaaggaagtccttagggcgcctggtaccatcaaagatcggatcaaaaaattgctcgcgcacaagaattcaatgaagaaaaaagccaaaatcaaaaacgttaccccagaacctacccgcactcctactcccaaagtcaacctccagccgtttaattacgaggaaatagtttctcgcggaggcaatagccacgggggaaagaaaggcaacgaagagaagatgaaggaaggactcgaggacgaaaagagagaggaaaaagcgctgaagaatgacatcgaagagaggtccctgcggggagacgtattttttccaaaggttaatgaagcgggagaattcggcctgatactggtacagagaaaagccctgacgtccaagttagagcataaagccgacctgaatataagcgtggattgctctttcaaccacggtatctgtgactggaaacaggacagagaggatgatttcgactggaatccggcagatcgagataacgccatcggcttttacatggctgtccccgctctggccggtcacaagaaggacattggaaggctgaaacttttgttaccagatctgcaaccccagtccaatttctgcctcctcttcgattacaggttagcaggagacaaggtggggaaactgagagtgtttgttaagaatagcaacaacgccctagcatgggagaagaccaccagcgaggacgaaaaatggaagactggtaagattcagctgtaccagggcactgacgccaccaagagcattatttttgaggcagaacgtggaaaaggcaagacgggtgaaatcgcggtggacggggtcctgctggtcagcggcctctgccctgatagcctgctgagtgtcgatgactag

SEQ ID NO: 221772 - DNA, 822 bp, synthetic construct
  misc_feature 1..822: note = Description of Artificial Sequence: Synthetic coding sequence
  source 1..822: mol_type = other DNA
atgcgtggatcacaggaagtgcttctcatgtggttacttgtgctggctgtggggggtacagagcacgcctacagacctgggaggagagtctgcgcagtgagggcccacggtgatcccgtaagtgaaagctttgtccagagagtgtatcagcctttcttgacaacttgcgacgggcatagggcctgtagcacctaccgaactatttataggaccgcctataggcgctcccccggactggctcctgctcggccaaggtatgcctgctgccctggttggaagagaaccagtggcctgccaggagcatgtggagccgctatctgtcaacctccttgccgaaatggcggttcctgcgttcagcctgggcgatgcaggtgtccggctggttggagaggagatacatgccaatccgacgttgacgaatgtagcgctaggcgcggaggttgcccacaaagatgtgtgaataccgccggtagctattggtgccagtgctgggagggtcactccctcagtgctgatggcaccctgtgcgtaccaaaggggggtccgccacgcgtggcgccaaacccgactggggtcgactccgccatgaaagaggaggttcagcgactccagtccagagtcgaccttctggaggaaaagctccagctggtgctcgccccactgcacagtctggcatcccaggcattggaacacggcctgccggatccaggctctcttctggtccacagcttccagcaactgggccgtatcgatagcttgtccgagcagatttctttcttagaagaacaattggggagttgtagctgtaaaaaagattcctag

SEQ ID NO: 221773 - DNA, 822 bp, synthetic construct
  misc_feature 1..822: note = Description of Artificial Sequence: Synthetic coding sequence
  source 1..822: mol_type = other DNA
atgagaggctcccaggaagttctcctaatgtggctcctagttttggctgttggaggaaccgaacacgcgtacaggcctgggagacgcgtatgtgctgttagagcgcacggcgatccagtgagtgagagtttcgtacaacgggtttatcagccattcctcacaacctgtgacggccaccgggcatgctcaacataccgtacaatttaccgcactgcatatcggagatccccgggactcgccccagctagaccaagatacgcttgttgcccaggctggaaacgtacgagtgggcttcctggcgcttgtggagccgctatatgccaacctccctgtagaaacgggggatcctgcgttcaacctgggagatgccgctgtcccgctggttggaggggcgacacgtgtcagtcagacgtcgatgagtgttctgcacggaggggaggctgtcctcagcgatgcgtcaacactgccggttcgtactggtgccagtgctgggaaggacacagtctgtctgcagacggtacattatgcgtgcctaagggcggtcccccaagggttgcccctaacccaacaggggtagattccgccatgaaagaggaagtgcaaaggctccaatcccgggtcgatctgcttgaggagaagctgcagctggttctggctccacttcattctctggcctctcaggccctggagcatggactccccgacccgggttccctgctggttcactcgtttcagcaactggggaggatagattcattaagtgagcaaatcagcttcctcgaggagcagctggggtcatgctcctgcaagaaggacagctag

SEQ ID NO: 221774 - DNA, 822 bp, synthetic construct
  misc_feature 1..822: note = Description of Artificial Sequence: Synthetic coding sequence
  source 1..822: mol_type = other DNA
atgaggggcagccaagaagtgctgcttatgtggctcctggttctcgccgtgggcggaaccgaacacgcttacaggcctggccgtcgggtatgcgcagtgcgggcacatggggatcctgtctcagaaagctttgttcagcgggtgtaccagccctttctgacaacctgcgacggccacagggcctgttcaacataccggaccatttaccgcactgcttaccgacggagtccaggacttgcccctgctcgccctcgatatgcctgctgcccaggttggaagaggacatcaggactacccggagcatgtggtgcggcaatttgccagcctccttgcagaaacggaggatcctgtgtgcagccgggacgatgcaggtgtccggcaggatggagaggtgacacgtgtcagtctgatgtggatgagtgctccgctcgcagaggcggatgccctcagcggtgtgtgaacacagccggatcctactggtgccagtgctgggagggacactcattgagcgccgatggcaccctgtgcgttcctaagggagggccacccagggtagcacccaacccgactggcgtagacagcgctatgaaagaagaggtacagcgccttcagagtcgcgttgacctgcttgaagagaagctgcagctggtgcttgcacccctccattcgttagcaagccaggccctcgagcacggactgccagacccaggctcattactcgtgcattcgtttcagcagctcgggagaattgattcactctctgagcagatcagcttcctagaagagcaactcggaagttgttcatgtaagaaggatagttag

SEQ ID NO: 221775 - DNA, 822 bp, synthetic construct
  misc_feature 1..822: note = Description of Artificial Sequence: Synthetic coding sequence
  source 1..822: mol_type = other DNA
atgagaggatctcaggaggtacttcttatgtggctgttagtgttggccgtgggcggtacagaacatgcatatcgcccaggtcgccgagtgtgcgctgtgcgggcacacggcgaccccgtctctgaatcattcgtccagagggtctatcagcctttcctcaccacctgtgacggccaccgagcttgctcaacatataggacaatctatcgcactgcttaccgcagatctcctggactagcccctgcacggccacgctacgcttgttgcccgggttggaagcgaacatccggactcccaggagcctgtggtgcggcaatctgtcagccaccttgccggaatggaggttcatgtgtgcaaccaggtaggtgccgctgtcccgcaggctggaggggtgatacttgccaaagtgatgtggacgagtgctctgcacggcgtggcggatgccctcagcggtgcgttaacaccgcgggatcatactggtgccagtgttgggaaggccactccttaagtgcagacggcacactttgcgtgcccaaaggagggccacccagggtcgcgccaaatcctaccggagtagactcagctatgaaggaagaggtgcagaggctgcaatctcgggtcgacctcctcgaggaaaaactccagctggtccttgctccactgcatagcctcgccagccaggccctggagcatggactaccggatccgggaagtttactggtccacagcttccagcagctggggcgaatcgactcactgtccgagcagatctctttcctggaagagcagctgggctcttgtagttgtaagaaagatagttag

SEQ ID NO: 221776 - DNA, 882 bp, synthetic construct
  misc_feature 1..882: note = Description of Artificial Sequence: Synthetic coding sequence
  source 1..882: mol_type = other DNA
atggggtcgcgggcagagttgtgtacactcctgggcggattttctttccttctcttgctgatccccggtgagggcgcaaaaggtggcagcttaagagaatctcaaggcgtgtgctcaaaacagactctggtggtacctctgcattataatgagtcgtactcccagccagtttataagccctacctcacactgtgtgctggtcgtagaatttgtagcacatacagaactatgtatagggtaatgtggcgtgaggtgcgacgggaggtgcaacagacacacgccgtctgctgccagggctggaaaaaaaggcacccaggagctctcacatgtgaagccatctgcgccaagccatgtctgaacggtggagtctgcgtaagacctgaccagtgtgagtgtgcacccggttggggcggtaagcactgccacgtcgacgtagacgagtgccggacctcgataactctgtgttctcaccactgtttcaacacggctggaagtttcacttgcggctgtccccacgatttggttctgggagtcgatggacgcacttgcatggaggggagccctgagccacccacatctgcatctatcctgagtgtggctgtgagggaggcagagaaggacgaacgagcactcaaacaggaaatccacgagctacggggaagattggagcgcttggaacaatgggccggacaggcaggcgcttgggtccgagccgtccttcctgtcccacctgaagagttacagccagaacaggtcgccgagctttggggtcggggtgacaggatagagagtctatcagatcaggtgcttctgctggaggagagattaggcgcatgctcttgtgaagataatagccttggcctaggagtcaatcaccgctag

SEQ ID NO: 221777 - DNA, 882 bp, synthetic construct
  misc_feature 1..882: note = Description of Artificial Sequence: Synthetic coding sequence
  source 1..882: mol_type = other DNA
atgggaagccgggcagagctgtgcaccctcctgggcggtttctcgtttcttctgctcctgatcccaggtgaaggcgctaagggcggttccctgagggagtcccagggcgtgtgcagcaaacaaaccctggtggtcccccttcattataatgagagctatagccagccagtgtacaagccatatctgacactctgtgctggcaggcgaatttgtagtacgtaccgcacaatgtatcgtgtgatgtggcgggaagtgcgacgggaagtgcagcagacccacgctgtctgctgccaaggctggaagaaacgccaccctggagcactgacctgcgaggctatctgtgcaaagccatgtctgaacggaggagtgtgtgtaaggccggaccaatgtgagtgcgcccctgggtggggtgggaaacattgccatgtagatgtcgatgagtgcagaacatccattaccctgtgctcacaccactgcttcaacacggcgggaagtttcacctgcgggtgcccacatgatctcgtgctcggcgtcgatgggagaacatgtatggaaggctctccagaaccacctacctctgcctccattttaagtgtggcggtgagggaggccgagaaggacgagcgtgctctcaaacaggaaatacacgagctgagaggtagacttgaacgtctggagcaatgggccggacaggcaggggcttgggttcgggcagtgctgcctgtcccacctgaagaactgcagccggagcaggtagccgagctttggggtagaggcgatcgcatcgaatctcttagtgaccaggtcctactcttagaggaacgcctcggcgcatgttcttgtgaggataattctctgggattgggagtaaatcatagatag

SEQ ID NO: 221778 - DNA, 882 bp, synthetic construct
  misc_feature 1..882: note = Description of Artificial Sequence: Synthetic coding sequence
  source 1..882: mol_type = other DNA
atgggatcccgggctgagctttgcaccctgctcgggggatttagttttctgctcttgctgatccccggtgagggcgctaaagggggatccctgcgcgaaagccaaggcgtttgcagcaaacagactctggtggtccccctgcactacaacgaatcctactcacagcccgtgtacaaaccatacctcactctgtgtgccggtcggagaatttgttcaacctaccgaacaatgtaccgggtgatgtggagagaagtgaagagggaagtccagcagacgcacgcagtctgctgtcagggctggaagaaaagacaccccggagctttaacctgcgaagccatctgtgctaagccttgcctgaacggaggtgtctgtgtccggcctgaccagtgtgaatgtgcccctggctggggaggcaaacactgtcatgtagacgtagacgaatgccggacgagcataacactctgtagtcatcattgttttaatacagcgggtagcttcacttgtgggtgcccccacgacttagtactgggggtcgatggacgaacctgcatggaaggctctcccgagcctccaactagtgcctccatcttgtcagtggccgtcagggaggctgagaaggatgaaagagcgctgaagcaagagatccacgagctaagaggacggttggaaaggctcgaacagtgggccggacaagcaggcgcatgggttagagccgtgctgccagtgcctcccgaggagctccagccagaacaggtggccgagctgtggggtcgaggcgacagaattgagtctctctctgaccaagtcctgctactggaagagcggctgggcgcttgtagctgtgaggacaatagcctcggcttgggggtgaatcaccgttag

SEQ ID NO: 221779 - DNA, 777 bp, synthetic construct
  misc_feature 1..777: note = Description of Artificial Sequence: Synthetic coding sequence
  source 1..777: mol_type = other DNA
atgggctcaagagctgaattatgtaccctgcttggtggattttcatttctgttactgctaattcctggcgagggtgcgaaaggcggttctcttagggagagccagggagtctgcagcaaacagacgttagtggtccctctgcactacaatgaaagttatagtcagcccgtttacaaaccttacctgacactgtgtgcaggcagacgcatatgtagcacctaccgaactatgtaccgcgtgatgtggcgggaggtaagacgcgaagtgcagcagacccacgcagtctgttgccagggatggaaaaagcgccatcccggtgccctgacgtgtgaggccatttgcgccaagccttgccttaacggcggtgtatgtgtccgcccagatcagtgtgaatgtgcgccaggatggggcggtaagcattgtcacgttgggtcctttacctgtggctgcccacacgacttggtgctgggggtggacggcaggacatgcatggaaggaagccccgagccccctaccagtgcgagtattctgtcagtggccgtgagagaggcagagaaggatgagagagctctgaagcaagagattcatgaactgagagggaggctcgagcgacttgagcaatgggctggccaggccggagcatgggttcgggcagtgctccccgtccctcctgaggagctgcaaccggagcaagtggctgaactttggggaagaggcgaccgaatagagtctttgtcagaccaagtactgctgttagaagaacggctgggtgcatag

SEQ ID NO: 221780 - DNA, 882 bp, synthetic construct
  misc_feature 1..882: note = Description of Artificial Sequence: Synthetic coding sequence
  source 1..882: mol_type = other DNA
atgggatcccgggctgaactgtgcacactgctgggtggtttcagcttcctcctattactgatacccggagaaggagcgaagggcggaagcctgagagagagtcagggggtctgctcaaaacagaccttggtggtacccctgcattataatgagagctactcccaaccagtctacaagccttacttgaccctgtgcgcaggtcgcagaatctgtagtacataccgcacgatgtaccgtgttatgtggagggaggtgaggcgcgaggttcagcagacacatgccgtctgctgtcagggatggaagaagcgtcaccctggcgctctgacttgcgaggccatctgcgccaaaccatgtctgaacggaggcgtctgtgttcgaccggaccaatgcgagtgtgccccagggtggggtggaaaacactgccacgtggatgtcgacgagtgccgcacctccatcaccctttgctctcatcattgcttcaacaccgctggctcctttacctgcggatgtcctcacgacctagtgctcggagttgatggccgaacctgcatggagggatcgccagaaccaccaaccagcgcgtccatcctgtcggtagccgtgcgcgaagccgaaaaagatgaacgggcactgaagcaggagattcatgaactacgcggaagactggagcgcctggagcaatgggctggccaggccggagcttgggtacgcgctgtgctccccgtcccaccagaagagctccaacctgagcaggtcgccgagctctggggacggggagacaggattgagagtctctcagaccaggtgttgctccttgaggaaaggttgggcgcttgctcttgcgaggacaactctcttggcctgggcgtcaaccaccggtag

SEQ ID NO: 221781 - DNA, 882 bp, synthetic construct
  misc_feature 1..882: note = Description of Artificial Sequence: Synthetic coding sequence
  source 1..882: mol_type = other DNA
atgggctctagagccgagttgtgtaccctgctggggggattcagtttcctgctcctgctcattccgggagaaggtgctaaaggcggatccctgagagagtcccagggcgtctgctctaagcaaacgctcgtggtcccactgcactacaacgagagttacagtcagcctgtgtataagccctatttgacactgtgtgcagggcgtcggatatgtagtacctaccgaacaatgtacagggttatgtggcgggaagtgcgcagggaagtgcaacagacgcacgctgtctgctgtcagggttggaagaaacgccaccccggagcccttacttgcgaggcaatttgcgccaagccctgcctaaatggcggtgtgtgcgtcaggcctgatcagtgcgaatgcgctccgggatggggaggcaaacattgtcacgtggacgtggatgagtgtcgaacctctatcaccctatgctctcaccactgttttaacactgccggaagcttcacgtgtggctgcccccacgacttggtactgggggtggatggcagaacatgtatggaaggatcaccggagccccctacaagcgctagtatcttatctgttgctgttcgggaagcggagaaggatgagcgagcgctgaagcaggagattcatgagttgcggggacggctagaacggctggagcagtgggccggacaggccggtgcctgggtgcgggcagtgctgcccgtgcctcctgaggaacttcagccagaacaagtggccgagttgtggggaaggggtgatcgcatcgaatcactttctgatcaggtgctgctgctcgaggagagattgggagcctgtagctgcgaagacaacagtttaggcctgggtgtgaatcataggtag

SEQ ID NO: 221782 - DNA, 882 bp, synthetic construct
  misc_feature 1..882: note = Description of Artificial Sequence: Synthetic coding sequence
  source 1..882: mol_type = other DNA
atgggatcccgggctgagctttgcactctgttagggggattctcattcctgttgctgctaattccgggtgagggggctaagggtggatctttaagggagtctcagggagtgtgcagcaagcaaactctggtggtgccattgcattataacgagtcgtactctcagcccgtgtataaaccctacctcaccttatgcgctggtcgcagaatctgctccacttatagaactatgtaccgtgtgatgtggcgagaggtgaggcgggaagtgcaacagacacatgcggtgtgctgccaaggctggaaaaaaagacacccgggtgctctgacttgcgaggccatctgtgcaaagccctgccttaatgggggagtgtgcgtgcgtcctgaccaatgcgagtgtgccccaggctgggggggaaagcactgtcacgtagatgtggatgagtgccgaaccagtatcacactgtgtagccaccactgtttcaacaccgcaggaagttttacctgtggctgtccccacgatctagtgcttggagtggatggcagaacctgcatggaaggtagcccagagccacccactagcgccagtattctttccgtggctgtcagggaagccgaaaaggacgagagagctcttaagcaagaaattcatgagctgcgcggacgactggagcgacttgagcagtgggcgggacaggctggcgcatgggttagagcagtgctgccggtacctcccgaggaactccagccagagcaggtcgccgagttgtggggacggggagacagaatcgagtcgctgtccgatcaggtgctattattggaagaaagactcggcgcatgtagctgcgaagataatagcttgggactgggagtgaaccaccggtag

SEQ ID NO: 221783 - DNA, 777 bp, synthetic construct
  misc_feature 1..777: note = Description of Artificial Sequence: Synthetic coding sequence
  source 1..777: mol_type = other DNA
atggggtcgagagccgaactgtgcaccctgttagggggattctcatttctgctcttgcttattcctggggagggcgcaaaaggtgggtctctgcgggagagccaaggggtgtgctctaagcagacactagttgttcctctgcactataatgaaagttactcacagcccgtctataagccctacctgacactttgtgctggacgccgtatttgcagtacatacagaactatgtatcgagtgatgtggagggaagtcaggagggaggtccaacagacgcatgccgtatgctgccagggctggaagaagaggcaccctggggctctaacatgtgaggccatctgtgctaagccatgccttaacggcggtgtgtgtgtgaggccagatcaatgtgagtgtgccccaggatgggggggtaagcactgtcacgtcgggagctttacatgtggttgccctcatgacctagtcttgggagtagatgggaggacctgcatggagggatctcctgaaccaccaacaagtgcctcaatactttctgtggccgtgagggaagccgagaaggatgaacgggcactgaagcaagagatccacgaactgcgaggcaggctggaacggttagaacagtgggcagggcaggccggagcgtgggtacgagccgtcttgccagtcccacctgaagaacttcagccagaacaggtggctgaattgtggggacggggagatcggattgagagcctgtctgatcaggtgctgctactcgaggaaagactgggcgcttag

SEQ ID NO: 221784 - DNA, 777 bp, synthetic construct
  misc_feature 1..777: note = Description of Artificial Sequence: Synthetic coding sequence
  source 1..777: mol_type = other DNA
atgggtagccgcgctgaactgtgcacacttcttggaggtttctcctttcttttgttactcatccctggcgaaggagcgaaagggggttcgctgagagagtcacagggtgtctgttcaaagcagaccctggtggtccctttacactataacgagtcttactctcagcctgtgtacaaaccctacctgacactgtgtgctggccgaagaatctgttccacatacagaactatgtaccgggtgatgtggagggaagtgagaagggaagtgcaacaaacgcacgccgtgtgctgtcaaggttggaagaaacgccatcccggagccctgacatgcgaggccatatgcgctaaaccctgtctgaatggcggagtgtgtgtgcgtcccgaccagtgtgaatgcgcaccaggctgggggggtaagcactgtcacgtcggatcttttacctgcggctgcccgcacgacctcgtattgggagtggatggcagaacctgtatggaggggtcacctgaaccacccacctctgctagcattctctcggtggctgtgcgcgaagccgagaaggatgagcgagcactgaaacaggaaatccacgagctgcgaggacgcttggagcgcctggagcagtgggcaggccaagctggggcttgggtgagagctgtgcttcccgtgccgcctgaggagttgcagccagaacaggttgccgaattatggggtcgcggagacagaatagaaagcctttctgatcaagtgctgctccttgaggagagactgggcgcttag

SEQ ID NO: 221785 - DNA, 777 bp, synthetic construct
  misc_feature 1..777: note = Description of Artificial Sequence: Synthetic coding sequence
  source 1..777: mol_type = other DNA
atgggctctcgcgctgaactgtgcacacttcttgggggttttagcttcctgctgctgttgatacctggggaaggtgctaaggggggatccctacgcgaatcgcagggagtgtgctccaagcaaactctggtagtgccactgcactataatgagtcttattctcagcccgtgtacaagccctatctgacactttgcgcaggacgcagaatctgtagcacttaccgcaccatgtatcgcgtcatgtggcgggaggtaaagcgggaggtgcaacagacccacgccgtgtgttgtcagggctggaagaagcgacacccaggggcactgacatgtgaagcaatatgcgcaaaaccgtgcttgaatgggggtgtttgcgtccggccagaccagtgcgaatgcgctccgggttggggaggcaaacattgccatgttggcagcttcacctgcgggtgtcctcacgatctggtgttgggagttgacggcaggacctgcatggagggaagtcctgagccacctacatctgcgtcaatcttgtctgttgctgttagagaagctgagaaagatgaacgtgcacttaagcaggaaatccacgagctgcgcggtcggctcgagcgccttgagcaatgggctgggcaggctggagcctgggtgcgggcagtgctccccgtcccaccagaggagctgcaaccagagcaggttgcagagctttggggcagaggggaccgcatcgagagtctctccgatcaggtcctcctactggaagaacgattaggggcatag

SEQ ID NO: 221786 - DNA, 882 bp, synthetic construct
  misc_feature 1..882: note = Description of Artificial Sequence: Synthetic coding sequence
  source 1..882: mol_type = other DNA
atggggtctcgggctgagttatgcactctcctagggggttttagttttctgcttctgctaattcctggggagggcgcaaagggagggtctctgcgcgaatctcagggggtgtgctctaaacaaactctggtcgtgcctctgcactataatgaatcatactctcaacccgtctataagccctacctcaccctgtgcgctgggagaagaatctgcagcacttatcggaccatgtacagggttatgtggcgggaagtgagacgcgaagtgcaacagacacatgctgtgtgctgtcaaggctggaagaagcggcaccctggtgccctcacctgtgaggccatttgtgccaaaccctgcctgaatggtggggtgtgtgtgaggcctgatcagtgtgagtgtgcccctgggtgggggggtaagcactgccacgttgatgtggatgagtgtcggacttctattaccctctgttcccatcactgctttaacaccgccggaagcttcacttgcggatgtccccacgatctagtgctgggcgtcgacggcagaacatgtatggaaggctctccggagccccctacctcagcatctatcctctccgtggcagtgcgcgaggccgaaaaagacgagagagctctcaagcaggagattcacgagctccggggtcgactggaacggcttgaacagtgggcagggcaggcgggagcgtgggtgagagccgtgctgcctgtgccacccgaagagctgcagcccgaacaggtcgccgagctgtggggacggggagaccgcatcgaaagtctatccgaccaggtcttactcctggaggaaagactgggagcatgttcttgtgaggataattccttaggactgggtgtgaaccaccggtag

SEQ ID NO: 221787 - DNA, 882 bp, synthetic construct
  misc_feature 1..882: note = Description of Artificial Sequence: Synthetic coding sequence
  source 1..882: mol_type = other DNA
atgggcagcagggccgagttgtgcaccctactcggcggattcagctttctgctgctgttaatcccaggagagggcgctaaagggggtagtctccgtgagagtcagggggtttgtagtaaacagacactggtagttccgctccattataatgagtcatatagtcaacccgtatataaaccatatctgaccctatgcgccggtaggagaatctgcagcacctatcggactatgtaccgcgtaatgtggagagaggtacgcagggaggttcagcagacccatgccgtttgttgtcagggatggaagaaacgacacccaggcgcactcacctgcgaagctatttgcgccaagccatgcctgaatggtggggtgtgtgtacgaccggatcaatgtgagtgtgctcctggctggggagggaagcattgtcacgtggacgtcgacgagtgccggacatctattaccttgtgcagtcatcattgcttcaatacagccggttcattcacttgtggctgtccacacgatctagtactcggagtcgacggtagaacctgtatggagggcagccccgagcctcccactagcgcttccatcctttcagtcgcagtccgcgaagctgagaaagatgaaagagcgttgaaacaggaaatccacgagctcagaggcagactggagaggttggaacagtgggcaggccaggctggtgcctgggtgagggcggtccttcccgtgcctcccgaagagttgcagcccgaacaggtggctgagctctgggggaggggcgacagaatcgaaagcttatctgatcaagtcctgttactcgaggagcgcctcggtgcgtgcagctgcgaggataattcactgggtctcggcgtaaaccacaggtag

SEQ ID NO: 221788 - DNA, 882 bp, synthetic construct
  misc_feature 1..882: note = Description of Artificial Sequence: Synthetic coding sequence
  source 1..882: mol_type = other DNA
atgggctcgcgagcagaattatgtacgttgctgggcggattctcctttctattgctgttgattcctggggagggagccaaagggggatcactgcgggaatctcagggggtctgcagcaagcagaccctggttgtgccactgcattacaacgagagctacagccagccagtctacaagccctacctgacgctctgcgcaggacggagaatttgttcaacctaccgcactatgtacagggtgatgtggcgggaagtaagacgtgaggtgcagcagacgcacgctgtgtgttgtcaggggtggaagaaaaggcaccccggagctctgacatgcgaggctatatgtgctaagccctgcctgaacggaggagtgtgtgtccgtcccgaccagtgcgaatgtgctccgggttgggggggtaagcattgtcatgtggacgtcgatgaatgccggacatcaatcacgctttgttcacaccattgctttaacactgccggttcatttacctgcggctgtccccatgaccttgtgctcggagtggatggacgtacatgtatggaggggtctcctgagcccccaacttctgcaagtattctgagcgtcgcagtcagagaggcagaaaaagacgagagggcattgaaacaggaaatacacgaattgagaggccgacttgaaagacttgagcagtgggccggacaggcaggggcttgggtgcgggcagtgctgccagtgccgccagaggagcttcaacccgaacaggtggccgagctgtggggcaggggcgaccgaatagagagtctgagcgaccaggttttgttactggaagaaagactcggcgcttgtagctgcgaggacaacagtctggggctgggagtgaatcatcgttag

SEQ ID NO: 221789 - DNA, 882 bp, synthetic construct
  misc_feature 1..882: note = Description of Artificial Sequence: Synthetic coding sequence
  source 1..882: mol_type = other DNA
atgggttctcgggcagagctgtgcacgttgcttgggggattcagcttcctcctgctccttatccctggcgagggcgctaagggtggctcactgagggaaagtcagggcgtctgctctaagcagaccctggtggtgccgcttcattacaatgaatcgtatagtcagccagtttacaagccttacttaactctgtgcgccggtagaaggatctgtagcacctatagaaccatgtatagagtcatgtggcgagaggttaaaagagaagtacagcagacccatgcagtttgttgccaggggtggaagaaacggcaccccggagctctcacgtgcgaggccatctgtgccaagccgtgcttaaacgggggagtgtgcgtgagaccagaccaatgcgaatgcgctcctgggtggggcggtaagcattgtcatgttgatgtggacgagtgtaggacaagtatcactctgtgtagccaccattgttttaatacagctggatcattcacgtgcggctgtccacacgaccttgtgctaggcgtcgatggcagaacctgtatggaaggttctcccgagccaccaacatcagcgtcaatcctcagcgtcgccgtgagggaagccgaaaaagacgagcgggcattaaagcaagagattcatgagctgagaggccgtttggagaggctcgaacagtgggccggacaagccggtgcgtgggttagggccgtgctgcccgtcccgccagaggagttgcagcccgagcaagtggccgaactgtggggaaggggggatcgcatagaatccctaagtgatcaggttctgcttctggaggagaggttgggagcgtgcagttgcgaggataattctctgggcctgggggtgaaccatcgctag

SEQ ID NO: 221790 - DNA, 882 bp, synthetic construct
  misc_feature 1..882: note = Description of Artificial Sequence: Synthetic coding sequence
  source 1..882: mol_type = other DNA
atggggagccgtgcggaactgtgtacccttctcggcggattttcatttttacttcttttgattccgggtgaaggcgctaagggcggttcgttgcgggagtcacaaggagtctgcagcaagcagacactagtggtgcctctgcactacaacgaatcatactctcagcccgtgtataaaccatacctgacattatgtgccggacgcaggatatgttccacctaccgtactatgtacagagtgatgtggagggaagtcagaagagaggtacagcagacccatgccgtgtgctgtcaaggttggaaaaaacgccatcctggagccctgacatgcgaggccatctgcgcaaagccctgcttgaatggaggagtgtgtgtgagaccggaccagtgtgagtgcgcacctggctgggggggaaaacactgtcacgttgacgtggacgaatgtcgtacgagcattacgctctgctcccatcattgtttcaataccgctggttcgttcacttgcgggtgcccccatgatcttgtgctgggcgttgacggcagaacctgtatggaggggagtccggaacctcccacatcagcctccattctctccgtagccgtgagagaagcggaaaaggacgagagggctctgaagcaggaaattcacgagctaaggggcagactcgaaaggctcgagcagtgggccggtcaggctggcgcttgggtccgagcagttctccccgtgcctcccgaagaactgcagccagagcaggtcgcagaattgtggggacggggtgatcggatcgagtcgctctccgatcaggttctcctattggaggagcgtctgggagcctgttcatgcgaggataactccttgggacttggagtaaatcataggtag

SEQ ID NO: 221791 - DNA, 882 bp, synthetic construct
  misc_feature 1..882: note = Description of Artificial Sequence: Synthetic coding sequence
  source 1..882: mol_type = other DNA
atggggtcccgggctgaactgtgtactttattggggggtttttcattcctcctgctcttgatccccggagagggggcaaaaggtggctctcttcgggagagtcagggtgtctgcagtaagcagacactcgtcgttccactacattataatgagagttattcccagccagtgtacaaaccctacctgacgttatgcgccggtcgccgaatttgttccacatatcggacgatgtacagagtgatgtggagagaggtgagaagagaggtgcagcagacacacgccgtttgttgccagggatggaagaagcgacatcccggagcgttaacatgtgaggccatctgcgccaaaccctgcttgaacggaggtgtgtgtgtcagacccgatcaatgtgagtgcgctccagggtggggaggcaagcactgccatgtcgatgtggatgagtgtagaacaagcatcacactgtgttctcaccactgttttaataccgctggaagtttcacctgtggttgtcctcacgacttggtcctgggcgtggatggcagaacttgcatggagggtagcccagaaccgccaacttcagcatctattttaagcgtggccgtgcgggaggctgagaaggatgagcgggcacttaaacaggagattcacgaactgcggggaaggctggaaaggctggagcagtgggctggccaggccggagcttgggtgcgagccgtgttgcctgtgcccccagaagagcttcagcctgagcaggtcgccgaactttggggcaggggagacaggattgagtccttgtctgaccaggtgctactgctggaggaacgtctgggggcatgcagttgtgaagacaattcactgggtctcggagtgaatcatcgatag

SEQ ID NO: 221792 - DNA, 882 bp, synthetic construct
  misc_feature 1..882: note = Description of Artificial Sequence: Synthetic coding sequence
  source 1..882: mol_type = other DNA
atgggttcccgggctgaactgtgcacactgctgggtggatttagcttcttacttctgctcattcccggagagggggcaaaaggcggtagcttgcgggagtcacagggagtctgctccaaacagacgctagtcgtgcctttgcactacaatgaatcttacagccaaccagtctacaaaccgtatctcaccctttgcgcagggaggcgaatctgcagcacctaccggactatgtaccgcgtgatgtggcgcgaggtgagacgagaagtgcagcagacgcatgccgtctgttgtcagggatggaagaagagacacccaggtgcattaacttgtgaagccatctgtgctaaaccttgtctgaatgggggtgtgtgtgtgagacctgatcagtgtgagtgcgcgcctggttggggcggtaagcactgccatgttgatgtagatgagtgtcggacatctatcaccctatgctctcaccattgctttaacaccgctgggtctttcacatgtggctgcccccatgatctagtgctgggggtggatggcagaacctgtatggagggctcacccgaacccccaacttctgcatctattctgagcgtggccgtaagagaggccgagaaggatgaacgggcattgaagcaagaaatccatgagctccggggaagactagagcggttagagcagtgggctggtcaggcgggtgcatgggtccgtgcagtgctgcccgtccctcctgaagaattacagcccgagcaggtagccgaactatggggcaggggagaccgcattgaaagtctgtctgaccaggtcctgttactcgaagaacgcctgggggcttgctcctgtgaggacaattctctgggccttggcgtgaaccatcggtag

SEQ ID NO: 221793 - DNA, 777 bp, synthetic construct
  misc_feature 1..777: note = Description of Artificial Sequence: Synthetic coding sequence
  source 1..777: mol_type = other DNA
atgggatcgagagccgagctttgcaccctgttggggggttttagctttctactcctgctgatccctggagagggcgctaaggggggaagtttgcgggaaagccagggagtttgcagtaaacaaaccttggtggtgccccttcactacaacgagagctattcccagcccgtgtataaaccttacctgaccctttgcgctggacgtaggatttgttcaacttataggaccatgtacagggtgatgtggagggaagtaaggcgggaagtccaacagacgcacgccgtttgttgtcaagggtggaaaaaacgccacccaggcgctctgacctgcgaggccatctgcgcgaagccatgcctgaacgggggtgtgtgcgtgaggcctgaccagtgcgagtgtgccccaggatggggcggtaagcattgtcacgttggctcttttacttgcggatgcccgcacgacttggttctcggggtggacggtcgtacctgcatggaggggagtcctgagcctccgacatcggcctctatactgagtgtggctgtgagagaggccgagaaagacgaacgcgcactgaagcaggagatccatgagctaaggggcaggctggaacgcttggaacaatgggccggacaggccggtgcttgggtcagggcagttctgcctgtgcctcctgaggagttgcagccagagcaggtcgctgagttgtgggggcgtggcgaccgcatcgagtctttatccgaccaggtcctcctgctagaagaacggctgggcgcatag

SEQ ID NO: 221794 - DNA, 882 bp, synthetic construct
  misc_feature 1..882: note = Description of Artificial Sequence: Synthetic coding sequence
  source 1..882: mol_type = other DNA
atgggatcccgggctgagttgtgtacactcctcggaggcttttcctttctgctcctcttgattcccggtgaaggggctaagggcggatctcttagagagtctcagggcgtgtgcagtaagcagaccctcgtggtgccactccactataacgagtcttatagccagcccgtgtacaaaccatatctaaccctctgtgccggacgaaggatctgcagcacttaccgcactatgtaccgagtcatgtggcgtgaggtgcgtcgggaggtccaacaaacgcacgccgtttgttgtcaaggatggaagaaacggcatcccggagcacttacctgcgaggcgatttgtgcaaagccttgtttaaatggtggagtctgcgtccggccagaccagtgtgagtgtgcgccaggttggggcggtaagcactgccatgtagacgtcgatgaatgtcggacaagtattactctgtgctcacaccactgttttaatacagccggttcatttacctgcggatgcccccacgacctggtactgggagtagacggcagaacctgcatggagggttccccagaacctcccacatcggcaagcattctcagcgtcgcagtgagagaggcagagaaagacgagagagctctgaagcaggagattcatgagctcaggggaagactggaaaggttggaacaatgggctgggcaggctggtgcttgggtccgagcagttctccccgtgcccccagaagaactgcagcccgagcaggtggccgagctgtggggcagaggagataggatagaaagcctgtcagatcaagtcctgctgctggaagaacggctcggggcatgttcatgtgaggataattccctggggctgggggtgaaccaccgctag

SEQ ID NO: 221795 - DNA, 1281 bp, synthetic construct
  misc_feature 1..1281: note = Description of Artificial Sequence: Synthetic coding sequence
  source 1..1281: mol_type = other DNA
atggctaacgactcaggtggacccggaggaccatcaccttccgaaagggatagacagtactgcgagctgtgcggcaaaatggaaaaccttttaaggtgcagccgatgtcgctcgtctttctactgctgcaaggagcaccaaaggcaggattggaagaaacacaagctggtgtgtcaaggatcagaaggtgccctggggcatggagtcggtcctcatcagcactctggccctgcacctcctgctgctgtcccacctccgagggcaggcgctcgggaaccaagaaaagccgcagctcgcagagataatgcctccggagatgccgcaaagggcaaggtgaaagctaaaccacccgctgaccccgcagccgcagccagtccttgtagagctgctgccggtggacaggggtctgcagtagcggcagaagcagaaccaggaaaagaggagcccccagcacggtcctctcttttccaggaaaaggctaacctctatcccccatccaatacccctggagacgcacttagccctggcggagggctccgaccaaacggccagacaaagccgcttcccgcattaaaactggccctcgagtacatcgtgccttgcatgaacaaacacggcatttgcgtcgtcgacgactttctgggcaaggagaccggacagcagataggcgacgaggttcgggctctacacgataccggtaagttcaccgacgggcagttggtttcgcagaagtcagacagcagcaaggatatacggggagacaaaattacttggatcgaagggaaagagcctggttgtgagaccattggcctcctgatgtcatccatggatgacctaatcagacactgtaatggaaagttgggatcctacaagatcaatggacggactaaggctatggtcgcgtgttatccgggaaacggaactggctacgttaggcatgtagacaacccgaatggagatggcagatgcgtgacctgcatctattacctgaataaggactgggacgctaaagtttctggcggaattctgcgaatctttcccgaaggcaaagcccagtttgctgatatagaaccaaagttcgatcgattgttgttcttttggtccgacagacggaatcctcacgaggttcagcccgcttacgccacacggtacgcaattactgtgtggtactttgatgctgacgaacgtgctcgagccaaagtgaagtatctgactggcgagaaaggtgtccgagtggaactcaataagccatccgattctgtggggaaggacgtcttctag

SEQ ID NO: 221796 - DNA, 216 bp, synthetic construct
  misc_feature 1..216: note = Description of Artificial Sequence: Synthetic coding sequence
  source 1..216: mol_type = other DNA
atgaataaacatggaatctgtgttgtggatgactttctggggaaggagactggtcagcagattggggacgaggtgagggcactacacgacacaggaaagtttactgacggttcttggtccgccaggagggtgacacgacccagaaccagtgaggccattcgctcccctgggagtagagctaggtctcctgccgctaagcctcttggatgcagctag

SEQ ID NO: 221797 - DNA, 1224 bp, synthetic construct
  misc_feature 1..1224: note = Description of Artificial Sequence: Synthetic coding sequence
  source 1..1224: mol_type = other DNA
atggacagtccctgtcagccccagcctttaagtcaggctctaccacagctgccaggctcatcttcagaaccgctcgaacccgagcccggacgcgctcggatgggcgtggaaagttatctcccatgcccattgcttcctagctatcactgccctggggttcctagcgaagcctctgcagggagcggcacacccagagccacagctacctctaccactgccagcccacttcgagacgggtttggaggtcaggacggcggagaacttcgtcccctgcagtcagagggtgccgcagccctcgtcacgaaaggatgccagcgtcttgccgcacagggcgctagacccgaggctcctaagagaaagtgggcagaagatggaggagatgctccctccccatccaagaggccatgggcaagacaagagaaccaagaagccgaaagagaaggaggcatgagctgcagctgctcctcaggcagcggagaagcttccgccggtttgatggaggaggccttaccatccgcacccgagcgactggccctggattacatcgtaccttgcatgcggtattacgggatttgtgtaaaggactccttcctcggagccgctctgggcggacgggtgctggctgaggtggaggcactgaaaagagggggtagactgcgagacggtcagctagtaagtcagcgagccattccacccaggtcaataagaggcgaccaaattgcctgggtagagggccacgagcccggttgcaggtctattggggcacttatggcccacgtcgatgctgtgatcagacactgcgctggtcggttgggtagttatgtcattaatggcaggacaaaagctatggttgcctgctatcccggtaatggcctcgggtacgtgcgccacgtggacaacccgcacggggacggtcggtgtattacgtgtatttactatctgaatcagaattgggacgtcaaggttcacggcggattactccaaatattccccgagggacggcctgtcgtagctaacatcgagcccctctttgacagactgctgattttctggtctgaccggcgtaacccccacgaggtgaagcccgcatatgccacaagatacgctatcaccgtgtggtacttcgatgcaaaggagcgagccgcagccaaggacaaataccagctcgcttctgggcagaagggcgtccaggtcccagtgtcacaaccgcctacgccgacatag

SEQ ID NO: 221798 - DNA, 1224 bp, synthetic construct
  misc_feature 1..1224: note = Description of Artificial Sequence: Synthetic coding sequence
  source 1..1224: mol_type = other DNA
atggattctccttgtcagcctcaaccgctctctcaggcgttaccacaattgccaggctccagttccgaaccccttgaacctgaaccagggagggctcgaatgggggtcgaatcatatctgccctgtccgttactgccatcctatcattgtcccggagttccatcggaggccagcgcaggttctggcacccccagggccaccgccaccagcactactgcttcaccgttacgcgatggtttcggaggacaggacggtggggagttgcgtcccctccaatccgagggggcagccgcactggtcaccaaaggttgccagaggcttgcagctcagggagctaggcccgaggccccaaagcgcaagtgggctgaagacggaggagacgccccatctccttcaaaacgcccttgggcacgacaggaaaatcaggaagctgagcgcgagggaggtatgtcctgctcatgcagttcaggctccggggaggcttcagctgggcttatggaggaggcactcccctccgctcctgaaaggcttgccctggactatattgtaccttgtatgcggtactacggcatatgcgtcaaagattctttccttggggctgctctagggggaagagtgctggcagaggtcgaagcactgaagcggggagggaggttgcgagatgggcagttggtgtcgcagagggcgattccccctcggtctatacgtggcgatcagatcgcttgggtcgaaggacacgaaccaggttgccgaagcataggagctctgatggcccatgtagatgccgtgatcaggcactgtgccggaaggctggggagctacgtgattaatggacgcacaaaagccatggttgcttgctaccctgggaatgggctgggctatgtaaggcacgttgataatccgcacggtgacggcaggtgcattacgtgtatttactatcttaatcaaaactgggacgttaaggtgcacggcggtctgctccagatctttcctgaaggccgtcctgtcgtggcgaatattgaacctctgtttgaccgcctcttgatcttctggtcagaccggagaaatcctcatgaggtgaaacctgcttacgcaacacgctacgctataaccgtgtggtacttcgacgccaaagaaagagcagcagccaaagataaatatcaattagcctctggacagaaaggcgttcaggtaccagtcagccagcctcctaccccaacatag

SEQ ID NO: 221799 - DNA, 720 bp, synthetic construct
  misc_feature 1..720: note = Description of Artificial Sequence: Synthetic coding sequence
  source 1..720: mol_type = other DNA
atgcctcttggacacattatgaggttagacctggagaagatcgcacttgaatacattgtcccctgcctgcacgaagtgggcttctgctacctggacaattttctgggcgaagtcgtgggtgactgtgtgttagaacgagttaaacagctacactgcaccggcgcactcagagacggtcagctcgctggccctcgcgctggagtctccaagagacatctgcgcggagatcagatcacctggatcggaggcaacgaagagggctgcgaggcaattagcttcttgctcagtcttattgacagattagtgctctattgcggttcccgattagggaaatactacgttaaggagagatctaaggcaatggtcgcatgctacccagggaacggaacagggtacgtgcggcacgtggataaccccaacggcgatggacgttgcatcacatgtatctactacctgaataaaaactgggacgccaaactgcatggtggcattctcagaattttccccgaggggaaatcgttcatcgccgatgtggaaccaattttcgacaggctattatttttctggagtgaccgcagaaacccacatgaggtgcaaccctcctatgcaacccggtatgcaatgaccgtttggtattttgacgccgaggaacgggctgaagcaaagaagaaatttagaaacctgactaggaaaaccgaatctgctctgaccgaagactag

SEQ ID NO: 221800 - DNA, 720 bp, synthetic construct
  misc_feature 1..720: note = Description of Artificial Sequence: Synthetic coding sequence
  source 1..720: mol_type = other DNA
atgccactgggacacataatgagacttgacctcgagaaaatagccctggagtacattgtgccatgtctgcacgaggtggggttctgttacctagacaacttcttaggcgaagtcgtcggtgattgtgtgctggagcgggtcaagcagctacactgcacaggtgcccttagagatggccagttggccggtccacgagctggcgtaagcaagagacacctgcggggagatcagatcacttggatcggcggaaatgaggaagggtgcgaagctatctcatttctcctgtctcttatcgaccgtctggttctgtactgcggatcccggctggggaaatactacgtaaaggaacgatccaaggccatggtagcctgttaccccggtaacggcactgggtatgtgaggcacgtggacaacccaaacggtgatggcaggtgcataacctgtatctactacctcaataagaactgggacgcaaagctgcacgggggtatcctgcgcattttccctgagggaaagtctttcattgccgatgttgagcccatatttgacagactcctctttttttggtccgaccgtcggaaccctcatgaggtccagcctagttacgcaacgaggtatgctatgaccgtatggtattttgatgcagaggaaagagcggaagccaagaaaaaatttcggaacctcacgcgtaagacagagtccgccctaaccgaagattag

SEQ ID NO: 221801 - DNA, 1605 bp, synthetic construct
  misc_feature 1..1605: note = Description of Artificial Sequence: Synthetic coding sequence
  source 1..1605: mol_type = other DNA
atgttctcgtgggtgagcaaggacgccaggagaaagaaagaacccgaactctttcagaccgtcgctgagggattgagacagctgtatgcacagaaactgctgcctctggaagaacattataggtttcatgaattccacagtccagccctcgaggacgcggacttcgacaataaacccatggtgttgttggtgggacagtattccactggaaagaccacctttattcggcatttgatcgagcaggatttccctggaatgagaattggtccagaaccaacaacggatagcttcatagccgtgatgcatggccctaccgaaggcgtagtgcctggtaatgccctcgtggtagatcctaggcgcccttttagaaaattaaatgcattcggcaatgcatttctgaatcgctttatgtgcgcccagctgccaaatcctgttcttgattccatctcaatcattgacaccccaggaattctcagtggcgagaaacaaaggattagccggggatacgactttgcggctgtactggagtggtttgccgaacgagtggaccgaataattttgctgttcgatgctcataaattggacatctccgatgaatttagtgaagtcattaaagccctgaagaaccacgaagataagattcgagtggtgttaaacaaggctgaccaaatcgagacccagcagttgatgagggtgtacggcgctcttatgtggagtctgggcaagataataaacacccccgaagtggtgagagtttatatcggaagcttttggagccaccctttgcttatccctgataacagaaagctctttgaggccgaggagcaggacctctttaaggatatccagagtttgcctcgcaacgccgcactccgcaaactcaatgatctgattaagcgggcaaggctcgccaaggtgcatgcttatatcatttccagtttaaagaaggagatgcctaacgtcttcggaaaagaatctaaaaagaaagaattagtaaacaatctgggcgagatctaccagaaaatcgagcgcgagcaccagataagtccaggagactttccaagcctgaggaaaatgcaggagctgttacagacacaggacttttccaagtttcaagcactcaaaccaaaactgttagacacggtggacgacatgttggctaacgacatcgcaagactaatggtgatggttagacaggaggaatcactgatgccctcccaggtggtgaaaggcggtgccttcgacggaaccatgaacggaccattcggccacggctatggggagggtgctggcgaaggaatcgacgacgttgaatgggtcgtcggaaaggataaacccacttacgacgagatcttttacaccctttccccagtaaatggcaagataactggggctaacgcaaaaaaagagatggtgaaatccaagctgcctaacaccgttctgggcaaaatctggaaactcgccgacgtcgacaaggatggtcttctggatgacgaggaatttgcgctagcaaatcacctaataaaagtgaagctggagggccacgagctacccgcagatctgccaccccacttagtgcccccaagtaaacggcgtcacgagtag

SEQ ID NO: 221802 - DNA, 1605 bp, synthetic construct
  misc_feature 1..1605: note = Description of Artificial Sequence: Synthetic coding sequence
  source 1..1605: mol_type = other DNA
atgttttcctgggtatcaaaagatgccaggaggaaaaaagagccagaattgtttcagactgtagccgagggccttagacaattgtatgcccagaaactgttacccctggaggaacattatagattccacgaatttcactctcccgcactggaggatgcagattttgataataagccaatggtccttttggtgggccagtactctacagggaagaccacattcattcggcacctaatcgaacaggactttccgggtatgagaataggacccgagcccaccacggacagcttcatcgccgttatgcatggaccaaccgagggagttgtgcccggtaatgctctcgtggtcgatccccgtcgacccttcagaaagctcaacgccttcgggaacgccttcctaaaccggttcatgtgcgcacaactccccaacccagtgctggacagtataagcatcattgataccccgggtatcctctctggtgaaaagcagcggatcagtcgaggctacgacttcgcagccgttttagaatggttcgccgagcgggtcgacaggattattttattgtttgacgcccataagctcgacatatccgacgagttctccgaagtgattaaggctctgaagaatcacgaggacaagatcagggttgttctcaataaagcggaccagatcgagacccagcagttaatgcgggtgtacggtgccctgatgtggtcgcttggtaagattattaacacacctgaggtggtgagggtgtacattggaagcttctggagccaccccctgctgatccctgacaatcgaaagttgttcgaggccgaggagcaggaccttttcaaggatatccaatctcttcccaggaacgccgcactgaggaaattgaatgatttgatcaagagggccaggctcgctaaagtccacgcttacattatctctagcctgaagaaggaaatgcctaacgttttcggcaaggagtcaaagaaaaaggagctggtcaataatttaggcgagatctaccaaaagatcgaacgggagcaccaaattagccctggagattttccaagcctgcgtaaaatgcaggagttgcttcagacccaagatttctctaaattccaagccctgaagcccaagttgctggacaccgtagacgatatgctggccaacgacatcgctcgcctgatggtgatggtgcggcaggaagaaagcttgatgccaagccaagtcgttaaggggggagcttttgatggaactatgaacggcccattcgggcatgggtacggtgagggagcgggtgagggtattgatgacgtcgagtgggtggtggggaaagacaaaccgacttacgacgagatattttataccctcagccctgtaaatggaaagataacaggggcaaatgctaaaaaggaaatggtgaagtccaagctgcccaataccgtcctaggaaaaatatggaaactggccgacgtagacaaagatggacttctggacgatgaagagttcgctctcgctaatcacctgattaaagtgaaattggaagggcacgaattgcctgctgatctgccccctcacttggtgcctcctagcaagcgccgacatgagtag

SEQ ID NO: 221803 - DNA, 438 bp, synthetic construct
  misc_feature 1..438: note = Description of Artificial Sequence: Synthetic coding sequence
  source 1..438: mol_type = other DNA
atgtttagctgggtgtcaaaggacgctcgaaggaaaaaggaaccagaactttttcagaccgtggccgagggtctccgccagctgtatgctcagaaactcttaccattggaggagcattacagattccacgaattccactctcctgccttggaagacgccgactttgacaacaaaccgatggttctgcttgttggccagtactcaacaggtaaaacaacctttatacggcacctcattgagcaggacttccccggaatgagaatcggacctgagcccacaaccgactctttcattgcagtgatgcacggtccaaccgaaggcgtcgtccccggaaacgcacttgtggtggatcccaggaggcccttccggaagctgaacgcgttcggaaatgcctttcttaacaggtttatgtgcgcacaactgccgaacccagtttag

SEQ ID NO: 221804 - DNA, 1296 bp, synthetic construct
  misc_feature 1..1296: note = Description of Artificial Sequence: Synthetic coding sequence
  source 1..1296: mol_type = other DNA
atggagcagccagggaccgcagcatctcccgtgtctggtagtatgttctcctgggtgtctaaggatgccaggcgcaagaaggaaccggagctttttcaaacggtggcagaaggactgcgccagctctacgctcagaagttgctgcccctggaagaacactataggtttcacgagtttcactcgcccgctctggaggatgccgactttgacaacaaaccaatggttctcctggtagggcaatattctacggggaagaccacattcatccgacacctgatcgagcaggacttccctggcatgcggattggcccagagcctacgaccgacagtttcatagccgtcatgcatggcccaaccgaaggagtggttcccggtaacgccctcgtcgttgacccacggagaccgttccgcaagctgaatgcttttgggaatgccttcctaaatcgcttcatgtgcgcccagctgcccaacccggtgctggactccatctctattatcgatacccccggtatcctgagcggggaaaagcaacggatctctagaggctatgacttcgctgccgttctagagtggttcgccgaaagagtggaccgtataatcctgttatttgacgcccataagctcgacattagtgatgaattttcggaggtgatcaaggccttgaaaaaccatgaggataagataagggttgtgttgaataaggcagatcaaatagagacgcagcagcttatgagagtgtatggagccttgatgtggtccctggggaaaataatcaataccccagaggtggtaagggtgtatatcggcagcttttggtcccatcctttactaatccccgacaaccgcaaactgtttgaggctgaagaacaggatttattcaaggacatccagagcttgccaagaaatgccgcactgcggaagctcaacgacctcatcaagcgggctagactcgcaaaggtgcatgcctatatcattagttccttgaagaaggaaatgcctaacgtgttcgggaaggaatcaaagaagaaagaattggtgaataatctcggagaaatttatcagaaaatcgagcgggaacaccaaatctcccctggtgatttcccctccctcaggaaaatgcaggaacttctccagactcaggatttttccaagtttcaggccctaaagcctaagctactggatgatgaagagttcgctctcgctaaccatctgatcaaggtcaaattggaaggacacgaactgccagctgatctaccccctcacttagtgcctcctagcaaaaggcgccatgaatag

SEQ ID NO: 221805 - DNA, 447 bp, synthetic construct
  misc_feature 1..447: note = Description of Artificial Sequence: Synthetic coding sequence
  source 1..447: mol_type = other DNA
atgttctcgtgggtgtcgaaagatgctcggaggaaaaaagagccggaattgtttcaaaccgtagctgagggcctgcgacagctgtatgctcagaaactgctgcctctggaagaacattatcgctttcacgaatttcattcgccagctctggaggacgccgattttgataacaagccaatggttctactcgtgggacaatatagtacaggaaagacaacatttattagacacctgattgaacaggactttccaggaatgaggatcggccctgagcccaccaccgattctttcatagccgtcatgcacggcccaacggagggggttgtaccagggaatgctctggtcgtggaccctcgtcgcccttttcgcaagctaaatgcctttggtaacgccttcctgaaccggtttatgtgtgctcagttaccaaatccagtccttgacagttag

SEQ ID NO: 221806 - DNA, 1533 bp, synthetic construct
  misc_feature 1..1533: note = Description of Artificial Sequence: Synthetic coding sequence
  source 1..1533: mol_type = other DNA
atgttttcctgggttagtaaagatgctcgtcggaagaaagagcactacagattccacgaatttcactccccagcgctggaggacgccgacttcgacaataaacccatggtattgttggtgggacagtatagtacaggtaaaaccactttcatccggcatttaatcgagcaggactttccgggaatgcgaatcggtccagagcccacgactgactcctttatagcagtgatgcatggccctacggaaggggtcgtacccggaaatgccctcgtcgtagatccacgcaggcctttccggaagcttaacgccttcggtaacgctttcctgaaccgtttcatgtgcgcccaattacctaaccccgtgctggacagcatctctataatcgacacacccggaatactgtcaggggagaagcaacgtatcagcagaggatatgacttcgccgcagtcctggaatggttcgcagagcgcgtggatcgaatcatattgctatttgacgcgcataaattagacatctctgacgaattttctgaggtcatcaaagccctgaaaaaccatgaggacaaaattagggtggtgctgaataaggctgaccagattgagacccagcagctgatgagggtgtatggcgctcttatgtggtcgctgggaaaaatcattaatacaccggaggtcgttcgcgtgtatattgggtcattctggtcacatcccctgctgatccctgataatcggaaactcttcgaggcagaagaacaggatttattcaaagacatccagagcctgccaagaaatgccgctttacgtaagctcaacgacttgatcaaacgcgctagattggcaaaggtccatgcgtatattatatccagcctgaagaaagaaatgcccaacgtgtttggcaaagagtctaagaagaaagaactggtgaataatctgggggaaatttatcagaagatagaacgagaacaccagatttcacccggtgacttcccctccctgagaaaaatgcaggaactgttgcaaacccaggacttcagcaaattccaggctctgaagcctaaactgttggatacggtcgatgacatgctcgcaaatgacattgcccgtctcatggttatggttcgccaggaggagagcctcatgccgtctcaagtggttaaaggcggagccttcgatggcactatgaacggcccattcgggcacggctacggcgagggtgctggcgaaggaatcgatgacgtagagtgggtggtggggaaggataaacctacctacgatgagattttttatacattgtctccagtgaatggtaagattaccggtgctaatgccaagaaggagatggtgaaatcgaaactgcccaatactgttctgggcaagatctggaagctggccgatgtagacaaagatgggcttctggatgacgaagagtttgccctagccaaccacttaataaaggtcaagctggagggccatgagctgccagccgacctccccccacatttagtgccaccttccaagcgaagacacgagtag

SEQ ID NO: 221807 - DNA, 1632 bp, synthetic construct
  misc_feature 1..1632: note = Description of Artificial Sequence: Synthetic coding sequence
  source 1..1632: mol_type = other DNA
atgttctcctggctaaaacgcggaggggcacgagggcagcagcccgaagcgattcggactgtgaccagcgcccttaaggaactgtaccggacgaagctgctccctttagaagagcattacaggttcggggcattccattcccccgcattagaagatgccgactttgacggcaaacctatggtgttagttgcaggccagtattcgactggcaagaccagctttatacagtacctgcttgagcaggaggttcccggatcgagggtaggccctgaacctacaacagactgctttgtggctgtgatgcacggggacacggaggggacagtacccggaaacgccctcgtggtggatccggacaagccctttcggaagctgaatccattcggaaacacttttttgaatcgcttcatgtgtgctcagctacccaaccaggtgctcgaaagcatctccatcatagacacacctgggatcctaagtggagctaagcagcgagtaagcaggggatatgatttcccggcagtgctacggtggttcgccgagagagtcgatctcatcattcttttgttcgacgcccacaagctggaaatttcagacgaattctccgaagcaattggtgcactacggggtcacgaagacaaaattagagtcgtgcttaacaaagcagacatggtagagacacagcagctaatgcgggtctatggggcattaatgtgggctctggggaaggtcgttggcactcccgaagtacttagggtttatatcggatcattctggtcccagccccttctcgtcccagacaaccgcagactgtttgagcttgaggagcaagacttgtttcgggacatccaaggattgccacgtcatgccgcactgcgcaagctcaatgacttggttaagcgggcaaggctggtgagagtccatgcatacatcataagctacctgaaaaaggaaatgcctagtgtttttggaaaggaaaacaaaaaaaaacagcttattttgaagttacctgtgattttcgccaagattcaactcgagcatcacatctccccaggcgattttcctgattgccaaaagatgcaagagttgctcatggcgcatgattttacaaagtttcatagcctgaagccgaagttgctggaagcactggacgagatgctaacacatgatattgcgaagttgatgcccctgctgcgccaagaagagctggagtctaccgaagttggtgtccaaggtggcgcttttgaaggaacacacatggggccatttgtcgaacgcggaccagatgaagcaatggaagacggggaagagggttccgatgatgaagcagagtgggtcgtgaccaaggataagagtaagtatgacgagatattctataacctggcaccggctgacggaaaactttccggtagcaaagccaagacatggatggtcggaaccaagctgcccaactccgtgctgggaaggatctggaaactttccgatgtggaccgcgatggaatgctcgacgacgaagaattcgctcttgcaagccatctcatcgaggccaagctggagggacacggtctgcctgcaaacttaccgaggagattggtgcctccatccaaacgtcggcataagggctccgccgagtag

SEQ ID NO: 221808 - DNA, 516 bp, synthetic construct
  misc_feature 1..516: note = Description of Artificial Sequence: Synthetic coding sequence
  source 1..516: mol_type = other DNA
atgcctagtgttttcggaaaggaaaacaaaaaaaagcagctgatcttgaagctacctgtcatcttcgcgaaaattcagctggagcaccacatttcacccggagacttcccggattgtcagaaaatgcaggagctgttgatggcccacgactttactaagtttcacagtctgaaacccaaactccttgaggcgttggatgagatgctgacacacgatatcgccaagcttatgcctcttctgcggcaggaggaactagaaagcactgaggtaggcgtgcagggaggcgctttcgaggggacccatatgggcccatttgttgaacggggacctgacgaggctatggaagaccaggggcaggttcagatccggagagacctcttacagcccggagcttgcaggcgacaagccgagcgcctgcagggtcaggatctggatggaggtgaccaggctccacagctgtctgcaggagcccatctcgaggcacaacggtgcggtcctcgcaggcatgcaggatag

SEQ ID NO: 221809 - DNA, 1224 bp, synthetic construct
  misc_feature 1..1224: note = Description of Artificial Sequence: Synthetic coding sequence
  source 1..1224: mol_type = other DNA
atgtgtgcccagctgccgaatcaggttcttgagtctatctctatcatcgacacccctggtattcttagcggagctaagcagcgagtgagcagaggatatgacttccccgcagttctgcggtggttcgccgaaagagtcgatctgataatcctcttgttcgacgcccataaactggagatctctgatgaattctcagaggccatcggagccctaagggggcacgaggacaagatcagggtggtactcaataaagcagacatggtcgagacccagcagttgatgagagtgtatggggcattaatgtgggcattaggaaaggtggtaggcacccctgaggtcctgcgtgtgtatatcggatctttctggtcccagcctctgcttgtgcccgataaccgcagactgtttgaactcgaagagcaggatctttttcgcgatatccagggcttaccccgacacgcagcgctgcgaaaactgaatgacctggtgaagagggcccgacttgttcgagtgcacgcttatattatctcataccttaagaaggaaatgccttccgtttttgggaaagagaataagaaaaagcagctgatcctcaagctacctgtgatcttcgctaagatacagttggaacaccatatctcacccggtgactttcctgactgtcagaaaatgcaagagctacttatggcccatgacttcactaaatttcactctctcaagcctaagttgctcgaagccttagatgaaatgcttacacacgatattgcaaaattaatgcccctgctgagacaggaagaactcgaaagtacggaggttggagtgcagggtggagcattcgaaggcactcacatgggaccattcgtagagcggggtcccgacgaggccatggaggacggcgaagagggcagtgatgacgaggccgaatgggtggtcaccaaagataaatcaaagtacgatgagatcttttataatctcgctcccgcagatggaaagttgtcaggctctaaggcaaagacgtggatggtgggtacgaaactaccaaactctgtactgggaagaatttggaagctgtctgacgtcgacagggatgggatgctcgacgatgaagagtttgcgttagcctcccacttgatagaggcaaaattggaaggccacggtctcccggctaatctgcctcgccgtttggtgcctccttcgaagcgtcgacataagggcagcgctgaatag

SEQ ID NO: 221810 - DNA, 1242 bp, synthetic construct
  misc_feature 1..1242: note = Description of Artificial Sequence: Synthetic coding sequence
  source 1..1242: mol_type = other DNA
atgttcagctggcttaaacggggaggcgcacgcggtcagcagccagaagcaatccggaccgtaacttccgcattaaaggagctttacagaaccaagcttctgccactcgaagagcactatcggttcggtgctttccactctcccgcactcgaagatgcagatttcgacgggaaaccaatggtgctggtggctggtcagtacagtacaggcaagacatcgtttatacagtacttattggagcaggaagtgcccggatcccgcgtcggaccggagcccacaaccgactgcttcgtcgccgtcatgcacggtgacacagagggtaccgtgcccggaaacgctctggttgtggacccagataaaccctttcggaagctcaatccttttgggaacacctttctcaaccgcttcatgtgcgcgcagctaccaaaccaagtgcttgaatcaattagtataattgacacccctggaatactctcaggagctaagcagagggtcagtcgcggatacgacttccctgctgtgcttcggtggtttgcagaacgggttgatctcataattctgctcttcgatgcccacaagctggaaatctcagatgagttctccgaagccatcggcgcactccggggtcacgaggacaagattagagtggtgcttaataaagccgatatggtcgagacccagcagttaatgcgtgtgtacggggctctaatgtgggcacttggtaaggtggtaggtacccccgaggtcctgcgcgtgtacattggtagcttttggtcacaaccacttttggtgcctgacaaccggaggcttttcgagctcgaggaacaggatctgttcagagatatccagggcctccccaggcacgctgccctgcgtaagctgaatgatttagtcaaacgggcaagattggtgagagttcacgcgtacatcatcagctacctcaaaaaggagatgccctccgtgttcggtaaagaaaacaagaagaagcagcttattttgaaattgccggtgatctttgcaaagattcagcttgagcatcatatctccccgggagacttccctgattgccagaaaatgcaggagttacttatggctcatgactttacaaaattccactctctcaaaccgaaactgttagaggctttggatgaaatgctgacacacgatatcgctaaactcatgccactcctgcgacaggaggaattggaatcctcccccgtggctgagatgacttcacgctag

SEQ ID NO: 221811 - DNA, 1602 bp, synthetic construct
  misc_feature 1..1602: note = Description of Artificial Sequence: Synthetic coding sequence
  source 1..1602: mol_type = other DNA
atgttttcctggcttaaaagagggggagcacgcggtcagcagcctgaggcaattcggacagtgacttctgctctgaaggagctgtaccggacaaaactactgcccctcgaagaacattaccgctttggagcctttcatagccccgcattagaagacgccgactttgacggaaaacccatggtgctagtggccggtcagtactcaacaggcaaaacatcttttattcagtacctcttggagcaggaagttcccggttcacgggttgcagttatgcacggggacactgagggaactgtgccaggtaatgctctcgtcgtggatcctgataaaccctttcgcaagctgaatccttttggcaacaccttcctgaacagattcatgtgcgcgcaattacctaatcaggtattagagagtatttctatcattgatacccctggtatcctaagtggcgcaaagcagcgagtgagtaggggctacgattttccagctgtactgcgttggttcgctgagcgcgtggacctgatcatactactattcgacgctcacaaattggagatctcagatgagtttagcgaggccattggtgctcttagggggcacgaggacaagatccgagtagtgctcaacaaggccgatatggttgagacgcagcagctcatgcgggtttacggtgctctgatgtgggcattgggcaaggtggtcggaacgcctgaggtattgagagtttacatcggatcattttggtcgcaacctttgctggtgcctgataaccgtaggttattcgaacttgaggaacaggaccttttccgtgacatccagggtctgcctagacatgccgctctccgcaagctgaatgaccttgtgaagagggcaaggctggtcagagtgcacgcatacataatctcttatctgaagaaggagatgccttctgttttcggtaaggagaataaaaagaaacagctgattctgaagctgccagtcatctttgccaagattcagctcgaacaccacatcagcccaggcgatttcccagactgccagaaaatgcaagagttgttgatggcccacgatttcactaaatttcacagtctcaagcccaaactcctggaagcactggacgagatgctcacccacgacatcgccaagttaatgcctctgctgaggcaggaggagctggagtctacagaggtgggcgtgcaggggggtgcttttgagggaacgcacatggggccttttgtggaacgaggacccgacgaggcaatggaagatggggaggagggctctgacgatgaggccgagtgggtggttacgaaagacaagagcaaatatgacgagattttctacaacctggcccctgccgatgggaaactatcaggcagcaaagcaaaaacctggatggtcggcaccaaactgcccaattccgttctagggcgtatctggaagctgtccgacgttgatcgggatggaatgctggacgatgaggaattcgcccttgcgtcgcacctgatcgaagccaagctggagggtcacggtctcccagcaaacctgcctcggaggcttgttccaccttctaagagacgacataaggggtctgccgagtag

SEQ ID NO: 221812 - DNA, 681 bp, synthetic construct
  misc_feature 1..681: note = Description of Artificial Sequence: Synthetic coding sequence
  source 1..681: mol_type = other DNA
atgccaagcgtgttcggtaaagagaacaagaaaaaacaactcatccttaaactgcctgtgatctttgccaaaattcagttggagcatcatatctcacctggcgattttccggactgtcaaaagatgcaggagctcctgatggcgcacgattttactaaatttcactccctgaagccgaagctgctggaagcactggacgaaatgttgacacatgacatcgccaagttgatgccactcctccggcaggaggagctggagtctaccgaggtgggtgttcagggtggggcattcgaaggaactcacatgggacccttcgtagagaggggacccgacgaagccatggaggatggagaggagggcagcgatgacgaagcagagtgggtggttactaaggataaatctaaatatgacgaaattttctacaacctggccccagctgatggcaaactgtctgggtctaaagccaagacatggatggtcgggaccaagttgccaaactccgtgttggggagaatttggaagctcagtgacgtggacagggacggaatgcttgacgacgaggagttcgcattggcatcccaccttattgaggcaaagcttgaaggccatgggctgcccgcaaacctccccagaaggttagtgcccccatctaagcggcgacacaagggttcagccgaatag

SEQ ID NO: 221813 - DNA, 1608 bp, synthetic construct
  misc_feature 1..1608: note = Description of Artificial Sequence: Synthetic coding sequence
  source 1..1608: mol_type = other DNA
atgttctcttggcttgggactgatgatagaagacggaaggatcctgaggtgttccagacagtcagtgaaggattgaagaagctctacaagtcgaagctacttcctctcgaagagcactaccgtttccatgagtttcacagcccagccctcgaagatgctgatttcgacaataagcctatggtgcttctcgtggggcaatattccactgggaaaacaacctttattcgctatctgctcgagcaagactttcctggaatgcggattggccctgaacctaccacggactccttcatcgcagtgatgcagggagacatggaggggatcatccccggtaatgctcttgttgtggaccccaaaaagccatttcggaagctcaacgccttcgggaacgcatttctaaaccgcttcgtgtgtgcacagctgcccaacccagttctcgagagcattagcgtgatcgacacccccggtatcctgagcggagagaaacaaaggatcagtcgcggttacgacttcgcagctgtgctagagtggtttgcagagagagtggatcggataattctgctgttcgacgcccataaactcgacatcagtgatgagttctctgaggtcatcaaggctctcaagaatcatgaggacaaaatgcgggtggtgttgaacaaagctgatcagatcgaaacccagcaattgatgcgcgtgtacggagcactgatgtggagtctaggtaagatagtgaacaccccagaagttatccgggtatatattggttccttctggtctcaccctctgttaatcccagataaccggaaattgttcgaggctgaagagcaggacctcttccgggacattcaaagtctaccacggaatgccgctctgaggaaactaaatgatctaattaagcgtgccaggctggccaaggttcatgcctatattatctcatctcttaaaaaagaaatgcctagcgtctttggaaaagacaataagaaaaaagaactggtcaataatttagcagaaatttacgggcgaattgagcgcgagcatcaaattagtcccggtgattttcctaacttaaagagaatgcaagaccagttgcaagcgcaggacttttccaaattccaacccctgaaatctaaactcttggaagtggtcgatgacatgttggcacatgacatcgctcaactaatggtgctcgtgaggcaagaagaaagtcaaagacctatccagatggtcaaggggggagccttcgagggcacattgcacggacccttcggacacggatacggcgagggcgctggggagggcatcgacgatgcggaatgggtggtcgcccgagacaagccgatgtacgatgaaatcttttacacgttatcccccgttgatgggaagataaccggagccaacgccaagaaagagatggtgcgaagcaagctgccaaacagcgtgctcggcaaaatctggaagctggcggacatcgacaaggatggcatgctcgacgatgacgagtttgccctggcaaatcatttgatcaaagtgaaattggagggccatgagctgcccaacgagctcccagctcatttactgccgccatctaagcggaaagtggcggagtag

SEQ ID NO: 221814 - DNA, 528 bp, synthetic construct
  misc_feature 1..528: note = Description of Artificial Sequence: Synthetic coding sequence
  source 1..528: mol_type = other DNA
atgttttcttggttagggaccgatgaccggcgaagaaaggatcccgaggtgttccagacagtgtctgaagggctcaagaagctgtacaaatcaaagctcctcccattagaagagcactatcggttccacgagttccactctcctgcattagaagatgcagatttcgataataagccaatggtgttgctcgtgggacagtactccaccggtaagactacttttattaggtatttgctggagcaggactttccgggtatgcgaatcggcccagaacctacaacggactctttcattgctgtaatgcagggggacatggagggaatcatccctggcaacgcgctcgtggtggatcccaaaaaaccattcagaaagctgaatgcttttggcaatgcctttctgaaccgattcgtttgtgcgcagcttcctaatcctgtgttggaatctatcagtgtcatcgacactccgggtatcctctccggcgagaagcagcgaatctcccggggtcctgcagccggtccagggttgtag

SEQ ID NO: 221815 - DNA, 4086 bp, synthetic construct
  misc_feature 1..4086: note = Description of Artificial Sequence: Synthetic coding sequence
  source 1..4086: mol_type = other DNA
atgggtgcagcagggaggcaggactttctgttcaaagcaatgctgacgattagctggctgacactgacttgttttcctggcgctacttccaccgtcgccgcaggatgcccagaccaatctccggaattgcagccgtggaacccaggtcacgaccaggatcatcatgttcatattggtcaggggaaaaccctgctactaacatcatctgcaacggtgtatagcatccacatttccgaggggggtaagttggtcattaaagaccatgacgaacccattgtattgcggacgaggcacatactgattgacaacggaggtgagcttcatgcaggctccgccctgtgcccattccaggggaacttcacaatcatcttgtatggcagggccgacgaaggaatacagcctgatccatattatggcttaaagtacatcggggtcggaaaggggggagcccttgagctccacggccagaagaagttgtcatggaccttcctgaacaaaaccctgcacccaggcggaatggccgagggcggatatttcttcgagagatcctggggacaccggggtgtgattgtccacgtcattgacccaaagagcgggaccgttattcactccgacaggttcgacacataccggagcaaaaaggagtccgaacgtctggtccagtacctgaatgctgtgcctgacggccgaatattatccgttgctgttaatgacgagggctctcgaaacctggacgatatggctagaaaggccatgaccaagctggggtccaaacacttcctgcatctaggattcaggcacccctggtcctttctgactgtcaaagggaatccgtcctcgagcgtggaggaccacatcgagtatcatgggcataggggttcagcagctgcccgagtcttcaagctttttcagacagagcacggtgagtactttaacgtgtcactctcgtccgagtgggtgcaggatgtagagtggaccgagtggttcgaccacgacaaggtatcacagacgaaaggcggtgaaaaaatttctgatctgtggaaagcccaccccggaaaaatttgtaatcggccaatcgacatccaggctaccactatggacggagtgaatctgtctactgaagtagtgtacaaaaagggccaggactataggtttgcttgctatgaccgtggaagggcttgccgttcctatagagtcaggttcctttgtggaaaacctgtccggcctaagttaaccgtgaccatcgataccaacgtgaacagtaccatcctaaacctcgaggataatgtacaaagttggaagcccggagatacccttgtgattgcttctactgactactccatgtatcaagccgaggaattccaggtccttccctgtaggtcttgcgcaccaaaccaggtcaaggtggccggaaaacctatgtaccttcacattggcgaggagatagatggcgttgacatgcgcgctgaggtcggtctgctcagccgtaacataatcgtgatgggtgaaatggaggataagtgttacccttaccgcaaccacatctgtaatttttttgactttgatacgtttggcggacacataaagtttgccctcggctttaaggctgcacacctggagggaaccgagctcaagcacatgggtcaacagctcgtaggacaataccctatccacttccatctggccggagacgtcgacgaacgaggcggatacgatcctccaacatacattcgagacctctctattcaccacacctttagtaggtgcgtgaccgtgcacggctccaacggattgttaataaaagatgtggtcgggtacaattcactaggccactgcttcttcacggaggatggccctgaagagaggaacacctttgatcactgcctgggcctgttggtcaagtccggcaccttattaccatccgacagggattcaaaaatgtgcaagatgattactgaagacagttatccgggttatatccctaagcccagacaggactgtaatgccgtcagcacattctggatggccaatccaaacaacaatcttatcaattgtgcagccgctggatctgaggagactggcttctggtttatattccaccacgttcctaccggaccatcagtgggaatgtacagcccaggatacagcgaacacatcccactgggcaagttttacaataatagagctcattctaattaccgggctgggatgattatcgataatggtgtgaagacaacggaggcttccgctaaggacaagaggccctttctgtccattatttccgcaagatattctccacaccaagatgctgacccccttaagcccagggaacctgctattattcgccattttatcgcttacaaaaatcaagaccacggggcatggcttagaggaggagacgtatggctggattcgtgccgcttcgcagacaacgggatcggactgactctagcaagtggaggcacgttcccttacgatgatggatcaaaacaggagataaagaactctctcttcgtgggtgaaagcggtaatgtcggcaccgagatgatggacaaccgaatctggggcccaggcggactggatcattctggcagaacgctacccatcggccagaattttcctattagaggaatacagctgtatgacgggcctattaacatccaaaactgcaccttcagaaagttcgtcgccttagaaggaaggcatacaagcgctctggcgtttcgtcttaataacgcatggcagtcttgcccacataataacgtcacgggaatagcgttcgaggacgttcctatcacctcgagagtgtttttcggtgaacccggaccatggttcaaccaacttgacatggatggcgataaaacttcggtgtttcatgatgttgacggctcagtgagtgagtatcccggttcataccttacaaaaaatgataactggttagtccgccatcccgactgcattaacgtgccagactggcgcggagccatttgctctgggtgctatgcccagatgtacatccaggcctacaaaacctccaacctgaggatgaagattatcaagaacgatttcccaagtcatccactttatctggaaggcgcactgacaagatctactcattaccaacaatatcagcccgttgttacattgcagaagggatataccattcactgggatcaaactgctcccgctgaactcgcgatttggcttatcaacttcaacaagggcgattggattcgcgttgggctgtgctacccccgagggaccacattctcaattctttcggatgtgcataacaggttattgaagcaaaccagcaaaactggcgttttcgtgagaaccctccagatggacaaagtggaacagagctacccagggagatcccactattactgggatgaggatagtggtttgctgttcctaaaactaaaggcacagaacgagcgggagaagtttgccttctgctccatgaagggctgcgagagaataaaaatcaaggctttaatccccaaaaacgccggagtgtctgactgtactgcaacagcttatcccaagtttacagagagggccgtggtggacgttcctatgcctaaaaaactatttggtagccagctcaaaacaaaggaccactttctagaagtgaaaatggaatcctcaaagcagcatttctttcacttatggaatgatttcgcctacattgaggtggacggtaaaaaatatccatccagtgaggacggaattcaggtggtggtaatagatgggaatcagggacgcgtggttagccacacatcttttagaaattctatactgcagggcattccatggcaactgttcaactatgtggccacgatccccgacaacagtatcgtgctgatggctagtaaggggaggtatgtctcacggggtccatggaccagggtgctggagaaactcggcgctgacagggggttgaaactaaaggaacagatggcctttgtgggcttcaagggctcctttcgccctatctgggttacgcttgataccgaggaccacaaggccaaaattttccaagtggtaccaatcccagtggtcaagaagaaaaagttgtag

SEQ ID NO: 221816 - DNA, 1092 bp, synthetic construct
  misc_feature 1..1092: note = Description of Artificial Sequence: Synthetic coding sequence
  source 1..1092: mol_type = other DNA
atgtctatggacgtcacgtttctaggaacaggcgcagcctaccccagtccgacccgcggagccagtgccgttgtgctcagatgcgagggcgaatgctggctttttgactgcggtgaggggacacaaacacagctgatgaaaagccagctcaaggccggtcggattaccaagatatttatcacacacttacatggggaccatttctttggcttgcccggactcttgtgcactataagtttacagtccgggtctatggtgagcaaacagcccatcgagatttacggtccagttggcctgcgcgacttcatctggcggaccatggagctgagccacaccgagctggtgttccattacgttgtgcacgagctggtccccaccgcagaccaatgcccagcagaggagctgaaggagtttgcacacgtgaacagggccgactctcctcctaaggaggagcagggaaggaccatccttcttgacagcgaggaaaacagttacctgctcttcgatgatgagcagtttgtcgtcaaggcctttaggctcttccataggatcccctcgttcggtttcagtgtggtagagaagaagagaccgggaaagctcaatgcacagaagctaaaggacctgggtgtgcctcctggtccagcgtacgggaagttgaagaacggtatctctgttgtgcttgaaaatggcgtcactatcagtcctcaggatgttcttaaaaaacccatagtaggacgcaagatctgtatacttggggactgttctggggtagtgggcgacgggggagtcaagctgtgctttgaagccgacctgttgattcacgaagctacgctggacgacgcgcagatggataaggccaaagaacacggccatagcaccccccagatggcagccacttttgctaagctgtgtagggccaaaaggctcgtgcttacacatttctcacagagatataaacctgtggccctggcccgagagggtgaaacagacggcatcgcggagctgaaaaagcaggcagagtccgtcttggacctccaggaagtgacactcgcagaagatttcatggtgattagtatcccaattaaaaagtag

SEQ ID NO: 221817 - DNA, 2481 bp, synthetic construct
  misc_feature 1..2481: note = Description of Artificial Sequence: Synthetic coding sequence
  source 1..2481: mol_type = other DNA
atgtgggcgttgtgttcccttctgcggagtgctgctggcaggacaatgagccagggccgaactataagtcaagctccagccagacgggaacgtccgcgaaaagatccactccggcacctccggacccgcgagaagcgtggtccctcagggtgtagtggcggacccaatacggtctacctacaagtggtagcggcaggatcacgcgattccggcgcagcactctacgtgtttagcgaattcaacagatatttgttcaactgcggagagggggtgcagaggctcatgcaggaacacaaacttaaagtggctagactcgacaacattttccttactcggatgcattggtccaacgttggcggtctctcgggcatgattctcaccctgaaagagaccgggctccctaagtgtgttttgtccggcccacctcagctagagaaatacctcgaggcgatcaagatattcagtggaccactgaagggcatagaactggccgtgaggccgcactccgcaccagagtacgaggatgaaacaatgaccgtatatcagatcccaattcattctgagcaaaggagggggaaacatcagccctggcaatctccagagaggcctctgagccgtctaagtccagagcggtcctctgacagcgagagcaatgaaaacgaaccacatctgccacacggggtctcacagagacgcggagttcgggactctagtttagtggtggctttcatctgtaagctgcacttgaaacggggtaacttcctcgtactcaaggcgaaggagatggggctacccgtaggtaccgctgccatcgcgccaatcatagccgcagttaaggacggcaagagcataacacatgaggggagggaaattttggcggaagagctctgcaccccacccgacccgggtgccgctttcgtggtggtcgagtgccctgacgaaagtttcattcagccgatttgtgagaatgcaacgtttcagagataccaggggaaagcagatgcgccagttgccctggtagtccatatggcccctgctagcgtgctggttgattctcgctaccaacagtggatggaaaggttcggaccagacacccagcatctggtgttaaacgagaactgcgccagtgttcataacctcaggagccacaagattcaaacccagcttaatctgatacatccagatatcttccccctgttgacgtcgttcaggtgcaaaaaagaaggtccaactttatccgtcccaatggtgcagggagaatgcctgctgaagtatcaactcagaccaaggcgagagtggcagcgggacgctatcattacctgtaacccggaggagttcatcgtggaagccctgcagcttcccaacttccagcagagtgtacaggaatatcgcaggtctgcacaggatggtcctgcacccgctgaaaagcggagccagtaccccgaaatcatctttcttgggacgggaagcgccatcccaatgaaaattaggaatgtgagtgcaaccctcgtcaatatctcaccagataccagcctcctcctggactgtggtgagggaacatttggtcagctctgccgccactatggggaccaagtggaccgtgtgctgggaaccctcgcggctgtatttgtctcacacctacatgccgatcatcataccgggctgccatctattcttctgcaacgagaacgggctttggcttctctgggtaaacccctgcaccctttacttgtcgtggctccaaatcagctcaaagcttggcttcaacagtaccacaaccaatgccaagaggtgttacaccacatcagcatgatccccgctaaatgccttcaggagggggctgagatctcgtcgcccgcagttgaacgcctgatctccagcttgctgcgcacgtgcgatctggaggagtttcagacttgtctggtccgccattgtaagcacgcttttggctgcgcactggtccatacaagcggttggaaagttgtgtatagcggagacaccatgccttgcgaagccctggtgaggatgggcaaggacgccacactgctcatccatgaggcaaccctggaggacggattggaggaggaggctgtggaaaaaactcattctacaaccagtcaagccatctctgtggggatgcgaatgaatgctgagtttatcatgctcaaccatttcagtcagagatatgccaaggtgccgttattttcacccaacttttccgagaaagtgggggtagcttttgatcacatgaaagtctgtttcggagatttcccaacaatgcctaagctgatcccacctctcaaggcactctttgctggtgacatcgaagagatggaagaacgcagagaaaaacgtgagttgagacaagtaagagctgctctgttaagtcgagaacttgctgggggtctcgaagatggagaaccgcagcagaaacgggctcacacagaggagccacaggccaagaaggtgcgggcacaatag

SEQ ID NO: 221818 - DNA, 2424 bp, synthetic construct
  misc_feature 1..2424: note = Description of Artificial Sequence: Synthetic coding sequence
  source 1..2424: mol_type = other DNA
atgtgggcgctctgcagcttgctccgttctgctgctgggagaaccatgtcacaaggcagaacaatctcacaagcacccgctagaagagagaggcccagaaaggacccattgagacacctccgcactagggaaaagaggggcccttcaggatgttctggtgggccaaataccgtttatcttcaggtcgtggcagccggttcccgagactcaggtgtgcagagactcatgcaagaacacaaactcaaggtggccagattggacaatatttttcttactaggatgcactggtccaatgtcggcggactctcaggcatgatcctcaccttaaaagaaacgggcctacctaagtgcgtgctgagcggtccaccccagttggagaaatacctcgaagcaattaagatctttagcggacccctcaaagggatcgagttggcggtcaggccccatagtgcacctgaatacgaagatgaaaccatgaccgtgtaccaaatccccatccacagcgagcagagacgcggaaagcaccagccatggcagagccctgaacgacccctttcccgtctgtctccggaacgttcaagcgacagcgaatccaatgaaaacgagcctcatttgccccacggggtgtcacagaggcgcggagttcgagacagctcattggtagtggccttcatatgcaagctccacctgaaacggggtaactttttggtgctgaaagctaaagagatgggactaccagtgggcacagctgccatcgcccctatcatagctgccgtcaaagatggcaagtcgattacccacgaagggagagaaatcctggcagaagagctgtgcactcctcccgatccgggagcagctttcgtcgtggtggagtgtcccgacgagtcttttattcagccaatttgcgagaatgccacatttcagcggtaccagggtaaggctgatgcaccagtcgcgcttgttgtccacatggctcccgcaagcgtcctcgtagactcgcgctaccagcaatggatggagaggtttggccctgacacacagcatctggttctgaatgagaactgcgcctcagtacataacttacgctctcacaagatccagacccagctgaacctgattcacccagatatcttccctttgctgacatccttcaggtgtaaaaaggaaggaccaactttatctgttcccatggtgcagggcgaatgtctgctcaaatatcagcttagacctaggagagagtggcagcgcgacgcgatcatcacctgtaaccccgaagagttcattgtggaggcactccagctacccaattttcaacagtccgtgcaggagtataggcggagcgcacaggacgggcctgctcccgcagagaagcggtcacagtatcccgaaattatctttctcgggaccgggtcagctatccctatgaaaatcagaaacgtgagcgcgactctcgtgaatatctcccctgatacctccctgctgctagactgcggcgaggggacatttgggcaactttgccgccactacggggaccaagtcgatcgggtgcttgggacgctggccgctgtctttgtttcccacctccatgccgaccaccacacagggctccccagtatcctccttcaacgagaacgggctctcgctagccttggcaagcccctgcaccccctgctagtggtcgctccaaatcagctcaaggcgtggctgcagcagtaccataatcagtgccaggaggttctccaccatatcagcatgattcccgcaaaatgcctccaggaaggcgcagagatttcttctcccgcagtggaacgcctcatctcctcattactgaggacctgcgatctggaggaattccagacttgcttggttcgacactgtaagcacgcattcggctgcgctcttgtgcataccagtggttggaaagtggtgtattctggtgacactatgccctgcgaagctctcgtcaggatgggcaaggacgccaccttgctgatccatgaggccacactggaggacggcctggaggaggaggctgtggaaaagacacatagcacgacctctcaggccatcagcgtgggcatgcgcatgaatgccgaatttatcatgctgaatcatttctcccagcgctatgccaaagtgccactcttttcccctaacttttcagagaaggttggggtcgcctttgatcacatgaaggtgtgcttcggggactttcccactatgccgaaactgataccccctcttaaagctctcttcgcaggcgatattgaagagatggaagaaaggagagagaaaagggaattgaggcaggtacgagccgctctgctgagccgtgagctggcaggaggactggaggatggcgagccccagcagaagagagcacacaccgaggaaccgcaggcaaagaaggttcgagcacaatag

SEQ ID NO: 221819 - DNA, 2361 bp, synthetic construct
  misc_feature 1..2361: note = Description of Artificial Sequence: Synthetic coding sequence
  source 1..2361: mol_type = other DNA
atgtgggctctgtgttctctgctaagaagtgccgctggtcgcactatgagccagggcagaacaatttctcaggccccagcgagacgtgaaaggccacggaaggatccgcttcgacacctacggaccagagagaagcgcggtccgtcggggtgtagtggaggcccaaacactgtatacctgcaggtggtcgccgcaggtagccgcgatagtggcgcagccctgtacgtcttcagcgagttcaatcgttatctttttaattgtggggaaggggtgcagcgccttatgcaggaacataagctgaaggtggcgcgattggataacatctttctaacccgcatgcactggagtaacgtgggaggcctttccggaatgattctgacccttaaagagaccgggctccccaagtgtgtactttcgggcccaccccagcttgagaaatacttggaggccatcaagatcttttcaggccctcttaaaggcatcgaactagctgttaggccacattcggctcccgagtacgaagacgaaacgatgactgtttatcagattcctattcactcagtaagccaacggagaggcgtgagagactcgtcattggttgtggctttcatctgcaagttgcacctgaagcgtgggaattttttggtgctgaaagccaaggagatgggcctcccagtggggaccgctgccattgccccaataatagctgcagttaaagacggaaaatcgattacgcatgagggacgcgaaattctcgccgaggaactctgcaccccacctgatcccggtgccgcttttgtggtggtcgagtgcccggacgagtccttcattcagcccatttgcgaaaatgccaccttccaacgctaccaagggaaagccgacgctccagtggcgctggttgtccatatggccccagcttcagtgctcgtcgactctcggtatcaacagtggatggagcgattcggccctgatacccaacacctggtcctaaatgagaactgcgcctctgtgcacaatctgcgttcgcataagatccaaacacagctgaatctgatacatccagatattttcccactcctgacatcgttccggtgcaaaaaagagggcccaaccctcagcgttcccatggtgcagggtgagtgcctccttaaatatcagctcagaccccgacgggagtggcaaagagacgccatcatcacctgcaacccagaggagtttatagtggaggctctgcagctcccaaacttccagcagtccgtgcaagagtatcgcaggtccgctcaggatggtccagcacctgcagagaaaagaagccagtatcccgaaattatcttcttgggcacaggatctgcgattcccatgaagatccgcaacgtgagtgccacattggttaatatcagccctgatacttcgctcctgctcgattgcggagaaggcacattcgggcagctgtgtagacattacggtgaccaagttgacagagtgctggggaccctggctgctgtcttcgtgagtcacttgcacgcggaccatcacaccggcctgcccagcatcctgctccaaagagaacgggctttggcctcccttgggaagccgctgcatccactacttgtcgttgctcctaaccagctcaaggcttggttacagcagtaccataatcagtgccaggaggtgttgcaccatatatcgatgatccctgctaaatgcctccaggagggggcagaaatcagctcacccgcagtcgaaagattgatttctagcctgttacgcacatgcgatctcgaggagttccagacatgtctggtgcgacactgtaagcacgcctttgggtgcgcacttgtacacaccagtggatggaaggtggtgtatagtggcgacacaatgccctgtgaggcattggtgagaatgggcaaagatgctaccctgctaatccacgaggcaacacttgaagatgggctggaggaggaagccgtcgagaaaacacacagtactacaagtcaagcaatctctgtgggaatgcgcatgaatgcagagttcatcatgctgaatcatttctctcagcggtatgctaaggtgccactcttttctcccaacttctcagagaaagttggagtcgctttcgaccatatgaaggtttgttttggggactttccaaccatgccaaaactcataccacctctgaaagccttgttcgccggagatatagaggagatggaagagcgaagagagaagcgggaacttagacaggtcagagccgctcttctgagcagggagttagctggaggcctggaggacggggagccccaacagaagcgtgcacacacggaggagccccaggccaaaaaggttagagcccagtag

SEQ ID NO: 221820 - DNA, 861 bp, synthetic construct
  misc_feature 1..861: note = Description of Artificial Sequence: Synthetic coding sequence
  source 1..861: mol_type = other DNA
tagccacatggggtgtcacagaggaggggagtccgcgatagctcacttgtagtggccttcatctgcaagctgcatttgaagcgaggcaatttcctggtgctaaaggccaaggagatgggccttcccgttggcaccgctgctatcgcccctatcatcgcggcagtaaaggacggcaagtccattactcacgaagggcgagaggtcctccaaatcctggctgaagagctttgcacgccacccgatccaggagctgcctttgtggtggtggagtgtcctgacgagtcttttattcaacctatctgcgagaatgctacctttcaaagataccaaggtaaggctgacgcacccgtggcgctagtagtacacatggccccagcctccgttctggtggattctcgatatcagcagtggatggaaagattcggccctgacacccagcatctggttttgaatgagaattgcgcgagcgtccacaaccttagatcccataagattcaaacgcagttaaacctcatacatccagacatattcccactcctcacaagttttcgatgcaagaaagagggacctacactgtccgttcccatggtgcaaggagaatgccttctgaagtaccaactgcgcccacggcgtgaatggcagcgagacgctatcatcacatgtaacccagaagagtttatcgtcgaggccctacagcttcccaacttccagcagtctgtccaggaatacaggaggtcagctcaggatgggcctgcacccgcagaaaagcgaagtcagtaccctgagatcatcttcttagggactggttctgccatccccatgaagattagaaatgtgagtgccacacttgtgaatatatag

SEQ ID NO: 221821 - DNA, 837 bp, synthetic construct
  misc_feature 1..837: note = Description of Artificial Sequence: Synthetic coding sequence
  source 1..837: mol_type = other DNA
atcctcgccgaagagctgtgcaccccacctgatcctggtgctgcttttgtggttgtggagtgcccagacgaatcctttattcagcccatatgcgagaatgctacgttccagcgttttggccctgacacgcagcatctggtcttaaacgagaattgtgcttctgtgcacaacttgaggtctcacaagatacagacccagctgaatctgatacatcccgatatctttcccctgctgacctcttttaggtgtaaaaaagagggccctacgctctccgtgcctatggtgcagggagaatgcctcctcaaatatcagctccgtcctcgacgagaatggcagagagatgcaatcatcacctgcaacccggaagaattcattgtcgaagcgttgcaacttcccaatttccaacagtctgtacaagagtatcggagatctgcccaggacggccctgcgcctgcagaaaaacgtagccaatacccagaaatcattttcctggggaccgggtccgcgattcctatgaagatacgtaacgtctccgcaacactggtgaatatctctccggacactagtcttttattggattgcggcgaggggacttttggacaactgtgccggcactatggagatcaggttgatcgcgtgcttgggacccttgccgcagttttcgtgagccatctgcacgcggaccaccatacgggactcccatctatacttctacagagggagcgggctctggctagcctgggcaagcctcttcatccgcttttggtggtggctccaaaccagcttaaggcctggctgcagcagtatcacaatcagtgtcaggaagtcctgcactag

SEQ ID NO: 221822 - DNA, 804 bp, synthetic construct
  misc_feature 1..804: note = Description of Artificial Sequence: Synthetic coding sequence
  source 1..804: mol_type = other DNA
atgaccctgggacgcagacttgcttgtttatttctggcctgcgtgctgccagctctcctgcttggtggcaccgccctggcatcggagattgtaggcggaaggcgagccagaccacacgcatggccttttatggtgtcattacagttacgcggtggccacttttgcggcgctacactgattgcccctaactttgttatgtctgccgcacactgcgtagccaatgttaacgtgcgagctgtgagggtcgtgctgggagcgcataatcttagtaggagggaaccgacgcgtcaggtgtttgccgttcagcggatttttgagaatggctacgatcccgttaaccttctaaatgatatagtgattcttcagctgaatggttcagcaactatcaatgccaacgtgcaggtcgcacaactccccgcacagggacgacgactgggaaatggagtgcagtgtctggccatgggttggggtttactggggcgaaatcggggaatagcttcagtcctccaggagctgaatgttacagttgttaccagcttgtgtcgcaggagcaacgtctgtactttggtccgaggacgtcaggccggagtgtgtttcggggactcgggatccccactggtttgcaacggcctcatccacggaattgcgtccttcgtacggggtgggtgcgcctccgggttgtacccggacgcgtttgccccagtggctcagtttgtaaactggattgatagcatcatacagcggagcgaagataatccatgtcctcaccccagggaccccgacccagcatcccgaacacattag

SEQ ID NO: 221823 - DNA, 804 bp, synthetic construct
  misc_feature 1..804: note = Description of Artificial Sequence: Synthetic coding sequence
  source 1..804: mol_type = other DNA
atgacattgggacgaagactcgcttgcctattcctagcctgcgtgcttccggctctcctgctcggcggtacagcgcttgctagtgagattgtcggcggtagaagagcccgaccgcacgcctggcccttcatggttagcttgcagctgagagggggtcacttttgcggagccacactcattgccccaaattttgtgatgtccgccgctcattgcgttgctaacgtgaacgtccgcgcagtccgggtggtcctcggcgctcacaatctctctagacgtgaacccaccagacaggtcttcgccgtgcagcggatcttcgagaacggctacgaccctgttaatctgctgaatgatatagtgatacttcagcttaacgggtcagcaacaatcaatgcgaatgtccaggtggcacagctgcctgcacagggcagacggctcggaaatggtgtacaatgcttggccatgggctggggcttgctgggacgtaatagggggattgccagcgtcttacaagagttaaatgtaactgttgtaacttccctatgtcgtcgatccaacgtgtgcacccttgtcagaggcagacaggccggtgtgtgcttcggggatagcggatcccctctagtgtgcaatggacttatacacggaattgccagcttcgtaaggggaggatgtgcttccggcttataccccgacgctttcgcccctgtcgctcagttcgtcaactggatcgactcaatcatacagagatcagaagacaacccctgtccccacccacgggacccagatcccgcttcacggacacattag

SEQ ID NO: 221824 - DNA, 3051 bp, synthetic construct
  misc_feature 1..3051: note = Description of Artificial Sequence: Synthetic coding sequence
  source 1..3051: mol_type = other DNA
atggcacctcgtacattatggtcatgttacctatgctgtttgctgaccgccgcagcaggagccgcatcatacccccctcgagggttcagtctatatacaggttcctctggcgctctctcccccggtggtcctcaggctcaaatcgccccaaggcctgccagtagacatagaaattggtgtgcgtacgtcgtcacacggaccgtgtcctgcgtgttggaagacggcgtggagacgtatgtcaaatatcagccttgcgcgtggggccagcctcaatgcccccagtcaatcatgtataggaggtttttgaggccccgatacagagtagcctataaaacagtgacagatatggagtggcgctgctgtcaggggtatggcggagacgactgtgccgaatcccccgctccagccttagggcctgcttcctcaacgcccagaccattggcccaacctgcacgccctaaccttagcgggtcctctgccggatccccgctctccggtttagggggtgaaggcccaggcgaatcggagaaagtgcagcaattggaggagcaagtccaaagtctcacaaaagagctgcaggggttgcgtggcgtcctgcaaggcttgagtggaaggctggctgaagacgtgcaacgcgcagttgagaccgccttcaatggcaggcagcaaccggctgatgccgcagccaggccaggtgtgcacgagacactgaacgaaattcagcaccagttgcagcttctggatactcgggtaagcacccacgatcaggaactggggcacttaaataaccaccatggtggctccagcagctctggcggttcaagagctcctgcccctgcctctgcaccacctgggccatcagaggaactattacgccaactggaacaacgcttacaggagagttgttcggtgtgcctggccggtcttgatggatttcggcgtcagcagcaagaagatcgggagcgcttacgggcaatggaaaaacttctggcctccgtagaggaaaggcagcgacacttggcagggctggccgtgggtagaagacccccacaggaatgctgtagccccgagcttggcaggcgacttgctgaactggagagacgcctggatgtggtcgccggttcagtcacagtgctgagcggtcgcaggggaactgaactcgggggtgccgctgggcagggcggacatcctcctggttatacttcactcgccagcaggctctctcgcctagaggaccgcttcaactcaaccttagggccatccgaagagcaggaggaatcttggccaggggcacctggcggtctgtctcattggctgcctgctgctcggggtcgcctggagcagcttgggggactcctggccaatgtgtcaggtgagctgggcggacgtctggacttgttagaagagcaagtggcaggcgcaatgcaggcgtgcggtcagctctgcagcggggctcccggagaacaggactcacaggtctcagaaatcctgtctgccctcgagaggcgcgtgctggacagcgaaggtcagctccggctggtcggatctggattgcacaccgtcgaggctgcaggagaagccagacaagccactttagagggcctgcaggaagtcgtgggtagactccaggatcgggtggacgctcaggatgaaacggccgcagagttcaccttaagactcaacttgaccgccgctcgactaggacagctcgaaggcctactgcaggcccacggcgatgaggggtgcggcgcatgcgggggtgtgcaagaggaactgggcagattgcgtgatggtgttgagcgctgtagttgccctctgctccctccgaggggaccgggtgccggaccaggcgtaggcggaccgtctcggggacccctcgatggcttctcagtgttcggcggatccagcggaagtgcgctacaggcattacagggagagttatccgaagtgattttaagtttcagtagtcttaacgactcccttaatgaattgcagacgaccgtggaaggacagggggctgacctggctgatctcggagcgacgaaggatcggatcatttccgagattaatagacttcagcaagaggctaccgagcatgctaccgaaagcgaggaaaggttccgcggactggaggagggacaggctcaggccggacagtgtcccagtctagagggcagactcggccgacttgagggagtttgcgaacgcctggacactgtcgctgggggactacagggcttgcgcgagggactctccaggcatgtcgctggtctttgggccggattgagagagaccaataccacatcgcagatgcaggccgctctgctcgaaaagctggtcggtggacaggccggacttgggagacgtctcggggctctgaacagcagtctccaacttctggaagaccggttgcatcagttgtccctgaaagatctgactggacctgcgggagaggctggcccacctggcccacccggactgcaagggccacccggacccgctggaccgccaggaagcccagggaaagacgggcaggagggaccaattggaccgccaggaccgcagggcgagcagggggtcgaaggagccccagctgccccagttccccaggtagcatttagcgctgctctatctttgcccagatcagagcccggaacagttcccttcgacagagtgctcctgaacgatggcggatactacgatcctgaaacgggagtcttcacggccccactcgcaggtcggtacctgttatctgcagtgctgaccggccatagacatgaaaaagtggaggctgtattgtcaaggagtaaccagggagtcgcaagggttgattcaggtggctacgagccagaaggcctggagaacaaacctgtggctgagtctcagccgagcccaggtactctgggcgtgtttagcctaatccttcctcttcaggcaggtgatactgtctgcgtggatttagttatgggacagctcgcacattccgaagagcctctgacgattttttcaggggctctgctatatggagatccggagctggaacacgcttag

SEQ ID NO: 221825 - DNA, 1044 bp, synthetic construct
  misc_feature 1..1044: note = Description of Artificial Sequence: Synthetic coding sequence
  source 1..1044: mol_type = other DNA
atggccgatctgggtgccactaaggacaggatcatcagcgaaattaatcgtttacagcaggaggcaaccgaacacgcgactgagagcgaagaaagattccggggactggaagagggacaggcccaggcgggacagtgcccatctcttgaagggagattggggcgattggagggcgtgtgcgagcgcctcgacacagtcgccggaggacttcagggcctgcgtgaggggctatctaggcacgtggcgggtctatgggcgggtctccgggaaactaacacgacttctcagatgcaggccgcactgctggagaaactggtggggggacaggccggattgggcaggcgcctgggtgccttgaatagctccctccagttactggaggatagactgcaccagttgtctttaaaggaccttaccggcgaaggcacaaaggggcctgccggagaagctggtccgcctggaccaccagggctgcagggtccgccaggaccagcaggcccaccagggtcacccggaaaggacggccaggaaggcccaatcggccctcctggtcctcaaggagaacagggggttgaaggcgcacccgctgctccagtccctcaagtggcatttagcgctgccctgagcttacctaggtccgaaccagggacagtcccattcgaccgagtgctgttaaatgatgggggatactacgaccccgaaaccggagtgttcaccgccccactcgcgggacgctatctcctgtccgcagtgctcaccggtcaccggcatgagaaagtggaggccgttcttagtcggtcaaaccagggggttgcgagggttgactctgggggatacgaacccgaagggctcgagaataagccagtagctgagagtcagcctagtcccggtacacttggtgtgttctcactgatactgcccttgcaggctggcgatactgtctgcgtggatctagtgatgggacaacttgcacatagcgaggaaccactgacgatctttagcggtgcacttttatacggagatccagaattggagcacgcttag

SEQ ID NO: 221826 - DNA, 1062 bp, synthetic construct
  misc_feature 1..1062: note = Description of Artificial Sequence: Synthetic coding sequence
  source 1..1062: mol_type = other DNA
atgggttctgggggtaggagcgcccaggtgtctacaggacagcgggcatggctgctgccctgccgcttcctcaagaacacaatgagcaatggatatgaagatcatatggctgaggattgtagaggggacatcgggaggacgaatctgatcgtcaattacctgcctcagaacatgacccaggacgagctgcgatccctcttcagctcaatcggggaagtagagagtgctaagctcatacgggataaggttgcagggcactcacttggttacggctttgtaaattacgtcaccgccaaggatgcagagagggctatcaataccctgaacggcttgaggctgcagtctaaaactattaaagtgagttacgccagacccagctccgaagttatcaaggatgctaatctctatataagcgggctgccccgtacaatgacgcaaaaagacgtggaagatatgttctctcggtttggcagaatcatcaattctagagttctggttgatcagacaacgggactgtcccggggagttgcatttattagattcgataaacggagcgaagcagaggaggccattaccagttttaatggccataaacccccaggttcgtcagaacccatcaccgtcaaattcgccgctaacccaaaccagaataagaacgtcgccctcctgagtcagctgtaccatagcccagcacgcagattcggcggtccagttcatcaccaggcgcagcggttcagattctcccccatgggcgttgatcatatgtccggtctgtccggggtgaatgtgccaggaaatgccagctcgggatggtgtatcttcatttataatctcggacaagacgccgacgagggtatcttgtggcagatgttcggtcccttcggtgccgttaccaatgtgaaggtaattagggactttaacacaaataagtgcaaggggtttgggttcgtcacaatgacgaattatgaggaggctgccatggccatcgcctccctgaacggttacaggctaggagataagatactgcaagttagtttcaagacaaacaagagtcacaagtag

SEQ ID NO: 221827 - DNA, 981 bp, synthetic construct
  misc_feature 1..981: note = Description of Artificial Sequence: Synthetic coding sequence
  source 1..981: mol_type = other DNA
atgagcaatggctacgaagaccacatggccgaggattgtagaggtgacatcggaaggacaaacttaattgtgaattacctgccccagaacatgacacaggatgagctccgatccttgtttagttctatcggcgaggttgaatccgcaaagctcattagggacaaagtcgcaggtcacagtttgggctatggattcgtaaattacgttaccgctaaggacgcagagcgtgctatcaatactctgaacggcttgcggctccagtctaagactatcaaggtttcgtatgcccgaccctcgtcagaggtgatcaaagacgcaaatctgtacatctctggccttcctcgcactatgacacagaaggacgtggaggatatgttttcccgtttcggtcggataatcaatagccgtgtgctggttgatcagactaccggcttgtccagaggggtggccttcattaggttcgataagcggagtgaggcggaagaggctataacctctttcaacggacacaagccaccaggtagctctgaacccataacagtgaaattcgccgcaaacccaaatcaaaataaaaacgttgctcttctcagccagttgtaccacagcccagccaggagatttggtggtcctgtgcaccatcaggcgcaacgattccgatttagcccaatgggcgtggaccatatgtctgggctctcaggcgtgaacgtacccggtaacgcatccagcgggtggtgcatcttcatttacaatttaggtcaggatgctgacgaaggcatcctctggcagatgtttggcccattcggagcagtaacaaatgtgaaggttatcagagactttaacactaataagtgcaaaggttttggattcgtcacaatgacaaattacgaggaggctgctatggctattgcctcgttgaatggctatagactgggtgataagatcttgcaggttagttttaaaaccaataagagtcacaagtag

SEQ ID NO: 221828 - DNA, 828 bp, synthetic construct
  misc_feature 1..828: note = Description of Artificial Sequence: Synthetic coding sequence
  source 1..828: mol_type = other DNA
atgtccagtctgcacaagtcgaggattgctgactttcaggatgttttgaaagaaccttccatcgctctcgaaaagctgcgagagctgagtttctccgggatcccctgtgaaggtgggctgcgttgcctctgttggaaaatcctgttaaactatctcccgctggagcgggcatcctggacgtctattctggccaagcagagggagctgtacgcgcagttcctccgcgagatgatcattcagcccggaatcgccaaggctaacatgggggtgagtagggaggacgtgacctttgaagatcaccccttaaatcctaatcccgactcacggtggaatacctattttaaggataatgaggtcctgcttcagatagacaaggacgtgaggagactctgtccagacatctcattttttcagcgtgctacagactatccttgcctgctcatcttggatccgcagaacgaatttgaaaccctgagaaagcgtgtcgaacagactaccctgaaaagccagactgtggctcgaaataggtccggagtgacaaatcaggaacagaatattaagccacagttttttgccttcagatggctgaccctcctcctatcccaggagtttctccttcccgacgttattaggatttgggattcactgtttgccgatgacaatcggttcgacttcctgctgctagtctgttgtgccatgctgatgctaatcagagagcaactcctcgaaggcgactttacagtgaacatgcgcctgctccaggactaccctatcacggacgtgtgccagattctgcagaaagccaaagaactccaggactcaaagtag

SEQ ID NO: 221829 - DNA, 1164 bp, synthetic construct
  misc_feature 1..1164: note = Description of Artificial Sequence: Synthetic coding sequence
  source 1..1164: mol_type = other DNA
atggccgtgcgactctgtgacgtcgcgagtcttttacggtctggcagctgggccgcagaaccttggaccggtgtgattgctgctatggaaactcagctgtccaacgggcctacctgtaataacacagctaacgggccaaccacgatcaataacaactgcagctcgcccgtggactccggcaacactgaagactccaagactaaccttatcgtgaactacctgccacagaatatgactcaagaggaactgaagtctttgtttgggtctatcggagagattgagagctgcaaattagttcgcgataaaatcacagggcaatccctggggtatggtttcgtgaattatatcgatcccaaggatgccgagaaagccatcaatacgttgaacggcctaagattgcagactaagacaattaaggtgagctatgcacgaccatcgtccgcctccatccgggatgctaacttgtatgtgtcaggtttaccgaaaactatgacccaaaaagagttggagcaactgttctcgcaatatggtcgtatcattacttctcgaatcttagttgatcaagttacgggcatatccaggggggtgggtttcatcaggttcgacaaacggatcgaagcagaggaggcaattaagggcctgaatgggcaaaagcctcccggagccacagaaccaattaccgttaagttcgctaataaccctagtcaaaagacaaatcaggcaattctgtcccagctttaccagagccccaataggcgatacccagggccactcgcccaacaggcccagcgattccgccttgataacctcctgaacatggcctacggggtcaagcgcttttctcccatgactattgacgggatgaccagcctcgccggaatcaatatacccggtcatcctggcacaggctggtgcattttcgtttataatttagcccctgatgcggatgaatcaatcctgtggcagatgtttggtccctttggggcagttacaaacgtgaaagttatcagggactttaataccaacaagtgtaagggatttggctttgtgacaatgacaaactacgatgaagccgcaatggccattgcctcattgaatgggtaccgcttaggggacagagtgctccaggtaagcttcaaaacaaacaaaacgcacaaagcctag

SEQ ID NO: 221830 - DNA, 1041 bp, synthetic construct
  misc_feature 1..1041: note = Description of Artificial Sequence: Synthetic coding sequence
  source 1..1041: mol_type = other DNA
atggaaacacagttaagcaacggtcctacctgcaacaacactgctaacgggcctactacgattaataataactgttcctcaccggtagattctggcaacacagaagacagcaagacaaatttaatagtgaactatctcccccagaacatgacccaagaggagctcaagagcctttttgggtcaatcggagaaatcgagtcttgcaaactggttcgagacaagatcacagggcagagcctcggctacggatttgtcaactacattgatcctaaggacgcagagaaagccatcaataccctgaatggtctccgcctgcagacgaagaccataaaagtctcctacgcacggccttcctcagccagtatccgtgacgccaatctctatgtcagcggattaccaaagacgatgacacaaaaggagttagagcagctgttttcccaatacgggcgtatcataacctccaggatcctggtggatcaagtgacgggcattagccgtggcgtggggtttattagattcgacaaaagaatcgaggccgaggaggccattaagggtctgaatggccagaaaccccctggagccacagagccaatcaccgtgaaattcgctaataatcctagccagaagaccaaccaggcaatcctgagccaactttaccaatctccaaatcgacggtatccaggtcccttagcacagcaagctcaacgtttcagatttagcccgatgacaattgacggaatgacttcactggccggaatcaacattcctggacatccaggaacagggtggtgtatattcgtgtacaaccttgcaccagacgcagatgaatccattctctggcagatgttcggtccgttcggagccgtgactaatgtaaaggttattagggattttaacaccaacaagtgcaaaggatttggcttcgtgacgatgaccaactacgatgaggctgccatggctatagcctccttaaacggttacaggctgggcgaccgcgtgctgcaggtttctttcaagacaaacaaaacccataaggcctag

SEQ ID NO: 221831 - DNA, 1080 bp, synthetic construct
  misc_feature 1..1080: note = Description of Artificial Sequence: Synthetic coding sequence
  source 1..1080: mol_type = other DNA
atggagactcagttgagtaatggtcctacttgcaacaatacagcaaacgggccaactacaataaacaacaactgcagctcaccagtagactcaggtaacactgaagactctaaaacaaatttgattgtcaactacttgccccagaacatgacacaagaggaactaaaaagcctattcggctccatcggggaaatagagtcttgtaagctggtgcgggacaaaatcaccgggcagagtctgggctacggattcgttaattacatcgaccccaaggacgctgagaaagccatcaacaccttgaacggtctccggttgcaaaccaagaccattaaagtgagctatgccaggccctcctccgcatcaattcgtgatgccaatttatacgtgtctgggctgccgaagacaatgacacagaaggaactggagcaactattctcccagtatgggaggattatcaccagcagaatcctagttgatcaggttacagggatcagccgtggagttggcttcatcagatttgataaacggatcgaggccgaagaggccatcaagggattgaatggccagaaaccgcctggagcaacggaaccaataaccgtgaagttcgccaataaccccagtcagaagacgaatcaggcaatcctttctcagttgtaccagtccccgaacaggcggtatcccggaccactcgcccagcaggcacaaagattccgccttgataacctcctcaacatggcttatggcgtcaagagattttcaccgatgacaatcgatggcatgacatctctggctggcatcaatatcccgggacaccctggcaccggttggtgcattttcgtgtataatttggcacctgacgcagacgaatcaattctctggcagatgtttggaccatttggcgctgtgactaatgtgaaagtcatccgcgatttcaacaccaataaatgtaaaggtttcggcttcgtgaccatgaccaactatgacgaagcagcaatggcgatcgcctcgctcaatgggtacagactgggtgatagagtgttgcaggtcagctttaaaacgaacaagacccacaaggcctag

SEQ ID NO: 221832 - DNA, 1080 bp, synthetic construct
  misc_feature 1..1080: note = Description of Artificial Sequence: Synthetic coding sequence
  source 1..1080: mol_type = other DNA
atggagacgcaattaagcaatggacctacctgtaataatacagcgaacgggcctaccacaataaataacaactgcagctcccctgtggactccggaaatactgaagattccaagactaacctgatcgtgaattatctgccccaaaacatgacccaagaggaactcaagtcccttttcggtagcataggtgaaatcgagtcatgcaagctggtccgtgacaagatcacaggacaaagcttaggatatgggttcgtgaactacatcgatcctaaggacgccgagaaggctatcaacacactgaacggtctgaggctgcaaaccaaaacgattaaggttagctacgctcggccttcttcggcctctatccgagacgccaacctgtatgtgtctggtctgcccaagactatgacccagaaagagctcgaacaactgttcagccagtacggcagaatcatcacgtcccggatcctcgtggatcaagttactggcatttctcgtggcgttggatttatccgctttgacaagcggatcgaggccgaggaggctattaagggcctgaatggccaaaaacctccgggagctacagaacccatcactgtgaaattcgctaataaccctagccagaagacgaaccaggctatactctctcagctgtaccaatcccctaaccggcgttacccagggccattagctcaacaggcccagcggtttcgtttagataatctcctaaacatggcttacggagtgaagagattctctcctatgaccatagacggcatgacttctttggccggaatcaatattcccggacaccctggaactggatggtgtatattcgtgtataacctggctcctgatgcagacgagtctatcctgtggcagatgtttgggccatttggggctgttactaatgtgaaagtcatcagagatttcaatactaataagtgcaaggggttcggcttcgtgacaatgaccaactatgacgaagcagctatggcaatcgccagcctcaatggctaccgactgggggatcgcgtcctccaagtgtcctttaagactaacaaaactcacaaagcatag

SEQ ID NO: 221833 - DNA, 273 bp, synthetic construct
  misc_feature 1..273: note = Description of Artificial Sequence: Synthetic coding sequence
  source 1..273: mol_type = other DNA
atgactcaaaaggaactggagcagcttttctcccagtatgggcgtatcattactagcagaattttagtcgatcaggtcaccgggataagtaggggggtgggattcatacgttttgacaaacgcattgaggccgaggaggcgatcaagggactaaatggccagaagcctccaggtgctacagagccaatcactgttaaatttgcgaacaacccaagtcagaagacgaaccaagccatcctcagtcagctgtaccagtcgccaaaccgtcggtag

SEQ ID NO: 221834 - DNA, 570 bp, synthetic construct
  misc_feature 1..570: note = Description of Artificial Sequence: Synthetic coding sequence
  source 1..570: mol_type = other DNA
atggaaactcagctgtccaacggccctacatgcaataacaccgctaacgggcctaccactatcaataacaactgctcctcgccagtcgacagcggcaataccgaggactcgaaaaccaatctcatcgtcaattatctgccccaaaatatgacacaagaagagctcaaatcattgttcggttccatcggcgaaattgagagctgcaagttagtccgtgacaaaataaccgggcaaagccttggctatggatttgtcaattatatagacccaaaagatgcagaaaaggctattaatacattgaatggcttgcggctccagacgaaaactatcaaagtgtcatacgctcggccttctagcgcaagtataagggacgccaacctatatgtttccggtctccccaaaactatgacacaaaaagagctggaacagctcttttcccagtacgggaggatcataacttctaggattctcgtagatcaggtaactgggatcagcaggggtgtcggcttcattcgttttgataaaaggattgaagcagaggaggcaataaaaggcctcaacggccagtag

SEQ ID NO: 221835 - DNA, 1080 bp, synthetic construct
  misc_feature 1..1080: note = Description of Artificial Sequence: Synthetic coding sequence
  source 1..1080: mol_type = other DNA
atggagacacagctctcaaacgggcctacttgcaataataccgcaaatggcccaacgacaattaataacaactgctcgagccctgtagattcaggaaatactgaagacagcaaaacaaatctgatcgtcaactatctccctcagaatatgacgcaagaggagttgaaaagcctcttcgggtccatcggcgagatcgaatcttgtaagctggtccgggataagataaccggtcaaagtctgggttatggattcgtgaactatattgatcccaaagatgcagagaaagcgatcaatacactaaacggtttgcggctccaaacaaaaactataaaagttagctatgctcgcccaagctccgcatctatcagagatgctaatctctatgtctcgggactgcccaaaaccatgacacagaaggaactggagcaattgtttagccagtacggccgaatcatcacctctaggattctcgtagaccaagtgacaggaatcagtcgtggtgtgggctttataagatttgacaagaggatagaagccgaggaggcaattaaaggtctcaatggtcagaagcccccaggcgcaaccgagccaattaccgtgaaattcgcaaataacccgtctcagaagacgaaccaagccatactttcccaactgtatcaaagcccaaatcgacgctatcccggtccactcgctcaacaagctcagcgcttccgcctcgacaatctcctcaatatggcctacggagtgaaacgcttcagtcccatgaccatcgacggcatgacctctctggcgggaattaatatacccggacatcctggtaccggctggtgtatctttgtctacaatctggcccctgacgcggatgagagcatcctctggcagatgttcggtccctttggcgctgtcacgaacgtgaaagtcatcagggatttcaatacaaacaagtgcaagggctttggctttgttaccatgacgaactatgacgaggcggctatggctattgcctcacttaatgggtacagactgggcgaccgggttctgcaggttagtttcaagacaaataagactcataaggcatag

SEQ ID NO: 221836 - DNA, 1104 bp, synthetic construct
  misc_feature 1..1104: note = Description of Artificial Sequence: Synthetic coding sequence
  source 1..1104: mol_type = other DNA
atggttacccaaattttaggcgcaatggagtctcaggtggggggtgggcctgcaggccctgcactgcctaatgggcctctgctggggacaaacggcgctaccgatgactcgaagactaacctcatcgtcaactacctccctcaaaacatgacacaggatgaatttaagtccctgtttggctcaatcggagacatcgagtcatgtaagctggtgcgggataaaatcacaggacagtcacttggatatggctttgtgaactactctgaccccaacgacgcagataaggctatcaatacactcaacgggttaaagctgcagactaaaaccattaaggtctcatatgccagacctagctctgcatcaatcagagacgcaaacctgtatgtatctgggctgcccaaaactatgtcacagaaagaaatggagcagctgttcagtcaatacggtcgcatcatcactagccgaattcttgtggaccaggtcactggggtcagcaggggggtgggcttcattagatttgacaaaagaattgaggctgaagaagcaatcaagggcctgaacgggcagaagccattaggcgcagcagagcccatcactgtcaaatttgcaaataacccgtctcaaaagacaggacaagccctgctgacacacctgtatcagtcctccgccagacgctacgctggccctctccaccatcagactcagaggtttcggctcgacaatctcttgaatatggcttacggggtgaaatccccactctcccttattgccagattctcccccatagcaattgatggcatgtccggactggccggagtgggtctgtccgggggagctgcaggggctgggtggtgcatcttcgtttacaatcttagtccggaggccgatgagagcgtgctttggcagctgtttgggccttttggcgcagtgacgaacgtcaaggtgatacgagattttactacaaacaagtgtaagggattcggctttgtgacaatgacgaattacgatgaggctgccatggcgattgccagtttaaacgggtaccgactgggcgaacgggttttgcaagtcagcttcaagacttcaaaacaacataaagcctag

SEQ ID NO: 221837 - DNA, 1083 bp, synthetic construct
  misc_feature 1..1083: note = Description of Artificial Sequence: Synthetic coding sequence
  source 1..1083: mol_type = other DNA
atggtgacccagatcctcggggcaatggagagccaggtggggggtggcccagcaggacctgctctgcctaatggcccacttctggggaccaatggggctactgacgactccaaaacaaatctcatcgtcaattatttgcctcaaaatatgacacaagatgagttcaaaagtctcttcggctcaataggggacatcgaatcgtgtaagctcgttcgggacaagataaccggacagagcctgggttacggattcgtgaactattcagatccgaatgacgccgacaaggccattaatactttgaacggacttaagttgcagacaaaaacaatcaaagttagctacgctcgcccatcctcagcctcaataagagacgctaacctatacgtatctggccttccaaaaacaatgtcacagaaagagatggaacaactgttcagtcagtacggacgaataattacatcgcggatcctggtcgaccaggttacaggggtatcacgtggggtgggtttcataagatttgacaaaaggatagaagccgaagaggcgatcaagggtcttaacggacagaagcccttgggggctgccgagcctataactgttaagttcgcaaacaatcccagccaaaagaccggtcaggctctgttaacacacctctaccagagtagcgccaggagatatgctggccctttgcatcaccagactcagagatttagactggataatctgttgaatatggcctatggcgtgaagaggttttctccaattgcaatcgacggcatgtccggactggccggagtgggcctgagtgggggagccgctggcgctgggtggtgtatattcgtatacaatctttctcccgaggctgacgagtctgtgttgtggcagctgtttggtccttttggtgcagtcacaaatgttaaggttatacgggacttcactaccaacaagtgcaagggattcggcttcgtcactatgaccaattatgacgaggcagccatggcaatcgccagccttaatgggtaccgtcttggagaacgagttctccaggtgtccttcaaaaccagcaaacagcataaggcctag

SEQ ID NO: 221838 - DNA, 1152 bp, synthetic construct
  misc_feature 1..1152: note = Description of Artificial Sequence: Synthetic coding sequence
  source 1..1152: mol_type = other DNA
atgcggctgttactcttacgcgaaattgtgattaacgaatcaaggaattgctcttttatgatcatctcaaccatggaacctcaggtgtcaaatggcccaacctccaacacaagtaacggaccatcgagcaataaccggaattgcccctcccccatgcagacaggcgctaccaccgatgactctaagacaaatcttattgtaaattatctgccacaaaacatgacccaggaggagtttcgttccctattcggatctattggcgagatcgagagctgtaagctggtgcgggacaagattactggccagtctctggggtatggatttgtgaattacattgaccccaaagatgctgaaaaggccatcaacacgctaaacggccttagactgcagaccaagaccattaaagtgtcttacgccaggccttcatcggcttcaattagagacgcaaatctgtacgtctcaggacttccaaagaccatgacacagaaagagctggaacagcttttctcacaatatggccgaataataacatctcggatactggtagaccaggtgacaggggtcagcagaggagtgggttttatccgattcgataagagaatcgaagccgaagaggctatcaaggggctcaatgggcagaagccatctggagctacggaacccataaccgtaaaattcgctaataacccctcccagaaatcctctcaggccctattatcacagctttaccagagccccaatcgcaggtaccccggacctttgcatcaccaagcacagagattccggttagacaatctattgaacatggcgtacggtgttaagagattctctcccatcacaattgacggcatgacaagccttgtgggcatgaatattcccggacacactggaactggctggtgtatctttgtctataacttgtctccagatagcgacgagtcagttctgtggcaactctttgggccatttggcgcagtgaataatgtgaaggtcattcgcgatttcaacaccaataaatgtaaaggatttggatttgtgaccatgacaaactatgatgaggccgcaatggcaatcgccagcttaaatggataccgcctcggtgacagagtattgcaggtcagcttcaaaacaaacaaggctcataagagctag

SEQ ID NO: 221839 - DNA, 1116 bp, synthetic construct
  misc_feature 1..1116: note = Description of Artificial Sequence: Synthetic coding sequence
  source 1..1116: mol_type = other DNA
atggagtggaacggcctgaaaatgatcatctcaacaatggagccacaagtgtccaatggacccacatctaatacctctaatggaccatcttcaaataatcggaattgcccgtcccctatgcaaacgggtgctacaactgacgattcgaagaccaaccttatcgtgaactacctgccccagaacatgacacaagaagagtttcgctccctgttcggatccattggagaaatcgagtcttgtaagctggtacgcgacaagatcaccggtcaatctctggggtatggctttgttaattatatcgaccccaaggatgccgagaaagcaatcaacacgctaaatggactgagactccagacgaagactattaaggtgtcctacgccaggccgagttcggcaagcatacgggatgccaacctgtatgtctccgggctcccaaaaaccatgacacaaaaggagcttgagcagcttttctcacagtatggcagaattattacatcacggattctggtcgaccaggtgactggtgtaagcagaggcgttgggtttatacggttcgataagcggattgaggctgaggaagctattaagggcctcaacggacaaaaaccttccggcgcaaccgagccaattacagtcaagttcgcaaacaatcccagtcaaaagtctagccaagcattgctctcccagttgtaccagtcgcctaatagaaggtacccaggcccactccatcatcaagcccagcgcttccggctagacaacttgctgaacatggcatacggtgtgaagcggttcagccccatcaccattgacggcatgacatcgctagtgggcatgaacatccctggacacactggaacagggtggtgcattttcgtctacaatctgagtcccgacagtgacgagagtgttttatggcaattgttcggtcctttcggcgctgttaacaatgtcaaagtcatccgcgactttaacacaaataagtgtaaggggttcgggtttgtaacaatgaccaattacgacgaagccgcaatggcaatagcctcactaaatgggtacaggctaggagacagggtgctccaggtgagtttcaaaacgaacaaggcccataaaagttag

SEQ ID NO: 221840 - DNA, 1158 bp, synthetic construct
  misc_feature 1..1158: note = Description of Artificial Sequence: Synthetic coding sequence
  source 1..1158: mol_type = other DNA
atggagtggaacggattaaaaatgattatctctactatggagccccaggtgtcgaatggcccaactagcaacacttctaacgggccatcatcaaacaatcggaattgtccctcgcccatgcagacgggcgctaccacagatgattctaagacgaacttgattgtgaattaccttcctcagaatatgacccaggaggagttccgctcactcttcgggtccatcggagagatcgagtcttgtaagctggtccgtgacaagatcacaggccaatcccttggatacgggtttgtaaactatatcgaccccaaagacgccgagaaggctataaacacattaaacgggttgcggcttcaaaccaaaaccatcaaagtgtcatacgctcggccaagcagcgccagcattcgggacgccaacctttatgtctctggcttgcctaagacgatgacccagaaggagttagaacaactgttctcccagtatggccgaattatcaccagcaggatcctcgtggaccaagttacgggagttagtagaggggttgggtttattcggtttgataagcgtatagaagccgaggaggccatcaaagggctgaacggccagaaaccctccggcgcaaccgagcccattacagtgaaattcgctaacaaccctagtcagaaatcaagccaggcattactgagccagttgtaccaaagtcccaaccggagataccccggtcccctgcaccatcaggctcagagattccggcttgacaacctgttgaacatggcctacggggtgaaacgcttgatgtcaggccctgtgcctccctccgcgtgcccacctaggttctcccccataactattgatgggatgacgtcactcgtgggaatgaatattccaggacacaccggcactggatggtgtatctttgtgtataacctgagtccagactcagatgaatccgtgctatggcaactgttcgggcctttcggcgcagttaataatgtgaaggtgatccgggatttcaacacaaataaatgtaagggctttggattcgtgacaatgaccaactacgacgaggccgctatggccattgcctccctgaacgggtatcgattaggtgaccgcgttctgcaagtctcatttaagacaaataaggcccataagtcctag

SEQ ID NO: 221841 - DNA, 1143 bp, synthetic construct
  misc_feature 1..1143: note = Description of Artificial Sequence: Synthetic coding sequence
  source 1..1143: mol_type = other DNA
atggtgatgattatcagtactatggagccccaggtgtctaacgggcctacttcaaacacctcaaatggcccttcgtctaacaatagaaattgtcccagtccaatgcagacaggggctacaaccgatgattcaaaaaccaaccttatagtgaactacttgccacagaacatgacacaggaagaatttagatccctgttcggttccataggcgaaattgagtcttgtaaattggtgcgtgataagataacgggtcaatcactggggtacgggttcgtcaactatattgatcctaaggacgctgaaaaagcaattaatacattaaacggactgcggctgcagacgaaaaccattaaggtgagttacgccagaccttcatcagcaagcattagggacgccaatctctatgtgtctggcctgcctaagaccatgactcaaaaagagctggagcaattgttttcccagtatggcagaattattacctctcggatcttggtagatcaggtgacgggagtgtcgcggggagtgggtttcatccgcttcgacaaaaggatcgaagccgaagaggcaattaagggtctgaatggtcagaagccaagcggtgccacagaacccataacagtgaaatttgctaacaatccttcacagaaatcttcccaggcactccttagccagttgtaccagagtcctaatagacggtaccccggacctctccatcaccaggcccagcgttttcggttggataatttacttaatatggcgtacggcgtcaaaaggctgatgagtggacccgttccaccgtcggcttgtcccccacggttttcacccattaccatcgatggcatgacatcattggtcggcatgaatatcccagggcacaccgggactgggtggtgcatcttcgtttacaacctctcacccgattctgacgaatcggttctgtggcagctgtttggcccttttggggctgtgaacaacgtgaaggtgatccgggactttaacactaacaaatgtaaggggtttggattcgtcaccatgacaaattatgacgaggcagcgatggctatagcttcgctgaatggctatcgccttggagatcgtgtcctgcaggtgtcattcaaaactaacaaagctcacaagtcctag

SEQ ID NO: 221842 - DNA, 1101 bp, synthetic construct
  misc_feature 1..1101: note = Description of Artificial Sequence: Synthetic coding sequence
  source 1..1101: mol_type = other DNA
atggtgatgattatcagcacaatggaacctcaggtctctaatggtcctacttctaacacttccaatggtccatcctcgaacaatcgcaattgtcccagccctatgcagacgggagcaacgaccgatgactcaaaaacaaacctgatcgtgaattatttaccccagaatatgacccaagaggaatttaggtccttgtttggaagcataggcgaaattgagtcttgtaagctggtccgggacaagatcactggccagtcccttggatacggctttgtgaactatatagatccgaaggacgccgaaaaagcaatcaacaccctgaacgggcttcggctgcaaacaaagacaattaaagtgtcctatgcccgtccgtcatcagcgagtatccgcgacgccaacttgtacgtaagtggtttgcctaagacaatgacccagaaagaacttgagcagttattctcccaatacggaagaataatcaccagccgcatccttgtggatcaggttacgggcgtgtcacgtggggttggtttcatccggttcgacaaacgaatagaggccgaggaagccattaaagggcttaacggccagaagccaagcggggctacagagccaattaccgtgaagttcgccaataacccctcccagaagtcttctcaggccctcctctctcagctttatcagagccctaatcgcagatatccaggccctctgcaccaccaggcccagagatttcgtctggataacctgcttaacatggcatacggggtgaaaaggttttccccaattactatagacggaatgaccagcttagtcggaatgaatattccagggcacaccgggactggatggtgtatcttcgtgtataacttgtctcccgactccgacgagtccgtgctatggcagcttttcggaccttttggggcagtgaataatgtgaaggttattagggatttcaacacaaataagtgcaaaggctttggttttgtgacgatgactaactatgatgaagccgctatggctatcgcatcactgaacggatatagactcggggacagagtgctccaggtctcatttaagactaataaggctcataagtcgtag

SEQ ID NO: 221843 - DNA, 1101 bp, synthetic construct
  misc_feature 1..1101: note = Description of Artificial Sequence: Synthetic coding sequence
  source 1..1101: mol_type = other DNA
atggagcagataataagcactatggagccccaggtcagcaatggaccaacaagcaacacttctaatgggccaagctccaacaataggaactgcccttctcctatgcagacgggagcaacaacagacgatagcaagacaaatctcattgtcaactacttgcctcaaaatatgacacaggaagagttccgctccctgttcggttcaattggtgagattgaatcttgtaaattagtgagggataaaatcaccggacagtcactgggctacgggttcgtgaattacattgaccccaaggacgctgaaaaggccataaacacattgaacggcctacgcttgcagacaaagactatcaaagtatcctacgccagaccttcatccgcctcaattcgagacgctaacctctacgtgtcagggcttccaaagaccatgactcagaaagagctggaacagttgtttagccagtatggcaggattataacttcgagaatcctcgttgaccaggtgaccggcgtgtctcgcggtgtgggcttcatcagattcgataaacgcatcgaggctgaggaagcgatcaaaggcctgaatggtcagaaaccctccggcgctacagaaccaattactgtgaagtttgccaacaatccctctcaaaagtcaagccaggctctcctgagtcagttgtatcagtcccctaatcgacgctacccgggaccactccaccaccaggcacagcgctttcggttagacaacctgttgaatatggcctatggggtgaaacgtttcagtccgatcaccatcgacggtatgaccagcctggtgggaatgaacatccctggacacaccgggacagggtggtgcattttcgtgtataacctgagccctgatagcgatgaatcagtgctgtggcagctgtttgggccattcggcgctgttaataatgtaaaggtgattcgagactttaataccaataagtgtaaaggctttggcttcgtgactatgacaaattatgatgaggcggcaatggccatagcctctttgaatggttataggttgggcgatcgggtcttacaggtaagctttaaaaccaataaggctcacaaatcttag

SEQ ID NO: 221844 - DNA, 1110 bp, synthetic construct
  misc_feature 1..1110: note = Description of Artificial Sequence: Synthetic coding sequence
  source 1..1110: mol_type = other DNA
atgagacttaaaaatcagattatctctactatggaaccccaggtctctaacggtcccacctcaaatacttccaatgggcctagctccaacaaccggaactgcccgtcccctatgcagactggcgcaacaacagacgactccaaaaccaatctgatagtgaattacctgccacaaaacatgacccaggaggaatttaggagtctttttggtagtattggggagatagagagttgcaaacttgtccgcgataagatcacaggccagtctctggggtatgggttcgtgaattatattgatcctaaggacgcagaaaaggccataaatacccttaacggcctccgactgcaaactaagaccatcaaagtcagctacgccagaccctcatccgccagtattagagacgccaacctgtatgtctccggattgcccaagaccatgactcagaaagagctggaacaactgttttctcagtacggcagaatcataacaagtcgaatactggttgatcaggtgaccggggtgagccgcggagtagggttcattaggtttgacaaaagaatagaagccgaagaggcaatcaaggggctcaacggtcagaaacccagcggggcaaccgagccaattacagtgaaattcgcaaataaccccagccagaagtcttctcaggccctattgagccagctgtatcaatctccgaatcggcgatacccaggaccgctgcatcaccaagcccagagatttcgactggacaacctccttaatatggcctacggcgtgaagcggttctctcccattacaatcgatggcatgacctccctcgtgggaatgaacataccgggtcacacaggcacagggtggtgtatatttgtgtacaatctgagtcccgactcagatgaatccgtactgtggcagctgtttggaccctttggagcggtgaacaatgtaaaagtcattcgggacttcaatactaataagtgcaagggatttggattcgtgaccatgaccaactatgacgaggccgcaatggctattgcctccctgaacggctatcgcttgggcgatagggtgttacaggtttcattcaagaccaacaaggcccacaagtcttag

SEQ ID NO: 221845 - DNA, 855 bp, synthetic construct
  misc_feature 1..855: note = Description of Artificial Sequence: Synthetic coding sequence
  source 1..855: mol_type = other DNA
atgtttagagcagcagccccagggcagctacggagagctgtcgcccaggatctatgtaaagtagctggcatcgctaaggtcttggtagcccagcacgatgtatacaagggcctgctgcctgaggagcttacaccgttgattcttgccacccagaagcaatttaactatacgcacatttgtgccggtgcaagcgccttcggtaaaaatctgctcccacgagtggccgctaagcttgaggtggcaccgatttcggacatcatcgcaattaaatcacctgacaccttcgttcggaccatttacgctggaaacgccctgtgcacagttaagtgtgatgagaaagtgaaagtcttttctgtgcgaggaacctcatttgacgcagcggcaacatccggagggtccgcatcttctgagaaggccagcagtacaagcccagtcgagataagtgagtggctcgaccagaagctcacaaagagtgatcggcctgagttaacaggggctaaagtagtggtctccggaggtcggggactgaagagcggggaaaacttcaaactgctctacgatctggctgaccaacttcatgctgccgtgggtgcatctcgggctgccgtggacgcaggtttcgtgcctaacgacatgcaagttggacagactgggaaaatcgtcgcacctgaactctacattgctgtcggcattagcggcgcaatacagcatctcgccggtatgaaggacagtaagacaattgtggcaattaataaagacccagaggctcctatcttccaggtcgccgactacgggatagtggcagatctgtttaaagtggtcccagagatgacggagattctgaaaaagaaatag

SEQ ID NO: 221846 - DNA, 1002 bp, synthetic construct
  misc_feature 1..1002: note = Description of Artificial Sequence: Synthetic coding sequence
  source 1..1002: mol_type = other DNA
atgtttagagcggctgccccaggccaactccggagagcggcttccctactacggtttcagtcaacactggtcattgccgagcacgccaacgatagcctggcacccatcacactgaacaccattactgcagccacaagactgggaggcgaagtgagctgcctggtggcaggaacaaagtgcgacaaggtggcccaggacctgtgtaaagtggcaggcatagcaaaggtactggtggcccaacacgacgtgtacaaaggactcctgccagaggagttgactccactcattctggccacacaaaagcaattcaactatacgcatatctgtgcaggtgcttctgccttcggaaaaaacctgctgcctcgcgtggctgctaaactggaggtagccccaatctctgatatcattgccattaaatctccagatacgtttgtccgcaccatctatgcgggaaatgctctgtgcaccgtgaagtgtgatgaaaaggtaaaagtttttagcgtgcggggtacctcgttcgatgctgctgcaactagtgggggttccgccagctcggaaaaggcctcttctactagccccgtagagatcagcgaatggcttgaccagaagctaaccaagtccgacaggccagaactcaccggcgcaaaagttgtggtctcaggcggacgcggactgaaatccggcgagaattttaaactgctgtatgatcttgccgatcagctccacgcggctgtcggggcatctagagcagccgtcgatgccggattcgtacctaatgatatgcaggttggacaaactggcaaaatcgtggcccctgaactgtacattgcagttggtattagcggtgccattcagcatttggcagggatgaaggacagtaagaccattgtggcgattaacaaggaccccgaggcaccaatcttccaagtagctgattacgggatcgtggccgacctttttaaagttgtacctgaaatgactgaaatcttaaaaaagaagtag

SEQ ID NO: 221847 - DNA, 768 bp, synthetic construct
  misc_feature 1..768: note = Description of Artificial Sequence: Synthetic coding sequence
  source 1..768: mol_type = other DNA
atggctgagctgcgggttctggtagccgtgaagagagtgattgattatgctgtgaaaattagggtgaagcctgacagaactggagttgtgaccgacggcgtgaaacacagtatgaatcctttctgcgagatcgccgtcgaagaagctgtgagacttaaggaaaaaaaactcgtgaaagaggtgatcgcggttagttgcgggccagcacagtgccaagagactataagaacagccctggctatgggagccgatagaggaatccatgtggaagtgcctccagcagaggctgaaaggctcggccctctgcaagttgcaagggtattagctaagctggctgagaaagaaaaggtggatctggtcctactaggtaagcaggctatcgacgacgattgcaatcagactgggcagatgactgccggtttcttggattggccgcaagggaccttcgcaagtcaggtcaccctggaaggtgacaagttgaaggtggaaagggaaatagatggagggctggagaccctccgtcttaagctgccagctgtcgtgacagctgatttaagacttaacgagcctcggtatgctaccctacccaatatcatgaaggcgaagaagaaaaagatcgaagtaattaagcccggagatttaggtgtggacctcacctctaagctatctgtcatttcagtggaagaccctcctcagcgtaccgcaggcgtaaaagtggaaacgaccgaagatcttgtggccaaactcaaggaaatcggccgaatttag

SEQ ID NO: 221848 - DNA, 1041 bp, synthetic construct
  misc_feature 1..1041: note = Description of Artificial Sequence: Synthetic coding sequence
  source 1..1041: mol_type = other DNA
atgtacctttccctgtgggtgacgatcaatacggtaaacctccgcaatactctctccggactgaggggggctgtgactactgtcggaatgatcaaaagtgacgtccccggtacccaagaatggctggacgagcgacgtcgccagggcgacttgcctttgcccaccaattcaaaccctgtgctttcactggagctgtgtgacccgggacaggggccagcaccttttcaggccgtagtggtactgattcaaccagggcgtgggctggccctgcgcccacccccatcatgcctgtttccccctgaccctaccccgagccccccagccggtcagatcagagtgaagcccgatcggacaggggtcgtaactgatggcgttaagcactcaatgaatcccttctgtgagattgccgtggaagaggccgtccggctgaaagagaaaaagctggtgaaggaggtaatagccgtatcctgtggccctgctcagtgccaggagacaatccggacagccctggcaatgggcgcagatcggggaatccacgtagaagtcccaccagctgaagccgaacggctcggcccactgcaagtggcccgtgtgcttgcaaagctggctgaaaaagaaaaagtggaccttgtcctcttaggaaagcaggccattgatgacgattgcaatcagactggacagatgactgccggatttctagactggcctcaaggaactttcgcgtctcaggtaaccttagaaggcgataagctgaaggtggagagagaaattgatgggggactagagacgctccgcctcaagttacctgctgttgtaacagctgatctgagactgaacgaacccaggtatgcaactctgcctaacattatgaaggctaaaaaaaagaaaatagaagtcattaagcccggagatctgggggttgacctcacatcaaaactgtctgtgatcagtgtcgaggatcctccgcagcggacagctggggtgaaagtcgagaccaccgaagatttggtcgctaaactgaaggagataggcaggatttag

SEQ ID NO: 221849 - DNA, 1713 bp, synthetic construct
  misc_feature 1..1713: note = Description of Artificial Sequence: Synthetic coding sequence
  source 1..1713: mol_type = other DNA
atgttggtgccgctggcaaagctgtcgtgtttgggcgttaacatggagcgattcgcggaggaagccgatgtggtcattgtcggcgctggtcccgcaggcttgtctgctgcggttagattaaaacaattggcagtcgcccacgaaaaagacataagggtctgtttagtggaaaaggctgctcagatcggggctcacactctttccggcgcatgcctggatcccggagctttcaaagagctgtttcctgactggaaggagaaaggcgctccgctgaacacccccgtcacagaggaccgctttggcatcctgaccgaaaaatatcgaattccagtgccaattcttcctggcctgcccatgaacaatcacgggaactatattgtcaggctcggccatctcgtgagttggatgggagagcaggccgaggctttaggggtggaagtttatccaggttacgcggctgccgaggtgctatttcacgatgacggtagcgtgaagggaatcgcgacgaacgatgttggtatccagaaggacggggctccaaaagcaaccttcgaaagaggactggaactgcacgccaaagtgaccatttttgccgaggggtgtcacggacacctggccaaacagctgtacaagaagtttgacttacgggcaaactgcgaacctcaaacctacggtattggactgaaagagctctgggtcatcgacgagaaaaactggaaaccaggtcgggtggatcatacagtagggtggcctctggatcggcacacttatggaggttccttcctctaccacctgaacgaaggtgagccacttgttgctctgggccttgtggtcggtcttgattaccagaatccttacttgtcccctttcagggagtttcagcggtggaagcaccatccttccatccgcccaaccctcgagggcggaaagcggatagcttatggagccagagctcttaatgaggggggatttcagtccatccccaagctgacttttcccggaggactcctcatcggttgtagcccgggattcatgaacgtgccaaagatcaagggcacacatacggcaatgaaatcagggattctagcagctgagagcatatttaaccagctcacttccgagaacctccagagtaaaaccattggactgcacgtcaccgagtacgaagataacttgaaaaacagctgggtctggaaggagttatatagcgtacggaatattagaccttcctgccacggtgtgctgggggtctacggcggtatgatctacaccggtattttctattggattctgagaggtatggagccgtggacactgaagcacaaggggtcggatttcgagagattaaagcccgcaaaggactgcaccccaatcgaatatcccaaaccagacggtcagatatcgttcgatctgctatcatctgtcgcccttagcgggaccaatcatgaacacgatcagccagcccaccttacactgagagacgactctattcccgtaaacagaaacctgagtatttacgatggtcctgagcagcgcttctgcccggctggcgtatacgagttcgtccctgtggaacaaggggacgggttccggcttcagatcaatgctcagaactgcgtgcattgtaagacgtgcgatatcaaagaccctagccagaacatcaactgggtcgtaccagagggaggagggggaccagcatataatggcatgtag

SEQ ID NO: 221850 - DNA, 1854 bp, synthetic construct
  misc_feature 1..1854: note = Description of Artificial Sequence: Synthetic coding sequence
  source 1..1854: mol_type = other DNA
atgctggtcccattagcaaaattgagctgccttgcttatcagtgttttcacgccctgaagataaaaaagaactatctgcctctgtgtgctacacgctggtcgtccacctccaccgtacctagaatcaccacccactacaccatctatccaagagataaagataaaagatgggagggcgtgaatatggagaggttcgctgaggaggctgatgtagttattgtgggggctgggcctgccggattatccgctgcggttaggcttaagcaattggccgtcgcccacgaaaaggacatccgggtctgccttgtggagaaggccgcacagatcggtgcacacactctgagcggtgcctgcctggatcccggtgcattcaaagaactgtttcccgactggaaggaaaagggggcacctttgaataccccagtgactgaggatcgctttgggatcctgactgaaaagtacagaataccagtccccatcctgcccggattgccgatgaataaccacgggaactatatcgttaggcttggacaccttgtgagttggatgggcgagcaggcagaagccctcggcgtggaagtttatccaggttacgctgctgccgaggtcctgtttcacgacgatggctcagtgaaaggtatcgcgaccaatgacgtcgggatccaaaaggacggggctcccaaggccactttcgagcgaggcctggagcttcatgcaaaagtgacaatcttcgcagagggatgccacggccatttggctaaacagctatacaagaagttcgacctgagggcgaactgcgagccacagacatatggcataggtctcaaagagctgtgggtcatcgacgagaagaactggaaacctgggagagtggaccacaccgtcggatggcccctggatagacacacctatgggggtagttttctctaccatctgaatgagggagaaccgctagtagctcttggcctagtagtggggctagactatcagaatccgtacctctccccatttagggaattccagcgctggaagcatcaccctagcattaggcccactttagagggaggtaagcggattgcctatggcgctcgagccttgaatgaaggagggtttcagtcaattcccaagttaacctttcccggaggcttgctgattgggtgctcacctggcttcatgaacgtacccaagattaaggggacacatactgcaatgaagagcgggatcttggcagctgagtcgatcttcaatcaacttacctctgaaaatctgcagtcaaaaactattggcctgcacgtgactgaatatgaagacaacctcaagaactcctgggtgtggaaagaattatattcagtccggaatatccgtcccagctgtcacggggttttgggggtatatgggggaatgatttacaccgggatattttactggattctacgcggaatggagccctggaccctgaagcataagggctccgactttgagcggttgaaacctgcgaaggactgtaccccaattgagtaccctaagccagacgggcagatctcatttgatttgctgagttcggtggccttgtctggtactaaccacgagcacgaccagccagcacatctgaccctaagggacgactccatccccgttaacaggaacctgtccatatacgatggcccagagcagcggttctgcccagctggagtctacgaattcgttccggttgagcagggagacgggtttcggctccaaattaacgctcagaactgtgttcattgcaagacctgcgacatcaaagacccatcacaaaatatcaactgggtggtacctgagggtgggggaggtcctgcttataatgggatgtag

SEQ ID NO: 221851 - DNA, 1287 bp, synthetic construct
  misc_feature 1..1287: note = Description of Artificial Sequence: Synthetic coding sequence
  source 1..1287: mol_type = other DNA
atggacccctctgttacactgtggcaatttctgttacaactcttgagagagcaagggaacgggcacattatttcctggaccagtagagacgggggtgaatttaaattggtggacgctgaggaggttgctaggctgtggggactgcggaagaacaagacaaacatgaactatgataagctatcacgagccttaagatattattacgacaaaaatatcatccggaaagtgtctggacagaagttcgtctataagttcgttagctacccagaggtagctggttgctccacagaagactgccctccccagcccgaggtcagtgtgacctccaccatgcccaacgtggcacccgctgcgatccacgcggctcccggtgacacagtgtcaggcaaaccgggaacacccaagggcgcaggcatggccggaccgggaggtctagcacggtcctcacggaacgagtatatgcggagtgggctgtattcaactttcaccattcagtcactgcagcctcagcctccaccacatccacgtcctgcagtggtgctgccttcggccgcaccggctggcgctgctgcccctccctccggctctcgcagcacctcacctagcccactggaggcctgtcttgaagcggaggaagccggactgcccttgcaagtgatcctgacaccacctgaggctccgaaccttaagtctgaggagctgaatgttgaacctggattgggtagagctcttcctccagaggtgaaggtcgagggtccgaaagaagaactagaggtggccggagagagggggtttgtgcccgagacaactaaagcggagccagaagtccctccgcaggaaggcgtgcctgcaagactgcccgcagtggtgatggacaccgcaggccaggcgggagggcacgccgcttcttccccagagatctcccagcctcagaaggggcgtaaacccagggatttggagcttcctttatctcctagtctactggggggacccggacccgagagaaccccaggcagtggatctgggtcggggttgcaggcccctggccctgcactgaccccctcacttttgcccactcatacccttacacctgttttactgacaccctcctccctccccccttccatccatttctggagtaccctgagccctatcgctccaagatcccctgcaaaactcagctttcaatttccgtcatccggaagcgcccaggtgcacatcccttccatctctgttgacggactgtcaacccctgttgtcctttcaccaggacctcagaagccttag

SEQ ID NO: 221852 - DNA, 1836 bp, synthetic construct
  misc_feature 1..1836: note = Description of Artificial Sequence: Synthetic coding sequence
  source 1..1836: mol_type = other DNA
atgcctgagatcgttgacacgtgctctcttgcgagcccagcttccgtctgccgaaccaagcaccttcacctgagatgcagtgttgattttacaagacgtaccttaacggggaccgccgctcttactgtgcagtcccaagaagacaacctgcggagcctggtgttggacacgaaagaccttacaatagaaaaagtggtgatcaacggacaggaagtgaagtatgctctcggtgagaggcaatcttataaaggatctccaatggagattagtcttcctatcgctctgtcaaaaaaccaggaaatcgtgatcgagattagctttgagacgtctcctaaatcgtctgcgctacaatggttgacaccagaacagacaagcggcaaagagcatccttaccttttcagccaatgtcaggcaatacactgcagagctattctaccttgccaggacacccccagtgtcaagctgacatacactgcagaagttagcgtgcccaaagagctggttgctctgatgtctgccatccgggacggggaaacacccgatcctgaagaccctagtagaaaaatctacaaatttatccagaaggttccaataccatgttacttgattgcactcgtagtaggggctctcgagtcgaggcagataggtcccaggaccctggtatggagtgaaaaagagcaggtcgaaaagtccgcttacgagttcagtgagacagagagcatgttgaaaatcgcagaggatctcggcggaccatacgtctggggacagtacgatctcctggtcctaccccctagtttcccttatgggggaatggagaacccttgcctgacatttgtcacaccaacactccttgccggagacaaaagtctctcaaatgtgattgcacacgagatcagccacagctggacaggcaatctcgtgactaataagacctgggatcatttttggttgaatgaggggcatacagtttatctggaaagacatatttgtggtcgactcttcggggaaaagttcaggcatttcaatgccctggggggatggggtgaactacagaacagcgtgaagacttttggtgagacacacccttttaccaaactagttgtggacttgacagatatcgacccagatgtggcctatagtagcgtgccgtatgaaaagggattcgctctattattttatctcgagcagttgctgggcggtccagaaatcttcctaggcttcctaaaggcatacgtagaaaagttctcatacaagtctatcacaacagatgattggaaggacttcctgtattcctatttcaaagacaaggtggacgtgttgaaccaggtcgactggaatgcttggctgtattcccccggactgccccctattaagccaaactatgatatgaccttgacaaacgcctgtattgctttgtcccaaaggtggatcaccgcaaaggaggatgatctgaacagctttaatgccaccgacttgaaggacctcagctctcaccagttgaacgaatttcttgctcagacactgcaaagagctccgctgccactcggtcacattaaacgcatgcaggaggtttataatttcaatgctatcaacaactcagagatccgttttcgctggctgcggttgtgcatccaatctaagtgggaagatgccattccattggctctgaagatggccacagaacagggcagaatgaaatttacccgcccactcttcaaggacttggctgcattcgataagagtcacgatcaagcagtgagaacctatcaggaacacaaagctagcatgcacccagttacagcgatgctggtgggaaaagacctcaaagttgactag

SEQ ID NO: 221853 - DNA, 117 bp, synthetic construct
  misc_feature 1..117: note = Description of Artificial Sequence: Synthetic coding sequence
  source 1..117: mol_type = other DNA
atggagtcagctattaccctgtggcaattcctgctgcaattgctcctagatcagaagcatgaacatctcatttgctggacttccaatgacggggagtttaaattacttaaggcttag

SEQ ID NO: 221854 - DNA, 483 bp, synthetic construct
  misc_feature 1..483: note = Description of Artificial Sequence: Synthetic coding sequence
  source 1..483: mol_type = other DNA
atggaaagtgccataactctttggcaatttcttctgcagcttcttctcgatcagaagcacgaacacttaatttgctggacaagtaatgacggagaattcaagctgttgaaggctgaggaagtcgcaaaattgtggggattgagaaagaacaaaacaaacatgaactatgacaagctgtcccgggctctgaggtactattatgacaagaacattattaaaaaagtgatagggcagaagtttgtgtacaagttcgtgagctttcctgagattctcaagatggacccccacgcagttgagatctcgcgcgagtccctattgttacaggactccgactgtaaggcgtcccccgaagggcgtgaggcccacaaacacggcctcgctgctctccgatccacctcacgcaacgagtacattcatagcggcctctattcttcatttactattaactcgttacagaaccctccagacgcctttaaagcctag

SEQ ID NO: 221855 - DNA, 1218 bp, synthetic construct
  misc_feature 1..1218: note = Description of Artificial Sequence: Synthetic coding sequence
  source 1..1218: mol_type = other DNA
atggacagcgccatcacgctttggcagttcctcctgcagctgctccagaaacctcagaataagcacatgatctgttggacatccaacgacggacaattcaaactcctccaggctgaagaggtggccaggctgtgggggattcggaaaaacaagcccaacatgaattacgataagctgagtagggcattacgttactactatgtgaagaatataatcaaaaaagtaaatggacagaagttcgtttacaagttcgtttcgtacccggaaatccttaatatggaccccatgacagtcggtcggatcgagggggactgcgaatccctaaatttctccgaggtctcatcgagctcaaaggatgttgagaacggcggtaaagataagccaccacaaccaggagcaaagacaagctctcgaaatgactacatacatagtggtctttacagttcatttaccctcaattccttgaactcttctaacgtgaagttgtttaagctcataaagacagaaaaccctgcagagaagcttgcagagaagaaatctccccaggagccaactcctagcgtgatcaaattcgtgactacaccttccaagaagcctcctgtggagcctgtagccgctactattagtattgggccaagtatctcaccctcctctgaggaaactattcaggctctcgaaaccctggtgtctccaaaactgcccagcctggaagccccaacgtccgcctctaacgtgatgaccgcgttcgcaaccacccccccaattagttccattcccccactgcaggaacctcccaggaccccatccccacctctaagcagccacccagacatagatactgatattgactcagtggccagtcagcccatggagctgccagaaaacctgagcttagagcccaaagaccaggattctgtgctgctggagaaggacaaggttaacaattccagccgatctaaaaaacccaaggggttagaactggctccgaccctggttataacatccagtgacccctcccctctgggaatcctatcccccagtctccctactgccagcttaactcctgcttttttcagtcaggtggcctgctccttattcatggtgtctccgttgctgagcttcatctgtcctttcaaacaaattcagaacctgtatacccaggtctgctttctcttactgcggttcgtccttgaaagattgtgcgtgaccgttatgtag

SEQ ID NO: 221856 - DNA, 1296 bp, synthetic construct
  misc_feature 1..1296: note = Description of Artificial Sequence: Synthetic coding sequence
  source 1..1296: mol_type = other DNA
atggatagtgcaatcaccttatggcagtttcttctgcaattgttgcagaaacctcaaaataaacatatgatctgctggactagcaacgacggccagtttaagctgttgcaggccgaggaggtggcacgcctttggggcatccgcaagaacaaacctaacatgaactacgataaactttccagggcactacgctattactacgtgaaaaatatcatcaaaaaggttaatgggcaaaaatttgtatacaagtttgtaagttacccagagatcctgaacatggacccgatgaccgttgggcgaatcgagggagactgcgaaagtctaaacttctctgaggttagctcctcctccaaggacgtcgaaaacggcggtaaggacaaacccccacaaccgggagcaaagacgtcatctagaaacgattacatccactctggtctctattcctcctttactcttaacagtctcaactcctcaaacgtcaagttattcaagctgattaaaacggagaaccctgcggaaaaactcgctgaaaagaaatccccccaagaaccgacccccagcgtgattaagtttgtcacaactccttcgaagaagccccctgttgagccagttgccgcaactattagcatcggcccttcaatcagtccttcaagcgaagagaccattcaagccctggagacccttgtgtcccccaagcttccctccctcgaggcgcctaccagtgctagcaacgtgatgactgctttcgccaccacaccccctatatcctcaattccgcctctgcaggagccaccgcgaacaccctccccacccttaagtagtcacccggatattgataccgatatcgatagcgtagcctcccagcccatggaattgcctgaaaatctcagccttgaaccgaaggaccaagactctgtattgttagagaaagataaggttaataacagtagtcggagcaagaaaccaaagggtttggagttagcaccgacgctggtgatcacatcatcagacccttctcccctcggcattctgagtccgtctctgcctaccgcttcactcactcccgcatttttctctcagacacccatcattcttaccccgagcccacttttgagctctatccacttctggtccacactgtcccctgtggcccctctgagtcctgctcgactgcagggtgctaacacactctttcaatttcctagtgtgctaaactctcatggcccttttacattgtctggtttagacggacccagcacccccggacctttcagcccagacttgcagaagacctag

SEQ ID NO: 221857 - DNA, 1566 bp, synthetic construct
  misc_feature 1..1566: note = Description of Artificial Sequence: Synthetic coding sequence
  source 1..1566: mol_type = other DNA
cggcctcaggatccacgacgacgctgtcgcgtgcggggtcgtggtggcaggggggcacgatcccggggtggcggtcggtgtggccgtctccgcgcacccggaggcctcggcttggcggcagccgcattttatggtagtgccgcaggggtggcagcagcagccgctcccagctcctccttccagcgtgaggaagaggctgaaggcggtgaagcacacagagtccggggaggtgaccggggaggagctccacgtgccgcttccctgattgccatggactctgctatcacactatggcaatttcttttacagctgctccagaaaccccagaataagcacatgatttgttggacttctaacgacgggcagtttaaactgctccaggctgaggaagttgccaggctttgggggatccgcaagaacaaacccaacatgaactatgacaagctgtctcgagcactccggtattactatgtgaagaatatcattaaaaaagtcaacggccaaaaattcgtttataagtttgtgagttacccagaaatcttgaacatggatcccatgaccgtgggcagaatagaaggcgactgtgagtccctgaatttcagcgaggtgtccagctcatccaaagacgttgaaaacggtgggaaggacaaacccccacaacctggtgctaagactagctcacgtaacgactacatacacagcggtttgtactcatcttttactctgaactcactgaattcctctaacgtgaaactcttcaaacttattaagacggaaaaccccgcagaaaaactcgctgagaaaaaatcaccccaggagcccaccccttctgtgattaagttcgtcactaccccatcaaaaaaacctccagtggagcccgtggccgctacaatatctattgggccttcaatcagtccttcctccgaagaaacaatccaggcactcgagacgttggtgtcgcccaaactgccctccctggaggcacctacttccgccagtaatgtcatgacagcatttgccaccactccccctattagctcaatcccaccactgcaagaaccacccaggactccaagcccccctctcagtagccaccccgacatcgacacggacattgattccgtggcctcccagccgatggagttacccgaaaatttgtccctagagcccaaggaccaagattctgtgctgttggagaaagataaggtgaataattcttcgaggtcgaagaagcccaaaggcctggagctggccccaactctcgttatcacaagcagcgacccctcacccctcggcatcctgtccccctctctcccaaccgcaagcctgacccctgccttcttttcccagacccctatcatactgaccccctcacccctgctatcatccattcacttctggtcgactctgtctccggtggcccctctctcccctgcaagattgcagggagccaacaccctatttcagtttccaagcgtgctgaacagccacggaccttttacactgtctgggctcgacggcccatcaacccctgggccattttcccccgacctccaaaagacctag

SEQ ID NO: 221858 - DNA, 807 bp, synthetic construct
  misc_feature 1..807: note = Description of Artificial Sequence: Synthetic coding sequence
  source 1..807: mol_type = other DNA
atgaacggtaccgctaatccactcctggatcgcgaggagcactgcctgcggcttggcgagtcgttcgagaagcgacccagggcctcatttcataccatacgctacgattttaagcctgcatccatagatacctcctgcgagggcgaactgcaggttggaaaaggcgacgaggttacgataaccctgccgcacatccctgggtctaccccccctatgactgtcttcaagggaaacaaacggccataccagaaggattgcgtgttaattataaatcacgataccggagagtacgtgttggaaaagctctccagctccatacaagtaaagaagactcgcgcagagggcagtagtaaaatccaagcccgaatggaacagcagcccacccgcccaccccagacttcccagcctcctcctccccctccaccaatgccattcagggctcctacaaagccccctgtgggaccaaaaacatcccccctcaaggacaatccttcgcctgaaccccagctggatgatattaagcgcgagctgcgggcagaggtcgacattatcgagcagatgagctcttcctctggctcctcatctagcgattccgaatcctcttccgggagcgacgatgacagttcatcctcagggggagaggataacggcccagcctctccaccgcagcccagccaccagcaaccttataacagtaggccggcagtggccaatggtacatccaggccccaggggagtaatcagctgatgaacaccctcagaaacgatctccagctgtcagaatcaggctccgattccgatgattag

SEQ ID NO: 221859 - DNA, 504 bp, synthetic construct
  misc_feature 1..504: note = Description of Artificial Sequence: Synthetic coding sequence
  source 1..504: mol_type = other DNA
atgaaaagtcagctgcattgtcacattagcctggccgaggggtccagcaagatccaagcccgtatggaacagcaacccacacgccctccacaaaccagccagcctccgcctccaccccctcccatgccatttcgtgcacccactaagccacctgttggcccaaaaacctcaccacttaaggataacccgtcccccgaacctcagctcgatgacatcaagcgcgagttgagagccgaggtggacatcattgaacagatgtccagctctagcggctccagctcatctgattcagaatcatcctcaggaagcgacgatgacagtagttcttccggcggagaagacaatggacctgcatctccaccccagccctcacatcagcaaccgtacaattctcggcctgcggttgcaaatggaaccagtcgcccacaggggagtaaccagctcatgaacactctcaggaatgatctgcagctaagtgaatctggatctgactctgacgattag

SEQ ID NO: 221860 - DNA, 2979 bp, synthetic construct
  misc_feature 1..2979: note = Description of Artificial Sequence: Synthetic coding sequence
  source 1..2979: mol_type = other DNA
atggcgcgagggggagccgcttgtaaatcggacgcaaggctgctgctgggaagagacgccctgcgacctgctcctgcccttcttgccccagcagttctgctcggggctgctctcggactgggcttaggcctgtggctcggctgcagagcgggacggcagcgtacccgccatcagaaagacgatacgcagaacctgctgaagaatctggagagcaacgctcagaccccctctgagaccggctctccttcacgaagacgcaaaagagaggttcagatgtctaaggataaggaggccgtcgatgagtgtgaaccccctagtaactcaaatatcaccgcgttcgcactgaaggccaaagtgatctatcccatcaaccagaagttccgcccattggcagacggctcctccaacccgtccctgcatgagaatctgaagcaggcagtgctccctcaccagcccgtggaagcctcacctagtagtagcctgggttcgctgtcccagggagaaaaggatgattgttcctcaagcagtagcgtgcacagtgccaccagcgacgataggtttttgtcaaggacgtttcttagggtcaatgccttccccgaggtcctggcttgcgagtccgttgatgttgatctgtgcatttattccctacacctgaaggatctgctgcacctggacacagccctgaggcaggaaaagcacatgatgttcattcagatatttaagatgtgtctccttgatctgctccccaagaagaagtcagacgatgaactgtaccagaagatactgagcaagcaggaaaaggatctggaagaactcgagaagggcctgcaggtaaagctcagcaatacagaaatgtctggcgcaggggactccgagtatattactctcgcagatgtggaaaagaaagagagagaatactcagagcagctgattgacaatatggaggcattctggaaacagatggccaacatccagcacttcctcgtggaccaatttaaatgtagctctagtaaagccaggcagctcatgatgacactgactgaaagaatgatcgctgcggaaggactgttgtgtgattcacaagaactgcaagcgttggatgcattagagcggactatggggagagcacacatggcgaaagtaatcgaatttttgaaactccaggttcaggaggagactcgttgcaggctggctgccatctcgcacgggctggaactgctagcaggcgaaggcaagctttcggggaggcagaaggaagagctacttacccagcagcacaaggccttttggcaggaagcggaacggtttagcagagagtttgtgcagcgagggaaggaccttgttaccgcaagcctcgcgcatcaggtggagggaaccgccaaactgaccctggctcaggaggaagagcagaggtcctttcttgcggaggctcaacctacagccgaccccgagaagtttctcgaggcattccacgaagtgctcgagagacagcggctgatgcagtgtgacttggaggaagaagagaatgtgagggcaaccgaggccgtcgtggctctctgccaggagctgtatttcagtacagtagacaccttccagaaatttgtggacgccctgtttttgcagactttacccggtatgacagggctgccacctgaggaatgcgattatctcagacaggaagtgcaggagaacgcagcctggcaactggggaagtctaatcgttttcggaggcagcaatggaagctgtttcaggaactcctcgaacaagaccaacaagtgtggatggaggaatgcgcactcagttccgtgctacagacccacctccgagaagaccatgaaggcacaatccgcggtgtgcttggcaggctggggggtctgacagaggaatcgacccggtgtgtcttgcagggacatgacttattacttcggagtgccctacggaggctggcgctgcgcggaaacgccctggctaccctgactcagatgagactcagcggtaagaagcacttgctgcaggaacttagagagcaacgtgcactggagcaagggtcatcccagtgcctcgatgagcatcaatggcaactccttagggctctggaagccagagtcctggaagaggcaagtcggttagaggaagaggctcagcagacccggttacagctccaacagcggctgctggccgaggcccaggaagtgggtcaattactgcagcagcacatggaatgcgctattggtcaggctctgctggtgcacgcacgaaatgctgcaactaagtctcgagcaaaggacagggacgacttcaaacgcactttaatggaggccgcagtggagtcagtgtatgtcactagcgccggtgtgtccaggctggtgcaagcgtattatcaacagatcggcaggatcatggaagaccacgaagaacggaagctccagcatttgaaaacattgcaaggggagaggatggagaattataaactgaggaagaaacaggaactgtctaatccctcctcaggcagccggacagctggcggagcacatgagacatcacaagccgtgcaccagagaatgcttagccagcagaagagattcctggcccaatttccggtgcaccagcagatgagactccacgctcagcagcagcaagccggagtaatggatcttctcgaggcacagttagagacccagttacaggaggccgaacagaacttcatatccgagctggcagcattggccagagtgcctctggctgagtctaagctactgcccgctaaaaggggcctgctggaaaaaccgctgcgtaccaaaaggaagaagccgttaccccaggagcgaggcgaccttggggtgcctaataatgaagatctcgcgagcggagaccagacctccggatcgctgtcctctaagcggttgagccaacaggagtcagaagcgggtgattccggcaactccaagaagatgcttaagagacgcagcaacctctag

SEQ ID NO: 221861 - DNA, 2979 bp, synthetic construct
  misc_feature 1..2979: note = Description of Artificial Sequence: Synthetic coding sequence
  source 1..2979: mol_type = other DNA
atggccagaggaggcgctgcttgtaaaagcgacgccaggctgctgctcgggcgagatgccttgaggcccgcacccgctctacttgctccagctgtgctgctaggagctgctctcggcctcgggctcggcctttggcttggctgtcgggctggtcgacagcgcacgaggcaccagaaggacgatacacagaatttgctcaagaacctggagagcaatgcccagacccccagtgaaactggaagcccctcccgacgccgtaaaagggaagtccagatgtccaaggacaaggaggccgttgacgagtgcgagcctccctcgaactccaacattaccgccttcgcattaaaagccaaagtcatttatccaattaatcaaaaattccggccattagctgatggctcttctaatcccagcctgcacgagaatttgaaacaggctgtgctgcctcaccagccggtggaagcttctccgtcgagctcactgggctctctcagccagggggagaaggacgattgctctagctcctcctccgtgcattcagcgacatccgacgaccgtttccttagcagaactttcttgcgcgtcaatgcattccccgaggttttagcgtgtgaatccgttgatgtggacctttgcatttatagcctgcatttgaaggacctgctacatctggatactgccttacgccaggaaaaacacatgatgttcatccagatcttcaaaatgtgcctcctggatcttctgcccaagaagaaatcagatgacgagctgtaccaaaagattctttcaaaacaggagaaagacctggaagaactcgagaaaggcctccaggttaaactgtctaataccgaaatgtcaggtgccggagacagtgagtacatcaccttagcagatgtagaaaaaaaggagcgtgagtattctgaacagctgattgataacatggaagccttctggaaacagatggcgaacatccagcactttcttgtcgaccagttcaaatgttcatcctccaaggccagacagctcatgatgactctgactgagcggatgattgcagccgaaggcctgctgtgcgatagccaggaattacaagctctggatgccctcgaacggaccatgggtcgcgcacacatggccaaggtgattgagtttctcaagctgcaggtacaggaagagacccgctgtcgcctagccgctatttcgcacgggcttgagctgctggctggagagggcaagttgagcggcaggcagaaagaggagctgctgacgcagcaacacaaggccttctggcaggaagccgagcgcttttccagagaattcgtgcagcgaggcaaggacctggtgacagcgtcattggctcaccaggtggagggcaccgctaagctaaccttggcacaagaggaagagcagagatcgttcttggcggaagctcagcccaccgctgaccctgagaagttcctggaagcatttcatgaagttctcgagcgtcaaagactgatgcagtgtgatttagaggaagaggagaacgtcagggcaaccgaggcagtggtggccctttgtcaggaactatatttctcaaccgtggataccttccagaagtttgtggacgccctgtttcttcaaactctgccagggatgactggcctgcctcctgaggagtgtgattatctccgacaggaagttcaggagaacgccgcatggcagctcggaaaatctaaccgattccgcaggcagcagtggaagctctttcaagaacttctcgaacaggatcaacaggtgtggatggaagaatgtgcactgtcgtcagttctgcaaacccatctgcgtgaagatcacgagggcacaatccggggagtgcttggtcggctaggaggtcttacggaagaatccacccgttgcgtactgcaggggcacgacctgctgctgcggagcgcactgcgaagattggcactgcggggaaatgctttagccacactcacacagatgagattgtcgggcaaaaagcatctgctgcaggagctgcgggaacaacgcgcacttgaacagggttcgtctcagtgcctcgatgaacaccaatggcagctcttgagagcgctggaggcgagagtgttagaagaagccagcagactggaagaggaagcgcagcaaacaagactacagttgcagcagcgcttgttagcagaggctcaggaggttggccagttacttcagcagcacatggaatgcgccattggccaagctctcctggtgcacgctagaaacgctgccacaaagagcagggccaaggatcgcgatgatttcaaaagaaccctgatggaagcagctgtggaaagcgtgtatgtaacgtctgccggtgtgtcaaggctagtgcaggcatattatcagcagatcggtcggattatggaagaccacgaagaaagaaaactacagcatctgaaaactttgcagggagaaaggatggaaaactataagcttaggaagaagcaagagctgagcaatccttctagtggctcccgtaccgccggtggcgctcatgagacgtcacaggcagtccaccagcgcatgctctcccagcaaaaacggtttctcgctcagttccctgtccaccagcagatgaggctgcacgcgcaacagcaacaagctggagtcatggatcttctagaagcgcagctcgaaacacagctccaggaggccgagcagaatttcatttccgagctagcagcccttgcacgtgtacccttagctgagtccaaactgctgccggctaagaggggcttgctggagaaacccctcagaaccaagagaaaaaagcccctgccccaggagcgtggcgatctcggcgttcccaacaatgaggatctagccagtggcgaccagacaagcgggagtttgtcatcgaagaggctgagccagcaagagagcgaggcgggtgactccgggaacagtaagaaaatgttgaagcggcgttccaatctatag

SEQ ID NO: 221862 - DNA, 3687 bp, synthetic construct
  misc_feature 1..3687: note = Description of Artificial Sequence: Synthetic coding sequence
  source 1..3687: mol_type = other DNA
atgatttggcctaaggtcgagtgctgtcacttcaaaaccgctgtagaggctcctttgggtatgaagctggacaagaaaatggaggtgttcattcctctctctacttcagccgcatcttctggcccatgggcccactctttgtttgcatttataccaagttggcccaagaaaaacttgtttaagagggagtctcctataacccaccgcctatacggagacattagtcgcgaagtgcaaggcacatctgaaaatggtgtaatcttccagaaatgcgcactcgtgagtgggagcagtgaagctcagacagctaggatctggctgctagtcaacaacacaaagaccacgtcctctgctaacctgtccgagctccttttgctggactccatcgccggactcacaatatgggattcggtagggaacagaacctccgaggggttccaagcattctctaagaagttcctgcaggtgggggacgctttcgccgtgtcttatgcggctactctgcaggcgggtgatttagggaatggcgaatctctgaaattgcctgcgcaactgacgtttcagagctcttccagaaacagaacccaattaaaggtcttatttagcatcaccgcagaggaaaacgttaccgtccttcctcaccacggcctgcatgccgctggtttttttattgccttcttactgagtctggtgctgacctgggctgctctgttcctaatggttcgctaccagtgcctgaaaggcaatatgctgacccgccatcgcgtatggcagtatgagtctaagcttgaaccactgccgttcaccagcgccgacggagtgaatgaggacctgtcccttaacgaccagatgatcgacattctgagtagcgaggaccctggctccatgctccaagctttagaagaactggaaatcgctactctcaatcgggcagatgcagacctcgaggcgtgccggacgcagattagcaaagacatcatagcgttgctgctaaaaaatctgaccagcagtggccatttaagccctcaagtagagcgcaagatgtccgctgtcttcaagaaacagtttctgttactggaaaacgaaatccaagaagaatacgacagaaagatggtggcgcttacagccgagtgtgacttagagacccggaagaagatggaaaatcagtaccaacgtgaaatgatggccatggaggaagccgaagagctcctcaagagggccggagaacgctcagcagttgaatgttctaacctcttgcggactctgcacgggcttgagcaggaacaccttaggaaaagtttggcccttcagcaggaggaggacttcgccaaggcccacagacaactggcagtcttccagcgcaatgaattgcatagtatcttttttacacagatcaaatctgcaatctttaagggcgagctgaaaccggaagccgcaaagatgctactgcaaaactactcgaagatacaggagaacgtcgaggagctgatggacttcttccaggcaagcaaaaggtatcatctttcgaaaagattcggccaccgcgagtacttggttcagaatctgcagagctccgaaacaagggtccaggggctgctctccactgcagctgcccagcttacgcacctgatccagaagcacgagcgggctggctatctcgacgaggatcagatggagatgctgctcgaacgtgcgcagacagaagtcttcagtatcaagcagaagctggacaatgacttaaaacaggagaaaaaaaagctgcaccagaaactcattaccaagaggcgtcgcgagctgctccagaaacaccgtgagcagcggagagaacaggcttcagtcggagaggcctttcgcactgtagaggatgcaggtcaatacctacaccagaagcgctctcttatggaagagcacggggcaaccctggaagaactacaagagaggctcgaccaagctgcattagatgacctgcggacgctcacccttagtttgttcgagaaggcaacagacgaactcaggcgactccagaactctgctatgacacaagaactcctgaagcgaggagtgccctggttgttcctacagcaaatcctcgaggaacatggcaaagagatggctgccagagctgagcagttagagggcgaagaacgcgaccgcgatcaggagggagtgcaaagcgttcgtcagcgcctcaaagacgatgcaccagaggctgtcacagaagaacaggcagaacttagacgctgggagcacctgattttcatgaagttgtgtagctcagtgttcagcttgtccgaggaggagctcctgcggatgaggcaggaggtgcacggctgtttcgctcagatggataggagccttgccctgccaaagattagggccagagtgctgctgcaacagttccagacagcatggagagaggcagaatttgtgaagctggaccaggctgtggctgcacctgagctacagcagcaatcaaaagtacgcaagtctaggtccaagagcaagtctaagggggaactgctgaagaaatgtattgaagataaaatccacctttgtgaagaacaagcctcagaagacctggtcgagaaagtgaggggagaattgcttcgggaaagggtccagcggatggaggcccaggagggcggatttgctcagagcttggttgccctacagttccagaaggcctcaagggtcaccgaaacgctttctgcgtataccgcgctcttgtccatccaggatctgctgcttgaggagctgtccgcctcagaaatgctgacaaagtcggcttgcactcagatcctggagtcacactctcgtgagttgcaggagctggaaagaaagctcgaggaccagctggtccagcaggaagcagcccagcaacagcaggcactagcgagctggcagcagtgggttgccgatggccctggaatcctcaatgagccgggtgaggtggatagcgagagacaggtcagtacggttttgcaccaggccctctctaaatcacagaccctcctggagcaacaccagcagtgcttgcgggaggagcaacagaactccgtggtgctggaggacctcctggagaatatggaagctgatacattcgcaacattgtgcagccaagaactaaggctggccagttacctggcacggatggccatggtgcctggcgctacgttaaggcgcctgctgtccgtggtcctgccaacagcctcccagccccaactgttggcgctcctagacagcgcaaccgagagacacgtagaccacgcagctgagagcgatggaggagccgagcaggccgacgtgggcaggagacgcaagcaccagagttggtggcaagcgttggacgggaagctcagaggagacctgatctccagaggactggagaagatgctgtgggcacggaagagaaaacaaagcatcctgaaaaaaacatgtctgccattaagagagagaatgatctttagcgggaagggatcatggccccaccttagtctggagcccattggagagctcgcgccagtgccgatcgtaggggctgaaacaattgaccttctaaatacgggggagaaattgttcatattcaggaaccccaaggaacccgagattagcctgcatgtgcctcccaggaagaaaaagaacttcctgaacgctaagaaggccatgagggctctcggaatggattag

SEQ ID NO: 221863 - DNA, 3927 bp, synthetic construct
  misc_feature 1..3927: note = Description of Artificial Sequence: Synthetic coding sequence
  source 1..3927: mol_type = other DNA
atggacccgagcggaagccggggtagaccaacctgggtcctagctgggggactcctggcggtggcactggcactcggaggacggggttgcctgggcgcatcgagtcggcctcggtggaggccgctcggcgctcaaccaccgagagaccctcaggtggcaccacgcagcggcccaggcctgcggatcccacctggcaggagcggagcaggccctgaatcttcaactcaggatcttccttgtatgatttggcccaaagtcgagtgttgccactttaagacagctgttgaggcccctttgggtatgaagcttgacaaaaagatggaggtgttcatccctctttccacaagtgcggctagctccggaccctgggcccattcattgttcgcatttatccccagttggccaaagaagaatctatttaagagggaatcccccatcacccaccgcctgtatggtgacatttctcgtgaagtacagggaacctctgagaatggcgtcatttttcagaagtgcgcactcgtctctggtagcagcgaggcccaaacggcaaggatttggttgctggtgaacaacactaagacgacgtcaagcgccaaccttagtgagctgctcctgctggattccatcgcaggtcttaccatttgggattcagtaggcaatcgcacgtctgaagggttccaggccttcagcaaaaagtttctgcaagtgggggatgcttttgcagtctcatacgccgcaactctacaggcaggcgatttgggaaacggagagtcattaaagctgccagcccagctgaccttccaaagctcttcccggaaccggacccagttgaaagtgttgttcagcataaccgctgaagagaacgtcacggtgcttccccaccatgggcttcacgccgcagggttcttcattgcctttctgctgtccctggtgttgacctgggccgctttgtttctgatggttcggtaccagtgccttaaaggcaacatgttgacacggcatcgcgtgtggcagtatgagagtaagcttgaacccttgccctttaccagcgcagacggggtcaatgaagatttgtccctgaacgatcagatgattgacatactctcttccgaggacccgggatcaatgctccaggctctggaagagctggagatcgcaacgctcaaccgggcagacgctgaccttgaggcatgcagaacccagatttctaaagacataatcgccttgctcctcaagaacctaacttctagcggacatctaagcccccaagtggagcgaaagatgtccgccgtgttcaaaaagcagttcctgctgttggagaacgaaatacaagaggagtatgaccgtaagatggtggccctgacagcagaatgtgacctggaaacgcggaagaagatggaaaatcaataccagagagagatgatggctatggaagaggctgaggagcttttgaagcgggcaggtgaacgttcagctgtagaatgtagcaacctcctcagaacgttgcatggcctggaacaggagcatctgcggaagtccctggccttgcagcaggaggaagactttgctaaggcccaccggcagttggcagtgttccagcggaatgagcttcattcaatcttttttacccaaattaaaagcgccatttttaaaggcgagctgaaacctgaagctgctaaaatgttgttgcagaattattcaaaaatccaagaaaatgttgaagagctaatggatttctttcaggcctcaaaacggtatcatctctcaaaaagattcggccaccgggagtatttagtacagaacctgcaatcaagcgaaacccgtgtccaaggactcctgtccaccgccgcagcgcagctaacgcacctgatacagaaacacgaaagagccggataccttgacgaagaccagatggaaatgcttctcgagagggcacagaccgaagtgtttagcataaaacagaagttggataacgatttgaaacaagagaagaagaagctgcaccaaaagctgattacgaagcggagaagagagttgcttcagaagcatagagaacaacggcgagagcaggcttcagtgggggaagcgttcaggactgtagaggacgccggtcaataccttcatcagaagcgctcattgatggaagaacacggcgctacactagaagagcttcaagaacggcttgatcaagccgctctggacgatctgcgaacgctcactttgtcgctgtttgagaaagctaccgacgagctaagaaggttgcagaactctgccatgacacaggagcttctgaagcggggagtgccttggctgtttttacagcagatcctggaggagcacggcaaagagatggctgctcgcgcagaacaactagaaggagaggagcgggaccgagaccaggagggcgtgcaatctgtcagacaaaggctgaaagatgatgcaccagaagctgtgactgaggaacaggcggaactccgtcgctgggagcatctgatattcatgaaactttgcagcagcgtgttcagcctttccgaagaagagctgctgaggatgagacaggaagttcatgggtgctttgcgcaaatggaccgaagcttggccctgccaaagattagggccagagtgctattacagcagttccagactgcttggagggaagcagaattcgtgaagcttgatcaagccgtggcggctccagaactgcagcagcagtccaaggtccggaagagtagatccaaatcaaagtcaaaaggcgagttgctgaagaagtgcatagaggataaaatacatctttgtgaggaacaagcatcagaggatctggtggagaaagtgagaggggaacttctacgggaaagggttcagaggatggaggcccaggagggcggtttcgctcagtcccttgtcgcattgcagtttcagaaggcctcacgggttacagagacgctgtctgcatacaccgccctactgtccatacaagacctcctgctcgaagagctatctgcatccgagatgttgaccaagtccgcctgcacacagatcctggaaagtcactcacgcgaactacaggaacttgagaggaaattagaagaccaactggtacagcaggaagccgcacagcagcagcaggccttagcctcatggcagcaatgggtagccgatgggccaggtatactgaatgagcccggagaagttgactccgagcggcaggtctccacagtgctccaccaagcactgtccaagagccagacccttctcgagcagcaccagcaatgcctgagagaggagcagcagaacagcgtggtgttggaagatctgctggaaaatatggaagcagataccttcgctacattatgtagtcaggaattacgcctcgcaagctacctagctaggatggctatggtgcctggcgctaccttgagacgcctgctctccgtggttctccctactgcgtcccaacctcaattgctggccttgctggatagtgccacagagagacacgtggatcacgctgctgagtctgatggcggagccgaacaggcagacgtgggacgccgtaggaaacatcaatcatggtggcaagccctggacggcaagctcaggggggaccttattagcaggggtttggaaaaaatgctgtgggccaggaagaggaagcaatccatcttgaaaaagacatgcctgccactgcgtgagagaatgatcttcagtggaaaaggctcatggccccacctgtccttggaacccattggggagctggcacctgtccccatcgtcggtgcagaaacaattgatctgctgaacaccggcgaaaaactgtttattttcaggaatcctaaggagccagaaatttcactgcatgtgccacccaggaaaaaaaagaatttcttaaatgccaaaaaagcaatgcgtgctctgggtatggattag

SEQ ID NO: 221864 - DNA, 3741 bp, synthetic construct
  misc_feature 1..3741: note = Description of Artificial Sequence: Synthetic coding sequence
  source 1..3741: mol_type = other DNA
atggatccctctggttccagaggccgaccaacttgggttctcgccggaggccttctcgcggtggcgctggcccttgggggtcgtgggtgccttggtgccagctcaaggcccaggtggcgcccattgggagcccagcctccccgagatccccaggtggccccacggtcgggcccaggcctccggatcccccctggcagatcgggcgctgggccagaaagctccacccaggacctgccctgtatgatctggcccaaagtcgagtgctgccactttaaaaccgcggtagaagcacccctgggaatgaaactggacaaaaaaatggaagtctttattcccctttccacaagcgccgcaagctctggaccgtgggcgcattcactgttcgccttcataccttcttggcccaaaaaaaacctgttcaagcgagaatccccaattacacatcggttatacggggacatttcaagggaagtgcaggggactagcgaaaacggcgtgatctttcaaaaatgtgctctggtttctggttcctctgaagctcagactgcacggatctggctccttgtgaataacaccaagacaacatcatctgctaatctttccgagctgctgcttcttgacagtattgccggtctgacaatctgggattctgtcggcaatagaactagcgagggcttccaagctttctcaaaaaaatttttacaagttggagatgcattcgctgtgtcatacgccgcaacccttcaggccggagatcttggcaatggagagtctcttaagctccccgctcagcttacatttcagtcttcctccaggaacagaacccagctgaaggtcctatttagcataacagctgaagagaacgtgacggtgctgcctcaccacggcctccatgctgctggcttcttcatcgcattccttctttcactcgtgctcacatgggctgcactgttcctgatggtccgataccagtgtctcaaggggaacatgctgacgcgacatcgcgtgtggcagtacgagtctaagctggaaccactcccgttcacgagcgcggacggtgtgaatgaggacttgtcactgaatgatcagatgattgacattctgagttccgaggatcccggtagtatgctccaggctctggaagagttagagatcgccacactgaacagggccgacgccgacctagaggcttgccgtacccaaatttctaaagatatcatcgcgctgttactgaaaaacctgacctctagcggccatctcagccctcaagtggagcggaagatgtctgccgtgttcaagaaacagttcctgctcttggagaatgagatccaagaggagtatgataggaaaatggttgctttgaccgcagagtgtgatctagagactaggaagaaaatggagaatcagtaccaacgggaaatgatggctatggaagaggctgaagagctcctgaagcgggctggcgaacgttcggccgtcgaatgttccaatttgctgaggaccctgcacgggcttgaacaggaacacttgagaaagagcttggctctccagcaggaggaagactttgctaaggcacaccgtcaattagccgtctttcaacggaatgagctccacagcatcttttttacccagattaaaagcgctatcttcaagggggaattgaagcctgaagcggctaaaatgctgctacagaattactccaagattcaggagaacgttgaggaactgatggatttcttccaagcaagcaagcgataccacttatcaaagcgtttcgggcatcgggaatatctagtgcagaacttacagtccagtgaaacaagggtccaaggcctcttaagtaccgctgccgctcagctgacgcatctaatccagaaacatgaaagagccggttacttggatgaggaccagatggagatgctcttagagagagcgcagaccgaggtttttagtataaaacaaaaacttgacaacgacttgaaacaggagaaaaaaaagttgcatcaaaagctgattaccaaacggagacgcgagcttcttcagaaacaccgtgaacagaggcgagagcaagcatccgttggagaagcatttcgcaccgtagaagacgctggtcagtatctccatcagaaacggtcccttatggaagaacacggagcaactcttgaggagctccaggagcgcctggaccaagctgccctcgatgacctccgcactctcacattgagcctctttgagaaggctaccgacgaactgcggagattgcagaatagcgcaatgacccaggaactgttgaagaggggagtgccctggcttttcctgcaacagattctggaagaacacggtaaggagatggcagccagggccgagcagctggagggcgaagagagagatagagatcaagaaggcgtccagtccgtacgtcagcgtctgaaagacgatgctcctgaggcggtcaccgaggagcaggctgaactaaggcggtgggagcaccttattttcatgaaattgtgtagctctgtgttctctctcagtgaggaagaactgctgcgaatgcggcaggaggtccatggatgctttgctcagatggatagatctctggctctccctaagatccgcgcacgagtgctcttgcagcagtttcagactgcctggagagaagctgagttcgtcaagctcgaccaagccgtggcagccccagagctccagcagcaatctaaggttagaaaatccaggagtaagtccaagagtaagggcgagttgctaaagaaatgtatcgaagacaagatccacctctgtgaggagcaggcctctgaagatcttgtggagaaggtcaggggggaacttctcagagaacgggtgcagaggatggaagctcaggagggcggtttcgcccaatctttagtggctctgcagtttcaaaaagcctcacgcgtcacggaaaccctatcagcttacacggcattgttatccatccaggatctgctccttgaggagctgtccgcctcagagatgctgacaaagtccgcatgtactcagatcctggagagccatagccgagagttgcaagaattggagcggaaacttgaggatcagctcgttcagcaggaagctgctcagcagcaacaggccttagcctcctggcaacagtgggttgccgatggcccaggaattcttaacgagcctggcgaggtggactccgaacggcaggtaagtactgtcttacatcaggctctgtccaaatctcagaccctgttggaacagcaccagcaatgtctgagagaagagcagcagaactctgtggtgctagaggatctactggaaaacatggaagccgacacattcgccactctgtgctcacaggagcttcgccttgcatcctatctggcacggatggcgatggtaccaggcgctactctgcgcagactgctgagcgtcgtgttacctacagccagccagccacagcttctggccctactggacagtgccacagaacgtcacgtggatcacgcagcggaatcagatggaggcgcagagcaggcagatgtgggaaggcgtcggaaacaccagtcctggtggcaggccctcgacggcaaactccgcggagacctgatttctcggggactggagaagatgttgtgggcacgaaaacgaaaacagaggtctggcaatcaagaaagcttttggcagtacctagttgggacccccgagatcggccttattgagtggatgtcggagaagtag

SEQ ID NO: 221865 - DNA, 882 bp, synthetic construct
  misc_feature 1..882: note = Description of Artificial Sequence: Synthetic coding sequence
  source 1..882: mol_type = other DNA
atgtttattagtttatgggagttcttttatggtcatttcttccgcttctggatgaaatggctgctgagacagatgaccggcaaatgtgaactacagcggattttcgatacctacgtaggcgcacagcgcacacatcggatcgagaatagtctcacatactctaaaaataaagtgttgcagaaagcgacccacgttgtgcagtctgaagtggataagtacgtggacgatattatgaaagagaagaacattaaccccgaaaaggacgcttcattcaaaatatgtatgaaaatgtgcctgctccaaatcaccgggtacaaacagctttacctcgatgtggagtccgttaggaaacgaccgtacgattctgataaccttcagcatgaggagcttcttatgaaactatggaatctgctgatgcctactaagaaattgaacgctcgtataagtaagcagtgggcagaaatcggctttcagggggacgatcccaagaccgactttagagggatgggcatactcgggctgattaatctggtgtacttctcggaaaactatacgagtgaggcgcaccagatattatctcgctcaaatcatccaaaactgggttattcctatgcaattgtagggataaacttgactgaaatggcctattccctcctaaagagtgaggcactcaaatttcacctctataacctggtgcccggtatccctaccatggaacacttccaccagttctactgttatttagtgtacgagtttgacaagttttggttcgaggaagaaccagaatctataatgtactttaatctgtatcgggagaagttccatgagaaaatcaaaggtctgttgctggactgcaatgtggcgctgacactgaaagtgtag

SEQ ID NO: 221866 - DNA, 507 bp, synthetic construct
  misc_feature 1..507: note = Description of Artificial Sequence: Synthetic coding sequence
  source 1..507: mol_type = other DNA
atgtttatctctctgtgggagtttttttacggccacttcttccggttctggatgaagtggcttcttcgacagatgaccgggaagtgcgagctccaacgcattttcgacacctatgttggggcacaaagaactcatagaattgagaacagtctaacctattccaagaacaaggtactccagaaagccacacatgttgttcagtcagaggtggataagtatgttgatgatatcatgaaggagaagaatattaaccccgagaaggacgccagctttaagatctgtatgaagatgtgcttactccaaataacaggctataagcagctatacctggatgtggaatctgttaggaagcgtccatatgactctgataatctgcaacacgaggaacttctgatgaaattatggaacctgctcatgcccaccaaaaagctgaatgcccgtatcagtaagcagtgggcagaaattggcttccagggagatgatcccaagacagactttagaggctag

SEQ ID NO: 221867 - DNA, 108 bp, synthetic construct
  misc_feature 1..108: note = Description of Artificial Sequence: Synthetic coding sequence
  source 1..108: mol_type = other DNA
atgttcattagtctgtgggagttcttctacgggcacttctttcggttttggatgaagtggctcttgcggcaaatgacagggaaatgcgagctccagcggatcttctag

SEQ ID NO: 221868 - DNA, 1866 bp, synthetic construct
  misc_feature 1..1866: note = Description of Artificial Sequence: Synthetic coding sequence
  source 1..1866: mol_type = other DNA
atggcggcactgaaggaggatagatcgtatggcttatcatgtggcagggtgtctgacggctctaaggtgtcagtgttccacgttaagctcactgactccgcgctgagagcatttgaatcctatcgggctcgacaggactccgtgagccttcgaccttccatccgtttccagggctctcagggacacatttccatcccacaacccgattgtccagccgaagccagaaccttctcgttctacttgtcaaacatcggacgtgacaaccctcagggcagctttgattgcattcagcagtatgtgagctctcatggcgaggtgcatttagactgtctcgggagcatccaggataaaatcaccgtttgcgctactgacgatagctatcaaaaggccaggcagtccatggcacaagccgaggaagagacaaggtctcgcagcgctattgtgattaaggccggtggtcgctacctcggtaagaaggtgcagtttcggaaaccggcacctggcgcaactgacgcagtgccatcacgcaaaagagcaacaccaatcaacttggccagcgctataaggaagtccggggcttcggctgtgagcggaggctccggggtgtctcagaggcctttccgagatcgcgtcctccacttgctggcccttagaccatataggaaggcagaactgctgctcaggctgcagaaggatggcctgactcaggccgacaaggatgccttggatgggctcctccagcaagtggccaacatgtctgctaaagacggtacttgtaccctgcaggactgcatgtataaagatgtgcagaaagattggccagggtattctgagggcgaccaacaactgttgaaacgagttctagtccgtaagctgtgtcagccacagagcactggcagccttttgggcgaccctgcagctagcagcccacctggagagagagggaggagtgctagccctccacagaagaggctgcaaccacccgatttcattgaccccttggccaacaagaaaccaagaatctcacattttactcaacgagcacagccggcagtcaacggcaagttgggggtgcccaacggaagagaagcccttcttcccactccaggccctcctgcatccactgatactctttcctcatcaacgcacctaccccctcgcctcgaacctccacgcgctcatgatccgttggcggacgtctctaacgacttgggacatagtggcagggactgtgaacatggtgaggctgctgcaccagccccaacagttcgcctaggactccctttgcttaccgactgcgcacaaccttcaaggccccacggctcaccctccagatctaaaccaaagaaaaaatcgaaaaagcacaaggacaaagagcgggctgctgaggacaagcccagggcgcagctgcccgactgcgctcccgcaacacatgctactcctggggctcctgctgatacacccggtctgaacggcacctgctccgtgtcgagtgtcccaaccagtaccagcgagacccccgactatctcctcaaatacgcagctattagcagttccgagcagcgacagtcctacaaaaacgactttaatgctgaatacagcgaatacagggatctacatgctaggattgaacgcattaccagacgatttacgcagctcgacgcacagctgcgacagctttcacaagggtcggaggagtacgagacaactagagggcagatcttacaagaatatagaaagatcaagaagacgaacaccaactattcacaagaaaaacataggtgtgaatacctccatagtaaacttgctcacattaaaagactgatagccgagtacgatcagcgacaactgcaggcgtggccgtag

SEQ ID NO: 221869 - DNA, 90 bp, synthetic construct
  misc_feature 1..90: note = Description of Artificial Sequence: Synthetic coding sequence
  source 1..90: mol_type = other DNA
atacatcggctggttgttgccttccaagatagcgtgtccctgaggccatctatccggttccaggggagtcaaggcgagatgagcctgtag

SEQ ID NO: 221870 - DNA, 1194 bp, synthetic construct
  misc_feature 1..1194: note = Description of Artificial Sequence: Synthetic coding sequence
  source 1..1194: mol_type = other DNA
atggaggagttacaggaacctctccgaggccagctgcgcctgtgcttcacccaagcagcacggacatctctgctgctgttgcgcttgaacgacgcggcactgcgtgcgcttcaagaatgtcagcggcagcaagtgaggcccgttatcgcgttccagggccacaggggctatctcaggttgcctggccctgggtggagctgcttattttcatttatcgtgagtcaatgctgtcaggagggggctggcggaagcctggacttggtttgccagcgcttcctccgaagcggtcctaacagtctgcattgtctcggttcactccgggagcgcctaatcatctgggcggcaatggactcgatccccgctccgtcgagcgttcagggacacaacctgacagaggatgccagacatccggagagctggcagaataccggcggatatagcgaaggcgacgccgtgagccagccacaaatggcactggaggaagtgtcagtgagcgacccactggcatctaaccaagggcagtccctgcccggttcatctcgagaacatatggcccagtgggaggttaggagtcagacgcacgttcccaatagggagcccgtacaggccctgccttcttccgcatcgcgaaagagacttgacaagaaacgatccgtcccggtggcaaccgtggagctggaggaaaagagatttcgaaccttgcctttggtgccctctcctttgcagggcttgaccaatcaagaccttcaggaaggtgaggactgggagcaggaggatgaggatatggatccccgactggagcactcctcatcagtacaagaggatagcgagtccccatcccctgaagacatcccagattatctgcttcagtatcgcgctattcatagtgccgagcagcagcacgcatacgaacaagattttgagacagattacgccgagtataggatactgcacgctagggtaggcacagcctctcaacgcttcatagaactgggcgcagaaatcaagagggtgcgacggggtacaccggaatacaaagtgctcgaggataaaattatccaggagtataagaagttccggaagcagtaccctagctatagagaagaaaaacggagatgtgagtacctccatcaaaagctaagtcatattaagggtctgatcctcgaattcgaggagaagaaccggggatcttag

SEQ ID NO: 221871 - DNA, 2889 bp, synthetic construct
  misc_feature 1..2889: note = Description of Artificial Sequence: Synthetic coding sequence
  source 1..2889: mol_type = other DNA
atggacaccgatctgtatgacgagttcggaaactacattggcccagaacttgactctgatgaggatgatgatgagctcggccgagaaacaaaagacctggatgaaatggacgacgatgacgacgacgacgatgtgggagatcatgacgatgatcacccgggaatggaggtcgttctgcatgaggtatacggtcccgaggtagaaacaattgtgcaagaggaagatactcagcccctcacagaacccatcatcaagcctgtaaagacaaagaagtttaccttaatggagcaaacactgccagttacagtatatgaaatggactttctggctgacctgatggataatagcgagctcatccggaacgtgactttgtgcggtcatctccaccatggaaaaacttgctttgtggactgcttaattgaacagacccacccagaaatcaggaaaaggtatgaccaggacctttgctataccgatatcttgttcacagagcaagagcggggagtcgggattaagtctaccccagtgactgtggtactgccggacacaaagggcaaaagttatttgtttaacatcatggatacacctggtcacgttaactttagcgatgaagttacagctgggctgagaatttccgacggagtggttttgttcatcgacgctgccgagggcgtaatgctgaacacagagaggctcatcaaacacgccgtgcaggaacgccttgccgtcacagtctgcataaacaagattgacaggttgatcctcgaactcaagctgcctcctactgatgcgtattacaagcttcgtcacattgtagacgaggttaacgggctcatttccatgtacagtaccgatgagaaccttattctctccccactactggggaacgtttgtttctctagctcccagtatagcatctgcttcactctcggaagcttcgccaagatttatgccgacaccttcggggatataaactaccaggaatttgccaagaggctgtggggcgacatttatttcaaccctaagactcggaaattcaccaaaaaagccccaacatcctcaagccagcgatcctttgtggagtttatactagaaccgctctacaagattttagcccaggtagtgggggatgtggatacttcactccctcgcaccctggatgaattgggcattcatctgacaaaggaggaactgaagttgaatattaggcctctcctgcgtcttgtgtgtaaaaaatttttcggcgagttcacaggcttcgtggacatgtgtgtacaacacattccaagtcccaaggtaggagccaaaccaaagatcgagcacacatataccggcggagtggattccgatcttggcgaggcgatgtcagattgtgatcccgacgggcctctgatgtgtcacaccacgaagatgtatagtaccgacgacggagtgcagtttcatgcatttgggagggtcctgagcggcacaattcacgccggacagccggttaaagtgctcggtgaaaattatactttggaggatgaagaagactctcagatctgtacagtgggcagactctggatatcagtggccagataccatatagaagtgaaccgcgtcccggctggaaattgggtcttaattgaaggcgttgaccagcccattgtaaagacggctacaattactgagccacgaggcaatgaggaggctcaaatcttcaggccactaaagtttaacacgacgtctgtgattaagatcgccgttgagccggtgaaccctagtgaactacccaaaatgctggacggccttcgaaaagttaataaatcttatccctcactgactacaaaggtagaagagagtggcgaacacgtgattctgggaacgggtgagctatatttggactgcgtaatgcacgacttgaggaagatgtattccgaaattgatattaaggtggctgaccctgtcgtgactttttgcgaaacagtagtggagaccagtagcctcaaatgctttgccgagactccgaataagaaaaacaagatcacaatgattgctgagccactggagaagggtctggccgaggatatagaaaatgaagttgtccagataacctggaaccgcaaaaagctgggtgaattcttccagacgaaatacgactgggatctgctcgcagctagatccatttgggcgttcggcccagatgccaccggaccaaatattctggtagacgatacactcccatcagaggtcgataaggcattactgggatcagttaaggacagtatagtgcagggctttcaatggggcaccagagaagggcctctgtgtgatgagctcattcgaaacgtgaagttcaagattctcgatgcggtcgtagctcaagaaccccttcacagaggtggaggtcagataattccaaccgcccgacgcgtggtgtacagtgcatttctgatggctacacctagattgatggaaccctactacttcgtcgaggtccaggcacctgccgactgtgtgagtgccgtctacacagtgctggcccgacgcaggggtcacgtaactcaggatgcgcctattccagggtctcccctgtataccatcaaggcatttatccccgcaatcgatagctttggtttcgagacggacctgcggactcacacccaaggtcaggctttctctctgtcagtcttccaccattggcaaatcgtccccggtgaccccctggataaaagcatcgtcattcgccctcttgagccacaacctgccccacatctcgctagggagtttatgatcaaaaccagaagacgcaaagggctgagtgaggacgttagtatttcaaagttcttcgatgacccaatgctgctcgaactggcaaaacaggacgtggtgcttaactaccccatgtag

SEQ ID NO: 221872 - DNA, 2814 bp, synthetic construct
  misc_feature 1..2814: note = Description of Artificial Sequence: Synthetic coding sequence
  source 1..2814: mol_type = other DNA
atggatgatgacgacgacgacgacgatgtcggggaccatgatgatgatcacccgggtatggaggtggtgttacacgaggataagaagtactatccgactgccgaagaggtgtacggccctgaagtcgaaacgatagtgcaggaggaggacacgcaaccgctgacggagccaattatcaaacccgtgaagaccaagaagttcactctgatggagcaaactcttccagtgacagtgtatgagatggatttcctggctgatctcatggataattctgaattaatccggaacgtgacattatgcggacatctccatcacggaaaaacctgcttcgtggattgtttaatcgagcagactcacccggaaattcgaaagcggtatgatcaggacctgtgctacacagatatcctatttaccgagcaagagaggggggtagggattaagtccaccccagtgaccgtggtcttaccagacacgaagggcaaaagctaccttttcaatatcatggatactccaggacacgtcaacttctcggatgaagttaccgcagggctccgtatctccgatggcgtagtgctgtttattgatgccgctgaaggggtcatgctgaacacagagcgcctcatcaagcatgccgtgcaggaaagactcgccgttactgtttgcatcaacaagatcgacagactgatcctggaacttaaattgccaccgacagatgcctattataaactgcggcacatagtggacgaggtgaacggcctgattagcatgtactctaccgacgaaaacttgattttgtcacctctcctcggtaacgtatgcttttcaagttctcagtattcgatctgtttcactctcggctccttcgccaaaatctatgccgacacattcggcgacataaattaccaggagttcgccaagcgtctgtggggtgatatatactttaatccaaaaacccgcaaattcacaaagaaagcacccacaagctcatcccaacgcagttttgttgaatttatccttgaaccactgtataaaatacttgcccaggtggttggagatgtcgacacatccctgccgaggacactggacgaacttggaatacacctgacaaaggaagagctgaagctgaacattaggcccctcctgcggcttgtctgtaaaaaatttttcggtgagtttactggcttcgtagatatgtgcgtccaacacatcccaagccccaaagtgggagccaaacctaagatcgaacacacctacacaggtggggttgatagtgatctgggtgaagctatgtcagattgcgaccctgacggaccattgatgtgtcatacaacgaagatgtacagcaccgatgatggagtccagttccacgcatttggacgtgtcctgtcaggcacaatccacgctggtcaacctgtcaaagttttgggcgaaaattatactttagaggatgaggaagacagccaaatctgtactgtcggaagactatggatctctgttgctagatatcacatcgaggtgaaccgtgtgcctgcaggaaattgggtgctgattgagggtgtggatcagcccatcgtcaaaaccgcaaccatcacagagccacggggaaacgaagaggcccagatttttcgacctcttaagttcaatacaacaagcgtgatcaagatcgccgtggagccggtgaatcctagtgaactgcctaagatgttagacgggctaaggaaggtaaataaaagctacccgtccctgacaaccaaggtggaggaaagtggggaacatgtcatcctgggcaccggggagctctacctggattgcgttatgcacgacctaagaaagatgtattcagagattgacattaaggttgcagatcccgttgtaaccttttgcgagaccgtcgtggaaacgtcctctttgaagtgcttcgcagaaactccaaataaaaagaacaaaattacgatgatcgccgagcccctggagaaaggtctggccgaggacatcgaaaacgaagtcgtgcaaatcacttggaaccgcaagaagcttggagagttcttccagacaaagtatgactgggacctgctggccgctaggtccatctgggcgttcggtcctgacgccaccggccctaacattctcgtggacgatacgctcccgagcgaggtagacaaggccctgttggggtccgttaaagactctattgtacaaggcttccagtggggaacgcgggaaggtcccctgtgcgacgagctcatccgcaacgtgaagtttaaaattctggatgccgtcgttgcccaagaaccactgcaccgcggtggaggccaaattattccaacagccagaagagtggtgtattctgcctttctcatggctacacccagacttatggagccatactatttcgtggaggtccaagctcccgcagattgtgtgagtgctgtgtataccgtgcttgctagacgaaggggccacgtaacacaggatgccccaattcccggaagcccactttatactattaaggcttttataccggctattgactcatttgggttcgagacagacctccgaacacacacacaggggcaggcctttagcctctccgtgttccatcattggcagatcgtgcctggcgatccactcgacaagtccattgtgatccggccattggagccacagcctgccccacatctggccagagaattcatgattaaaactcgaagaaggaaaggtctgtccgaggatgtgagcattagtaagttcttcgacgacccgatgctcctggaactggccaagcaggacgtggtgctcaattaccccatgtag

SEQ ID NO: 221873 - DNA, 2919 bp, synthetic construct
  misc_feature 1..2919: note = Description of Artificial Sequence: Synthetic coding sequence
  source 1..2919: mol_type = other DNA
atggacaccgacctttacgacgagttcgggaattacatcggccctgagctggatagcgatgaagatgatgacgaacttggcagagaaaccaaagatctcgacgaaatggacgacgatgacgatgacgacgacgttggtgatcacgatgacgaccatccaggaatggaggtagttctccatgaggataaaaaatactacccgacggccgaggaagtctacggtccggaggtcgaaaccatcgtgcaagaggaagacacacaaccactgacagaacccatcataaagcctgtaaagaccaagaagttcactttaatggaacagacactgccagtcacagtgtatgagatggattttctagccgatctgatggacaattctgagctcattcggaacgtgacactgtgcgggcacctgcatcacggcaagacttgcttcgttgattgtctgatcgaacagactcacccagagatccgcaagcgctacgatcaagatctgtgttacactgacatcttgtttacagagcaagagaggggcgttgggatcaagtcaactcctgtgacagtggtgctcccggacactaaaggcaagagttatttatttaatattatggatacccctggccatgtcaattttagcgacgaggtgaccgccggattgcggatctcagatggagtggtcctcttcatcgacgctgctgagggcgtgatgctgaacacggagaggctgattaaacatgcagtccaggagagactcgcagtgactgtctgtatcaacaagatagatcgcctgattcttgagttgaagttaccaccaacggatgcttactataagctaagacacatagtggacgaagtcaatggactcattagcatgtatagtactgacgagaatctgattctgtcccctcttctggggaatgtctgtttcagctcctcacaatacagcatttgctttacactggggagctttgcaaagatttatgccgacactttcggcgacataaactaccaggaattcgctaaacgtctgtggggtgatatatattttaaccccaaaacacggaagttcactaagaaggcacctacctcaagttctcagcgttcctttgtggaatttattcttgagccgttgtataaaatccttgcacaggttgtcggggatgtggatacttctctcccccgaacactggacgaactgggaattcacctgaccaaggaggagttaaaacttaatatccgaccactccttcggcttgtgtgtaagaaattctttggcgaatttaccgggtttgtcgacatgtgtgtccagcacatcccatcccccaaggtcggggctaagcccaagatcgaacatacttacacaggcggagtcgacagtgatctcggtgaggcgatgtcagattgtgatccggacgggccactaatgtgccataccacaaagatgtactctacagacgatggagtgcagttccatgccttcggtcgggtgctctctggcacaattcacgcgggtcaacccgtgaaagtgttgggcgaaaattacacactagaggatgaagaagattcgcaaatatgcacagtgggcagactctggataagcgttgccagataccacatagaagtgaaccgcgtgccagccggtaattgggtgttgatagagggcgtggaccagcctatcgtaaagactgcaacaataaccgaaccccgtggcaacgaggaagcacagatcttcagaccgttgaagtttaatacgacttcagtgataaaaatcgcagtggaacctgtaaacccctccgaactgcccaaaatgttggatggcttgagaaaggtgaataaaagttatccgagcttaactacaaaggtggaggaaagcggggaacacgttattttaggcactggagagctatacctagactgtgtcatgcatgacttgcgtaagatgtactcggagatcgacatcaaagtggcagacccagttgttactttctgtgaaacagtggttgagacatcctcgctaaagtgttttgccgagacacctaataagaagaataagatcaccatgattgccgagcccctggagaaggggctggccgaggacatcgagaacgaggtagtgcagatcacttggaataggaagaagctcggggaattcttccagaccaagtatgattgggacctactcgcagcaaggagcatctgggcattcggacctgatgctacaggtcctaatattcttgtcgacgacacactgccctcagaagtggataaggcactgctggggagtgttaaggatagcatagttcagggctttcaatggggcacccgggaagggccactctgtgacgagctcatacgcaacgtaaagttcaaaatcctcgatgccgtagtggcgcaagaaccgctgcatcgcggagggggacagatcataccaactgcccgtagggtggtgtacagcgctttcttaatggccaccccaagactgatggaaccctattacttcgtagaggtccaggcccctgccgactgcgtctcggccgtctacaccgtgttggctcgccgtaggggtcacgtcactcaggacgccccaattcccggttctcccttgtacactataaaagcatttatcccagctattgactcctttgggtttgagactgacctccggactcatactcagggtcaggctttctccttatctgtattccaccattggcagatcgtacctggagatcccctcgacaaatcaatagtcatacggccactggagcctcaacctgccccacacctggcccgtgaatttatgattaagacccgcaggcggaaaggtctgagcgaggatgtgtcgattagcaagttttttgacgatcccatgctcttagaactggctaagcaggatgttgtcctaaattacccaatgtag

SEQ ID NO: 221874 - DNA, 1923 bp, synthetic construct
  misc_feature 1..1923: note = Description of Artificial Sequence: Synthetic coding sequence
  source 1..1923: mol_type = other DNA
atggcagctggcggtacaggcggtcttcgcgaagaacagcggtatggcctgagctgcggtcgattgggccaggataacattaccgtactgcacgtaaagctcactgaaacagccatccgcgcactcgaaacttatcagtcgcataaaaacttgatcccatttcgaccctccatacaatttcaggggcttcatggcctcgtcaaaattccaaagaacgatcctcttaacgaggttcataactttaatttctatctgagcaacgtgggcaaggacaacccccaggggtcattcgattgtattcagcagacattcagctctagcggagcctctcaacttaactgtttgggctttatccaggataagatcacagtgtgtgccactaacgatagctatcagatgacacgggaacggatgacccaggctgaggaggagagccgcaaccgctccacaaaagtcattaaaccagggggtccttacgtcgggaagcgcgtgcaaatcaggaaagctccacaagcggtatccgatacggtgcctgaacggaagagatccacacccatgaatcccgctaacacgattcgaaagacccattcttcatccaccataagtcagcggccatatcgagatcgcgtgatccacctcctcgctctgaaggcatacaagaagccagagctgctcgctcgcctgcagaaggatggagtcaaccagaaagacaagaattccctgggcgctattctgcagcaggtggccaacctgaatagtaaggatctgtcgtacaccctaaaagattatgtctttaaggaactgcagcgcgattggccgggatatagcgagattgataggaggtctctggagtccgtgctgtcccgtaaactcaatcctagccagaacgccgcaggcaccagccgcagtgaatcaccagtctgtagtagcagagacgccgtttccagtccacagaaaaggttgctcgactccgagtttatcgaccctctgatgaataagaaggccagaatatcccatctgacaaacagggtaccacccaccctcaatgggcatcttaacccaacctctgagaaatcagcggctggccttcccttgccacctgcagccgctgccatccccacacccccacccttaccaagcacatatctgccgatttctcacccgccacagattgtgaactcaaattctaactctccctctaccccggaggggaggggaacccaagacttgcccgtggattctttcagccagaacgatagtatttatgaagaccagcaagacaaatataccagcaggaccagccttgaaacattgcccccaggaagtgtgttgctcaaatgccctaagcccatggaggagaaccacagtatgagccacaaaaagtcaaagaaaaagtccaagaaacacaaggaaaaagatcagatcaaaaagcacgacatcgagacaattgaggagaaggaagaggatctgaagcgagaggaagagatcgccaaacttaacaacagtagtcccaattcaagtggaggcgtgaaggaagactgcacggcaagtatggaaccatctgctattgagctcccagactacctcataaagtatattgccatcgtttcgtatgagcagagacagaattataaggacgacttcaatgcggaatacgacgagtaccgagctttgcacgcaaggatggagaccgtcgccaggcgctttatcaaactggatgcccagcgtaaaagattgagtccaggttccaaagagtaccagaatgtgcacgaggaagttctgcaggaataccaaaagataaagcagagtagtcccaactatcacgaagaaaaatatcgctgcgagtacctccacaataaactggcccatattaaacgcttaattggtgaatttgaccagcagcaagctgagagttggtcctag

SEQ ID NO: 221875 - DNA, 1173 bp, synthetic construct
  misc_feature 1..1173: note = Description of Artificial Sequence: Synthetic coding sequence
  source 1..1173: mol_type = other DNA
atggccgctggtgggaccggaggcttgcgagaggaacaaagatatggactctcctgcggtaggctggggcaggacaatattacagtgctgcatgtgaaactaacagaaactgccattagagcattggagacttaccagtctcataagaatctcataccctttcgcccatcaatccagtttcaagggctgcacggtcttgttaagatccctaagaacgacccgttaaatgaggtccataattttaacttctatttgtctaacgttggaaaagacaatccccaggggtccttcgattgcattcaacagacgttcagcagttctggtgcctcgcagttaaactgcttgggtttcattcaggataagatcacagtgtgcgcgactaacgattcatatcagatgacaagagaaaggatgacccagattgtcaacagtaattctaattcaccatctacacccgaaggcaggggcacacaggacctgccggtcgatagcttttctcaaaatgattctatttatgaggaccagcaggataagtacactagtcggacctcacttgaaactcttccgccaggatcggtacttctcaagtgtcctaaaccgatggaggaaaaccacagtatgtcccacaagaagtccaaaaagaagagtaagaagcataaagaaaaggatcagatcaaaaaacatgacattgagacaatcgaggagaaagaggaagacctaaagcgagaagaggagatcgcaaaactcaacaatagctcccccaatagctccggtggcgtcaaggaagattgtacagcctcaatggaacctagcgcaatagagctcccagactacctgatcaaatatattgccatagtaagctatgagcaaagacagaattataaagatgattttaatgccgaatatgacgagtaccgggcattgcatgctcgtatggagactgtggccaggaggttcatcaagctagatgcccagcggaagagactgagtcccggatccaaagagtatcaaaacgtccacgaggaagtattgcaggaataccagaagattaaacagagcagccccaattaccacgaggaaaaatacaggtgtgaatacctgcataacaagctggctcacattaaacgcctgattggtgagtttgatcagcaacaggctgagtcttggtcctag

SEQ ID NO: 221876 - DNA, 1644 bp, synthetic construct
  misc_feature 1..1644: note = Description of Artificial Sequence: Synthetic coding sequence
  source 1..1644: mol_type = other DNA
atgcgccaaaagaggaagggggaccttagccctgccgagctgatgatgcttaccatcggcgacgttataaaacaactgatcgaggcccacgagcagggaaaagacattgatttaaacaaagtgaaaaccaaaactgctgcaaagtacggcctgagcgcccaaccgagattagtggacatcattgcagccgtccctccacagtacagaaaagtgcttatgcccaagctgaaggctaagcctatccggactgcatctggaattgctgtggtcgcagtcatgtgtaagccccacaggtgtccccacattagttttaccggcaacatttgcgtgtactgccccggagggccagatagcgactttgaatactccacccaatcctatacaggctacgaacctacctctatgcgtgccatacgtgccaggtatgacccgtttctgcagacccgccaccgcatcgagcagctgaaacaactcgggcatagcgttgataaggttgaattcattgtgatggggggaactttcatggctttgccagaggagtacagggactactttatccggaacttacatgacgcactgagcggacacacgtccaataatatttacgaagccgttaagtacagcgagcgctctctaacaaaatgtattggaattactattgagacaagaccagactattgcatgaagaggcaccttagtgatatgctcacttacggctgcacccgccttgagatcggagtgcagagcgtgtacgaggacgtggcaagggatactaatagaggccacacagtgaaagccgtttgcgaatcatttcacctggcaaaggacagtgggttcaaggtcgtcgctcacatgatgcctgatctgccgaacgtagggctggagcgggatatcgaacagttcactgaattctttgagaatccagcatttaggccagacggtttaaaattataccctaccctcgtaatccggggtaccggcttgtatgaactgtggaagtccggaagatataagtcctacagtccctctgatctggtcgagttagtcgcacgaatattggcattggttcccccttggactcgagtctatcgggttcagagggatattcccatgcctctggtctccagcggcgtggagcacggtaacctgcgggagctggctctggctaggatgaaggacctaggtatacaatgtcgtgacgtcagaacccgagaggttgggatccaagaaattcatcataaagtgcgaccttatcaggtggagctggtcaggagagactacgtagccaatggcggttgggaaacatttctctcctatgaagacccagatcaagatatcctcataggactactgagactcaggaagtgttccgaagagacattcaggttcgagctgggcggaggcgtgtccatcgtcagagaactgcacgtgtatggatccgtagtgccagtatcgtccagagatcccactaaattccaacaccagggtttcggcatgctattgatggaagaggcagagcgcatcgccagagaggagcatggcagcggcaaaattgccgttatttcaggcgtaggcacaaggaattactaccgcaaaatcggctacaggttacagggtccttacatggtgaagatgctgaaatag

SEQ ID NO: 221877 - DNA, 1368 bp, synthetic construct
  misc_feature 1..1368: note = Description of Artificial Sequence: Synthetic coding sequence
  source 1..1368: mol_type = other DNA
atgtgtaaacctcacaggtgtccacacatcagctttaccggaaatatttgcgtctattgtcctgggggtcccgactcggatttcgagtactctacccagtcttatactgggtatgaacccacttcaatgagggcaattcgggcaaggtatgatccattcctccagacacggcaccgcatcgagcaacttaagcagctcggccactctgtggacaaagtcgagtttatagtcatgggcggaacattcatggcactgcccgaggaatatcgcgattacttcattcgtaatctccatgacgccctctcgggccacacatccaataatatctatgaagcagttaagtactcggagaggtcattaactaagtgcatcggtatcaccattgaaacccgccctgattactgcatgaagcggcatctttccgatatgctgacctacggatgcaccagattggagatcggtgtccagtcggtgtatgaagatgtcgcccgagatacaaatagaggacataccgtcaaggcagtgtgtgagtctttccatctggcaaaagactcgggttttaaggtggtcgcacatatgatgcctgacctccctaacgtgggtctcgagagagatattgaacagttcactgaattcttcgaaaaccccgcatttcggccagacgggttaaagctgtaccccacgctggtgatccgcggaaccgggctttacgagctctggaagtctggccgatacaagagctactctccatcagacctggtcgagctggtggccaggatcctggccctcgtgcccccttggactagggtgtatagagtgcagcgcgacattccaatgcctcttgtctcctcaggcgtggagcacggaaatttgagggaactcgctcttgcaagaatgaaagacttgggcatacagtgcagggatgtgcggacaagggaggttggaattcaggaaatacaccataaagtcaggccctatcaagtggagctggtacgaagagactatgttgccaatggcggttgggaaacatttctgagctacgaagatcctgaccaggacattttgataggcttacttcgactgcgcaagtgttccgaggagacatttcgattcgagctcgggggaggagtatcaatcgtgagggaattgcacgtttacgggtccgttgtgccagtctctagtcgcgaccctactaagttccaacaccagggtttcggtatgttgctcatggaagaagctgagcggattgcgagagaagagcacgggtcgggaaagatcgctgtcatcagtggcgtggggactcgcaactactacagaaaaatcggctaccggctgcagggtccatacatggtgaaaatgcttaagtag

SEQ ID NO: 221878 - DNA, 342 bp, synthetic construct
  misc_feature 1..342: note = Description of Artificial Sequence: Synthetic coding sequence
  source 1..342: mol_type = other DNA
atgatgctgaccattggggacgtgatcaaacaattaatagaagcccacgaacaaggaaaagatatcgatctgaacaaagtgaagacaaaaacggcagccaagtatgggctgtcggcccagccaagacttgttgacattatcgccgctgtcccaccccagtaccgtaaagttctgatgccaaagctgaaggccaagcccataaggaccgcttccggaatcgcagtggttgccgtaatgtgcaagccccaccgctgtcctcacatttcttttaccggaaatatttgtgtctactgtccagggggacccgattctgactttgagtacagcacgcagtcatattag

SEQ ID NO: 221879 - DNA, 1602 bp, synthetic construct
  misc_feature 1..1602: note = Description of Artificial Sequence: Synthetic coding sequence
  source 1..1602: mol_type = other DNA
atgatgttaacaatcggcgacgtgatcaaacagcttattgaagcacatgaacaggggaaggacattgatctgaacaaagtgaagacgaagacggccgctaaatacggcctctctgctcagcccagacttgtggatattatcgcggcagttccaccccagtacaggaaggttttgatgcctaagttgaaggccaaacctatcagaaccgccagcggaattgccgtggtggcagtgatgtgcaaaccacataggtgtcctcatattagttttacaggcaatatttgcgtgtactgtccgggtggccctgatagcgatttcgagtattctacacagtcttatactggatatgagcctacatctatgcgggctataagagcacgttacgacccatttctgcagacacgtcacaggatcgaacagctcaagcaacttggacactccgtcgacaaagtggagttcatcgtgatggggggaacgtttatggctctgcctgaggagtatcgagactattttattagaaatttacacgatgccttaagcggtcacacgtctaacaatatctacgaagctgtaaagtatagtgaacgcagcctgaccaagtgtattgggatcaccattgagacaaggccagactattgcatgaaaaggcatctgagtgatatgcttacttacgggtgtacccgtctggaaatcggagtccagtccgtgtatgaagatgtggcccgagacaccaaccgcggacataccgtgaaggccgtctgtgagagtttccacttagcaaaggattcaggatttaaggtagtggcccacatgatgcctgacttgcctaatgtggggcttgagcgggatatcgagcagtttacggaattctttgagaaccccgcatttcgaccagatgggctgaaactctaccctacactggtgatccggggtacaggcctatacgaactgtggaagagcggcaggtataagtcatacagtcctagcgaccttgtcgagctggtcgcccgaatactggctttagtacctccttggactagagtgtaccgcgtgcagagggacataccgatgcccctggtaagctcaggcgttgaacacggcaatttgcgcgagctggcactggcgaggatgaaggacttaggcatacaatgtcgcgacgtgcggacacgcgaggtgggcatacaagagattcatcacaaagtcagaccgtaccaagtcgagcttgtgcgcagggattatgtggccaatgggggttgggagacgtttctgtcatatgaggacccagaccaggatatcctgataggtctattacggttaagaaaatgctctgaagagacatttaggttcgaattaggcggaggggtgagcattgtccgggagctgcacgtgtatggcagcgtcgtccctgtcagttcaagagaccccacaaaattccagcatcagggcttcggaatgttactcatggaggaggcagaacgaattgcacgtgaggaacacggcagcgggaaaatagccgtgatctccggagttggaacgaggaattactaccgcaagattggttaccgcctccaggggccttacatggtaaagatgctgaaatag

SEQ ID NO: 221880 - DNA, 576 bp, synthetic construct
  misc_feature 1..576: note = Description of Artificial Sequence: Synthetic coding sequence
  source 1..576: mol_type = other DNA
atgatgctgaccatcggcgacgtcatcaagcagctgattgaggctcatgaacaaggcaaagatatcgatttgaataaggtaaaaacaaaaactgcagccaagtacgggctttccgcccagccacggttggtggatatcattgcagctgtgcccccacagtataggaaggtgctgatgccaaaacttaaggctaagccgattcgcactgctagcgggattgccgtcgtggcggttatgtgcaagccgcacaggtgcccacatatttcttttacaggaaacatttgcgtgtattgtcctgggggaccggactctgacttcgagtattcaacacagtcctacacaggatatgagcccacgtcgatgagagccattagggccaggtacgaccctttccttcagaccagacacaggatagaacagcttaagcagcttggtcattcagtcgacaaagtggagtttatcgtcatgggaggaacattcatggcccttcctgaggaatacagggactattttatccgaaatctgcacgacgcactttccggccacactagcaataacatttatgaggccgtatag

SEQ ID NO: 221881 - DNA, 1287 bp, synthetic construct
  misc_feature 1..1287: note = Description of Artificial Sequence: Synthetic coding sequence
  source 1..1287: mol_type = other DNA
atgtctacccaccagttttacagaaaatacatgtgcccaactagcatgcgcgcaatccgggctaggtatgacccatttttgcagactagacatcggatcgagcaactgaagcagctgggccacagtgtggataaggttgaattcattgtcatgggaggcacattcatggcacttcctgaagagtatcgtgattacttcatccggaacctccacgacgcattgtccggccacaccagtaacaacatctatgaggcagttaaatattccgagcggtctctaacaaaatgcattggtataaccattgaaactaggcctgattactgcatgaagcgccatcttagtgacatgctaacgtatggctgcacaagactggagatcggcgtgcaatctgtatacgaggatgttgcgcgagataccaaccgagggcatactgtcaaagctgtgtgtgaatcatttcatcttgccaaggacagtggattcaaagtagtggcacacatgatgcctgatttgcctaacgtaggactcgaaagagacattgaacagttcaccgaattttttgagaatccagcgtttcggcctgatggattgaagctctatcctacgctggttatccgcggaacgggcctctatgaattatggaaaagcggtcggtataaatcctactctccgtctgatctggtcgagctggtggccagaatccttgccttggtcccaccttggacacgcgtttaccgtgtgcaacgggacattcccatgcctctagtcagctccggagtggagcatggaaatctgagagaattagctctggctcgaatgaaggacctgggaattcagtgtagagatgttcgcacccgggaggtcgggattcaggaaattcaccacaaagtgaggccctatcaggtggagttggttcggagagattacgtggctaatggaggctgggaaactttcttaagctacgaagatcctgaccaggatattctgatcggacttctgcgactgagaaaatgtagtgaagagacctttcgcttcgagttggggggtggtgtgagcattgtcagagagctccatgtttacggaagtgttgttccagtcagctcaagagatcccaccaagttccaacatcagggattcggcatgctgctgatggaggaagcagagcgtatcgctcgcgaagaacatggaagcggcaagattgccgtgatttctggcgtcggcacaaggaactattatcggaagataggatacaggcttcagggaccatacatggttaagatgctcaaatag

SEQ ID NO: 221882 - DNA, 1257 bp, synthetic construct
  misc_feature 1..1257: note = Description of Artificial Sequence: Synthetic coding sequence
  source 1..1257: mol_type = other DNA
atgtgcccgacctctatgagagcgattagggcccgttacgacccattcctccagacgaggcacaggattgagcagctgaaacagctgggtcattccgttgacaaagtagaatttatcgtaatgggcggaacttttatggccctgcctgaagagtacagggactatttcattagaaatctgcatgatgcattgtccgggcatactagcaacaatatttacgaggcagtgaagtattctgagcgatctctcactaagtgcatcggcatcactattgagacccggcctgattactgtatgaagcgtcatctctccgatatgttaacctatgggtgtacacgcttggagatcggggttcagagcgtttacgaggacgtggcaagggacacaaacaggggtcacaccgtaaaagcggtctgtgagtctttccacctggccaaagatagtggcttcaaggtggtcgcacacatgatgcctgaccttccgaatgtcggcttggaaagagacattgagcagttcactgagttctttgaaaaccccgctttcagacctgacggcctgaagttgtaccctaccttagtgatccggggaactggcctgtacgagttgtggaagagcggtcggtacaaatcctacagccccagtgatctggtggaactggtggcgagaattctcgcactggtgccaccctggacccgggtctaccgcgtgcagcgtgacatcccgatgccactagtgagcagtggggtagagcacgggaacctgcgcgagcttgccttagccaggatgaaagatctgggcattcagtgtcgggacgtaaggaccagggaggtggggattcaggagattcaccacaaggtgagaccttaccaggtagagcttgtgagacgggattatgtcgcaaatgggggttgggagactttcctttcatacgaggaccctgaccaggacatccttatagggctcttgagactgcgcaagtgttccgaagagacttttagattcgagctgggcggaggagtctccatagttcgagagttgcacgtctatggaagcgtagttccggtcagctcacgggaccctacaaagtttcagcaccagggcttcggaatgctacttatggaggaggccgaacggattgcgagggaggaacacggaagcggaaagattgctgttattagtggtgtaggtacaaggaattattaccgcaagattggctacaggctccagggaccctatatggttaaaatgttgaagtag

SEQ ID NO: 221883 - DNA, 1275 bp, synthetic construct
  misc_feature 1..1275: note = Description of Artificial Sequence: Synthetic coding sequence
  source 1..1275: mol_type = other DNA
atggccgctgttgcaacctgcggctcagtggccgcatcaacaggtagcgccgtcgcaaccgcttctaagtctaatgtcacgtcttttcagaggcgcggaccgagagcgtcagtgacaaacgacagtggccctcgtctggtaagcatagcgggtacaaggccatcggttaggaacggccagcttttggtttcaacaggcctgccagccctggaccaattgctcggcggtggtctcgccgtcggcacggtgctgcttattgaagaagacaagtataacatctatagccctttactgtttaagtactttcttgctgaaggcattgtcaatggacacactttacttgtagcttctgctaaagaagatcctgccaatattctacaggaattaccagccccactgctggacgataagtgtaaaaaagagtttgacgaagacgtatacaatcacaaaacccctgagagcaatatcaagatgaaaattgcttggcgatatcagctactcccaaagatggaaattggccctgtttcttccagtcgcttcggacattattacgatgcgtccaagagaatgccacaagagcttatcgaggctagcaattggcacggcttctttctgcccgaaaaaattagtagtaccctgaaagttgaaccctgctctctgaccccaggatacaccaaactccttcagttcatacaaaatataatttacgaggaaggattcgacggctctaaccctcagaagaagcagcgcaatattttgcggatcggaatacaaaacctagggtctcctctttggggcgatgatatctgctgcgcggaaaacggtggcaactcccactcccttaccaagtttctctatgtccttcgtggtctgcttaggacctccctgagcgcgtgcattatcactatgccaactcacctaatccagaataaggcgataatcgccagggttacgaccctgtccgacgtcgtggtcggcctggagtcgtttattggcagtgagcgggagacaaacccactctataaagattaccatggcctcatccatatcagacaaatcccccgactgaataatttgatttgcgacgaaagcgatgtcaaagacctcgcttttaaactgaagagaaagctgtttacaatcgagaggctgcacttaccaccagatctgtccgatactgtttctcgttccagcaaaatggacctcgccgaaagtgccaagcggttggggccaggctgtggcatgatggccggtggaaaaaagcacctcgacttttag

SEQ ID NO: 221884 - DNA, 1431 bp, synthetic construct
  misc_feature 1..1431: note = Description of Artificial Sequence: Synthetic coding sequence
  source 1..1431: mol_type = other DNA
atggctgctgtggccacatgtgggagcgtggccgctagcacaggctccgccgtggcaaccgccagcaaaagcaatgtgacttcattccagcgccgaggccctcgagcatcagtcaccaacgatagtggtccacggcttgtgtctattgccggtactcggccatctgtcaggaatgggcagctgctggtttctaccggactgccagcacttgatcaactgcttgggggagggcttgccgtcggcaccgtactgctaattgaggaagacaaatacaacatttattcaccgctcttatttaagtacttcctcgcagagggcatagtgaatggtcacacgctgctggtggcctcagctaaagaggatcctgcaaatattctccaggagctccctgcgcctctgctggacgacaagtgtaagaaggagtttgacgaagatgtctacaaccacaaaaccccggagtcaaacattaagatgaaaatcgcatggcgctatcagttacttcccaagatggaacagattggtcctgtgtcgagcagcagattcggccattattacgatgcttcaaaacgaatgccacaggaactgatcgaggccagtaattggcacggtttcttccttccagagaaaatctcttccacactgaaggtggaaccctgctcattgacacctggctataccaagctcttacagttcatccagaatattatttacgaggagggctttgacgggagcaacccccagaaaaagcagcgtaacattctgaggatcgggatacagaacctaggctcacctttatggggggacgatatttgctgcgctgagaatggagggaactctcactctttaaccaagttcctgtacgtacttaggggcctgttgcgtaccagtttatctgcctgtattatcacaatgccaactcacctaatccagaacaaagcaatcattgcacgagtgactaccctgtcggacgtggttgtcggtcttgaaagctttattgggtcggagagggagacgaacccactgtataaggattaccatggcctcattcatatccggcagattccaagacttaataatctgatctgcgatgagagtgatgttaaggacctagcctttaagctaaagcgcaagctgttcaccatcgaatgggttcaggacaactatctgcggcaggagagaaatatctatcccccagggttctcctatttgctcaaacaaaaggatagcgcttggggggagggatccttacaacactctacctttttaatgtcattccttgcaaaggccaccgctttcgccagtcgactggtgcggcattcagagcctctcaagcagaacggcagcgggagaatcaggcaggccgctggccctcgtctgtggcacgacggtaggaggcaagaggctcccggactgctcgggattccgccttag

SEQ ID NO: 221885 - DNA, 1608 bp, synthetic construct
  misc_feature 1..1608: note = Description of Artificial Sequence: Synthetic coding sequence
  source 1..1608: mol_type = other DNA
atggcagcggtggcaacctgcggtagcgtggccgcaagcaccggaagcgccgtcgctacagcgtcgaaatccaacgtgacctcatttcaacggcgtgggccaagggcgtcagtaaccaacgattctgggcctagactggtgagcattgccggaactcggccaagtgtccggaacggacagttacttgtgtcaactggactgcctgcactggatcagctgctggggggaggcctggcagttggtacagtgttacttattgaggaggataagtataacatttactccccactgctgttcaagtactttttagccgaagggattgttaatggtcacactttactggtggctagtgccaaagaagatccagccaacattctccaggagcttccagctcctcttctagacgacaagtgtaaaaaagaatttgacgaagacgtttacaaccacaaaactccagagtccaacattaagatgaagatcgcctggaggtaccagcttctgcccaagatggagattggcccagttagctcttcacgattcgggcattactatgacgcctcgaaacgaatgccacaggagttgattgaggcctcgaattggcacgggtttttcctgccagagaaaatctcatccaccctgaaggtggaaccttgttcacttacccctggctataccaagctgctacagttcatccagaacataatctacgaagagggcttcgacggatctaatccacaaaagaaacagaggaacatcctcaggataggtatccagaacttgggaagtcccttgtggggcgacgatatctgttgtgcagagaatggaggcaattcccacagcttaacaaagtttttgtatgtactgagaggactgttacggacttctctgagtgcctgtattattacgatgccaacgcacctcattcaaaataaagccataatagcacgagtaactacattatctgacgtagtggtagggttggagagcttcatcggaagcgagcgcgaaaccaatccgctgtataaagactatcatgggcttatccacatccgacaaatcccgagactcaacaatctcatctgtgacgaatcagacgtcaaggacctggctttcaaactgaaacgcaaactgttcacgatcgaggcgggagtgcagtggcatgacctgggatcccgacaaccacgactgctgggttcttctaacagccccgctagtgcctctctggtggcaggtatcaccggtgcccaccaccacacccaattaattttcgtgttccttgttgagatgggcttccaccatgtgggtcaagccggacttgagctgcttacctctggcgacagttccgcgagcgctagtcagtcagctggcatcaccggcatgtcctatcgggctcgcccacgggctctctactttaaagagaataaatctaaggtgggcgctagacagctgctggaaactagagaagaacacctctcgagccggctgctgatcctgacccaggccgagagattatgtatgggcagacgctttttcacagcatttcacatctttaatgagctgccttgcaaaggtgactgcatctgcctgcagacgtgccaaacacagtag

SEQ ID NO: 221886 - DNA, 840 bp, synthetic construct
  misc_feature 1..840: note = Description of Artificial Sequence: Synthetic coding sequence
  source 1..840: mol_type = other DNA
atggaggccgtggtgaacctgtatcaggaagttatgaaacatgcggacccccgtatccaggggtacccccttatgggctcacccctgcttatgacatcgatactgctgacctacgtgtactttgtcctctctctcggaccacgcattatggcaaacaggaagccctttcagctcaggggttttatgattgtctataacttcagtctcgtggcattatcattatatatcgtctacgagttcttgatgagcggctggctgtcgacttatacctggagatgtgatcctgttgattattcgaacagccctgaggcactccgtatggtgcgcgttgcatggctattccttttctccaaattcatcgaactgatggacaccgtgatctttattctcaggaagaaagacgggcaagtgacctttcttcatgtatttcaccattccgtcctgccatggagctggtggtggggggtcaaaattgcacctgggggaatgggtagcttccacgcgatgattaattcctctgtacacgtgattatgtatctgtattatggtctttccgcttttggacctgtggctcaaccatatctgtggtggaaaaaacacatgactgcaattcagcttatccagtttgtgttggtctcccttcatatatctcagtactatttcatgagttcatgtaactaccaatatccagtcattatccacctgatctggatgtacggtaccatcttttttatgctgttctccaacttttggtatcattcgtatactaaaggtaagcgccttcccagggcactgcagcagaacggcgcaccgggtattgccaaagtgaaagctaactag

SEQ ID NO: 221887 - DNA, 759 bp, synthetic construct
  misc_feature 1..759: note = Description of Artificial Sequence: Synthetic coding sequence
  source 1..759: mol_type = other DNA
atggaggctgtggtgaatctctatcaagaggtgatgaagcacgccgatcccaggatccaaggctatccactgatggggagtccgcttcttatgacatctatcttgctcacttacgtgtattttgtgctgtcactgggtcccagaatcatggctaaccgcaagcccttccagctgcggggttttatgatcgtgtataacttctctttggtagcactgtccctgtatatagtgtatgaaatggtgcgggttgcttggctgttcctcttctctaaatttatcgagctgatggacactgtgattttcatactcagaaaaaaggatggccaggtaacctttctacatgtgtttcaccacagcgtgctgccctggtcttggtggtggggtgtgaagattgcgcctggtggaatgggtagcttccatgcaatgatcaatagtagcgtgcatgttattatgtacctgtattatggactttctgccttcggccctgtagctcagccgtatctgtggtggaagaagcatatgactgcgatccaactgatccagttcgtgctggtgagtctgcacatcagccagtattatttcatgagttcctgtaactaccagtatccagttatcattcatttaatatggatgtatggcacgatatttttcatgttgtttagcaacttttggtatcactcctacaccaaaggtaaaagactgccacgggcacttcagcagaatggggctccagggatcgccaaggtaaaagccaactag

SEQ ID NO: 221888 - DNA, 891 bp, synthetic construct
  misc_feature 1..891: note = Description of Artificial Sequence: Synthetic coding sequence
  source 1..891: mol_type = other DNA
atggagcatcttaaagcgtttgacgacgagatcaatgcatttctggataacatgtttgggccacgcgacagcagggtccgcggttggtttatgctcgactcctacttaccaaccttcttcctcactgtgatgtacctgttgtctatatggttgggcaataagtacatgaaaaacagaccagcactgagccttcgcggtatcctgacactctacaaccttggcataaccctgctgtctgcttatatgcttgcagaactgattctgtccacctgggaaggaggttataatctccagtgccaggacctaacatctgctggcgaggcagacatcagggttgcgaaagtgttatggtggtattacttcagcaagtccgtggaatttcttgataccattttctttgtactcagaaaaaagactagccagatcacttttctgcatgtttaccatcatgcttccatgtttaatatctggtggtgcgtgctcaattggataccatgcggccagtctttctttggacccactctcaacagcttcatccatatcttgatgtattcgtactatggattgagcgtcttccccagtatgcataaatatttgtggtggaaaaagtatctcacccaagcccagttagtacaattcgtcctcaccataacccatactatgtccgctgttgtgaaaccgtgtggattcccattcgggtgcttaatctttcagtcatcctatatgttgactttggtaattttgtttttaaacttctatgttcagacctaccgaaagaaacccatgaaaaaagacatgcaggaaccgcctgcaggcaaggaagttaaaaatggattcagcaaagcatattttaccgccgctaatggggttatgaataaaaaggcccagtag

SEQ ID NO: 221889 - DNA, 813 bp, synthetic construct
  misc_feature 1..813: note = Description of Artificial Sequence: Synthetic coding sequence
  source 1..813: mol_type = other DNA
atggtgactgccatgaacgtcagccacgaggtgaaccagctctttcagccctacaacttcgagctgagtaaagatatgcggcctttcttcgaggagtactgggcaacttcctttcccatcgccctcatctatctggtcttgatcgccgtggggcaaaattacatgaaagaaaggaagggattcaacttgcaaggcccattaattctctggagcttctgtcttgccatctttagcatcctcggagcagttcggatgtggggtataatgggcaccgtactcctgaccgggggactcaagcagaccgtctgcttcattaacttcatcgataactctacagtgaaattctggagctgggtgtttctcctttcgaaggtcatagagctgggcgataccgctttcattatactgcgaaaacgtccgctgattttcatccactggtatcatcattccaccgtgctggtgtatacctcctttgggtataaaaataaggtgcctgccggagggtggtttgtgacaatgaacttcggcgtccacgccataatgtacacctattacaccttgaaggccgcaaacgtcaagccaccaaagatgctgcccatgctgatcactagtctgcagatcctccagatgttcgtaggcgctatcgtatccatcctgacttatatctggagacaagatcaggggtgtcatactactatggaacaccttttttggagttttatactgtatatgacctattttattctgttcgcccactttttctgccagacttatatcaggcctaaagtgaaggccaagacgaagtcccagtag

SEQ ID NO: 221890 - DNA, 945 bp, synthetic construct
  misc_feature 1..945: note = Description of Artificial Sequence: Synthetic coding sequence
  source 1..945: mol_type = other DNA
atgggacttctcgactcagagcctgggagtgtgttaaacgtcgtgtcaacagcattgaacgacactgtggagttctaccgctggacttggtccatagccgacaaacgggtcgagaactggccgctgatgcagtcaccctggcccaccctttctatatctacgctctatttgctgtttgtctggctgggccctaagtggatgaaagatcgggagcctttccagatgcggctggttctcataatatataactttggcatggtgctgctcaacctctttatattccgtgagctgttcatgggtagctacaacgccggttattcttatatttgccagtctgtggactatagcaacaatgtgcacgaagttcgcatcgccgcagctctctggtggtactttgtttccaagggggtcgagtatctggacacagtcttctttatattgcgtaagaagaataatcaggtgtctttcctccacgtgtatcaccactgcactatgtttactctgtggtggataggaattaagtgggttgcaggaggacaggcctttttcggtgcccagctgaacagtttcattcatgtgatcatgtatagctattacggcctgaccgcatttggcccttggatccagaagtacctgtggtggaaacgttatctgaccatgttgcaactcatacagttccatgtgaccatcggccacactgccctgagtttgtataccgactgtccctttcccaaatggatgcactgggccctcatagcctatgcaatatccttcatttttttatttcttaacttttacataaggacctacaaggaacctaagaaaccaaaggccggaaaaactgcaatgaatggtatctccgccaatggagtgagcaagagcgaaaaacagctgatgatcgagaacgggaaaaaacagaaaaacggcaaagcgaagggcgactag

SEQ ID NO: 221891 - DNA, 900 bp, synthetic construct
  misc_feature 1..900: note = Description of Artificial Sequence: Synthetic coding sequence
  source 1..900: mol_type = other DNA
atggagcattttgatgctagtctctcgacttacttcaaggccctgcttggccctagggatacaagagtgaaggggtggtttttacttgacaactatatccctacgttcatctgtagcgtcatttacctattgatcgtatggttaggtcctaaatacatgcggaataaacagcctttcagctgcagaggaatccttgttgtttataaccttggcctgacccttctgagcctctacatgttttgtgaactggtaactggtgtctgggagggcaagtacaactttttttgccaggggacaagaaccgccggagagtcagatatgaagattatacgtgttttgtggtggtactactttagcaagctgatcgagttcatggacactttttttttcattttgagaaagaacaaccatcaaatcactgtcctgcacgtctaccatcacgctagtatgttgaacatatggtggttcgtcatgaactgggtcccctgtggccactcttattttggtgcaacgctgaattccttcattcacgtgctgatgtactcttattatgggctgagtagtgtaccatcgatgagaccctatctctggtggaaaaagtatattacccagggccagctcctgcagttcgtcctaactataattcagaccagttgtggggtgatctggccatgtaccttccctctgggctggctctacttccagatcggatacatgatttcactgattgctctgttcactaacttctacatccagacatacaacaagaaaggtgcatcgcgcaggaaggatcatctaaaggatcatcagaacgggagtatggcagccgtgaatggccatactaattccttctcccccctggaaaataacgtcaagccacgcaaacttagaaaagattag

SEQ ID NO: 221892 - DNA, 267 bp, synthetic construct
  misc_feature 1..267: note = Description of Artificial Sequence: Synthetic coding sequence
  source 1..267: mol_type = other DNA
atggagcattttgacgcaagtctgtctacatacttcaaagccttactaggtcctagaggcatcagctcctccgtcctcagaatggggcctcctctgcacacagttgtcggatggctgcaacagctgcaggcagcccattccgaagaggaagaaaaaatgtttcacctgtgtggcttcaagcacaaagaggtcgtgagccagtcttctctgccggcagttatcccgcaaaatagcctagccaccatcgcttctcatgcgccagcctag

SEQ ID NO: 221893 - DNA, 870 bp, synthetic construct
  misc_feature 1..870: note = Description of Artificial Sequence: Synthetic coding sequence
  source 1..870: mol_type = other DNA
atggagcacttcgacgcctccctgtcaacatattttaaggcgctgctgggccctagagatactagggtcaaaggatggtttctgctggacaattacatccctaccttcatatgcagtgtcatctatctgttgatcgtttggctgggacccaagtacatgagaaacaagcaaccattcagctgcagaggtattttggtggtgtacaagttctgcgagctggttactggggtctgggaggggaagtataactttttctgccagggcacccggaccgctggagagagcgacatgaagataatccgtgttctctggtggtattatttcagtaagctgatcgaattcatggacacttttttcttcattttgcgcaaaaacaaccaccagattactgtccttcacgtgtaccaccatgcctcaatgctcaacatctggtggtttgttatgaactgggtgccatgcgggcactcctacttcggtgcaacactgaacagctttatacacgtcctgatgtacagctattatggcctgtcatccgttccctctatgaggccttacctctggtggaagaaatatattacacagggacaactcttgcaatttgtgctaaccataatacaaacttcatgtggtgttatatggccttgcacctttcccctgggatggctgtatttccagatcggctacatgatctctcttatagccctcttcactaacttctatattcaaacttataataaaaaaggcgcatcacgacgtaaagatcacttaaaggaccatcaaaacggctctatggctgccgtaaacggacacacaaattccttctctcccctcgagaataatgtgaaaccacggaaattacgcaaagattag

SEQ ID NO: 221894 - DNA, 981 bp, synthetic construct
  misc_feature 1..981: note = Description of Artificial Sequence: Synthetic coding sequence
  source 1..981: mol_type = other DNA
atggaacacttcgatgctagcctgtcaacgtatttcaaagctttacttggtccacgcgatacaagagttaagggatggtttctgctcgataactacatcccgaccttcatctgctctgttatttacttactcattgtctggctagggccaaagtacatgcggaacaagcagccctttagttgcaggggaattctggtcgtgtacaacctcggtctgaccctactgtcattatatatgttttgtgaatccaaacgggagcagcctcgcagatctgcttgcgcgtctcggactgatcctagtacccagcagcagctaccagagaatcgcctggtgactggcgtgtgggaaggaaaatacaattttttctgtcaggggactcggacagcaggtgaatctgacatgaaaataataagagtgctttggtggtactatttttctaagttgattgaatttatggacacattcttctttatactccgtaaaaacaaccatcagatcacagtcctacacgtgtatcatcatgcctccatgctgaacatttggtggttcgttatgaactgggtgccctgcgggcacagttactttggcgctacacttaacagcttcatccatgtcttaatgtatagttattatggcctgtcaagtgtccccagcatgagaccttatttgtggtggaagaaatacattacacaggggcagttgcttcagttcgttttgactattattcagacatcctgtggggtgatttggccctgtacgttccctctggggtggctgtatttccagatcgggtacatgatttctctgattgccctgtttaccaacttttatatccaaacatacaataaaaaaggtgcatctaggcgaaaggatcatctaaaagatcaccaaaatggttcaatggctgctgtgaacggtcatactaattctttctcccccctggaaaataatgtgaaacctcggaagctccgaaaggattag

SEQ ID NO: 221895 - DNA, 900 bp, synthetic construct
  misc_feature 1..900: note = Description of Artificial Sequence: Synthetic coding sequence
  source 1..900: mol_type = other DNA
atggagcacttcgacgcctcactctccacatacttcaaggcccttctcggtcctcgggatacacgtgtcaaaggctggtttcttctggacaattatatccccactttcatctgctccgtgatctatcttctcatcgtttggctaggccctaaatatatgaggaacaaacagccctttagttgcagaggcattttggtcgtgtataatctgggcctcacactactttccctgtacatgttttgtgaattggtaactggagtctgggaagggaaatacaatttcttttgccagggcaccaggactgcaggagaaagtgatatgaaaattattagggtgctgtggtggtattacttttctaaactcattgaattcatggacacattcttctttatactgcggaagaataatcaccagattaccgtactgcacgtgtatcatcatgccagcatgttgaatatctggtggtttgtcatgaattgggttccttgcggacatagctactttggcgctacactgaatagcttcatacatgtgcttatgtacagctactatggtctttctagtgtgccgagtatgaggccctacctttggtggaaaaaatacattacccaggggcagctgttacaatttgttctgaccattattcagaccagctgtggcgttatatggccttgcactttcccactgggatggttatactttcagattggctatatgatttctttgatcgccctctttacgaacttctacattcagacttataacaagaaaggcgctagccgtcgcaaggatcacctgaaagatcaccaaaacggaagcatggccgctgttaatgggcacaccaactcgtttagccccctggagaacaacgtgaaacctcgtaaacttcggaaagactag

SEQ ID NO: 221896 - DNA, 798 bp, synthetic construct
  misc_feature 1..798: note = Description of Artificial Sequence: Synthetic coding sequence
  source 1..798: mol_type = other DNA
atgaacatgtctgtgttaacattacaggaatatgaattcgagaaacagtttaacgagaatgaagctatccagtggatgcaggaaaattggaagaaaagtttcctattcagcgccttgtatgctgcattcatatttggtggcaggcatctgatgaacaagcgtgccaagtttgagctccggaaaccgctcgtgttgtggtccctcacgctggcggtgttcagcatctttggagctctccggaccggcgcttatatggtgtatatccttatgactaagggtctgaagcaatcagtgtgtgatcagggcttctacaacgggccagtctccaaattctgggcctacgctttcgttctgagtaaagcgccagaactgggcgatactattttcatcatactgcggaagcaaaagctcatctttttgcactggtaccaccatattacagtccttttgtactcttggtatagctataaagatatggtagctggagggggttggtttatgacaatgaactacggggttcacgccgtcatgtactcttactatgccctgagggccgctggtttccgcgttagtaggaagttcgctatgttcataacgttgagccaaattacccaaatgctcatgggctgcgtcgtgaattacttggtgttttgttggatgcagcacgaccagtgtcattcccacttccagaatatcttttggagctcccttatgtatttgtcctacttggtcctgttttgccacttctttttcgaggcctatatcggtaagatgagaaagacaaccaaagcagagtag

SEQ ID NO: 221897 - DNA, 798 bp, synthetic construct
  misc_feature 1..798: note = Description of Artificial Sequence: Synthetic coding sequence
  source 1..798: mol_type = other DNA
atgaacatgtcagtactcacgttgcaggagtatgagttcgaaaagcagtttaatgagaatgaagccattcaatggatgcaggagaattggaagaagtctttcctctttagtgctctgtacgcagcattcattttcgggggtcgacatctgatgaataagagggcaaaattcgaactccgaaagcctctggtgctttggtctctcacgttagctgtcttttccatattcggagcgctgcgcacaggcgcttacatggtgtatattctgatgactaagggtctgaagcagagcgtgtgcgatcagggtttttacaatggacccgtatctaaattctgggcatacgcatttgtcttgtccaaggctccggagctcggcgatacgatctttattatactgcgtaaacagaaactcatattcctccactggtatcaccatatcacggtgctgttgtattcctggtacagctacaaagacatggtggccggaggtggttggtttatgaccatgaactacggcgtgcatgcagtgatgtacagctactacgcactgagggctgcaggttttagggtctctcgcaagtttgctatgtttatcactctcagccagatcacccaaatgcttatgggctgcgtggtgaattacctcgtcttctgttggatgcagcacgaccagtgtcactcacacttccaaaacatcttttggagctctctcatgtacctctcttacttggtgctgttttgccatttcttctttgaggcatacatcggtaaaatgcgtaaaactacaaaagccgagtag

SEQ ID NO: 221898 - DNA, 327 bp, synthetic construct
  misc_feature 1..327: note = Description of Artificial Sequence: Synthetic coding sequence
  source 1..327: mol_type = other DNA
atgaatatgagcgtccttacccttcaggaatacgagttcgagaaacaatttaatgaaaacgaggccatccagtggatgcaagaaaactggaagaagagtttcctgtttagcgctttgtatgcagcctttatctttggcggtcggcatctgatgaataagagggcaaaatttgaactgcgcaaaccattggtgctgtggagtttgacactggccgtgtttagtatctttggggctttgaggaccggagcatatatggtctacattttgatgaccaagggcctaaaacagagcgtttgcgatcagggtttctacaatgggcctgtgtag

SEQ ID NO: 221899 - DNA, 414 bp, synthetic construct
  misc_feature 1..414: note = Description of Artificial Sequence: Synthetic coding sequence
  source 1..414: mol_type = other DNA
atgaatatgagcgtgcttaccttgcaggagtatgaattcgagaaacagtttaacgaaaatgaagccattcagtggatgcaggaaaattggaaaaagagctttctgttcagtgccttgtatgccgcatttatatttggtggtcggcacttgatgaataagagggcaaaatttgagttgcggaaacctttggtcctctggtctttgaccctggccgtgttttcaatctttggcgcactgaggactggtgcctacatggtatacatccttatgaccaaaggcctgaaacagtccgtgtgcgatcaaggcttctataatggtcccgtttctaaattctgggcctacgcctttgttctttcaaaagcccctgagctgggagatacaatttttatcatcttaaggaaacagaagttatag

SEQ ID NO: 221900 - DNA, 846 bp, synthetic construct
  misc_feature 1..846: note = Description of Artificial Sequence: Synthetic coding sequence
  source 1..846: mol_type = other DNA
atggcttttagcgatctgacttctcggactgtccacctgtacgacaactggatcaaggacgcagacccaagagtggaggactggctgctgatgtcaagccctcttcctcagacaatcctccttgggttttacgtatacttcgtaactagccttggtccaaagctgatggagaaccgcaagccatttgaattgaaaaaggctatgataacatacaactttttcatcgtgctcttttcagtctacatgtgttatgaattcgtcatgtctggatggggcattggatatagcttccggtgtgacatcgttgactattctagatccccgaccgcccttaggatggcaagaacctgttggctatattacttctcgaaatttattgaactcctcgacactatcttctttgtcctgcgaaaaaagaattcccaggtgaccttcctgcacgttttccaccacacaatcatgccatggacttggtggtttggcgtgaagttcgccgcaggaggcctagggacattccacgccttactgaatacagcagtccatgtcgtgatgtacagctactacggcctatcagctctgggcccagcataccagaaatacttgtggtggaagaaatacctgactagcttgcaactggtccagtttgtcattgtggcgattcacatcagccaatttttttttatggaggactgcaagtatcagttcccggtctttgcctgcattattatgtcttactcctttatgtttctcttactgttcttgcatttctggtaccgggcttacactaagggccagcgtcttcctaagactgtgaaaaatggcacatgcaagaacaaagataactag

SEQ ID NO: 221901 - DNA, 846 bp, synthetic construct
  misc_feature 1..846: note = Description of Artificial Sequence: Synthetic coding sequence
  source 1..846: mol_type = other DNA
atggcctttagtgatctcacctcccggactgtgcacttgtacgataactggatcaaagatgcggatcctcgggtggaagattggctactgatgtcctcccccctgccccagaccatcttgctcgggttttacgtgtactttgttactagcctcggacccaaacttatggagaacaggaaaccttttgagctgaagaaggcaatgattacctataacttttttattgttctgttctctgtgtatatgtgctacgagtttgtcatgagcggatggggaatcgggtatagctttcgatgcgatattgtggattactctaggtccccaaccgctcttcgtatggctcgcacctgctggctgtactatttttccaaatttattgaactgctcgacactatctttttcgtgttgagaaagaagaattcccaagttacattcttgcacgtatttcatcacacaattatgccctggacctggtggttcggcgtgaagttcgctgctggaggattgggcacgtttcacgctctgttgaacactgccgtccacgtcgtgatgtattcttactacggcctctccgccctgggtcccgcttaccagaaatatctgtggtggaaaaagtatctcacctcactacagcttgtgcaatttgtcatagtcgcgattcatattagtcagttcttcttcatggaggactgtaagtatcagtttcctgtatttgcctgtattatcatgtcatactcgtttatgtttctgctgctcttcctccatttctggtacagggcatacacaaaagggcaacggctcccaaagacagttaaaaacggcacatgcaagaacaaggacaactag

SEQ ID NO: 221902 - DNA, 498 bp, synthetic construct
  misc_feature 1..498: note = Description of Artificial Sequence: Synthetic coding sequence
  source 1..498: mol_type = other DNA
atggccttcagcgatctaacctctcgtaccgtgcacctgtacgacaattggattaaggacgccgaccctcgagtagaagattggttactgatgtcctcccccctgccccaaaccattctcctcgggttttacgtttattttgttacctccctgggacccaaacttatggaaaacagaaaaccttttgagttgaagaaggcaatgattacctataacttctttatagttctattctcagtatatatgtgttatgaattcgtcatgagcgggtggggtattggctactcgtttagatgtgatatcgtagattacagcaggtccccaactgccttaagaatggcacgaacctgttggctatattatttctccaaatttatcgaactcttagataccatattcttcgtcctccgcaaaaaaaacagccaagtgacattccttcacgtgttccatcacactataatgccttggacgtggtggttcggcgtgaaattcgcctag

SEQ ID NO: 221903 - DNA, 846 bp, synthetic construct
  misc_feature 1..846: note = Description of Artificial Sequence: Synthetic coding sequence
  source 1..846: mol_type = other DNA
atggccttcagcgatctgacttcccgcactgtgcacttgtacgacaactggatcaaagatgccgaccctcgtgtcgaagactggctcctcatgagctcccctctaccacaaacgatcctgctgggtttttatgtgtattttgtcactagtttaggacccaagctgatggagaacagaaaacccttcgagcttaagaaggccatgattacttacaatttcttcattgtgctcttctcagtctacatgtgctacgagtttgtgatgtcagggtggggtatcggctactctttccgctgtgacatcgtggactattctagaagtccaacggccctcaggatggccaggacatgctggctgtactacttttcaaagttcattgagcttctcgacaccatttttttcgtgttaagaaagaagaactcacaggtgaccttcctgcacgttttccatcatactatcatgccttggacctggtggttcggggtgaaatttgctgccggtggtcttgggacattccatgccttactcaacaccgccgtgcatgtagttatgtattcctattacggtctttctgcccttggcccagcctatcagaaatacctctggtggaagaaataccttaccagtctgcaattggtgcaatttgttattgtggcaatacatatctcccagtttttttttatggaagactgcaagtaccagtttccagtatttgcctgcattataatgagctattctttcatgttcttgttgctgtttctccatttctggtatcgcgcatatacaaagggccagcgattgccaaaaaccgtaaagaatggaacatgcaaaaataaagataactag

SEQ ID NO: 221904 - DNA, 498 bp, synthetic construct
  misc_feature 1..498: note = Description of Artificial Sequence: Synthetic coding sequence
  source 1..498: mol_type = other DNA
atggcctttagcgacctgactagtcgcacggtgcatttgtacgacaactggatcaaagatgccgatcctagggttgaagactggctgctgatgtccagccccctccctcagacgattcttctgggtttttacgtgtattttgtcaccagcctgggccctaagctcatggagaaccgtaagccatttgagctaaagaaagcaatgattacttacaatttcttcatcgtattattttccgtgtatatgtgttacgagtttgttatgtccgggtgggggatcggctattcgttcaggtgcgatatcgtggactacagccgtagtcccaccgccctacgaatggccagaacttgttggctgtattacttcagcaagtttatcgaattgctggatacaattttctttgtactccggaagaagaactcacaggtgacattcctgcacgtgttccatcacacaattatgccttggacctggtggtttggggtgaagtttgcctag

SEQ ID NO: 221905 - DNA, 921 bp, synthetic construct
  misc_feature 1..921: note = Description of Artificial Sequence: Synthetic coding sequence
  source 1..921: mol_type = other DNA
atggccgcagcagcggctgccgcagcagcagccggagccgctggcggacggggatctggccctggacgccgacgccatttggtgcctggtgctggcggagaggctggggagggggctcccggtggagctggagactacggcaacggactcgagtccgaagaactggagcctgaagaattgctgctggagcctgagccggagcccgagccggaggaagaaccccctcgccctagggcccctccaggggctcccggacctggccctggctcaggagcaccgggtagccaggaggaggaggaagagcccggattagtggagggcgacccaggagacggggcaatcgaagaccccgaattggaagcaatcaaagccagagtgagagagatggaagaggaggctgagaaactcaaggaactgcaaaatgaggtggagaaacagatgaatatgtctcctcccccaggcaatgccggacccgtaataatgtcgatcgaggaaaagatggaagccgacgcccgatcaatatacgttggtaacgtggattacggggcaactgccgaggagttggaagcccacttccacggctgtgggagtgtgaacagagtaactattctgtgtgacaagttttctggccatcccaagggcttcgcatacatcgagttttctgataaggagtcagttcgaacctcactagctctcgacgaatcactttttagagggagacaaatcaaagtaatccccaagaggaccaaccggcctggcattagtaccactgaccgcggattccctcgcgctagataccgagctagaacaaccaactacaattccagccggagcaggttctactcaggcttcaacagtaggcccagaggcagagtttaccggggtagagccagagctacgtcttggtacagtccctattag

SEQ ID NO: 221906 - DNA, 1407 bp, synthetic construct
  misc_feature 1..1407: note = Description of Artificial Sequence: Synthetic coding sequence
  source 1..1407: mol_type = other DNA
atggcaatcgcgacttctgtctatgtggtacctcctcctgccagaccctgccccacgagcggaccgccagctggaccttgtccaccctccccagacctgatttacaagatccctagagcgtccggaactcaactggccgctccgagagacgccctggaggtgtatgacgtccccccaactgcccttcgagtgccttcctctggaccatatgactgtcctgcctcattcagccacccactcactcgggttgcccctcagccacccggtgaggatgacgcaccctatgacgtgccattaacacccaagcccccagccgaactcgagcctgacctcgagtgggagggaggcagagagcctggccctccaatttatgccgctccgtcaaatctcaaacgcgcaagcgccttgttgaatctttatgaggcaccagaagagctgctggccgacggtgagggcggaggcactgatgagggaatatacgatgttccacttttgggaccagaagctccaccctcccccgaacctccaggcgctttggcctcacatgatcaggataccctcgcccagctgttagccagatccccgccaccccctcacagacccagactgcccagtgcggaatccttgtctaggaggcctctgcccgcactcccggtccctgaggccccatctccttccccagtgccttcccccgcaccgggacggaagggatcaatccaggatcgcccactgccccctcctcccccacgtctccctggatatgggggaccaaaggtggaaggcgaccccgaggggagggagatggaagacgatcctgccggtcatcacaacgagtacgagggcattcctatggcggaagagtatgattacgttcacctgaaaggaatggacaaggcacagggaagcaggccccctgaccaggcctgcactggcgacccggaactgcctgagcggggtatgcctgcccctcaggaggctttgagtcccggtgagcccctggtcgtcagcacgggcgatctgcaactactgtacttttatgctgggcagtgtcagtctcactacagcgcactgcaagccgcagtggccgctttaatgagtagtacccaagccaatcagccaccccgattatttgtgccccattctaagagggtggtggttgccgcacaccggctggtttttgtaggtgataccctgggccgactggccgctagtgcccctttaagggcccaggtcagggcagcgggaactgcactcggacaagcactgcgcgcaacagtgttggctgtgaagggcgctgcgttaggctacccctcatcccccgcaatacaagagatggtgcaatgtgtcacagaacttgctgggcaggccctgcaatttaccactttgctaaccagcctcgctccttag

SEQ ID NO: 221907 - DNA, 1179 bp, synthetic construct
  misc_feature 1..1179: note = Description of Artificial Sequence: Synthetic coding sequence
  source 1..1179: mol_type = other DNA
atggccattgctaccagcgtctacgttgtcccacccccagcacgcccttgtcccaccagcggaccacccgctggcccttgtcccccatcccccgaccttatctacaagatcccccgtgcttccgggactcaacttgcggctccaagggatgctctcgaggtgtacgatgtgcctcccaccgcgcttcgcgtgcccagctccggtccgtacgattgtccagccagcttttcccaccccctgacaagagtggccccacagccacctggggaagacgatgctcccccttctccagaaccaccaggcgctctggccagtcacgatcaggacacactggcccagctgcttgcccgttctccgcctcctccccacaggcctaggttgcccagcgctgaaagtctgtcccgcagaccattaccggctcttcctgtacccgaagcccctagtccctcccccgtaccctcccctgcaccgggtaggaagggaagtatccaagacagaccattgccacccccacccccacgtctacctggctacgggggacccaaggtcgagggcgatcctgaaggcagggagatggaggacgacccggcaggacaccacaacgagtatgagggcattccaatggcagaggagtatgattatgttcatcttaagggcatggacaaggctcagggctccaggccacccgatcaagcttgtacaggtgacccagagctgcccgagagaggcatgcccgcaccgcaggaagcactcagtccgggtgagcctctggtagtgtccactggggatctgcagttgctgtacttctacgccggtcagtgtcagagtcattatagcgctcttcaggcggctgtggctgccctcatgagctccacacaggccaatcagccacctcggctttttgtgccccattctaaacgtgttgttgtggccgcacacaggcttgttttcgtgggagacacgttgggtagattggctgcgtccgctccactgcgtgcccaggttagggccgcagggacagccctgggccaggctcttagggcgacagtgctggctgtgaagggcgctgccctcggatatcccagcagcccggctatccaggaaatggttcagtgtgtcactgagctcgcgggacaggccctgcagtttacgactcttctgaccagcctcgccccatag

SEQ ID NO: 221908 - DNA, 1326 bp, synthetic construct
  misc_feature 1..1326: note = Description of Artificial Sequence: Synthetic coding sequence
  source 1..1326: mol_type = other DNA
atgtccgagagggaggtcagcacagctcctgccggaactgatatgccagctgccaagaagcagaaactgtcgtcagacgaaaactccaaccccgatctaagtggagatgagaatgacgatgccgtgtctattgaatcgggcacaaataccgaacggccagacacacctacaaacacccctaatgccccaggacgtaagtcctggggaaaaggcaagtggaaaagcaagaagtgcaaatattcattcaaatgcgtcaattcactcaaggaggatcacaaccaaccactctttggggttcagttcaattggcactcaaaggaaggagaccccttagtttttgcgactgtggggtccaaccgggtcactctgtatgagtgtcatagtcagggagagatcaggctgctgcagagttatgtcgatgccgacgcggatgagaatttttatacttgcgcctggacttacgactcaaatactagccatcctctcttggccgtggctggctcgaggggtattatcagaatcatcaacccaattaccatgcaatgcattaaacactacgttggtcacggaaatgccattaatgagctgaaatttcacccccgtgatcctaacttactgcttagtgtgtctaaggaccacgccttgcggctctggaatatccagacagatactctggtggccatattcggaggggttgaaggtcatcgcgatgaggtcctgtcggctgactacgatctgctgggggaaaaaattatgagctgcgggatggaccattcactaaagctatggcggataaacagtaagaggatgatgaatgcaattaaggagagctacgattataatccaaataaaactaataggcctttcatttcccagaaaatccatttccccgattttagtactagggacatccacaggaattacgtcgattgcgtgcgctggctgggtgacttaatcttatccaagagttgtgagaacgccatagtctgttggaaacccggaaagatggaagatgatatcgacaagattaagccctccgaatccaatgttaccatcctgggcaggttcgattactcccagtgtgacatatggtacatgcggttcagtatggacttttggcagaagatgttggccctgggaaaccaggttggtaaattatatgtgtgggaccttgaagtggaagacccccacaaggctaaatgtaccaccctcacacaccataagtgcggggctgctattcggcagacttccttttcacgggactcttccattctgatcgccgtatgcgatgatgcctccatctggcgatgggacagattgagatag

SEQ ID NO: 221909 - DNA, 1203 bp, synthetic construct
  misc_feature 1..1203: note = Description of Artificial Sequence: Synthetic coding sequence
  source 1..1203: mol_type = other DNA
atgagcgagagagaggtgtccaccgccccagccggaactgacatgcctgccgctaagaagcagaagttaagttcagacgagaattccaatcctgacctttctggggatgaaaacgacgacgccgtcagtattgaatccggtacaaacactgaacgccctgatacgccaaccaacacccccaacgctcctggtcggaaatcttggggcaagggaaagtggaaatccaaaaaatgcaagtatagtttcaagtgtgtcaacagccttaaggaagaccacaaccaacctctcttcggagtgcagtttaattggcactcaaaggaaggcgacccattggtatttgcaacagttggttcaaaccgggtgaccttgtatgagtgccactctcagggggagatcaggctcctacagagctatgttgacgctgacgcagacgaaaacttttatacctgtgcatggacatacgacagcaacacttcccaccctttactggccgtagctggaagccgaggaattatccgtatcatcaaccccatcaccatgcagtgtataaagcattatgtcgggcatgggaacgcgatcaatgaattaaagtttcacccccgtgatcccaacctgctgttaagcgtcagcaaggaccacgctctcaggttgtggaatattcagaccgacactctggtggcaatttttggcggagtggaagggcaccgcgacgaagtgctgtctgccgattacgatcttcttggcgagaaaataatgagttgtggcatggaccactctctcaagctctggaggatcaattccaaacgcatgatgaatgccatcaaggaaagttacgattacaaccctaacaaaacaaatcggcctttcatttcacagaagatacattttcccgatttcagcactcgggacatacacagaaattacgtcgattgtgttcggtggctgggggatctcatattatcaaagtcttgtgaaaacgccattgtatgctggaagccaggcaaaatggaagatgacatcgataagataaaaccgagcgaatcaaacgtgacaatactcggacggtttgattacagccagtgcgacatctggtatatgaggttctctatggacttctggcagaaaatgcttgcactcgggaaccaggtcggcaagctgtacgtctgggacttagaagtggaggacccgcataaagccaaatag

SEQ ID NO: 221910 - DNA, 1401 bp, synthetic construct
  misc_feature 1..1401: note = Description of Artificial Sequence: Synthetic coding sequence
  source 1..1401: mol_type = other DNA
atgagtgaaagggaggtctcaactgctcccgcaggcactgacatgcccgctgctaagaaacaaaaacttagctccgacgaaaattcaaacccagatctatccggagacgaaaatgacgacgctgtgtctatcgagagcggcacgaacacagagcgcccagacactccgaccaatacccctaatgcacctgggagaaaatcctgggggaaaggcaaatggaagagcaagaaatgtaagtactctttcaaatgcgtaaactctctgaaggaagaccacaatcaacccctctttggagtgcagttcaactggcactcgaaggaaggtgatcccttggtgtttgccaccgtgggcagtaatcgtgtaacgctttacgaatgtcatagtcagggcgagattcgcttgttacagagctatgtggatgctgatgcggacgaaaacttttacacatgcgcatggacatatgacagtaacacaagtcaccctctgctggcagtggccggttctcggggaatcattaggattataaaccccatcacaatgcagtgcatcaaacactacgtgggccatggaaatgctataaatgagctgaagttccatcctcgggatcccaatcttctcctgtccgtgagcaaggaccacgcactaaggctgtggaacatccagactgacacgctcgtggccatctttgggggtgtggaggggcatcgagatgaagttctgtctgctgactacgatctgcttggagaaaaaattatgtcgtgcggtatggaccactctttgaaactgtggagaatcaacagcaaacgtatgatgaatgccattaaagagagttacgactataaccccaacaagactaaccgtccttttattagccagaaaattcactttcctgacttcagcactagagatatccatcgcaattacgttgattgtgtgcggtggttgggcgatcttatactatctaaatcaggcagggcaattctgcactcccaccagcagtgcatgagagatccagtgagccctaatctgcgtcagcatctcagttgcgagaacgctatcgtgtgttggaagcctgggaaaatggaagacgacatcgacaagatcaaaccaagcgagtctaatgtgactatcctcggccgtttcgactacagccagtgcgatatttggtatatgagattcagcatggacttctggcagaaaatgttggcattgggaaaccaggttggcaagctgtatgtgtgggacctggaagttgaagatcctcacaaagccaaatgtaccaccctgacccatcataagtgcggcgcagcgatcagacagacctccttcagccgtgattctagtattcttatagcagtctgcgatgatgcttcaatctggaggtgggatcgcctgaggtag

SEQ ID NO: 221911 - DNA, 471 bp, synthetic construct
  misc_feature 1..471: note = Description of Artificial Sequence: Synthetic coding sequence
  source 1..471: mol_type = other DNA
atgtcagaacgagaagtcagcaccgcgccagccggaacggacatgccagctgcgaaaaagcagaagctgtcctcagatgagaactccaatcctgacctgtccggcgatgaaaacgatgacgcggtatctatagaatcaggcaccaataccgagcggccagacacccctacgaacacaccgaacgctccaggcaggaaatcctggggtaagggcaagtggaagagcaagaaatgcaagtatagctttaaatgtgtcaactcactgaaagaggaccacaatcaacccctctttggggtccagtttaattggcattcgaaagagggcgatccactcgtgttcgcaaccgtggggagcaatcgcgtaactctgtatgaatgtcacagtcagggcgagatccgactgctccagagctatgtcgatgccgacgctgacgaaaacttttatacttgtgcctggaagtgttaccaatag

SEQ ID NO: 221912 - DNA, 660 bp, synthetic construct
  misc_feature 1..660: note = Description of Artificial Sequence: Synthetic coding sequence
  source 1..660: mol_type = other DNA
atggataattatgccgacctgagcgacacagaacttactacgctgttacggcgatataatatcccacacggacctgtcgtggacttgaattctacgcgcggagatgcagacatgtacgatttacccaaaaaggaagacgcattgttgtaccagagcaaaggatacaacgacgattactatgaggagagctatttcacaacacggacctatggggaacctgagtccgccggaccaagccgcgctgtgcgacaatccgtaacatctttcccagatgccgatgcgtttcaccaccaagtgcacgacgatgacctattgtcttccagtgaggaagaatgcaaggatcgagagcgacctatgtacggcagggatagcgcctatcagtccattactcactatcggccagtctccgcctctcgcagctctctcgatctgtcatactacccaacaagctcctctacctcattcatgtcatctagcagtagctccagctcctggctgactagacgtgcaattaggcctgagaaccgcgctcctggggctggcctgggtcaggatcggcaggtccccttatggggacaactcttgctctttctggtgtttgttatcgtgctcttctttatctaccacttcatgcaggccgaagagggtaaccccttttag

SEQ ID NO: 221913 - DNA, 765 bp, synthetic construct
  misc_feature 1..765: note = Description of Artificial Sequence: Synthetic coding sequence
  source 1..765: mol_type = other DNA
atggataactacgccgacttgtctgacacggagctaacaaccctccttaggagatacaatattcctcacgggcctgtggtgggttcaaccaggcggctttacgagaaaaaaatattcgagtatgagactcagcgcaggcgcttgtcgccgccatcctcttctgcagcttctagttatagtttcagcgacttgaacagcacccgtggagatgccgacatgtacgacctcccaaagaaagaagacgccctcctatatcagagcaagggttacaacgatgattactacgaagaaagttattttaccacaagaacatacggcgagccagaatcagcaggaccctccagggctgtcaggcagtccgtgacatcgtttcccgacgccgacgctttccatcaccaggtgcacgacgacgacctcctttcctcatctgaggaagagtgtaaagatcgcgagcgcccaatgtacgggagggactcagcataccagagcattacccactatcggcctgtgtccgcttcccgttctagtcttgatctttcctattatcccacaagctctagtacatcgtttatgtcatctagttcctcatcaagttcatggctgacacggagagcgattcgtccagaaaatagggctcccggagctggccttgggcaagaccggcaggtgcccctgtggggccagctactcctgtttctggtgtttgtaatcgtcctttttttcatataccatttcatgcaagctgaggagggtaaccctttctag

SEQ ID NO: 221914 - DNA, 441 bp, synthetic construct
  misc_feature 1..441: note = Description of Artificial Sequence: Synthetic coding sequence
  source 1..441: mol_type = other DNA
atgacgaccaacgccggacctctgcacccatattggccccagcacctgcgtctcgataattttgttccaaatgacagacccacgtggcacatcctggccggactgtttagcgtgactggcgtgctggtagtcacgacctggctcctcagcggccgagcagccgtcgttccattgggaacctggcggagactgtcactatgttggttcgcggtttgtggcttcattcaccttgtgatcgagggatggtttgtgctgtactacgaggacttgctgggagaccaagcttttctgagccagttgtggaaggagtacgctaagggggactcaagatatatccttggagacaatttcactgtatgtatggagacgataacggcttgcctctgggggccattaagtctctgggttgttattgcatttctgagacagcatccactgtag

SEQ ID NO: 221915 - DNA, 483 bp, synthetic construct
  misc_feature 1..483: note = Description of Artificial Sequence: Synthetic coding sequence
  source 1..483: mol_type = other DNA
atgaccacgaacgccggaccattgcatccctattggccacagcatttgcggttagataactttgtccctaacgatcgcccaacgtggcacatcctggccggactgttctctgtgacaggagttctagtggtgaccacttggctcctttccgggagagccgctgtcgtcccgctgggaacatggcgtcggctctctctgtgttggttcgcagtgtgtggcttcatccacctcgtaattgagggttggttcgtgctgtactatgaagaccttctcggcgatcaggccttcctcagccagctttggaaggaatatgctaagggcgattccaggtacatccttggggacaacttcaccgtttgcatggagacaattaccgcctgcctgtggggtccactgtcactctgggttgtaatcgcatttctgaggcagcaccctctccgtttcatcttgcaactcgttgttagcgttggacagatctactag

SEQ ID NO: 221916 - DNA, 693 bp, synthetic construct
  misc_feature 1..693: note = Description of Artificial Sequence: Synthetic coding sequence
  source 1..693: mol_type = other DNA
atgacaacaaatgcagggccattacatccctactggccccaacacttgagattggacaacttcgttcccaacgataggccaacttggcatattcttgccggtttgttctcagtgaccggtgtgctggtagtaacgacatggctactgagcgggcgtgctgccgtggtgcccctaggcacttggcgaaggttgtcactgtgctggttcgcagtatgcggttttatccatctggtgattgaaggatggtttgtgttatactacgaagatcttctcggagatcaggcttttctctcccaactgtggaaggaatacgctaaaggcgatagcagatacatactgggcgacaactttaccgtgtgcatggagaccataaccgcctgcctatggggacccctcagtctgtgggtagtaattgcctttctgagacaacatccactgcgttttattctgcaactagtggtgagtgttggccaaatctacggagatgttctgtacttcctgacagagcaccgcgacgggttccagcatggggagctcggacacccactatacttctggttctatttcgtgtttatgaatgccctctggctggttctgcccggagtgcttgtgttagatgccgtgaagcatcttacccacgcccagagcactcttgatgcaaaagctactaaagcaaaatctaagaaaaattag

SEQ ID NO: 221917 - DNA, 873 bp, synthetic construct
  misc_feature 1..873: note = Description of Artificial Sequence: Synthetic coding sequence
  source 1..873: mol_type = other DNA
atgtgtctggccggatgcaccccgaggaaggccgctgcccctgggaggggagcactgccccgagctcggctcccacgaaccgctcctgctgctgcaaccatgttccaaccagcggctaagcggggtttcacgatagagtccctggtcgccaaggatgggggaacggggggaggaaccggagggggaggtgcaggctcacatctgctcgctgcagccgcaagtgaagagcccctgagaccaactgcacttaactatccccatccaagtgcggcagaggctgcgtttgtgtctgggttccccgcagcagcagctgccggagcgggtcgatcactgtacggcggaccagagctcgtgtttcccgaagcaatgaaccacccagctttgaccgtgcaccccgcacatcaattgggcgcaagccccttgcaaccccctcactccttcttcggcgctcagcatcgcgatcctcttcatttctatccttgggtgcttagaaatcggttcttcggccacaggttccaggcctcagacgtgccccaggatggactgctgcttcacggcccttttgcgaggaaaccaaaacgaattagaaccgccttcagccccagccagttgctgagattggaaagagctttcgagaagaatcactatgtggtgggagcagaaaggaagcagctagctggctctttgtcattgtccgaaacgcaagtcaaggtgtggttccagaaccgaaggacaaagtataagcgccaaaagttggaagaagagggccctgaatccgagcagaagaagaaaggctcccatcacataaaccgctggcggattgcaacaaaacaggccaatggtgaggacattgatgtcacttcgaacgactag

SEQ ID NO: 221918 - DNA, 759 bp, synthetic construct
  misc_feature 1..759: note = Description of Artificial Sequence: Synthetic coding sequence
  source 1..759: mol_type = other DNA
atgttccagcccgctcctaaaaggtgtttcactatcgaatctctagtcgccaaagactcgcctttgccagcctcacgctccgaggaccccatccggcctgcagctctgagctatgccaattcgagtccgatcaatccatttctgaatggtttccatagtgcagccgcagccgcagcgggacgcggagtttactcgaaccccgacctggtgttcgctgaggccgtatcacacccacccaacccagcagtgccggtgcaccctgtccccccaccacacgccctagccgcacatccgctgccctcctcccacagcccacatcccttgtttgccagtcagcagagggatccgagtactttttacccttggctgattcatcgctatcgataccttggtcaccggtttcagggcaacgacacctccccggaaagtttcttactgcacaacgccctggcacggaagcctaaacgaatacggaccgcatttagcccatcgcaattactcaggctcgagcacgcttttgagaagaaccactatgttgttggtgctgaaaggaaacagctagcccacagtctctcactcaccgaaactcaagtcaaggtctggtttcagaacagacggaccaaatttaagcgccagaagctcgaagaggagggcagcgacagccagcaaaagaaaaagggtacccaccacataaacagatggcgcattgctaccaagcaggcctcacccgaagagatcgacgtaacctccgatgattag

SEQ ID NO: 221919 - DNA, 510 bp, synthetic construct
  misc_feature 1..510: note = Description of Artificial Sequence: Synthetic coding sequence
  source 1..510: mol_type = other DNA
atgttccagcctgctccgaaacggtgtttcacgatcgagtccctcgttgcaaaggattctcctttaccagccagtcggtccgaggatcccatacgcccagctgctctatcctatgccaatagctcgccgataaatccttttctcaatggattccattcagctgctgctgccgcagcaggcagaggtgtctattctaaccctgaccttgtattcgctgaggcggttagccaccccccaaatccggcagtgcctgtccaccctgtcccaccaccacatgcactggcagcccaccccctgcctagctcacacagtccacaccctctgttcgcctcccagcagcgggatcccagcacattttacccttggttgatccaccgctacagatacttgggccatcggtttcagggtaaatctatggtttccgaacctaagaacaaagtgcagaaagcagaggctggaggcagaaggcttcgcttcgcgaccaaggagaagcgcgatgccccatactag

SEQ ID NO: 221920 - DNA, 957 bp, synthetic construct
  misc_feature 1..957: note = Description of Artificial Sequence: Synthetic coding sequence
  source 1..957: mol_type = other DNA
atggcgattaagtctattgcctctagactgcgcggttcacgccgatttctgtccggcttcgtcgccggtgctgtggtcggggctgctggagctgggttggccgcactgcaattcttcaggtcacagggagccgagggcgctcttacagggaagcagcccgatggagatgccgatcgtaaacattgtaaatttaagcctgacccgaacataccgcctacgttctctgcctttaatgaggactacgtggggagcggttggtcacgcggacatatggcccctgcagggaacaataagttctcatccaaggcaatggccgaaacattttatctaagtaacatcgtgccccaggacttcgacaacaactctggatactggaacagaatcgaaatgtactgccgcgaactgacggaacggttcgaagatgtatgggtcgtatccggacccctgaccctcccccagacccgtggagacggaaaaaaaattgtcagttaccaggtcattggtgaagacaacgttgctgtgccctctcatctgtataaagttatcctggcccgacggtctagcgtgagtactgagccattggccctcggcgcattcgtggtgcccaatgaggcgattggattccaaccccagttgacggagtttcaggtgagtctgcaggatttggagaaactgtccgggctcgtcttttttcctcacctggacagaacaagcgatatccggaatatttgctctgttgacacctgcaagctcctggactttcaggagttcactctatatttatccacccggaaaatcgaaggggcaagatccgtcctaaggctggaaaaaatcatggagaatttgaaaaacgccgaaatagagcccgacgattatttcatgagccggtacgaaaaaaagctggaggaattaaaggccaaagagcagtctggaacacaaatccggaaaccaagctag

SEQ ID NO: 221921 - DNA, 1107 bp, synthetic construct
  misc_feature 1..1107: note = Description of Artificial Sequence: Synthetic coding sequence
  source 1..1107: mol_type = other DNA
atggccattaagtctatcgcctctcgcctccgtgggagcagacgatttttgagcggctttgtggccggagcagtcgtgggagctgctggggctggcctggcggctcttcagttctttcgctcccagggggcagaaggagctttgacggggaaacagcctgatggcagcgctgaaaaagccgtgcttgaacaattcggatttcctctgaccgggacagaggcccgatgctacaccaaccacgctctcagttacgatcaggctaaacgtgtgccgaggtgggtgttagagcatatctctaaatccaaaatcatgggggacgctgataggaagcactgcaagtttaaacccgatcccaacattccccctaccttttcagcctttaacgaggattatgtgggatccggctggtcccgcggtcacatggctcccgcagggaacaataaattcagttccaaagccatggcagagaccttctatctgagtaatatcgtgcctcaagactttgataataattccggttactggaaccgtattgaaatgtactgccgcgagcttaccgagcggttcgaagatgtatgggtcgtgtccgggccactgactctgcctcagacaaggggggacggcaaaaaaatcgtgagttaccaggttatcggagaggacaatgtagctgtgccttcccacctgtataaagtgatactggcaaggcggtcctcagtgagcaccgaaccgctcgcgttaggggctttcgttgttcccaatgaagctatcggtttccagccccagctaacggaatttcaggtctccctccaggacctggaaaaactgagcggactcgtgttctttcctcacctggaccggacctccgatatccgcaacatttgtagtgtggatacatgtaagctgctggattttcaggagttcaccttgtacctgagcacccgtaagattgagggagctcgctcggtgctgcgcctcgagaaaatcatggagaacctgaaaaatgcagagatcgaaccagacgattactttatgagccggtatgagaagaaactagaagaacttaaggcgaaagaacagtccgggacccaaatcaggaagccctcatag

SEQ ID NO: 221922 - DNA, 450 bp, synthetic construct
  misc_feature 1..450: note = Description of Artificial Sequence: Synthetic coding sequence
  source 1..450: mol_type = other DNA
atggcgccagccggaaataacaaattttcttctaaggccatggcagaaaccttctacctgagcaacatcgtgccacaagacttcgacaataactccggatactggaaccgcatcgagatgtactgtagagaactgaccgagcgcttcgaagacgtgtgggtcgtgtctggccctctgactctgccccagacaagaggcgatggcaagaaaatcgtcagctaccaggtgattggcgaagataatgtggccgttccttcacacctatataaagaccacgcgggttgttgtgtggaatctcccctggggactagaacttctgaggaagccacggctagaatacaggagcgtgatgatggcggatcagatcagaggtcaggactcgtggaactggggatctacttcgaaggccgtgccaatcgcataagtggacgcattggctgccgagtctag

SEQ ID NO: 221923 - DNA, 819 bp, synthetic construct
  misc_feature 1..819: note = Description of Artificial Sequence: Synthetic coding sequence
  source 1..819: mol_type = other DNA
atgggatattttctgaagctgtacgcttatgtgaactcccattctctgtttgtctgggtctgtgatcgctcctataaacggagcttccgccctatgattctgaacaagattaaagaactttcccgcaatcagtttagcacaatgtcccatctacggaaggactcacagccaagcagtcccggagacgacgcgatggatcggagcggactgcccgatctgcaagggcgatttgaactttctggcaaaaatcgacagtatcctctagatgccctagaaccacagccatccatcggggacattaaggatataaaaaaggcagctaagagtatgctcgatcctgcccataaatcacacttccaccccgtgactccaagcctcgtgtttttgtgttttatcttcgacggcctgcatcaggcacttctgtccgtgggcgtcagcaagcgttctaacactgttgttggcaatgaaaatgaagagagaggaaccccctacgcgagtagattcaaagacatgccaaacttcatagccttagagaaaagtagcgtcctcagacattgttgcgatttacttatcggtatcgcagctgggagctctgacaagatctgcacttcaagcctgcaggtgcagcgcagattcaaggccatgatggcctctattggaaggctgtctcatggtgagagtgcagacctactgatctcatgcaacgccgagagcgccattggttggatcagtagcaggccatgggttggtgaattgatgttcaccctcctgttcggggacttcgaatctcctttacacaagttaaggaagtcatcttag

SEQ ID NO: 221924 - DNA, 894 bp, synthetic construct
  misc_feature 1..894: note = Description of Artificial Sequence: Synthetic coding sequence
  source 1..894: mol_type = other DNA
atgcgggctttgcgcgctggcctgacactggcgagtggtgccggtctcggggcagttgttgaaggatggcggcgtcggagagaggatgctcgggctgcacctggcctgctgggcaggctgcctgtgcttccagttgctgctgctgcagagctaccgccagtgcccggagggccacggggtcctggagagctggcaaaatatgggctacctggactggcccagcttaagtcccgtgagtcttatgtattgtgttacgacccgcgaacccgcggtgcattatgggttgtggaacagctgagacccgagagactgaggggagacggtgataggcgagaatgcgattttcgtgaggacgactctgtacatgcctaccaccgagcaaccaatgccgactatagaggatctgggtttgacagggggcaccttgctgctgcagctaaccatcgttggtcacagaaggcaatggacgacaccttctacctctcgaatgtggccccacaggtgccgcacctgaatcagaatgcttggaacaatttggaaaagtactccaggtcactgacacggtcctatcagaacgtgtacgtgtgcaccggcccactctttctgcccagaaccgaagcagatggtaagtcatatgtaaaataccaggtgatcggcaagaatcacgtggctgtgccaacacatttcttcaaggtacttatactcgaggctgcagggggtcagattgaactgagaacatatgttatgccgaacgctccggtggatgaggcaatccctctcgaacgattcctggttccgatcgaaagcatcgaacgcgcttccggactgctcttcgtacctaacatcctggcgcgtgccggttcattgaaagcaattactgccggaagtaaatag

SEQ ID NO: 221925 - DNA, 2847 bp, synthetic construct
  misc_feature 1..2847: note = Description of Artificial Sequence: Synthetic coding sequence
  source 1..2847: mol_type = other DNA
atggtcttcctcccactaaaatggtccctggccactatgtccttcctgctctcatcactgttggcgctacttactgtcagcacgccgtcttggtgccagagtacagaagcttctccgaaacggtcggacggaaccccattcccttggaataagattaggctgccagaatatgtgattcccgtccactacgacttgttgatccacgcgaatctaaccacattaacgttttggggaacaaccaaagtggaaataacagcttcccagcctacatctactattattctccactctcaccatctgcagatatcccgcgctaccctgcgtaaaggggctggcgagcgcctctctgaggagccacttcaggtgttggagcatccaaggcaggaacagatcgctctgctggcccctgaaccactactggtgggacttccctacaccgttgtgattcattacgccggaaatctgtcagagacttttcacggattctataaaagtacataccggactaaggaaggggagttgcgcatcctggcttctacacaattcgagcctacggcagccaggatggccttcccttgttttgatgagccagcattcaaagcttcattctcaattaagattagaagggagccacgacatctcgccatcagcaacatgccgttggtgaaaagtgttaccgtggccgagggcctcattgaggatcactttgatgttactgttaagatgtctacttatttagtggcctttattatctcagacttcgagtcagtgtcgaagataaccaagtctggagtcaaagtctctgtctatgctgtgcctgataagatcaaccaggctgattatgccctggacgccgctgtgactttgctggagttctacgaggactacttctctattccgtaccccctgcccaagcaggatctcgccgcaataccagactttcaaagtggtgccatggagaactggggcctgacaacctaccgggaaagcgcactgttgtttgatgccgagaaatcatcagctagtagtaaactcggtattacgatgacagtcgcacatgagctagcccaccagtggtttggaaacctcgtgacaatggagtggtggaacgacttatggcttaacgaggggttcgccaaatttatggaatttgtgtccgtgtccgtcacacacccagagctcaaagtaggcgattacttcttcgggaaatgtttcgacgctatggaggttgacgcactgaactcgagtcacccagtgagtacaccggtggaaaaccccgctcaaatacgtgagatgttcgacgacgtttcctatgataaaggcgcatgtatcttgaatatgctgagggagtacctttccgctgacgccttcaagtccgggatcgttcagtatcttcagaagcactcctacaagaacaccaagaacgaggacctgtgggattccatggcctctatctgccccacggacggtgtgaaaggcatggacggcttctgctctcgctctcagcatagctccagctcgagtcattggcatcaggaaggagttgatgttaaaaccatgatgaacacatggactctacagaaaggattccccttaatcactatcacagtgcggggtcgcaatgttcatatgaagcaagaacactatatgaaaggaagcgacggcgcaccggacactggttatctgtggcacgtccccttaactttcattacttcaaagtctgacatggttcacagattcctcctgaagactaagacagatgttttaattctccccgaggaagtcgaatggatcaagtttaacgttggaatgaatggttactatattgtgcactacgaggacgatggttgggattcgctaaccggcttattgaaagggacccataccgccgtgtcttctaacgatcgagcgagcttaatcaataacgcctttcagctcgtgtccatcggcaagctgagcattgagaaagccctggatttatctctgtacttaaaacatgaaacagagatcatgcctgttttccaaggattgaatgagttgatccccatgtacaaacttatggagaagagagatatgaacgaggtggaaacccaatttaaggctttcctcattaggctacttcgagatctgattgataaacagacttggactgatgaggggtctgtttccgaacgcatgctccgctcccagctgctgctcctggcatgtgtccacaattaccaaccctgcgtccagcgagctgaaggctattttcgaaagtggaaagaatccaacgggaacctgtccttacccgttgacgttacattggcagtgttcgccgtgggagcccagagcacagaagggtgggattttctgtactctaaataccaatttagtttatctagcactgagaagagccagattgaattcgcactttgcaggacacagaacaaagagaaactacaatggctccttgacgagagctttaagggagacaaaatcaagacacaggagttccctcagatcctcactctcattgggagaaatccggtggggtatccactagcttggcaattcctcaggaagaattggaataaactcgtgcagaagttcgaactgggctcgtcgtcaattgcacacatggtgatgggaactactaatcaattcagtactaggaccaggttggaagaagtcaaaggctttttttcctcgctcaaggaaaatggctctcagctgaggtgcgttcagcagacgattgaaactatcgaggaaaacattggatggatggataagaactttgacaaaatacgggtttggttgcagagtgaaaaattagaacatgaccccgaagcagacgccactggctag

SEQ ID NO: 221926 - DNA, 2826 bp, synthetic construct
  misc_feature 1..2826: note = Description of Artificial Sequence: Synthetic coding sequence
  source 1..2826: mol_type = other DNA
atggtattccttccacttaaatggtcacttgcaacaatgtctttcctccttagctctctgctggctttattgacggtgtccactccatcttggtgccagagtactgaggcatcaccaaaacgaagcgatggaacccccttcccctggaacaaaatccgcctgcccgagtatgtcatccctgtgcattatgatctcctcatccacgcgaacctgacaaccctgacgttttggggcaccacaaaagtggagattaccgcctctcagccaaccagcacaatcatcctccacagccaccatctacagattagcagggcaacgttgcgaaaaggtgcaggggaaaggctcagtgaggaaccgctacaggtcctggagcaccccagacaggagcagatagctctcttagcacccgaacccttactggtgggcctgccctataccgtagtcatccattacgccggtaatctctctgaaaccttccatggtttttataagagcacctaccggacgaaagaaggcgaattgaggatacttgctagtacccaattcgagcccaccgcggctaggatggcctttccctgcttcgacgagccagcctttaaagcctctttttctattaagatcaggcgcgagccccgtcatttagctatttcaaacatgccactggtcaagtcggtcactgttgctgaaggtttaatcgaagatcacttcgatgtcaccgtgaagatgtcgacttacctggtagcattcattatttcagacttcgagagcgtcagtaagatcactaaaagcggggttaaagtgtcggtttacgccgtgccagacaaaattaaccaagccgactatgcactggacgcagccgtaacactactggagttttacgaggattacttctcgattccctaccccttgcctaagcaggacctagccgctatccctgactttcagagcggagccatggagaattggggcctgaccacttatcgtgagtccgcccttctgtttgacgccgaaaagtccagcgctagtagcaaactaggtatcacaatgacagtcgctcatgaactggcacatcagtggttcggaaatcttgtgacaatggaatggtggaatgatttgtggttgaatgagggattcgccaaatttatggagtttgtgtctgtatctgttacacatccggaactgaaagtcggagactattttttcggcaaatgtttcgatgctatggaagtggacgctctcaactccagtcatcccgtcagtactcccgttgagaaccccgcacagattcgggaaatgttcgatgacgtttcttacgacaagggcgcatgcattttaaacatgcttagagaatatctttctgcagacgccttcaagagcgggatcgtccagtacttacagaagcacagttataagaatactaaaaacgaggatctgtgggacagcatggctagcatctgtcctacagacggggtcaagggaatggatggtttctgttcccggagccagcatagttctagctcaagtcactggcaccaggaaggggtggacgtcaagacaatgatgaatacatggacgcttcagaaggggtttccactgattaccataactgttcggggtcggaacgttcatatgaaacaagaacattacatgaaggggtctgacggggctcctgatactggttacttatggcatgttccactgacctttatcacctcgaaatccgacatggtgcataggtttttgcttaaaaccaagactgacgtgctgattctgcctgaggaggtggaatggattaagtttaacgtgggcatgaatggatactatatcgtgcattacgaggacgatgggtgggacagcttaacgggcctgctgaagggcacccatacagcagtgtctagcaatgatagggcatcattgattaacaatgcatttcaactcgtatcaattggcaaattgtccattgagaaagcactcgacctaagcctgtatcttaaacatgagaccgaaatcatgcctgtgttccagggactaaacgagttaatccccatgtataagctgatggagaaacgagacatgaacgaggtggagacacaatttaaggccttcctgatcagactcctccgcgatctcattgacaaacagacatggacagacgaaggcagcgtctccgaaaggatgctgcggagccagttgcttctgctggcttgcgttcacaattatcagccttgtgtgcaaagagcggagggctacttcagaaagtggaaggagagcaacggcaatttgtccctgcccgtcgatgtcacactcgccgtgtttgccgtcggtgcccaaagtactgagggttgggactttctgtattccaaataccaattcagcctgagttccactgaaaaaagccagattgaatttgccttgtgcagaacccaaaataaggagaaactgcagtggctgctcgacgagtcattcaaaggtgataagataaaaacacaagaatttcctcaaatactgacacttattggcaggaatccggttggatacccattggcttggcagttccttcgcaaaaactggaataagttagtgcaaaaatttgaactgggctccagcagtatcgcacacatggtcatgggcaccaccaaccagttcagtaccaggacacgtttagaagaagtcaaagggttcttttcctccctgaaggaaaatggttcccagctcaggtgtgtacagcaaactattgagaccattgaagagaatattggatggatggataagaatttcgataaaatacgggtgtggctgcagagcgagaagctcgaaaggatgtag

SEQ ID NO: 221927 - DNA, 2826 bp, synthetic construct
  misc_feature 1..2826: note = Description of Artificial Sequence: Synthetic coding sequence
  source 1..2826: mol_type = other DNA
atggtgttcctgcccctgaaatggtctctggctaccatgagcttcttactgagcagtttactagccttattaaccgtgagcactcccagttggtgccaaagtacagaagcatcccccaagcgctctgacggcaccccattcccctggaataaaattcgtttgcctgagtacgtgatcccagtccactacgatctccttattcatgccaatttaaccaccttaaccttctggggcaccacgaaggtcgagatcacagcgtctcaaccaacaagtaccatcatcctccactctcaccatttgcagatttctcgggctactttgcgaaagggggctggagaacggttatccgaggagcctctccaagtcctagagcatcctaggcaagagcagatcgctctgttggctcccgagcccctgttggttgggctgccatataccgtggtcatacactacgctggaaacctaagcgagacttttcatgggttctataaaagtacctatcgcaccaaagagggcgagttgagaatcctcgccagtactcagttcgagccgacggccgcacgcatggcctttccatgctttgatgaacccgctttcaaggcaagcttctctattaagatccgtcgcgaacccagacatttggccatcagcaacatgcccctggtgaagtctgtgaccgtcgccgaagggttaatcgaggaccactttgacgttaccgtaaagatgtctacatacctggtcgccttcattatatcggattttgagtcagtcagtaaaatcacgaaatcgggagtgaaggtgtctgtgtatgctgttccagataagataaaccaggctgactatgctcttgacgcagctgtcacattgttagaattttatgaggactatttctctattccctaccctctccccaagcaagatctggcagctatcccagattttcagtcaggggctatggagaattggggactgacaacctaccgggaaagcgcgctgctgtttgacgctgagaaatcgagtgccagctctaagctcggcatcacaatgactgtggctcatgagctggctcaccaatggttcggcaacctcgttactatggagtggtggaacgacttgtggctaaacgagggcttcgccaaattcatggaattcgtgagtgtatcggtcacacatcctgaattaaaggtgggggactacttcttcgggaagtgtttcgacgcgatggaggtcgatgcactgaattcaagccaccccgtcagcacgcctgttgagaacccagcacagatccgagagatgtttgatgatgtgagttacgataaaggagcctgtatcctcaacatgcttcgagagtacctgtccgcagacgcgtttaagtccggaatagtgcaatacctgcagaaacatagctataaaaatacaaagaacgaagacctttgggattcaatggctagtatttgtcctacagacggcgtcaaaggaatggatggcttttgtagccgcagccagcattctagttcctcatcccactggcaccaagaaggcgtcgacgtgaagacaatgatgaatacctggactctgcagaagggcttcccccttataactatcaccgtgaggggacggaatgtccatatgaaacaggagcactacatgaaaggaagtgacggcgctccagataccgggtatctctggcacgtgcccctaaccttcattaccagcaaatccgacatggttcaccgattcttgcttaagacgaagaccgacgtcctgatcctcccagaggaagtggagtggatcaaatttaacgtgggcatgaacggatattacatcgtgcactatgaagatgatggctgggactccctgacaggcctgctcaaaggcactcacacagctgtgtcctctaatgatcgagcatctctcatcaacaacgctttccagctcgtgtccatcggtaagctctccatcgaaaaagctttggatttatccctgtacctgaagcacgagacggaaatcatgccggtgttccagggtcttaacgaattgataccaatgtacaaactcatggaaaagcgcgatatgaacgaagtggaaacccagtttaaggcatttctcatccggcttctgagagaccttattgataagcagacttggactgacgagggcagcgtttcagagcggatgcttagaagccagcttctcctgctggcttgtgttcataattatcagccatgcgttcagagagccgagggatacttccggaaatggaaagaaagcaacgggaatctgtctcttcctgtggacgtgaccttagcggttttcgcagtgggagcacaatctacggaggggtgggatttcctgtactcaaagtatcagttcagcctttcaagtactgaaaagagtcaaatcgaattcgctctgtgcaggacccagaacaaggagaaactgcagtggctgttagacgaaagctttaagggcgacaaaataaagacacaggaattcccacagatccttacactcattgggcgtaatccggtgggatacccgctcgcgtggcaatttctgcgtaaaaactggaataagttggtccagaagtttgaattgggaagtagctctatagcgcacatggttatgggcactacgaaccagtttagcacgcgtacgcgtttggaggaagtgaaaggtttcttctcgtcccttaaggaaaacggtagccaattgcgctgcgtgcaacaaaccattgagacgatcgaggagaacatcggctggatggataaaaactttgataaaattagagtgtggctgcaatcggaaaagctcgaacgcatgtag

SEQ ID NO: 221928 - DNA, 390 bp, synthetic construct
  misc_feature 1..390: note = Description of Artificial Sequence: Synthetic coding sequence
  source 1..390: mol_type = other DNA
atggtctttctgcccctgaagtggtcactcgccaccatgagctttctcttgtctagcctgctcgctttgcttaccgtttcaacaccctcatggtgccagtccacagaggcgtcacctaaacgatccgatggaactccctttccttggaacaagatccggctgcctgaatatgtgataccagtgcattacgatctactgattcacgccaatctgacaactttgaccttctggggtaccaccaaggtggaaattaccgcctcacagcccacttccactatcattttgcatagccaccatctgcagataagcagagcaacattgaggaaaggcgcaggtgaacgactgagtgaagaacccttgcaggtccttgagcacccacgtcaggagtag

SEQ ID NO: 221929 - DNA, 2748 bp, synthetic construct
  misc_feature 1..2748: note = Description of Artificial Sequence: Synthetic coding sequence
  source 1..2748: mol_type = other DNA
atgttccattcctctgccatggtgaactcacatagaaagccgatgttcaacatacatcggggtttctattgtctgactgccattttgccccaaatttgtatttgcagccaattttctgttccatcgtcctatcattttaccgaggaccctggcgcattccctgtcgccacaaacggcgagagatttccatggcaggaactcaggctgccgtctgtcgtgataccactccactacgatttgtttgtgcatccaaacctgaccagtctcgattttgtagcatcagaaaagatcgaagttctggtgtcaaatgccacacagttcataattttgcattccaaggatctggagattactaacgcgacactgcagtcagaggaagactccagatacatgaagcccggaaaggaactcaaagtgctcagttaccctgctcacgaacagattgcattactggtcccagagaaactgactccacacctcaaatactacgtagctatggacttccaggcaaaactcggagacggcttcgagggtttttacaagagtacctatagaacactggggggtgagacaagaattctcgcggttaccgacttcgagcccacgcaggccaggatggcgttcccttgctttgacgagcctctcttcaaagctaatttcagcatcaagatcaggcgtgagagtcggcacatagccctgtctaatatgcccaaggtcagtatttacgcctctccagacaaacggaaccagacgcattatgccttacaggccagtctgaagctgctggacttttacgaaaagtacttcgatatatactaccctctgagcaaactcgatctgatcgctattcctgacttcgccccaggtgcaatggaaaactgggggttaattacatatagagaaacctctctactttttgaccctaagacctcttctgctagtgataaactttgggtgacgcgggttatcgcacacgaacttgcacaccaatggtttggcaatctggtcactatggagtggtggaatgatatttggcttaaggaggggttcgcgaaatatatggagctaatagcagtcaacgctacataccctgagctccagtttgatgattactttcttaacgtgtgcttcgaggtaatcacaaaagacagccttaacagcagcagacccatttccaaaccagccgagacccccacccagattcaggaaatgtttgatgaggtgtcctacaacaaaggcgcatgcatcctgaacatgctaaaagactttctgggcgaagaaaagtttcagaaaggcatcatacagtacttaaaaaaattttcctacagaaacgccaagaatgacgacctgtggagctccctgtctaacagttgcctggaatctgattttacgtccggtggcgtgtgccactccgatccgaagatgaccagcaacatgctagccttcctgggagagaacgccgaggttaaagaaatgatgactacgtggaccttacagaaggggatccccctccttgtcgtgaaacaggatggttgctcgttgcgcctgcagcaggaacggttcttacagggggtcttccaggaggaccctgagtggcgagctctgcaggaacggtacttatggcacattccactcacttatagcacatcctcctcgaatgtgatacaccgacacatcctgaaatcgaaaacggacactctggatctacccgagaaaacctcgtgggtcaaatttaacgtggactctaacgggtattacatagtacactatgaaggccatgggtgggatcaactgatcacccagctcaatcaaaaccatactttactgcgtccaaaagaccgcgtagggctgattcatgacgttttccagctcgtaggggctggcagactgaccctggacaaggctctcgacatgacctattacctccagcacgagacatcctcacctgcccttctggagggactgtcatatctggagagcttctaccatatgatggacaggcgcaacatctccgacatttccgaaaacctcaagcgctacctgcttcagtactttaaacctgttattgatcgtcagagttggtcggacaaaggaagcgtgtgggacagaatgctgagatctgccctgctcaagctcgcctgtgatttgaatcatgcgccttgtattcagaaagccgcagagctgttctcccagtggatggagtcctccggcaagctgaacataccaacagacgtccttaagatagtttactctgtgggtgcacagacgacggccggatggaactatctgcttgagcagtacgaactcagcatgagctctgcggagcagaataagatcctgtacgctctctcaacttccaaacaccaggagaaactgttaaaacttatcgagctggggatggaagggaaagtcataaagacgcagaatctggcagctttgctgcatgccattgccagacgcccaaaaggacaacagctggcttgggattttgtgcgcgaaaactggacccatctgctgaaaaaatttgacttaggctcttatgacattagaatgataatctccggcacaactgcacattttagcagcaaggacaaactccaggaggtgaaactgttctttgaaagccttgaggctcagggttcccatctcgacattttccagacagtgttagagacaatcaccaaaaatataaaatggctggagaaaaacctgcctacactgcgcacttggctcatggtgaacacctag

SEQ ID NO: 221930 - DNA, 2883 bp, synthetic construct
  misc_feature 1..2883: note = Description of Artificial Sequence: Synthetic coding sequence
  source 1..2883: mol_type = other DNA
atgtttcattcgagtgccatggtgaactcgcacagaaaacccatgtttaacatccacagaggattttattgtctcacggccattcttccacaaatctgtatttgttcccaattttctgtgccctcttcgtaccacttcactgaggacccaggcgctttccctgtcgccactaacggtgagaggtttccgtggcaggagcttcgcctgccttcagtcgtgattcccctccactatgacctgttcgtgcaccctaatctgacttccctggacttcgtcgcctccgagaagatagaggtgctggtgtcaaacgccacgcagttcattatcttgcactcaaaggacctggaaatcaccaatgccacattacaaagcgaagaggactctagatacatgaaacctggaaaggagctaaaagtgctgtcttacccggctcatgagcaaattgcgcttctagtcccagaaaagttaaccccacatctgaaatattatgtggctatggatttccaggccaaactaggcgacggatttgagggcttttataagagtacttaccgcaccttaggtggagaaactcgcattttagcggtcaccgatttcgagcccacccaggccaggatggcatttccatgttttgacgagcccttatttaaagctaatttctcaatcaagatccgaagggagtccagacacattgccctttccaacatgcctaaagttaaaaccatagagttggaaggtggcctcctagaagaccatttcgagaccacagtaaaaatgagtacttaccttgtggcctacattgtgtgcgatttccactcactgagcggctttacttccagtggagtcaaggtgtccatttacgcttctccagataaacggaatcagacccattacgcactgcaagctagcctgaagctgctggatttctacgaaaagtacttcgacatatactaccctctaagcaagctagatctcattgccataccagatttcgccccaggtgccatggaaaactggggcctgattacctatagggagacctcactgctcttcgatcctaaaacctcctccgcctcagataagctatgggtgactcgagtgattgcccacgagttagcccaccagtggttcggcaacctggtgaccatggagtggtggaatgatatatggttaaaggagggtttcgccaagtacatggagctgatcgcagtcaatgcgacttaccccgagctgcagtttgatgactatttcctgaatgtttgcttcgaggtgattaccaaagactcccttaattccagcagaccaatctctaaacctgctgaaactccaactcagatacaggaaatgtttgatgaagtgagttataacaaaggtgcatgcatccttaacatgttgaaggattttttgggggaagagaagtttcagaaggggattattcagtacctgaagaagttttcttatagaaatgccaagaacgatgatctgtggtcaagcctgagcaatagctgccttgaaagcgacttcacttctggcggagtttgtcacagcgacccgaagatgacttcaaacatgttggcattcttgggggaaaacgccgaggttaaagaaatgatgactacctggacccttcagaaaggaatcccgttactagtagtgaaacaggatggttgtagtctccgcctgcagcaggagagatttctgcagggcgtgttccaggaggaccctgaatggagggcactacaggaacggtacctgtggcacatccccctaacctacagcacttcgtcgtccaacgtcattcacagacacatcctgaaatccaaaactgacacactcgatctgccggagaagacaagctgggttaaattcaatgtggactctaatgggtattatatcgttcactacgaaggacacggctgggaccagctgattactcaacttaaccaaaaccacacgttgctgaggccaaaggaccgcgtgggtttgatccacgatgtgttccaactggtgggcgctggacgcctcacccttgacaaggctttagatatgacatactacttgcagcatgagacatcaagtccagccctcttggaggggctctcatatctggaatctttttaccatatgatggaccgccgtaatatttccgacatctcggaaaatctgaagaggtatttactgcagtattttaagcccgtgatagataggcagagctggtctgataaaggttcagtatgggaccggatgttacgcagcgccctactcaagttagcatgcgatctgaatcatgcgccttgcattcaaaaagctgccgagttgttttctcagtggatggagtcctccggaaagttgaatatcccaactgacgttctgaagattgtgtattctgtgggcgctcagacgaccgctgggtggaactatctgctggagcagtacgagctcagtatgtcaagtgcagaacagaacaagatcttgtacgctctgtcaacctcgaaacatcaagagaagctgttaaagctgatcgaattgggaatggaggggaaagtgatcaaaacccagaacctggccgcactgctgcacgccattgctagaaggccaaaaggacaacaactggcctgggattttgttagagagaactggacccaccttttgaagaagttcgatctcgggagctatgatatccggatgatcataagtgggacaaccgctcacttttcttccaaagataaacttcaggaggtgaagctcttttttgagagtctggaagctcagggaagccatctcgacatattccaaactgtgcttgaaactattactaagaacatcaagtggctcgaaaaaaatctgcccacgctaaggacttggctgatggtgaatacgtag

SEQ ID NO: 221931 - DNA, 1053 bp, synthetic construct
  misc_feature 1..1053: note = Description of Artificial Sequence: Synthetic coding sequence
  source 1..1053: mol_type = other DNA
atgtttcacagttcagctatggttaattcacaccgaaagcctatgttcaacatccacaggggtttttactgtctcaccgccatcttgccacagatatgcatatgttcccagttcagcgtgccttcatcctatcattttaccgaggatccaggggcatttcccgtcgccacgaatggtgagcgctttccctggcaggaactgagactgccctcagtagtgatccctcttcactatgatttgttcgtacaccctaatctcacctcacttgatttcgtcgcttctgaaaagatcgaagtgttggtgtctaatgcaactcagttcataatcttgcactctaaagatttggaaattacaaacgctaccctgcagtccgaggaggattcccgctatatgaagccgggaaaagaattaaaggttttgagctaccccgctcatgagcaaatagcacttcttgtgccggaaaaattaaccccccatctgaagtattatgtcgccatggacttccaggctaaactgggcgatgggtttgaagggttttataaaagcacttacaggaccctcgggggtgaaacccggatactggccgtgacagactttgaaccgacccaagcacggatggcgttcccttgttttgatgaacccctgttcaaggccaacttttccatcaagatacggagggagagccgccacatcgccttgtcgaacatgcctaaagtgaaaaccatcgaactggaaggaggcctgttggaggatcacttcgaaaccacagttaagatgagcacatatttggtcgcgtatatagtgtgtgacttccatagcctctctggctttacaagtagcggagtgaaggtttcgatttatgcctctcccgacaaacgcaatcagacacactacgccttgcaagcttctctgaagttactagacttctacgagaaatattttgacatttactaccctctgagcaaattgggtatgtttaaattccatatcattgtgtttatttttgcacataaaacttgctttgacttatttcccctgagcctgtcaatgtag

SEQ ID NO: 221932 - DNA, 2085 bp, synthetic construct
  misc_feature 1..2085: note = Description of Artificial Sequence: Synthetic coding sequence
  source 1..2085: mol_type = other DNA
atgtttcactcctcagctatggttaacagccacaggaaacccatgttcaacatccaccggggtttttattgcctgaccgccatccttccgcagatttgtatctgcagccaattctctgttccaagctcctatcattttaccgaagatccaggcgctttccccgtggctacaaacggggagagattcccttggcaggaactgaggctgccatcagtggtgattccactgcattacgacctgtttgtacatccaaacctgaccagcttagacttcgtcgctagcgagaagattgaagtactggtaagcaatgccactcaatttatcatcctgcacagtaaagacctggagatcaccaatgcaactctgcagagtgaagaagactctcgttatatgaagcctggcaaagaactcaaggttctgtcatatcccgcacatgagcagattgcacttttggtaccagagaaattgacaccacatctaaaatattatgtcgccatggattttcaggcaaaactgggcgatggatttgaggggttttataagtccacatatcggacactgggaggcgagacacggattctggccgttacagacttcgagccaactcaggcacggatggcgttcccatgcttcgatgaacctctgttcaaggcgaatttctcaataaaaatacgacgagagagccgacatatagcattgagtaacatgcccaaggtgaaaacgatcgagctggaggggggacttcttgaggaccatttcgaaaccactgtaaagatgtctacctatctcgtcgcatacattgtttgcgactttcatagcctctctggctttacaagttccggagttaaagtctcaatatatgcatcaccagataagagaaaccagacccactatgccctccaggcttcactgaaactgcttgacttttacgagaaatacttcgatatctactaccccctgtccaagttagaccttatcgcaatccctgattttgcacccggagctatggagaactggggactcatcacttaccgtgaaacgagtctgctctttgaccccaaaacctccagtgccagcgataaactgtgggtcaccagagtgatcgcccacgagctcgcccaccagtggtttgggaacctggtgacaatggagtggtggaatgatatctggctcaaggaaggctttgctaaatatatggagcttattgccgtgaacgccacatacccggagctgcagttcgacgactattttctgaacgtttgcttcgaggttataaccaaggacagccttaactcttccaggccaattagcaagccagccgagaccccaactcagatccaggaaatgttcgacgaagtatcatataacaagggcgcttgtatactcaacatgctgaaggatttcctgggtgaagagaagttccagaaaggaatcattcagtacctgaagaagtttagctataggaacgcaaagaacgatgacctgtggtccagtctctcaaattcctgcctggagtcagatttcactagcgggggagtgtgccactcagatccgaagatgaccagtaatatgttggccttcctaggggagaatgccgaagtgaaggagatgatgacaacatggaccctccagaaaggcattcccctgttggtggtgaaacaggacggctgttctctaaggctgcaacaggaaagattccttcagggagtgttccaggaggaccccgaatggagggctctgcaggaaagatatctttggcacattcccctgacttactccacgagcagttcaaacgtgattcaccggcacatactcaagtccaagacggataccttagatctacctgaaaagacctcctgggtcaaatttaacgttgatagtaacggctattacatcgtgcactatgaaggtcatgggtgggatcagcttatcacacagctgaaccagaatcacaccttgctgaggcccaaggatcgagttgggctgattcatgacgttttccagcttgtgggggctggacgcctgacactggataaagccctggacatgacctattatctccagcatgaaacctcttctccctag

SEQ ID NO: 221933 - DNA, 1452 bp, synthetic construct
  misc_feature 1..1452: note = Description of Artificial Sequence: Synthetic coding sequence
  source 1..1452: mol_type = other DNA
atggaggaaggtgggggaggcgtgagaagcctcgtccccggaggtccagttttactagttctgtgcggccttctggaggccagcggcggaggacgggctttgcctcagctgagcgacgacattcctttccgcgtaaattggccgggaacggagttctccctgcccactacaggagttttatacaaagaggacaattacgtgattatgacaacagcccacaaggaaaagtataagtgtattctcccgctcgtcacaagcggggatgaggaagaggagaaggactataagggaccaaatccgcgtgaactactggaaccgcttttcaagcaatcttcatgctcctatagaattgagtcatactggacgtatgaggtgtgccatggcaagcacatccgtcaataccatgaggagaaggagactggccaaaagatcaacatacacgagtattacttgggaaatatgttagcgaaaaacctgctatttgagaaggagagagaggccgaggagaaagaaaagtctaatgaaattccaaccaagaacatagagggacagatgacaccatactatcccgttggcatgggtaacggaactccttgtagcttaaaacaaaataggccacggtcttccacagtaatgtacatctgccatccggagagcaagcacgaaatcctatccgttgctgaagtgacaacatgtgaatacgaggtcgtgatcctcactcctctcttgtgcagtcacccaaaataccgctttagagcttcaccagtcaacgatattttctgtcagagcttacccggaagccctttcaaacctctcacactgagacagctcgagcagcaggaggagatcttaagagtgccttttaggcgaaacaaagaagaggacctccaaagcacgaaagaagaaaggtttcccgcaatccacaagagtatcgctattggtagccagccggtcctcaccgtcggaaccacccatattagtaaactgaccgacgatcagttgattaaggaatttttatccggcagctactgctttcgcggaggcgtgggatggtggaagtacgagttttgttatggtaagcacgtgcatcagtatcacgaggacaaggatagcgggaagacctcggtcgtagtgggtacttggaatcaggaggaacatatagagtgggcaaaaaagaacaccgctagggcctatcacctgcaagatgacgggacccaaacagtccggatggtgagccatttttacgggaatggtgacatctgtgatataacagacaagcctcgccaggtcacggtcaaactaaaatgcaaggagagtgatagtccccacgcagttacagtctacatgctggagccccacagctgtcagtatattctcggagtagagtccccagtgatttgtaaaatactggataccgcagacgaaaatggcctgctgagcctgcctaattag

SEQ ID NO: 221934 - DNA, 1290 bp, synthetic construct
  misc_feature 1..1290: note = Description of Artificial Sequence: Synthetic coding sequence
  source 1..1290: mol_type = other DNA
atggaggagggaggtggcggagtgaggtctctggtgcccggaggaccggtactcctagttctttgtggcctgctcgaagctagcggcggtggtagagccctgccgcagttgagtgatgacatcccatttcgtgttaattggcccggtacagagtttagccttcccaccaccggcgtcctctacaaagaggataactacgtcatcatgacgaccgcccataaggaaaagtataagtgcatattgccactggtcacctccggagacgaagaagaggaaaaagattataaaggtccaaatcctcgggagctgctggaacccctgtttaagcaatcctcctgctcttaccgtatagagtcctactggacttacgaggtgtgtcacggaaaacatattcgccagtaccatgaagaaaaagagaccggacagaagatcaacatccacgaatattacctcggtaacatgcttgccaaaaacctgctgtttgagaaagagcgcgaagctgaagagaaggagaagtcaaatgaaatccccacgaagaatatcgaaggccagatgactccatattaccctgtcggcatgggaaatgggactccatgtagtctcaagcagaacaggccgagatcaagtaccgtcatgtatatctgtcatccagagagcaagcacgagatcttgtccgtggccgaggtaactacttgcgagtacgaggtcgtaatcctcacgccattactctgctctcatccgaagtaccgattccgggctagcccagtcaacgatatcttctgtcagagtttgccaggctcacccttcaaaccattgactctgaggcagctggaacaacaagaggaaatactgagggtcccctttagacgaaataaggagggggtaggatggtggaagtacgagttttgctatggcaagcatgtccaccagtaccatgaggacaaagactctggtaagaccagtgtggtggttgggacctggaaccaggaagaacacatcgagtgggctaaaaagaacacagcacgggcttatcacctccaggacgacggaacgcagaccgttcggatggtgtcccatttctatggcaatggagacatatgcgacattactgataagcccagacaggtcacggtaaaattgaaatgtaaggagtctgattccccccatgcagtgaccgtatatatgctggagccacattcttgtcagtatattttaggtgttgaaagtccagtcatttgcaagatattagatacagccgatgagaatggcctgttatccctccctaattag

SEQ ID NO: 221935 - DNA, 1374 bp, synthetic construct
  misc_feature 1..1374: note = Description of Artificial Sequence: Synthetic coding sequence
  source 1..1374: mol_type = other DNA
atggaggaaggtggaggaggggttagaagtctggtgcccggaggtcctgtgcttctggtgctctgtggcctgctggaggcttccggagggggaagagcgctgccccagctgtccgatgatatcccctttcgcgtgaactggcctggcaccgaattctctctccccactaccggtgtgctgtacaaggaggataactacgtgatcatgaccaccgcccacaaagagaaatacaagtgtatcctgcctctcgtcacttctggggacgaagaagaggaaaaggattacaagggccctaatccccgtgagttgcttgaacctctgttcaaacaaagctcgtgctcttatcggattgagtcttactggacttatgaggtctgccacggaaaacacatacgacagtatcacgaggagaaggagactggccaaaaaataaatatacatgagtactatctgggcaatatgttggccaaaaatcttcttttcgagaaggaacgggaggctgaagagaaagaaaaatctaacgaaatacccacgaagaatatcgaaggacagatgacgccctactaccccgtcggaatgggcaatgggaccccctgtagcctcaagcagaatcgaccaagatcaagcacagttatgtatatttgccaccctgaaagcaagcatgagatattatccgtagccgaagtcactacatgcgagtatgaagtggtgatcttgaccccactgctttgtagccatcctaagtaccgctttagagcctccccagtgaacgatatattttgccaaagtcttcctggctcaccattcaagccgttaacgctccgccagcttgagcaacaggaggagatcctccgcgtccccttccgaagaaataaggaggaggacttacagagtacaaaggaagaaagattcccagctatccacaagagtatagcaataggctcccagcccgtcctgaccgttggaaccacacacatcagcaagttgacagacgaccaactcatcaaggagttccttagtgggtcttactgcttccgcggtggcgtgggttggtggaaatatgaattttgctacgggaagcacgtgcaccaatatcacgaagacaaagacagcggaaaaacaagcgtagtcgtgggaacttggaaccaggaggagcacatagaatgggcaaagaaaaacactgctcgggcttatcatctgcaagatgatgggactcagaccgtgaggtgtaaagaatctgactctcctcacgctgtaaccgtgtacatgctggagccacatagctgccagtatattctgggcgtggagtctcctgtcatctgcaaaatacttgacacagcggacgagaacggcctcctctctctgccaaattag

SEQ ID NO: 221936 - DNA, 2715 bp, synthetic construct
  misc_feature 1..2715: note = Description of Artificial Sequence: Synthetic coding sequence
  source 1..2715: mol_type = other DNA
atggagtggggctctgagtccgctgcggtgaggagacatcgggttggcgtggaacgtagagaaggcgcagctgcggcacctcctcccgagcgggaagcgcgtgctcaagaaccgctcgtggatgggtgttctggcggaggcaggacacgaaagcgctcgcccggaggtagtggaggtgcatcaagaggggcaggtaccggactgagcgaggtgagggctgctttaggcctggccctctatctgatagcactacggaccctcgtgcaactcagcttgcagcagctggtgttgaggggggcagccggtcatcggggtgagttcgacgctctgcaggctcgggattaccttgaacacattacctccattggcccacgtacaacgggttcccccgagaatgaaatccttaccgtgcattacctgctggaacagattaaactgatcgaagtacagagtaactccttgcataagatctctgtcgacgtgcagcgccctacaggcagcttctccattgactttctgggcggatttacttcatattatgataatattaccaacgtagttgtgaagcttgagccacgcgacggcgcacagcacgcagtgctggctaattgtcactttgatagtgtagctaacagtcccggagccagcgatgacgccgtctcatgctctgtgatgcttgaagtactccgcgtactgtccactagttcagaggcgttgcatcacgccgtgatctttctatttaacggagctgaggagaacgttctgcaggcctcccacggatttatcacccaacatccatgggccagcctcatccgcgcttttattaacctagaggcagctggagttggcggaaaggagcttgtttttcagactgggcctgaaaacccctggctcgtgcaggcttatgtgtctgcagctaaacatccatttgcatcagttgtggctcaagaagtgttccagtctggcattatccccagtgacactgactttcgcatctaccgggacttcgggaacatacctggcattgacctggcctttattgagaatggctacatctatcacacaaaatacgacactgccgaccggatcttaaccgactcaatccaaagggcaggcgataacatcttggcagtgcttaagcacctcgctacttcagacatgcttgcagcggcttctaaatatcgacacgggaatatggtgtttttcgatgtactgggtctgttcgtgatcgcatatccttccagaattggctcaatcatcaactatatggtggtgatgggcgtggtactgtacttgggaaagaagttcctgcagcccaagcacaaaaccggaaactataagaaggacttcctgtgcggactgggcatcactcttatctcttggtttacctccttggtcaccgtgctgatcattgccgtattcatctctctgatcgggcagagtttgtcatggtacaaccatttttacgtgagcgtgtgcctctacggaaccgctaccgtagcaaagatcattctgatccacacccttgcgaagcggttttattatatgaacgcatctgcccagtatctgggtgaggtgttcttcgatatctctctgttcgttcactgttgcttcttagtgactttaacgtatcaggggctttgttctgctttcatttccgccgtatgggtggcattccccttgctgaccaaattgtgtgtgcacaaagatttcaagcagcacggagcccagggtaagttcattgctttctatctcctgggcatgtttatcccttacctgtatgccctgtatttaatctgggccgtctttgaaatgtttacaccaattctgggcaggtcgggttccgaaattcctccagatgtcgtgctcgcatctatattggccggttgtaccatgattctgtcaagctacttcattaatttcatttacctggcaaagtcaacaaaaaaaaccatgttaactctgacacttgtgtgtgcgataacattccttttagtttgctctgggacattcttcccctacagttctaaccctgcgaaccctaaacctaagagagtcttcctgcagcacatgacacgcaccttccatgacctcgaggggaatgccgtcaagcgagactcgggcatttggataaatggtttcgactataccggtatcagccacatcactccgcacatcccggagataaacgattctattcgggcacactgcgaagagaacgctcctctgtgcggttttccttggtatttacctgttcactttctgatcagaaaaaattggtatttaccagcgccagaggtatctccgagaaaccccccacattttcgtctgataagcaaagagcagacaccctgggactcaatcaagctgactttcgaggccactggtccatctcacatgtccttctacgtcagggcgcacaaaggctcaaccctgtcacagtggtctctagggaacggcacaccggtaacctctaagggcggagattacttcgtgttctactcacacggactgcaggcaagcgcttggcaattctggatcgaagttcaggttagtgaagaacaccccgagggtatggtaacagtggcaatcgccgcacactacctgtctggggaagacaagcgctcgccccagcttgatgctttaaaggagaagtttccagattggacttttcctagtgcctgggtgtgcacctatgatctgtttgttttttag

SEQ ID NO: 221937 - DNA, 1056 bp, synthetic construct
  misc_feature 1..1056: note = Description of Artificial Sequence: Synthetic coding sequence
  source 1..1056: mol_type = other DNA
atgctcgaggttctgagggtgctgtctacaagcagcgaggcgctgcatcatgccgtgatttttttgtttaacggtgcagaggaaaatgtgctgcaggcgtcacatggctttatcactcagcacccgtgggccagtttaattagggcctttatcaacttggaggccgcaggcgttgggggaaaggagctggtctttcagacagggccagaaaacccctggctcgtgcaggcctatgtcagcgctgcaaagcatccattcgcaagtgtagtggctcaggaagtatttcagagcggcatcataccctctgacaccgactttagaatctacagagattttgggaatataccaggaatcgacctcgcctttattgaaaatgggtacatttaccatactaaatacgatacggctgatcgaatacttactgacagcatccaacgggcaggggacaatattctggccgttctgaagcacttagccacaagcgacatgcttgccgcagcatcgaagtatcgccacggaaatatggtgttttttgacgtgcttggcctatttgtaatcgcctacccaagtcgtattggaagcattatcaactacatggtggtaatgggcgtggtactgtatctgggcaagaagttcctgcagcctaaacacaaaaccggaaactataaaaaggactttctctgcggcctcggcatcacgctgatatcttggttcacatccctcgttactgtactgattattgccgtcttcatctctttgatcggtcagagcctgtcctggtacaatcacttctatgtttccgtctgcctgtacgggacggcaacagtggctaagattatactcatccacacgctggccaaacgtttttactatatgaatgcgtcagctcagtatctgggcgaggtgtttttcgacattagtctgtttgtacactgctgtttcttggtgacactgacgtaccaaggactctgttccgccttcattagcgcagtgtgggtggcctttccgctgttaacaaagctctgtgttcataaagatttcaagcaacatgattag

SEQ ID NO: 221938 - DNA, 2715 bp, synthetic construct
  misc_feature 1..2715: note = Description of Artificial Sequence: Synthetic coding sequence
  source 1..2715: mol_type = other DNA
atggaatgggggagtgaatctgcggcagtgcgaaggcaccgggttggcgtagagcgacgggagggcgctgccgctgcgcctccccctgaacgtgaagccagggcccaagagccgttagttgatgggtgttccggcggtggcaggaccagaaaacgatctccaggagggtcgggaggagcatcccgtggcgcagggactggactaagcgaggtgagggctgcactggggctcgcactgtatcttatagccctgcggacgctggtccagcttagtttgcagcagctggttctccggggtgccgcaggacaccggggtgagttcgatgccctgcaggctcgggattatctggaacatatcaccagtattgggcctcggactaccggaagccccgaaaatgagattcttactgtacactatcttctggagcagattaagctcattgaggtgcagtctaattcattacacaaaatttccgtggatgtccagcgccctacaggctcattcagtatcgatttcttaggtggctttactagttattacgacaacatcacgaatgtagtcgtgaagctcgaacctcgagacggggcacagcatgcggttttggccaactgtcactttgactccgttgctaactctccgggtgccagcgacgacgctgtaagctgttccgttatgctcgaggtactgagggtgctgagcacatccagcgaggcactccaccatgctgtgattttcttatttaacggcgcagaagaaaatgtgttgcaggccagccacgggttcattacgcagcacccatgggcatctctcattagggctttcattaacttagaagccgctggggtggggggtaaggagctggtgttccagaccggtccggaaaatccctggctcgtccaggcctacgtgtccgccgctaaacatcccttcgcctctgtggttgcccaagaggtgtttcagtctggaattatcccctctgacacggacttccgcatatatcgggattttggaaatatccctggaatcgatctggctttcattgaaaatggatacatctatcacacaaagtacgataccgccgaccgcatcctaacagactcgatccaaagggctggagacaacattctcgccgtcttgaagcaccttgcaacatcggacatgctggccgctgcttccaagtatcgccacggcaacatggtgttttttgacgtcttgggtctctttgtaatcgcgtaccctagcagaatcggttcaattatcaattacatggtagtaatgggcgtggtgctatacctgggcaaaaaattcctgcagccaaaacataaaactggcaactacaagaaagatttcttatgtggcctgggaattactttgatttcctggttcacatcactcgtgaccgtccttatcatcgccgtgtttatctccctcatcgggcagtctctcagctggtataatcacttttatgtgtctgtgtgcctatacgggaccgcgaccgtggccaaaatcattctgatccatacactggccaagcggttctactatatgaatgccagtgcacagtacctgggagaagtttttttcgatataagcctctttgtgcactgttgttttctcgtaaccctgacctatcagggactgtgtagtgcattcatctctgccgtgtgggtcgcctttccactcctgaccaagctgtgcgtgcataaagatttcaaacagcatggggcacaggggaaatttatcgctttctacctgctgggcatgttcatcccctatctctatgcactttatttgatatgggccgtatttgagatgttcacccccatccttgggcgatcaggttcagagatcccccctgacgtcgtgcttgcctctattctggccggttgtaccatgattctcagttcttatttcatcaatttcatctatcttgctaagagtacaaagaaaacaatgctgacgctcacactggtgtgtgccatcacctttctcctggtgtgtagtggcacatttttcccctactccagtaaccccgctaacccgaaaccaaagagggtatttctccagcacatgaccaggacatttcatgatcttgagggcaacgcagttaaacgagacagtgggatttggatcaacggcttcgattacaccggcatctcacatatcaccccgcacatccccgagatcaatgattctattagggcccactgtgaggaaaacgctccgctgtgcgggttcccatggtacctgccggtacacttcctgatcaggaagaactggtatttgcccgcaccagaggtttcaccacggaatcctccacattttcgccttatcagcaaagagcaaaccccttgggacagtatcaagctgaccttcgaggctactggtccttcccacatgtctttctatgtgagagcccacaaaggttcaacattgtcgcagtggtcacttggcaacgggacgcccgtaacctctaagggcggtgattacttcgtgttctattcccacggactacaggcgagtgcctggcaattttggatcgaggtgcaggtgtctgaggaacaccccgagggaatggtcacagttgccattgctgctcattaccttagcggtgaggataagcgttctccccagctggatgccctgaaagagaaatttcccgactggacattccccagcgcttgggtgtgtacctatgacctctttgtgttttag

SEQ ID NO: 221939 - DNA, 1260 bp, synthetic construct
  misc_feature 1..1260: note = Description of Artificial Sequence: Synthetic coding sequence
  source 1..1260: mol_type = other DNA
atggtggtgatgggcgtagtgctctatctgggtaagaagtttctgcagcccaaacacaaaactgggaactacaaaaaggacttcctgtgcggcctgggtattaccttaatttcgtggttcacctctctcgtcacagttctgatcattgcagtctttatctcgctgatcggacagagcttgtcatggtataaccacttctacgtgagcgtgtgtctgtatggcacagccacggttgctaaaattatattaatacacaccctcgcgaagcgattctattacatgaatgcctcagcccagtacctgggcgaagtgttcttcgacatcagcctgttcgtgcattgttgctttctggtgactttgacctatcaaggcctgtgttctgcttttatctctgcagtctgggtcgccttcccgcttttgaccaagttgtgtgtgcacaaagatttcaaacaacacggagcacaaggcaagttcatcgcattctacctgcttggaatgttcatcccttatctatatgcgttgtacctcatttgggccgttttcgagatgttcactcccattctgggaagaagtggaagtgagatccctccagacgtggtccttgcatcaatactggctggttgtactatgattcttagctcatacttcattaatttcatctatttggctaagtccaccaagaaaacaatgttaactttgacattagtgtgcgcgattacttttctcctggtgtgctctggcaccttcttcccatatagtagtaatcccgcaaaccctaaaccaaaaagggtatttctgcagcacatgacccgcacatttcacgacctggaaggaaatgccgtgaaacgagactcagggatttggattaatggatttgactataccggcattagccatattaccccgcacattcccgaaattaatgatagcatccgtgcccactgtgaagagaatgcccctttgtgtggattcccatggtacctcccagttcactttctgatccgcaagaattggtatctgcccgcaccagaggtgtccccgaggaatcctccacatttccgcctgatttctaaggagcagactccctgggactctattaaactgacctttgaagcgacagcatgtttgcctatcctgcagatcttggacctccctgccagcactatcatgactaaaccgtacgtattactgtgttctagccctcaaagggtcaacacttttagcgtggtgagctggcaatggcacccctcccacaagtag

SEQ ID NO: 221940 - DNA, 786 bp, synthetic construct
  misc_feature 1..786: note = Description of Artificial Sequence: Synthetic coding sequence
  source 1..786: mol_type = other DNA
atggctgcggcagtacccagagcagcctttctgtctcccctccttccattactgctcggcttcctgcttttatctgctcctcacggaggcagcggtctgcataccaaaggagctcttccactggatactgttacattctacaaggtgattcccaaatccaagtttgtgctggttaagttcgatacccaatatccttacggcgagaagcaggatgaatttaaaaggcttgccgagaactccgcctcgagcgatgacctgctggttgctgaggtaggaatatcggactatggagataaattgaatatggagctgtccgaaaaatacaagcttgacaaggaatcctatcctgtgttttacttgtttcgtgatggcgacttcgaaaacccagtgccatacacaggagccgttaaggtgggggctatacagcgatggctgaaagggcaaggggtgtatcttggaatgcccggttgtctgcctgtctatgatgctttagccggagaatttattcgggctagcggagtcgaagccagacaggctttactcaaacaaggacaagacaacttgagctcagttaaagagactcagaagaaatgggctgaacagtacttaaaaataatgggaaagatactggatcagggggaggacttccctgccagcgaaatgacccggattgctaggttgatagaaaagaataagatgtccgatgggaagaaagaagagttacagaaaagtttgaacatcctcaccgcctttcagaaaaagggagcagagaaagaggaactgtag

SEQ ID NO: 221941 - DNA, 162 bp, synthetic construct
  misc_feature 1..162: note = Description of Artificial Sequence: Synthetic coding sequence
  source 1..162: mol_type = other DNA
atggcagcagccgtgcctcgggcagctttcttatctcccctgcttccactgttgctgggtttcctgcttctgtccgccccacacggaggcagcggcctccacacaaagggggctctaccactggacactgtcacattttacaaaatcatggtcacatcatag

SEQ ID NO: 221942 - DNA, 2925 bp, synthetic construct
  misc_feature 1..2925: note = Description of Artificial Sequence: Synthetic coding sequence
  source 1..2925: mol_type = other DNA
atgagacgtgcgggaattggagaagattcccggctgggattgcaagcccaaccaggtgcagagccctcacccggtcgggcagggactgagcgatccctcggtggtactcagggtccgggacagccctgttcatgtccaggtgctatggcaagcgctgtgaggggcagcagaccgtggccgcgtctggggctccagttgcagtttgcagccttacttttggggacgttgagccctcaggtgcacacactcagacccgaaaatcttctgctggtctccaccctagatggatctctccacgccctctccaagcagaccggggatcttaagtggacactgcgcgacgacccggtcatcgagggacctatgtacgtcactgaaatggcttttctgagcgacccagccgatggtagcctgtatatcctgggcacacagaaacagcaggggctgatgaaactcccgtttacgatccccgagcttgttcacgcttctccctgtaggtcctcagatggggtgttctacaccggcaggaaacaggatgcatggttcgtggtcgacccagagtcaggtgagacccagatgaccctgaccacggagggcccttcgactccaaggctgtacatcggacgcacgcagtacacagtgaccatgcacgatcctcgcgctcctgcactgagatggaataccacctataggagatatagtgccccaccgatggacgggagcccagggaagtacatgtcccatttggcttcctgtggaatggggttgctcctgacagtcgacccgggttctggtaccgtgctatggacacaggatctgggagtgcccgtgatgggagtatacacctggcaccaggacggtctgcgccagctcccgcacctgaccctagccagggacacactgcactttcttgctctcagatggggccacattcggttgcccgcaagtgggcctcgggacacggcaaccctgttcagcaccctggatacccagctcctcatgaccctgtatgtaggcaaagatgaaaccggtttctatgtctcaaaggccttagtccacaccggtgtagctctagtgccaagggggttaactcttgccccagcagatggcccaactactgacgaggtcacgcttcaggtcagtggtgaaagggaagggagtcctagcacagctgtcaggtacccgtctgggagcgtcgccttgccgtctcagtggctgctgatcggccatcacgaactgcccccagtcttacacactactatgcttagagtacacccaacgctgggaagcgggacggcagagacccgtcctccggaaaatacccaggcgcctgctttctttttggagctcctgtcgctaagccgggagaaactctgggatagtgaactccacccagaagagaagacaccggattcctatttagggcttgggccacaggacttgctcgcagcaagtttaaccgccgtgcttcttggcggttggatcttgtttgtcatgagacaacaacaaccacaggtggttgagaaacagcaggaaactccactggccccagccgacttcgcccatatctcccaagacgcgcaatccttacactccggcgctagccgcaggtcccagaaacgactgcaatccccttccaaacaggcccagccgctggatgaccctgaggcagagcagttgacagtcgtcggtaagattagctttaatcccaaagacgtgctgggccgaggggctgggggaacgtttgtgttccgcggacagtttgagggacgggcagtggctgtaaagcgcctgctccgggagtgtttcgggctggtgcgcagggaggtgcagctgctccaggaaagcgatcggcacccaaacgtactcagatacttttgcaccgagaggggaccacagtttcactatatagcactcgagctttgccgggctagcctccaggagtatgtagaaaaccccgatctggatagaggagggctcgagcctgaagtggtcctgcaacagctgatgtctggactcgctcacctgcatagtcttcacatcgtccaccgggacctcaagcccggaaatatattgattacaggacctgattctcaagggttaggaagagtggtcctttctgacttcgggctgtgtaaaaagttacccgctggccgttgttcttttagtttgcacagtggtattcctggcaccgaaggttggatggcaccggagctgcttcagctgctaccgcctgatagtccaacctcagctgtggacatctttagtgctgggtgcgttttctactatgtgctgagcggtggtagtcacccatttggcgactctctctaccgccaggctaatattctgacaggcgctccatgcctggcccatctggaagaagaagtacacgataaggttgtagcccgagatttggtcggcgcaatgttaagcccactcccccagcctcgaccgagcgcaccgcaggtgctggcccacccattcttctggagcagggcaaaacaacttcaattcttccaggacgtgtccgactggctggaaaaggaatccgagcaggaaccattggtgagggctctggaagccggaggatgcgctgtggttcgagataactggcacgaacacatatccatgcctctgcagacagacctacggaaatttcgtagctacaaaggtacatcagtgagggaccttctacgagctgtgagaaacaagaaacatcactaccgtgaacttcctgttgaagtgcggcaggctttaggccaggtaccagatggcttcgtccagtattttaccaatcggttccccagactcctgttacatacccaccgtgctatgcggtcttgcgcgagtgaatctctatttctgccttattacccacccgacagcgaggccagaagaccttgtccaggtgcaactggtcggtag

SEQ ID NO: 221943 - DNA, 2625 bp, synthetic construct
  misc_feature 1..2625: note = Description of Artificial Sequence: Synthetic coding sequence
  source 1..2625: mol_type = other DNA
atggcatccgccgtacgcggttctagaccatggcctcgtttaggcctgcagctccagtttgcagccctcctgttagggacattaagcccacaggtgcatacactgcgtcctgagaatctactcctggtgtctacgctggatggaagcctgcatgcactttctaaacagactggcgaccttaagtggactctacgagatgacccagtaatcgaaggacctatgtacgtaaccgagatggcatttctgtcggacccggctgatggctccctctacatcctcggaacccagaaacagcaggggttgatgaaattaccatttacaatccccgaactagttcatgccagcccctgtcgcagtagtgacggtgtattttacaccggtcggaaacaagacgcctggtttgtggtggatcctgagagtggtgagactcagatgacactcaccaccgagggaccatccactccgaggctttacattgggagaactcagtacaccgtgacaatgcacgatccacgcgcaccagctctgcgctggaatacgacataccggcgatattccgcccctccaatggatgggtcaccgggtaagtacatgtctcatttggcttcttgcggaatgggcctgctgttaactgtggatcctggcagtggaacagtgctttggacgcaagatctcggcgtgcctgttatgggcgtctatacctggcatcaggatgggttgcgccagctgccacacctcaccctggccagagacacactgcatttcctggccctgaggtggggtcacatcaggttaccagccagcggaccaagggataccgctacactattcagcacccttgacactcaactgctgatgaccctgtacgtgggaaaggatgagaccggcttctacgtgagtaaagccctcgtgcataccggggtagcattggtccctaggggcctgacgcttgctcccgctgacggcccaaccacagacgaggtgacattgcaggtatccggggaaagggagggcagcccctccactgctgttcgctatcccagcggcagtgtggccctgccctcccagtggctgctcatcggtcatcacgagctcccaccagtgctccatacgaccatgttaagggtgcatccaacccttggctcaggaacagccgaaacacgaccccctgagaacactcaagccccagctttcttcttggagcagcaaccccaggtcgtggagaagcaacaggaaaccccgctggcccctgccgactttgcccacataagtcaggatgcccagagcctccattccggggctagccggcgatctcagaagaggttacaaagtccatcaaaacaagctcagccactggatgaccccgaggccgagcagctgactgtcgtagggaaaatcagtttcaatccaaaggacgtgcttgggagaggtgcgggtggcacttttgtttttcgaggtcaattcgaaggacgggcagtggcagttaaacggctgctccgcgagtgctttgggctcgtgcgtcgggaggtacaattgctgcaggaatccgaccgccacccaaacgtgctgaggtacttttgcaccgaaagaggcccacagtttcactacatagctcttgaattgtgccgcgcatccctacaggaatatgtcgagaaccctgatctcgaccggggaggcctggagcctgaagtggtgctgcagcaattgatgagcggccttgcacacctacactctctgcacatcgtgcatcgcgatctcaagcccggaaacatcctcatcactggccctgacagccagggcttgggcagagtcgtcttgagtgacttcggactgtgcaagaaattgcccgcaggcaggtgttccttttcactccacagcgggattccaggaaccgagggatggatggcccctgagcttctgcagctgctgcctccggacagccccaccagcgctgtcgacattttctctgccggatgcgtgttttactatgtgctgtctggcggtagccatccctttggagattccctctaccgacaggcgaatatacttactggcgctccttgtttggcccatcttgaagaggaggttcacgacaaagtcgtcgcacgcgaccttgtaggtgccatgctttcaccgctgcctcaaccacgcccaagtgcacctcaggttctggcccatccgttcttctggtcccgcgctaagcagctccagtttttccaggatgtgtccgactggctcgaaaaggagagcgagcaagagccactggttcgagcattggaggcaggcggttgcgctgtcgtacgcgataattggcacgaacatatatctatgccccttcagactgatctgagaaaatttcgaagttataagggtacgagcgtgagagacttactgagagccgttcgaaataagaaacaccactaccgcgagctcccagtcgaggtgaggcaggcccttgggcaggtgcccgatggatttgtccaatatttcacgaatcgttttcctcgacttctcctgcatacacaccgagccatgagaagctgtgcatccgagagcctctttctgccttactaccccccagacagcgaagccaggaggccttgccctggtgcaactgggcgatag

SEQ ID NO: 221944 - DNA, 354 bp, synthetic construct
  misc_feature 1..354: note = Description of Artificial Sequence: Synthetic coding sequence
  source 1..354: mol_type = other DNA
atgagccagaaacaggaggaagagaatcctgctgaggagactggagaggagaagcaggacactcaggagaaggaaggaatcttaccagagcgcgcagaggaagcgaagctgaaggctaaatacccctcactcgggcagaagccaggtggttcagacttcctcatgaaacgcttgcagaaaggacagaagtactttgactcaggagattacaacatggctaaagccaagatgaagaataaacagctcccgtcagccggtccagataaaaatctagtcaccggagaccatatccccacccctcaggaccttccccagcggaagtccagcctggtgacgtctaagctggccggttag

SEQ ID NO: 221945 - DNA, 414 bp, synthetic construct
  misc_feature 1..414: note = Description of Artificial Sequence: Synthetic coding sequence
  source 1..414: mol_type = other DNA
atgtcccagaaacaagaagaggaaaatcctgcagaggagaccggggaagagaagcaggacacacaggagaaagaggggattcttccagagagagcggaggaggccaaactgaaggccaaatacccatccctggggcagaagccagggggaagcgacttcctcatgaagcgtctccagaagggggactacaaaagtttgcattggtcagttctgctgtgtgccgacgagatgcagaagtacttcgacagtggcgactataatatggccaaagctaagatgaagaataaacagcttccctctgcaggcccagacaagaatctcgtcaccggtgaccacattcctaccccacaggacctacctcagcgaaagagttctctggtgacgagcaagttggccggtgggcaggtggaatag

SEQ ID NO: 221946 - DNA, 423 bp, synthetic construct
  misc_feature 1..423: note = Description of Artificial Sequence: Synthetic coding sequence
  source 1..423: mol_type = other DNA
atgtcacaaaagcaagaggaagagaaccctgccgaagaaactggggaagagaaacaggacactcaagagaaagaaggtattttaccagaacgggcagaggaggccaagttaaaagccaagtatccttctcttggccagaaaccaggaggaagtgactttctgatgaagcgccttcaaaagggcgtatggggaatcgtatcctaccccctatcgctagaacttaaggaagtcttgaggatgaagtctgtcgagcagaagtattttgattcaggggattacaacatggccaaagcaaaaatgaaaaacaagcaactgccctcggccggtcccgacaagaacctcgtgacaggtgaccacatacctactccccaagacttgccccagcggaagtcctcccttgtgactagcaaactggcaggctag

SEQ ID NO: 221947 - DNA, 354 bp, synthetic construct
  misc_feature 1..354: note = Description of Artificial Sequence: Synthetic coding sequence
  source 1..354: mol_type = other DNA
atggcgggtggcctgggctgtgatgtctgttactggttcgtggaggacacccaggaaaaagagggtatactcccagaacgtgctgaggaggccaagttgaaggccaagtatcccagtcttgggcaaaaaccagggggatccgattttctgatgaaacggctgcagaaaggtcagaagtatttcgattccggcgactacaacatggctaaagcgaaaatgaagaacaagcagttaccgtctgccggacccgataagaatctggtgactggagaccatatccccaccccacaagatttaccccagagaaagagttcacttgtcacatctaaactggcgggtggtcaggtcgagtag

SEQ ID NO: 221948 - DNA, 402 bp, synthetic construct
  misc_feature 1..402: note = Description of Artificial Sequence: Synthetic coding sequence
  source 1..402: mol_type = other DNA
atggctgggggactaggttgtgatgtgtgttattggttcgtagaggatacgcaggagaaagaaggcattctgcccgaacgcgctgaggaagcaaagctcaaggcgaagtatccctccctagggcagaagcctggcggtagtgattttctcatgaagcggctccagaaaggcgactacaagagccttcattggtctgtattgctatgcgctgatgagatgcagaagtacttcgactcgggggactacaacatggccaaagccaagatgaaaaacaaacaattaccgtccgctggcccagataaaaacctcgttactggagaccatatccccacacctcaggacctaccccaacgtaagtcttctctggtgacttctaagctggctgggggtcaggtggagtag

SEQ ID NO: 221949 - DNA, 318 bp, synthetic construct
  misc_feature 1..318: note = Description of Artificial Sequence: Synthetic coding sequence
  source 1..318: mol_type = other DNA
atgtcccaaaagcaagaagaggagaatccggcagaggagacaggggaagagaaacaggatacacaggaaaaggaaggtattctgcccgagcgggctgaggaagcaaagctcaaggcgaaatacccctccctaggacagaagccgggtggctccgactttctaatgaaaagactgcaaaaaggcgtatggggaattgtgtcttaccccctgtctctagagctgaaagaggtgcttagaatgaaaagcgtcgaggtgttgctggacccattcctggaggtcctgctgcttaaccggagcaggggggagtttgagatctag

SEQ ID NO: 221950 - DNA, 435 bp, synthetic construct
  misc_feature 1..435: note = Description of Artificial Sequence: Synthetic coding sequence
  source 1..435: mol_type = other DNA
atgtcccagaagcaggaggaagaaaatccagccgaagagacaggagaggaaaagcaggatacacaagaaaaggagggaattctgcctgagagagccgaggaagccaagctgaaggcaaaatacccatccctggggcaaaaacctggagggtccgatttcttgatgaagaggttgcagaagggtgtttggggaatcgtgtcataccctctctcattagagttgaaagaagtcctgaggatgaagtcagtcgagcaaaagtatttcgacagcggggactacaatatggctaaggctaagatgaaaaacaaacagttgcccagcgccggacctgacaaaaatctggttacaggcgatcacattccaacccctcaagatctgccccagcggaaatcttcgctggttacttctaagttagctggcggacaggttgagtag

SEQ ID NO: 221951 - DNA, 366 bp, synthetic construct
  misc_feature 1..366: note = Description of Artificial Sequence: Synthetic coding sequence
  source 1..366: mol_type = other DNA
atgtctcagaaacaggaggaggagaaccctgctgaggaaaccggggaagagaagcaggacacacaagaaaaagaaggcattctgcccgagagagctgaggaggctaagcttaaggcgaaatatccctccctagggcagaaacccggaggctcagacttcctgatgaaacgccttcagaaggggcagaaatattttgacagcggcgactacaacatggcaaaggcaaagatgaagaataagcagctaccctccgccggacctgacaagaatcttgtgacaggagaccatattccaacgccacaggatttgcctcaacgaaagagctcactggtaacaagtaagttagccggtggacaagttgagtag

SEQ ID NO: 221952 - DNA, 402 bp, synthetic construct
  misc_feature 1..402: note = Description of Artificial Sequence: Synthetic coding sequence
  source 1..402: mol_type = other DNA
atgtcccagaagcaggaggaggagaaccccgcagaagagacaggggaggagaagcaggatactcaggagaaggagggcattctcccggagcgcgctgaagaggccaagctgaaagccaaataccctagtctgggtcagaaaccagggggaagcgatttcctgatgaagcgtttacaaaagggggattacaaatcccttcattggtccgtactactgtgtgctgacgagatgcagaaatactttgactctggggattataacatggcgaaggccaagatgaagaacaaacagctgccttccgccggacccgacaaaaatcttgtgactggcgaccatatacccaccccacaggacctgcctcagagaaagtcatctttggtcacctctaaattagctggctag

SEQ ID NO: 221953 - DNA, 318 bp, synthetic construct
  misc_feature 1..318: note = Description of Artificial Sequence: Synthetic coding sequence
  source 1..318: mol_type = other DNA
atgtctcagaagcaggaggaagaaaaccctgcagaagagaccggagaggaaaagcaggacacccaggagaaagaagggatacttcccgaacgagccgaagaggcaaaactgaaggcgaagtatccatccctggggcagaagccaggaggcagtgacttcctgatgaagaggctacaaaagggcgtttggggtatagtgtcatatcctctgtctctggagttaaaggaggttctccgtatgaagtctgtggaggtcctcctcgacccatttttggaagtgctgttacttaaccgcagtcggggtgagtttgaaatttag

SEQ ID NO: 221954 - DNA, 342 bp, synthetic construct
  misc_feature 1..342: note = Description of Artificial Sequence: Synthetic coding sequence
  source 1..342: mol_type = other DNA
atggcaggcggactcggatgtgacgtctgttactggtttgtggaggatacccaagagaaggaaggtatcctgcccgaaagagccgaggaggccaaactcaaggccaagtaccccagcctaggccagaaacctggtggctctgactttctgatgaaaagactgcaaaaaggccagaagtacttcgactccggcgactataacatggcgaaggctaaaatgaagaataaacagctgccctccgccggaccagacaaaaatctggtgaccggggaccatatccctactccacaggaccttccacagcggaaaagttctcttgttaccagcaagctggcgggttag

SEQ ID NO: 221955 - DNA, 1173 bp, synthetic construct
  misc_feature 1..1173: note = Description of Artificial Sequence: Synthetic coding sequence
  source 1..1173: mol_type = other DNA
atgatctccctgcccggaccactcgtgactaaccttctccggttcctcttcttaggactgtccgcgctcgctccaccttcacgggctcagctccagttacatctccccgcaaatcgcctgcaagccgtggaaggcggtgaggtcgtgttgcccgcttggtacactctgcacggagaagtgagttcctcacaaccatgggaagtcccttttgtaatgtggtttttcaagcagaaagaaaaggaagatcaggtgctgagctatataaacggtgtgaccacgtcaaagccaggagtgagtctcgtttattccatgccatcccgcaatctttccctgcgcttagaggggctgcaggagaaggactctggaccctattcatgcagtgttaacgttcaggataagcaaggaaagtctcgcggacactctattaaaacccttgagttgaatgttctagtgcctcctgctccaccaagttgcagactccaaggcgtgccccacgtgggcgctaacgtaactctcagctgtcaatccccccgttcaaagccggcagtccagtatcagtgggacaggcagctcccttcctttcaaacctttttcgcaccagcactcgacgtgataagaggttccctgtctttgacgaatctgagttcctcaatggcaggcgtgtatgtttgtaaggcccataacgaggtcggaactgcgcagtgcaatgttacgcttgaggtctcaaccggacccggtgcagctgtggtggctggagcggtagttggaactctggtcgggttgggcctgcttgccggactggtgctcctttaccaccgtcgcggtaaggccttagaggaacctgcaaatgacataaaggaagatgccatcgccccacggactctgccttggccaaagtccagcgacaccattagcaaaaatgggacactgagtagcgtgacttctgctagagctctcagacccccacatggacccccacggcctggtgctttgacgccaaccccgtcactgtcatcacaggccctccctagccccaggcttcccactacagatggcgcacatccccaacccatctctcccatccccggtggggtctctagctcaggcctgagccgaatgggcgcagtgccagtgatggtgccagcccagtcacaggccggttccctagtttag

SEQ ID NO: 221956 - DNA, 426 bp, synthetic construct
  misc_feature 1..426: note = Description of Artificial Sequence: Synthetic coding sequence
  source 1..426: mol_type = other DNA
atgatcagcttgcctggccctctggtgaccaatctcctgcggttcctcttcctgggattatcagccctggacgtgataagaggatcactcagtctgacaaatctctcttcaagcatggcaggagtatacgtatgcaaagcacacaatgaggtcggtacggcccagtgcaatgttaccctggaagtgtctacgggccctggcgctgcagtggtggcaggggcagttgtggggacactggttggcctggggctcctcgccggtctcgtgctgctctaccatcgacgcggaaaggcgctggaggaacccgcaaatgacatcaaggtaaggtcccctctgggactgtcattcagcgccccaaaaatggagtggttgtggaaatggagggatgcccacttctatcgggatagctacctatccaaatggtag

SEQ ID NO: 221957 - DNA, 2613 bp, synthetic construct
  misc_feature 1..2613: note = Description of Artificial Sequence: Synthetic coding sequence
  source 1..2613: mol_type = other DNA
atgactgccgataaagagaagaagcgatctagttcagagagaagaaaagagaagtccagagacgctgcacgttgccgcaggtcaaaggagacggaagtgttttatgaactggcccacgagttaccgctgcctcactccgtgagtagccacctggacaaggcgagcatcatgaggttggccattagcttcctgaggacacacaaactgttgtcaagcgtctgttcagagaacgagtcagaggccgaggctgatcagcagatggacaatctgtacctgaaggctcttgagggtttcatcgcggtagtcactcaggatggggacatgatcttcctttctgaaaatattagtaagtttatgggcctgacccaggtggaactcactggccatagtatattcgatttcacgcatccttgcgaccatgaggagattcgcgagaacctgtcattaaagaacggatcaggctttggaaagaaaagcaaagatatgagcactgagagagactttttcatgcgcatgaagtgtacagtgactaataggggcaggacagtgaatctcaaatccgctacctggaaagtgctccattgcacaggacaggttaaggtgtacaacaactgcccgccacataactccctgtgtggctataaggaacctctgcttagctgcctcatcattatgtgcgaacctattcagcatccctcgcacatggacattcctcttgatagcaagactttcctgtctagacactcaatggatatgaaatttacttactgcgatgacagaatcaccgagctcatcgggtatcaccccgaggaattactcggccgaagtgcttacgaattctaccacgctctagactctgaaaatatgacaaagagccatcaaaacctgtgcacaaaggggcaagtggtcagcggccaatacagaatgttggctaagcacggcggatatgtgtggctggaaactcaaggcactgtcatctataatcccaggaacctgcagccacagtgcatcatgtgcgtgaattatgttctgtccgaaattgaaaagaatgacgtggtgttcagcatggaccagacagagagtctgtttaaacctcacctcatggctatgaattccattttcgattcatctgggaagggcgcagtgtctgaaaaatcaaacttcctcttcactaagcttaaagaagagcctgaggagctggcccagcttgcgcctactcctggcgatgctatcatctccctagattttgggaatcagaactttgaggaatcaagtgcatatggcaaagctatcctgccaccttctcagccatgggccaccgaacttagatctcattcgactcaatccgaagctggcagtctgccagccttcaccgtgcctcaagccgcagcccctgggagcaccacaccgtctgcaacaagcagctcttcctcgtgcagcacaccgaactcaccggaggattattatactagccttgataacgatctgaaaatcgaggtgattgagaaattgtttgcgatggatacagaggccaaggatcaatgctctacacagactgatttcaatgaactggacctggagacactagcaccgtacattcccatggatggagaggacttccaactgagtcctatctgtcccgaggagaggcttctggccgagaacccacagagtactcctcagcactgcttttccgccatgaccaatatttttcagcctctggcccctgtggcccctcactctccgttcctactggacaagtttcaacagcaactcgagtcaaaaaagaccgaaccagaacacaggcccatgtcttccattttttttgatgccggatctaaagcaagccttcctccctgctgcggacaggctagcactcctctgagctcaatggggggtcggtccaatacccagtggccaccggacccgccattgcactttggccctaccaagtgggctgtaggtgaccaacgaaccgagttcctgggagcagccccactggggcctccagtgtccccaccacacgtctcaacgtttaagacgcgaagtgctaagggatttggtgccagaggcccagatgtgctgtcccctgccatggtcgcactgagcaataagctgaagttaaagcgccagctggagtacgaagagcaggcgttccaggatctgtctggaggagatcccccaggcggttcaacgagtcacttaatgtggaaacgcatgaaaaacttacgaggcggaagttgtccccttatgccggacaaacctttatccgccaatgtccccaacgataagtttacgcagaaccctatgaggggactagggcatcctctccgccatctcccactgccccaaccaccttctgcaattagcccgggtgagaacagcaaatctcgtttcccaccccaatgctacgctacacagtatcaagattactctttatcctccgcacacaaggtgagcggaatggcttcccgtctactagggccttcatttgagagctatctgctgccggagctgacaagatacgactgtgaggtgaacgtgcccgttctaggtagctccacgctattgcagggaggtgacttgctccgggctttggaccaagctacttag

SEQ ID NO: 221958 - DNA, 780 bp, synthetic construct
  misc_feature 1..780: note = Description of Artificial Sequence: Synthetic coding sequence
  source 1..780: mol_type = other DNA
atgactgcagacaaggaaaaaaaaagaagcagcagcgaacggagaaaagagaaaagcagggatgccgcacgctgtcgaaggagtaaggagacagaggtcttctatgagctggctcatgaactgcctctcccacatagcgtgtcctctcacctggacaaagcgagcattatgcgtttggcgatctcgtttctgcgaacccacaaattgttgagtagcgtgtgcagcgagaacgaatcagaagccgaagctgaccaacagatggataacctatacctcaaagcactggaggggttcattgcagtggtcacgcaagatggagacatgatttttttgtcagagaatataagtaagtttatggggctgacccaggtagaacttacgggccacagtatatttgattttacccacccctgtgatcacgaggagattcgcgaaaatctttctttgaagaatgggtccggctttggaaaaaaaagcaaagatatgagtacagagcgggacttcttcatgcgaatgaaatgcaccgtgacaaatcgaggacgcaccgtaaatctcaagtccgctacatggaaagtactacactgtacgggacaggttaaggtgtacaataattgtccacctcataacagtctttgcggttataaggagccattgctctcttgccttatcattatgtgtgagcccatccagcatccttcacatatggacataccacttgacagtaagactttcctcagcaggcacagtatggatatgaaatttacctattgtgacgactag

SEQ ID NO: 221959 - DNA, 537 bp, synthetic construct
  misc_feature 1..537: note = Description of Artificial Sequence: Synthetic coding sequence
  source 1..537: mol_type = other DNA
atggtcagcgtccccactacctggtgttcagtggctctggcgctcctggttgcacttcacgaggggaaaggacaggcagccgcaacactggaacagccagcttcttcctcccacgcacagggcacacacttacgtttgcgccgatgttcctgcagttcctggttggataaagaatgcgtgtacttctgtcatctcgatataatttgggtgaacacacccgaacagacggcaccctacgggctggggaaccccccacgacgacgcaggcgctctctgccccgtagatgccagtgttccagcgcgagggacccagcctgcgcgactttctgcctcagaagaccctggactgaagctggggcagtacctagcaggaaatctccagctgatgtgtttcagacggggaaaacaggggctaccactggcgaactcctgcagcggctgcgggacattagcaccgtgaagtccctgttcgctaagcgacaacaagaggccatgagagaacccaggtctacccacagccggtggcggaaacgctag

SEQ ID NO: 221960 - DNA, 660 bp, synthetic construct
  misc_feature 1..660: note = Description of Artificial Sequence: Synthetic coding sequence
  source 1..660: mol_type = other DNA
atggagcctgggttgtggctgctcttcggtctgacagtcacctcggcagctggttttgttccatgctcccaaagcggcgatgcgggaaggagaggtgtctcccaggcccctaccgccgcaaggagtgagggagattgtgaggagacggtggcgggtccgggagaggaaactgtggcgggacctggggagggcacggtggccccaacagcacttcaaggcccaagtcccggttctccaggccaggaacaggccgctgaaggggctcccgaacaccaccggagcaggagatgcacgtgcttcacctataaggacaaagagtgcgtctattactgtcacctggacataatttggataaatacccccgaacagactgtgccttatggtctctctaattatagaggctcctttcgcggtaaaaggagcgctggacctctgcccggtaacctgcaattatctcaccgcccacatctgaggtgcgcctgcgtggggaggtacgacaaggcatgccttcacttctgtacgcaaacactcgatgtatcttctaatagtaggactgctgaaaaaacagataaggaggaagaaggcaaggtccgcggagccaatcgtggactgtgtcaacgccgtctgaagagcaggaccaataaagcatcccgcctgtag

SEQ ID NO: 221961 - DNA, 717 bp, synthetic construct
  misc_feature 1..717: note = Description of Artificial Sequence: Synthetic coding sequence
  source 1..717: mol_type = other DNA
atggagcccggactttggctgcttttcggcctgaccgttacatctgccgcaggatttgtgccatgctcccagtccggcgatgctgggaggcgcggagtctctcaagccccaactgccgcacggtctgaaggggattgcgaggagacggtggccggaccaggagaggagaccgtggcaggacctggagaagggacagtggctcctacggccttacagggacctagcccgggaagcccgggtcaggagcaggccgctgagggagccccagagcaccaccgcagccggcgttgtacatgcttcacttacaaggataaggagtgcgtgtattactgccatctggatattatttggatcaatacccctgagcaaaccgtaccttacggtctgtctaattacaggggcagcttccgtgggaaacgctcggccggacccctgcccggaaatttacaattgtctcaccgaccacatctaaggtgcgcatgcgtgggtaggtacgataaagcttgcttgcacttttgcacgcagaccctagatgtgtcctcaaactcccgtacagccgaaaagacagataaagaagaggagggaaaagtagaggtcaaggaccagcagtccaagcaggccctcgacctccatcatccaaagttgatgcctggtagtggactggccctggcgccaagtacctgtcctcgctgcctgtttcaggaaggagccccatag

SEQ ID NO: 221962 - DNA, 579 bp, synthetic construct
  misc_feature 1..579: note = Description of Artificial Sequence: Synthetic coding sequence
  source 1..579: mol_type = other DNA
atggaacccggactgtggctgctgtttggactcacagtaacgagcgccgctggctttgtgccttgcagtcagagtggggacgcaggcaggcgaggcgtaagtcaggcccctacagccgctcggtccgaaggtgactgcgaggaaacagtggcagggcctggtgaagagacagtggcaggcccaggagagggaacggtggctccaacggctctgcagggcccttcacccggaagtcctgggcaggagcaggccgctgagggcgcacccgagcatcatagaagtaggagatgtacttgtttcacatacaaagataaggagtgcgtgtactattgtcatctcgacatcatttggatcaacactccagagcagaccgtaccgtacggcttatctaactaccgaggaagtttccgtgggaagcgtagtgccggtccgctgcctgggaatctccaacttagtcatcggccacacctaagatgtgcttgcgtcgggagatacgacaaggcctgcctgcacttctgcacccagaccttggacgtgtcacggctaaagagcagaactaacaaggcatctcggctgtag

SEQ ID NO: 221963 - DNA, 717 bp, synthetic construct
  misc_feature 1..717: note = Description of Artificial Sequence: Synthetic coding sequence
  source 1..717: mol_type = other DNA
atggaacctggcctgtggttgttatttggactcactgtgacctccgcagcgggattcgtgccctgcagtcagagcggggacgctggacgccgtggagtgagccaggcccctaccgccgctagatctgagggcgattgtgaggagaccgtggcgggtcctggtgaagagactgtcgccggtccaggcgagggtacagtggcccctacagccttgcagggaccatcacccggatcccccggtcaagaacaggcagcggagggggctccagaacaccatagaagcaggaggtgcacctgcttcacctacaaggacaaggagtgcgtctattactgccacctcgacattatatggataaataccccggagcagactgtaccttatggcctgtcgaactaccgaggatcctttagagggaaacggtcagccggacctctgcctggaaatcttcagctgtcacaccgaccacacttacgttgcgcctgcgtaggccgatatgacaaggcttgtctgcatttttgcacccaaactttggatgtctcctccaactcccggaccgccgaaaaaacggataaagaggaggagggaaaagtggaagtaaaggatcagcagagtaagcaggcattggacctgcatcaccccaagcttatgccaggttcaggtctggccttagcgccttccacttgtccccgttgtctgttccaggaaggggctccctag

SEQ ID NO: 221964 - DNA, 675 bp, synthetic construct
  misc_feature 1..675: note = Description of Artificial Sequence: Synthetic coding sequence
  source 1..675: mol_type = other DNA
atggagcccggtctgtggctcctgtttggactgactgttacgagtgcagctgggtttgttccgtgcagccaatcaggggacgccggtaggagaggcgtgtctcaggcacccactgccgctcgctccgagggggactgcgaagaaacggtagcaggtcctggagaagagaccgtggccggaccgggtgaaggaaccgtggcgccaactgccttgcaggggcctagccctggcagccctgggcaggaacaggcagcagaaggggcaccggagcaccataggtccagaagatgcacctgtttcacctataaggataaggagtgtgtgtactactgccatctggacattatctggatcaataccccagagcaaacagtcccttatgggttgtcgaattataggggaagtttccgaggtaagcgctccgccggaccattacccggtaacctgcaactgtcacaccggcctcacctcaggtgtgcgtgtgtggggagatacgacaaagcctgtctccacttctgcacgcagacactcgacgtttctcgtcaagtggaagtgaaagaccaacagtctaaacaggccctcgatctgcaccatcctaagctgatgccaggtagtggactggccctcgctcccagcacctgcccacgctgtctcttccaggagggagcaccctag

SEQ ID NO: 221965 - DNA, 2304 bp, synthetic construct
  misc_feature 1..2304: note = Description of Artificial Sequence: Synthetic coding sequence
  source 1..2304: mol_type = other DNA
atggaggcgctcagagaaagcgtgctgcaccttgctcttcagatgtctacatataagcgcgcaacccttgacgaggaggatcttgtggacagtctgagcgagggagatgcatacccaaacggtctccaagtgaacttccatagtcccagatcgggtcagagatgctgggccgcaaggacacaggtagagaagagactcgtggtcctggtggtcctgctggcagccggtctggtcgcgtgtttggcagccctggggattcaataccaaaccagaagcccttcagtgtgcctatccgaagcctgtgtatctgtcacctcatctatcctgagttctatggaccctacagtggatccatgtcatgacttctttagttacgcctgcgggggatggatcaaggccaacccggttcccgatggacattcccgttggggaacttttagcaatctgtgggaacataatcaggctattattaagcatctcctggaaaatagcaccgcttccgtctccgaggctgagcgcaaagctcaggtgtattacagggcctgcatgaacgagacaagaatcgaggagttgagagctaaaccactcatggaactaatagagagactcggcggttggaacatcacagggccatgggccaaagacaatttccaggacacccttcaggtggtaactgctcactaccgcacaagcccattcttctcagtttatgtcagcgcggatagcaagaactccaatagcaacgtcattcaggtggaccagagcggtttggggcttccctctcgcgattattacctgaacaaaaccgagaatgagaaggtgctgaccggatacctgaattatatggtgcagctgggaaaactgctgggcggaggagacgaggaggcaatacggccacaaatgcaacagatactcgatttcgaaaccgcgctggcaaatatcactataccacaggagaaaagacgcgatgaggagcttatctatcacaaagttactgccgcagaactgcagacactagctccggcaattaactggctcccattcctaaacaccatattttatcccgtcgagataaacgaatcagaacccatcgtggtttacgataaggaatatctggagcagatttccacactgatcaataccactgaccgctgcctcctcaataattacatgatatggaacctcgtgaggaaaacctcatctttcctggatcaaagattccaggacgccgatgagaaatttatggaagtgatgtatggaacgaaaaaaacctgtcttccaagatggaagttctgcgtgtcggataccgaaaataacttggggtttgctctgggcccaatgttcgtgaaggccacattcgcggaggactctaagtcaatcgctacagaaatcatccttgaaattaaaaaagcttttgaggagagcctgagtacgttgaaatggatggatgaagagaccagaaaaagcgcgaaagagaaagccgatgccatttacaatatgattggctatccaaactttatcatggatcccaaggagctggacaaagtctttaacgactacacagctgttcctgacctgtacttcgagaatgctatgagatttttcaactttagttggagggtcaccgccgatcagctgaggaaggcccctaatagggatcaatggtccatgacccctcctatggtcaatgcttactactccccaactaaaaatgagatcgtattccctgcgggaattctgcaggcgcctttctacaccaggtcatctcctaaggctctgaacttcggcggaattggagttgtggtcggacatgaactgacacacgcctttgacgaccaggggcgagaatacgataaagacggaaatctgaggccctggtggaaaaacagctccgttgaagcctttaaaagacagaccgagtgtatggttgagcaatatagtaattacagcgtgaacggagaacccgtgaacggacgccacacactgggagaaaatattgcagataatgggggtctgaaagctgcttaccgcgcttaccagaattgggtgaaaaagaacggcgctgaacatagcctgcctactctgggccttaccaataatcagctcttttttctgggctttgcgcaggtgtggtgttcagtaagaacgccagagagcagccatgaagggctaatcactgatccccactcaccatcccggttccgggtgataggatccctctcaaacagtaaggagttctcggagcattttcggtgtcctccgggaagtcctatgaacccgccacataagtgtgaagtgtggtag

SEQ ID NO: 221966 - DNA, 2277 bp, synthetic construct
  misc_feature 1..2277: note = Description of Artificial Sequence: Synthetic coding sequence
  source 1..2277: mol_type = other DNA
atgccccttcagggtctggggctgcagcgcaacccatttcttcaggggaaacggggtcccggactgacctcttcgcctccccttctccctccatcattgcaggttaattttcacagcccccgttctggccagcggtgctgggccgctcgcacacaggtcgagaagagactggtggttttagtggtactgctggccgctggcctagtggcctgcctggctgcactgggaattcagtatcagactaggtcacccagcgtatgtttgagtgaagcctgtgtgtccgtaacttcctcaatcttaagctccatggatcctacagtcgatccctgccacgacttcttcagctatgcctgtggcggatggatcaaagcaaacccggtgccagatggacattcccggtggggcactttctccaatctgtgggagcataatcaggcaattatcaagcacctgctggagaacagcacagcgtctgtctccgaagctgaacgaaaggcacaggtgtattatcgcgcttgcatgaacgagacaaggattgaagaactgcgggcaaagcccctgatggaactgattgagcgcctcggtggctggaacattacaggaccctgggccaaagacaattttcaagacacattgcaagtggtcacagcccactaccgcacgtcaccctttttttccgtctacgtgtctgcggattcgaaaaactccaattctaacgttattcaagtggaccaatcaggcctggggctgcccagcagagattattacctgaataagactgaaaacgaaaaagtcctgacagggtaccttaactacatggttcagttaggcaaactgctgggaggcggagatgaggaggccatccgcccacagatgcaacagattcttgatttcgagactgcccttgccaatattaccatcccccaggaaaaacggagggatgaagaactgatataccacaaggtgaccgctgccgaattacagacacttgcccctgccatcaactggctgccattccttaatactatcttctatccggttgagattaacgagtctgagcctatagtggtgtacgacaaagaatatctggaacaaatatcgacactgatcaatacgactgataggtgcctgctgaataattacatgatctggaatcttgttagaaagacatcttcctttctcgatcaaagattccaggatgccgacgagaagtttatggaggttatgtacgggactaaaaagacgtgcctgcccaggtggaagttttgcgttagcgacaccgaaaataatctcgggtttgcacttggccctatgtttgtgaaagccacatttgccgaggactcaaagagcatcgccacagagattatcttagagataaagaaggcttttgaggagagcctgtctactttgaaatggatggacgaggagacacgaaagagcgcaaaagaaaaggccgatgcaatttataatatgatcggatatcctaattttataatggatcccaaagaactggacaaggtgtttaacgactacacagcggtgccggacctttactttgaaaatgctatgcggttttttaacttcagctggagagtgactgccgaccagctgcgcaaggcacctaatagagatcagtggtcaatgacacctccgatggttaacgcgtattacagtccgactaaaaatgagatcgtgttccccgcaggaatcctccaggcgcctttctataccagatcctctcctaaagcgttgaacttcggaggaataggggttgttgtggggcacgagctcacccacgctttcgacgatcaaggtcgagaatacgacaaagacggtaacctccgcccatggtggaaaaactcctctgttgaagccttcaagaggcaaacagagtgcatggtcgaacagtactccaactattctgtaaacggggaacccgtcaacgggaggcatacactcggggaaaatatcgccgacaatggcggactgaaagccgcatatagagcctaccagaactgggtaaagaagaatggggctgagcactccctgcctacccttggcttaactaacaaccaattgttttttctgggctttgcacaggtgtggtgttccgtaagaaccccggagagctcccatgaagggctcatcactgatcctcactcaccaagtcgttttcgcgttattgggagcttaagcaactccaaggaattttcagagcacttccggtgccctccaggctctccgatgaatccccctcataaatgtgaggtctggtag

SEQ ID NO: 221967 - DNA, 2313 bp, synthetic construct
  misc_feature 1..2313: note = Description of Artificial Sequence: Synthetic coding sequence
  source 1..2313: mol_type = other DNA
atgagaggggtgtggcctcccccagtttcagccctcctttctgcattgggtatgtcgacgtataaacgggcaaccctggacgaggaggacctcgttgactcgctgtccgagggcgacgcttacccaaatggactgcaggttaactttcatagccccagatctggccaacgctgttgggccgcaaggacgcaagtcgagaagaggctcgtggtgttagtagtgctattggccgctgggttggtggcgtgcctggccgctctggggatccagtaccagactagaagcccttctgtgtgtttgagcgaagcctgcgtctccgtgacgtcctcaattctgtctagcatggacccaacagtcgatccctgtcatgacttcttcagttatgcgtgcgggggttggatcaaggcaaatcccgttccagatggccatagccgctggggtaccttctcaaatttgtgggagcacaatcaggcaatcattaaacatctccttgagaactccaccgcaagtgttagcgaagcagagaggaaggcacaggtatactacagggcatgcatgaatgagaccagaatcgaggagctccgggctaaaccactaatggagctcatagagcggttaggcggttggaacatcactggcccatgggctaaggacaacttccaggacaccctgcaggtcgtgaccgctcactatagaacttcaccatttttctccgtttacgtgtctgccgactccaaaaacagtaacagtaatgtgatccaggttgaccagtccggactggggcttcccagcagagactactacttgaacaagaccgagaacgagaaggtgctcacgggctacctgaactacatggttcagcttggaaagctactgggcggtggggacgaggaagcaattcgtcctcagatgcaacagatcctcgatttcgagacagctttggctaatattactattccccaggagaaacggcgtgatgaagagttaatttaccataaggtcactgccgctgaattgcaaaccttagcacccgcaatcaattggcttccattcctcaacaccatcttctatcctgttgaaattaacgaatcagaacctattgtggtatacgacaaggaatacctcgagcagatttccacactgattaacactaccgatcggtgcctgctcaacaactacatgatctggaacctggtaaggaagacaagttcatttttggaccagcgcttccaggatgccgacgaaaagtttatggaggtgatgtatggcactaaaaagacttgcctgcccagatggaagttctgcgtctccgacactgagaataacctgggctttgccctcggccctatgtttgtcaaagcgacatttgccgaggatagcaagtcaatcgccacagaaattatcctggagatcaagaaagcatttgaagagagcctgtctactcttaagtggatggacgaagagacccggaagtctgctaaggaaaaggccgacgcgatttacaacatgattggctatccaaattttatcatggacccaaaggagcttgataaagtgtttaatgattacactgctgtccccgacctgtactttgagaacgcgatgcgattctttaacttctcgtggcgcgttactgccgaccagttacgtaaggctccaaacagagaccagtggagtatgacacctcctatggtgaacgcgtattattctccaactaagaatgaaatcgttttcccagctggcatcctgcaagcacccttttacactaggtccagccctaaggcacttaattttggaggcatcggagtcgttgtcggccacgagttaactcacgccttcgatgaccaaggtcgggagtacgataaggacgggaatttgcgcccatggtggaagaattcgtcagtggaggcatttaaaaggcagacagagtgcatggttgagcagtatagtaactattccgtaaacggcgaaccagttaacggaaggcacacccttggcgaaaacatcgcagacaatggtggcctcaaggcagcctaccgcgcatatcagaactgggtgaaaaagaacggagccgaacactctctccccaccctgggactgaccaataaccagctgttcttcttagggttcgctcaggtttggtgtagcgtgcgtacccctgagagctcacatgagggactgattactgaccctcactcaccaagtcgttttagagtcataggatccctgtctaatagcaaggagttcagcgagcacttccgttgcccccctgggtctccgatgaacccaccccataagtgtgaggtgtggtag

SEQ ID NO: 221968 - DNA, 2265 bp, synthetic construct
  misc_feature 1..2265: note = Description of Artificial Sequence: Synthetic coding sequence
  source 1..2265: mol_type = other DNA
atgatgtccacgtacaagagggctaccctggacgaggaggatctggtagatagcctgagcgaaggagacgcctatccaaacggcctccaggtgaacttccactctccaaggtctggccaaaggtgttgggctgctcgcacccaggtcgaaaaacgcttggttgtcctggttgtgctccttgcagcaggcttagtcgcctgcttagcggctctcggaatccaatatcagactcgaagcccaagtgtgtgcctgtcggaggcatgcgtgagtgtaacctccagtattcttagtagcatggatccgacagtggatccctgccatgatttttttagctatgcttgcgggggttggataaaagccaacccagtgcccgatgggcactcacgctggggtacattctctaacctctgggagcacaaccaagctattatcaagcatttgctagaaaactctaccgctagcgtcagcgaggcggagcgcaaggctcaagtttactacagagcatgcatgaacgagactcgcatcgaagaattgcgggctaaacctctgatggaactgatagagcgtctgggcggatggaacatcaccggtccatgggcaaaagataatttccaagatacccttcaggtggttaccgcacactaccgcacaagcccatttttttcagtgtacgtgtcagctgatagcaaaaattccaactccaatgtcatccaggtggaccagtctggcctcgggctgccatccagggattactatcttaacaaaacagagaacgagaaggtcctgaccgggtacttaaactacatggtgcagcttgggaaactccttggtggcggtgacgaggaggctataagaccccagatgcaacaaattctggacttcgaaacagcacttgccaacattaccatacctcaggagaagaggagagacgaggaacttatctaccacaaggtgacagccgcagagctgcagactctggcaccagccataaactggctgccttttttgaataccatattttacccagtcgaaattaatgaatcagaacccatcgtggtttacgacaaagaatacctggaacagattagcacgttgatcaatacgactgacaggtgtctcttaaacaattatatgatctggaacctggtccgcaaaacatcctcatttttggaccagaggtttcaggatgccgacgagaagttcatggaagttatgtacggaacaaaaaaaacctgcctgccacggtggaaattttgtgtgagcgacaccgagaacaacctaggtttcgcactaggacctatgttcgttaaagcaaccttcgccgaggattctaagagtattgccacagaaataatattggaaatcaaaaaggctttcgaggagtccctatccactctcaaatggatggatgaggagacccgcaaatctgccaaagagaaggctgacgctatttacaacatgatcggctaccctaatttcatcatggatccaaaggagctggataaggtttttaacgattatactgccgttcctgacctgtattttgaaaacgcaatgcgctttttcaacttctcatggcgggtcaccgccgatcaacttagaaaagcgccaaaccgtgaccagtggtccatgactccgccaatggtcaacgcttactactcccccacaaaaaatgaaatcgtgttcccagccggaatattgcaggcccctttctacacgaggtcatctcccaaggccctcaatttcggcggtattggggtggtggttgggcacgaactgactcacgcattcgacgaccaggggagagagtatgacaaagatggcaatttacggccatggtggaagaatagtagtgttgaagctttcaagcggcaaactgaatgcatggtcgagcagtacagtaactacagtgtcaatggagagccggtcaatgggagacataccctgggcgagaacatcgcagataatggaggtcttaaagcggcttatcgtgcctaccagaactgggtgaagaagaatggagccgagcacagcctgcccacactcgggctgacaaataatcaactgttcttcttaggctttgcacaagtgtggtgctctgttcgcaccccagagtcatcgcatgaggggctgatcacagacccacactctccatctagatttagagtgattggctccctatccaatagtaaggaattcagcgagcactttcgttgcccccctggctcccctatgaatccaccacacaaatgcgaggtgtggtag

SEQ ID NO: 221969 - DNA, 2217 bp, synthetic construct
  misc_feature 1..2217: note = Description of Artificial Sequence: Synthetic coding sequence
  source 1..2217: mol_type = other DNA
atgcgtggagtgtggcctcccccagtcagcgctcttctgtctgccttgggtatgtccacgtacaaaagagcaacactcgacgaggaggatttagtggatagcctctctgagggagacgcctaccccaacggtctacaagtaaacttccattcccctagatccggacagcgatgctgggcagcaagaactcaagtcgaaaaacggttagttgtcctagtggtgttgctagccgcaggcttagtggcctgtctggccgcactggggattcagtaccaaactcgcagtccaagtgtttgtctgtccgaagcttgcgtgagtgtgacgtcaagcattttatctagtatggatccaacagtagatccatgccacgatttcttttcctatgcttgcggcggatggataaaagcaaacccggtgcccgacgggcacagccggtggggcacattctccaatctctgggagcacaaccaagctattatcaagcacctgcttgaaaactcaaccgcctcagtttccgaggctgagcggaaggcacaagtgtactaccgcgcatgtatgaatgaaaccagaattgaagaattgagggcaaagcctttgatggaattgatcgagcggctgggaggttggaatatcactggaccgtgggccaaagataacttccaggatacgctgcaagtggtgaccgctcactaccgaacgagcccgttttttagtgtctacgtgtctgcagattcaaagaatagcaacagcaacgttatacaggtggaccagtcgggactcggtctgccaagcagagactattacctcaataaaacggagaacgagaaggtgttgaccggctatctgaactatatggtgcagctgggaaaattactgggcggtggcgatgaggaagcaattcgcccacagatgcagcagatcttggactttgaaacagcactcgccaacatcacaattccccaggagaaacgaagggatgaggagctgatttatcataaggtcactgccgcagaattgcaaacacttgctccagccattaactggctgcctttcctgaacactattttctatcccgttgagatcaatgagagcgagccgatcgtggtgtacgacaaggaatacctggagcaaatttccacattgatcaacaccactgaccgatgcctcctgaacaattatatgatttggaatctggtgagaaagacgagcagctttcttgaccagagattccaagatgcagacgagaagtttatggaggtaatgtatggaaccaagaaaacctgtctgccaagatggaagttttgcgtcagtgacactgagaacaacctgggctttgccctcggtccaatgtttgtcaaagctacctttgccgaggactccaagtctattgccaccgagattattctcgaaattaagaaggctttcgaagaaagcctttctacgctgaaatggatggatgaggagacccggaaatccgccaaagagaaggcggatgcaatctacaatatgatcgggtatcccaatttcattatggaccctaaggagttggataaggtattcaatgactataccgccgttccggacctgtattttgagaatgccatgcggttcttcaatttcagttggcgcgtaactgccgatcagctacggaaagctcctaatcgggatcaatggagcatgacccctccaatggtgaatgcatactacagtcccacaaaaaacgagattgtcttcccagcagggattctgcaagctccattttatacgaggagttcgccaaaggcactgaattttggcggaataggggtcgtggtgggacacgagcttacgcacgcctttgacgaccagggcagggaatatgataaagatggaaacttgcgcccatggtggaagaattcctcagttgaggcctttaagcgtcagactgagtgcatggtagaacagtactccaattattcagtcaatggcgagccagtgaacggacgccacacgctgggcgaaaacattgctgacaatggcggtctgaaggccgcatatcgagtctggtgtagcgtccgcacccctgagagtagtcacgaagggctgatcacagaccctcatagtccctcccgatttcgtgttatcggttcactgtcaaattctaaggaattttcagagcactttagatgcccaccaggatcaccaatgaaccccccacacaaatgtgaagtgtggtag

SEQ ID NO: 221970 - DNA, 2328 bp, synthetic construct
  misc_feature 1..2328: note = Description of Artificial Sequence: Synthetic coding sequence
  source 1..2328: mol_type = other DNA
atggagcccccatattccctgactgcccattatgatgagttccaggaagtgaagtacgtttccagatgtggcgcaggcggtgctagaggtgcctcgctgcctcccggatttcccctcggagcggcacgctccgctaccggtgccagaagtggactccccagatggaacagacgggaggtgtgtttattgtccggactggtgttcgccgcaggtctttgcgcgatactggccgctatgcttgcactgaagtatcttggaccagtggctgccggaggcggtgcgtgtcccgaaggatgcccagagaggaaagccttcgcccgtgccgctaggttcctggctgctaatctcgacgctagcatcgatccatgtcaggacttttacagcttcgcatgcggcggatggctccgccgacacgccatcccagacgacaagttgacatacgggactatcgcagccattggcgagcagaatgaggaacgcctccgcaggcttcttgcgagacccggaggcggaccaggcggagcagcgcagaggaaggtgagggctttctttcgttcatgtctagatatgagggaaattgagcgactgggaccacgacctatgctcgaagtgatcgaagactgtggtggatgggatttagggggtgccgaagagcgacctggcgtggctgccaggtgggacctgaaccggctgctctataaagctcagggtgtgtattccgccgcagcactgttcagcctgacggtgtccttggacgatagaaactcaagccgttacgttattcgtattgatcaagatggcctgactctccccgagcggactctgtacttggcacaagatgaggactctgaaaaaattcttgcggcttatagggtgtttatggagcgagtgttgagccttctgggcgcagacgcagtggagcagaaggcccaagagatactgcaggttgagcaacagcttgctaacatcaccgtgagtgagcatgatgatctgcggcgtgacgtgtccagcatgtataataaggtcaccctgggccagctgcagaagatcacaccccacctccggtggaagtggctcctcgatcagatatttcaggaggacttctccgaggaagaggaggtggtcttgcttgcgacagactatatgcagcaggtgtctcagctgattcgcagtacacctcacagggttttgcacaactatctcgtgtggcgcgtggtggttgtcctgagcgagcacctgtctcctcctttcagggaggcattgcatgagctggcacaggagatggagggctcagataagccccaggagctggcacgggtatgtctgggccaggccaaccgccacttcggtatggccctgggtgcactcttcgtgcacgaacacttttctgctgcttccaaagcgaaagtccagcagctggtggaggatattaaatacatattgggtcagcggctggaggagttagattggatggacgctgaaaccagagcagccgctcgagctaagttgcagtatatgatggtgatggttggatatcccgatttcctgttgaaacccgatgcggtggataaggagtacgaattcgaagttcatgagaaaacatactttaagaatattttaaacagtatccggttttcaatccagctgtctgtgaaaaagattcgccaggaggtggacaagagcacatggctgttacccccacaagcacttaacgcctactatttgccgaacaaaaatcaaatggtgttccctgccggaatcctgcagccaaccttgtatgatcctgacttcccccaaagcctgaattacggcggaatcggcaccattattggccatgaactgacacacggctatgatgattggggagggcaatatgacaggagcggaaatttattacactggtggaccgaagcgagttattcacggttcttgcgcaaggccgagtgcatagttcgactgtatgacaactttacggtgtataatcagagggttaacggcaaacatacactgggggagaatatagctgacatggggggtctgaaattggcctatcacgcctaccagaagtgggttcgtgagcacggaccagaacaccctcttccaagattgaagtacacacacgaccagttgttctttatagcattcgcccagaactggtgcattaagaggcggagccagtcaatctatctgcaggttctaacagataaacacgccccagagcattaccgcgtcctcggctccgtcagccagtttgaagagtttgggcgagcctttcattgtcctaaggatagtcctatgaaccccgctcacaaatgttctgtctggtag

SEQ ID NO: 221971 - DNA, 2322 bp, synthetic construct
  misc_feature 1..2322: note = Description of Artificial Sequence: Synthetic coding sequence
  source 1..2322: mol_type = other DNA
atggagcctccgtattctcttactgcccactacgatgagttccaggaagtcaaatacgtgagtagatgtggggctggtggagctcgcggagcttctctccccccaggcttccccttaggagcagccaggtctgccacaggcgctaggtctggcttgccacggtggaacaggagggaagtctgtttgcttagcggcctggtcttcgccgctggattgtgtgcaattctggcagctatgctagccttgaaatacttaggccctgtcgccgcagggggaggggcatgccccgaggggtgccccgagcgcaaggcattcgcgcgtgccgcacgttttcttgctgccaatctggacgcctccatagacccgtgtcaggatttttattcttttgcgtgcgggggatggcttagaaggcacgcgattccagacgataagcttacttacggaacaatagccgctatcggtgaacaaaatgaggaaagacttcgcagactgctggccaggcctggtggcggtcccggaggtgccgcacaaagaaaagtaagagccttctttcgcagttgtctcgacatgagggaaattgaacggttgggccctcggcctatgcttgaggtcatcgaggattgcgggggatgggatctgggcggagccgaagagcgccctggcgtggctgctcgttgggacttaaatcgtctgctgtacaaagctcagggggtctacagcgccgcagcacttttcagcctcaccgtttccctggatgaccggaatagttctcggtatgtcatccgcatcgatcaggacggactgactcttcctgaacgcaccttgtaccttgcgcaggatgaggattccgaaaaaatactcgcagcttatagagttttcatggagcgggttctgagcctgctgggcgctgatgcagttgagcagaaagctcaggaaatattacaggtggagcagcagctcgctaatattaccgtgtccgaacatgacgacctccgcagggacgtgagttccatgtataataaggttactctgggccagcttcagaaaattacgccacatctgcgctggaagtggttactggatcagatcttccaggaagacttcagcgaagaagaggaagtggtcctgctcgcgaccgactacatgcagcaggtgagccaactgatcagaagcacccctcacagagtactgcacaactacttggtctggagggtggtcgtcgtgttgtcagaacacctgtctccaccctttagagaggctctccacgaactggcacaggagatggagggatccgacaaaccacaagagctggcacgtgtttgtctcggacaggcaaaccggcactttggaatggcattaggagcactgtttgtccacgagcacttttctgcagcctccaaagccaaagttcaacaactggttgaggatatcaaatacattctggggcaacggctggaagagctcgactggatggacgctgagacacgggctgccgctcgcgctaaactgcagtatatgatggtcatggtgggctatccagatttcttgttaaagcccgatgccgtcgacaaagaatacgagttcgaggtccatgaaaagacctactttaaaaacatcctgaattcaattcgattcagcatccagttaagcgttaagaaaatcaggcaggaggtggacaagtggttattgccaccccaagccctgaacgcctattacctgcccaacaaaaatcagatggtattccccgctggaatcctacaacctaccttatacgatcctgactttccccaaagcctaaactatggaggcattgggactatcatcggccacgaacttacacacggttacgacgattgggggggacagtacgaccggagcgggaatctgttgcattggtggactgaggcttcttatagcaggtttctacgtaaagccgagtgtatcgtaagactctacgataacttcacggtctacaaccaaagggttaatggcaagcacactctcggtgaaaacatcgccgatatgggcggactaaaactggcctaccacgcctatcagaagtgggtgagagagcacggcccagagcatccactccctagactcaagtacacccatgaccagctgttcttcatagcctttgcacagaattggtgcatcaagagaaggtctcaaagcatttacctgcaggtactgactgataagcatgcccctgaacattatcgagtgttagggtccgtatcgcaattcgaggaatttggacgggcttttcactgtccaaaggattcccccatgaatccagcccataaatgctcagtatggtag

SEQ ID NO: 221972 - DNA, 1284 bp, synthetic construct
  misc_feature 1..1284: note = Description of Artificial Sequence: Synthetic coding sequence
  source 1..1284: mol_type = other DNA
atggagaccctgtgcttgagagcatctttctggctggctcttgtcgggtgtgtcatttcggacaatcccgaacgttattctactaacctgagcaaccacgtcgatgatttcactacattcagaggcaccgagctctctttcctagtgactacacaccagcccacaaatctagtgctgccttctaatggaagcatgcataactattgtcctcaacagacaaagatcacatcagcattcaagtacattaataccgtgataagctgcactatctttattgtgggaatggtgggcaatgctacactgctccgtatcatataccaaaataaatgcatgcggaatgggcctaatgcactgatcgcttctctggctctcggagatctgatttacgtagtgatcgatctgcccattaacgtatttaagctactggccggaaggtggcccttcgaccataatgatttcggcgtgttcctctgcaaattatttccgttcctacagaagtcatctgtgggcatcaccgtcttaaacctatgtgcattatccgtggaccggtatagggctgtggcaagttggtctagggtccaagggatcggcattcccctggtaacagcaatcgagatcgtgtctatttggattttgagctttatccttgccattcccgaagctatcgggttcgtaatggtcccatttgagtatagaggtgaacagcacaaaacatgtatgctgaacgctaccagcaagtttatggaattttaccaagatgtgaaagattggtggctgtttggtttctacttttgtatgcctctcgtgtgcacggcgattttttatacgttaatgacttgcgaaatgctcaaccgaagaaacggttctctccgaatcgccctaagtgagcaccttaaacagcgtagagaggtggctaagactgtattctgcttggtcgtgatattcgccttgtgttggtttccattacacctgtcccggatcctgaaaaaaaccgtttacaacgagatggacaagaaccgttgtgaactgctctcattcctgctgctgatggactatatcggtatcaatttggccaccatgaattcttgcataaacccgattgccctgtattttgtgagcaagaaatttaagaactgctttcagagttgtctttgttgttgctgctaccagtctaagagcctgatgacatccgtgcctatgaatggcaccagcatccagtggaaaaaccacgaccaaaacaaccacaatacggacagatcttctcacaaagacagcatgaactag

SEQ ID NO: 221973 - DNA, 486 bp, synthetic construct
  misc_feature 1..486: note = Description of Artificial Sequence: Synthetic coding sequence
  source 1..486: mol_type = other DNA
atggagactttgtgtttgagagccagtttttggctcgcactcgtcggctgtgtcatctccgacaatccagaacgatattccactaatctgtccaaccacgtcgacgactttacaacctttcgtggcactgaactgtcattccttgtaactacgcatcagccgacaaacttagtgttacccagcaatgggtctatgcacaattattgtccacagcaaacaaaaattacgagcgctttcaagtatatcaataccgtcatcagctgtacaatcttcatcgtcggcatggttgggaatgcgaccctgctgaggatcatctaccagaataagtgtatgcgcaatgggcctaatgccctgattgcatctttggctttaggtgatctcatctatgtagtgattgacctgcctatcaatgtcttcaaagtccagtcaagttgtctgttggaatcatgcagtggcaactgggactccttcggcaactgtcactag

SEQ ID NO: 221974 - DNA, 957 bp, synthetic construct
  misc_feature 1..957: note = Description of Artificial Sequence: Synthetic coding sequence
  source 1..957: mol_type = other DNA
atggagactctatgcctcagagcgagtttttggctcgccctggtgggatgcgtaataagcgacaacccagagcggtactctactaacctttctaatcatgtagacgacttcactacttttcgcggaacagaactctctttcctggtgacgactcatcaacctacgaatcttgtgctgcctagtaatgggagtatgcacaattactgcccgcaacaaaccaagattacttcagcatttaaatacatcaacacggtgatctcatgcaccatcttcatcgtcgggatggtggggaacgccactctccttcgcataatttaccagaacaagtgcatgcggaatgggcctaacgcccttattgccagccttgctcttggagacctcatctacgttgtgatcgatttgcccattaatgtcttcaaattttaccaagacgttaaggactggtggctgttcggcttttacttctgcatgccattagtgtgcactgcaattttttatacactaatgacgtgcgaaatgcttaatcgtcgcaacgggagtctgagaattgccctcagtgagcaccttaaacagaggcgtgaagtggccaaaactgtgttttgcttggtggtgatttttgcactgtgctggttccccctgcatctgtcccgcatcctgaaaaaaaccgtgtataacgagatggataagaatagatgcgaactactgtcattcctgcttctgatggactacattggcatcaatctggccaccatgaactcttgcatcaaccccattgctttatactttgtttccaagaaattcaagaattgcttccagagctgtctctgttgttgctgctaccagagtaaaagcctgatgacatctgtacctatgaatggcacctctatccagtggaaaaaccacgatcagaacaatcataatactgaccgctcttctcacaaggactccatgaactag

SEQ ID NO: 221975 - DNA, 564 bp, synthetic construct
  misc_feature 1..564: note = Description of Artificial Sequence: Synthetic coding sequence
  source 1..564: mol_type = other DNA
atggaaaccctttgcctgcgcgctagcttttggctcgcattggtgggttgtgtcatttctgataatccagaacggtatagcacgaatttgtctaaccacgtggacgattttactacatttaggggaaccgagttgtctttcctcgtcacgacccatcagccaaccaatctcgtgcttcctagcaatggtagcatgcataattattgtccccagcagaccaaaatcacgagtgcttttaagtacattaatacagtaatcagctgcactatcttcatcgtgggtatggttggtaacgcgacactcctgcgaattatttatcaaaacaaatgtatgcgcaatgggccaaatgccctgattgccagccttgcactgggtgacctaatctatgtcgtgatcgacttgcccatcaacgtttttaagctcctggctggacgatggcctttcgaccacaatgactttggagtatttctgtgtaagctgttcccctttctgcagaaatcatccgttggcatcaccgtgcttaacttgtgtgctctctccgtggataggaaaaccgagatgtag

SEQ ID NO: 221976 - DNA, 957 bp, synthetic construct
  misc_feature 1..957: note = Description of Artificial Sequence: Synthetic coding sequence
  source 1..957: mol_type = other DNA
atggagaccctgtgcctgcgggcatctttctggctggccctggtaggctgcgttattagcgataatcctgaacgctatagtactaacctttcaaatcacgtggatgattttaccacctttcgcggaaccgagctcagcttccttgtcactacccaccaacctactaacctagtcttgccgagtaatggctctatgcataattactgcccccagcagacaaaaataaccagtgcttttaaatacatcaacactgtgattagctgtaccatttttatagtgggaatggtgggaaatgctaccctgctgaggataatctatcaaaataagtgcatgcgcaacgggccaaacgcactcatcgcatctctcgccctcggcgacctgatttatgtggtcatcgatctccctattaacgtgttcaagttctatcaggatgtcaaggactggtggctgttcggcttttatttttgcatgcctttggtgtgcactgctattttttacacacttatgacttgcgagatgctgaacagaagaaatggcagccttcggatcgcactctcagagcatttaaagcagcgtcgcgaggtcgcaaaaaccgttttctgtctggtggtcatctttgctctttgctggttccctctgcacctgagccgcatcctgaaaaaaacagtttataacgagatggacaagaatagatgcgagcttctctcgtttctgctcttgatggactacatcggcatcaatctagcgaccatgaacagttgcatcaacccgatagccctgtatttcgtctctaaaaagtttaaaaactgcttccagagctgtctgtgttgttgttgttatcagtctaagagccttatgacgtcagtccccatgaacgggaccagcattcagtggaaaaatcacgatcagaataaccataataccgaccgtagttcacacaaagatagtatgaattag

SEQ ID NO: 221977 - DNA, 1179 bp, synthetic construct
  misc_feature 1..1179: note = Description of Artificial Sequence: Synthetic coding sequence
  source 1..1179: mol_type = other DNA
atggaggaacagcagcccgaaccgaaaagtcagagagattctgcactgggcgcagccgcagctgcgacaccgggtggtttgtccctgtctctgtcccctggagcctcaggcagttcaggctccgggagcgacggagacagtgtcccagtgtcccctcaaccagctccaccctctccaccagcggctccgtgcctgccgcctttggcccatcacccacatctaccccctcacccacctccacccccaccccagcacctggcggcacctgcacaccagccccagcctgcagcgcagctccaccgcacaactaatttcttcatcgataacatcttgaggcccgattttggctgcaaaaaagaacagccaccgcctcaattgctagtggctgcagccgctcggggaggtgccggaggcggtggcagagtggagcgggacaggggtcagacagcagccggaagagacccagtgcaccccctgggtaccagagcccctggtgccgcttctctcctctgtgcacccgacgctaattgcggacccccagacggaagtcagcccgcagccgctggggcaggtgcgtcaaaggccggtaaccctgccgctgctgcagcggcagccgctgccgctgtcgccgcagctgctgctgcagccgcagcaaaaccgtcagataccggcggtggcggaagcggcggtggagctggcagcccaggggcacaggggacaaagtacccagagcacgggaaccccgctatactgctcatgggctccgcaaacggcggaccagtcgtaaagaccgatagccagcagcccctggtttggcccgcttgggtgtattgcacaaggtattctgatagacccagcagcggacctaggacccggaaactaaagaaaaagaaaaatgaaaaggaggacaaaaggcctcggactgcgtttacagctgaacagcttcagaggttgaaagctgagtttcaggccaaccgatacataacagagcagcgacgacagacgttagcccaggagcttagcctgaatgagtcccagataaaaatttggttccagaacaagcgggcaaagataaaaaaagccacaggtattaaaaatggcttagccctccatctgatggcacagggcctttataatcactcgaccacaaccgtccaggacaaggatgaaagcgagtag

SEQ ID NO: 221978 - DNA, 1002 bp, synthetic construct
  misc_feature 1..1002: note = Description of Artificial Sequence: Synthetic coding sequence
  source 1..1002: mol_type = other DNA
atggaggagaacgaccctaaaccgggagaggctgctgccgctgtggagggtcagcggcagcctgaaagtagtccgggaggcggaagcgggggtggagggggaagctccccaggtgaagcagatactggccgtcggagagcgctgatgcttcccgcagtactccaggcacctggcaatcatcagcatccccaccgtatcactaatttttttattgataatatcctgaggccagaattcggtcgacgcaaggacgccggtacatgctgtgctggcgctggtggcggacgtggaggtggcgctggcggtgaaggcggtgcttctggcgctgagggtggcggaggggcaggcggatctgagcagctgctcggcagtggaagccgcgagccaagacagaacccaccatgcgctccaggagctgggggaccacttcctgctgctggctcggacagtcccggtgatggtgaaggcggaagcaagacattgtccctccatgggggagcgaagaaaggtggagaccctggagggcctcttgatggcagcctgaaagccaggggccttggcggtggggatctgagcgtgagctccgactctgattcttcccaggcaggcgctaacctgggtgctcagcccatgctgtggcctgcctgggtctactgtacgcgctactctgacaggccaagttccgggcctagatcacggaagccgaagaaaaagaaccctaataaggaggacaagcgacctcgcacagcgttcaccgccgaacagcttcagcggttaaaggcagagttccagaccaatcgctatttgaccgaacagcgcagacagagtctagctcaggaactgtcacttaatgaatctcagattaagatatggttccagaacaagcgggcaaagataaagaaagccactgggaataagaacaccctggccgtgcacctaatggctcaggggctgtacaatcacagcaccaccgcgaaggaaggtaagagtgactcagaatag

SEQ ID NO: 221979 - DNA, 2184 bp, synthetic construct
  misc_feature 1..2184: note = Description of Artificial Sequence: Synthetic coding sequence
  source 1..2184: mol_type = other DNA
atgccccctcctgccgacattgtgaaggtggcgattgaatggcctggtgcgtacccaaagcttatggaaatcgatcagaagaagccactcagtgcaattataaaggaggtatgtgacggttggagcctggcaaatcacgagtatttcgcactccagcacgccgactcctcaaacttctacattactgagaaaaatcggaacgagatcaagaacggcacaatcctccgccttactacgagccctgctcagaatgcccagcagctgcacgaacgcatccagtcctcaagcatggacgctaaactggaggcgctgaaggatctggcatccctgagcagagatgtgacctttgctcaggagttcataaaccttgatggaattagcttattgacacagatggtggagtccggcacggagagataccagaagctacaaaaaataatgaagccatgttttggcgatatgctttccttcaccctcacagccttcgttgagttaatggatcacggcatagtgagctgggatacattctctgtcgcctttattaaaaaaatcgcttcctttgtgaataaatcagctatagacatttcgattttacagagaagcttggcgatattagagagcatggtgctgaactcccacgatctctaccagaaggtcgcccaggagatcaccattggtcaattgatccctcacctgcagggctccgatcaggagattcagacctatacgatagcggtcattaacgctctttttctgaaagcccctgatgaacgacgccaagaaatggcaaacatccttgcccagaaacaactgcgctccataattcttactcacgtaatccgtgcccagcgagctataaacaacgagatggctcaccaattgtacgtgctccaagtcctgaccttcaaccttctggaagacaggatgatgaccaagatggacccccaagaccaagcgcagcgggatataatcttcgagctcaggcgcatcgccttcgacgcagagtcagaacctaataacagctcagggtccatggaaaagcgtaaaagtatgtatactagagattataagaagctgggtttcatcaatcacgtgaatccagcgatggactttacgcagacccctccaggaatgctggcacttgataacatgctctatttcgctaagcatcaccaggatgcctacatccggatcgttctagagaattcctccagggaggataaacatgagtgtccttttggacgaagctctatcgagctgactaaaatgctctgtgagatcctgaaagtaggcgaactgccttccgaaacctgcaatgactttcatcctatgttcttcacgcacgacaggtctttcgaggagttcttttgtatctgtattcaactgctgaacaagacttggaaggagatgcgtgccacatccgaggattttaacaaagtgatgcaggtggttaaggaacaagtgatgcgcgctttgaccacgaaaccatccagcctggatcagttcaagtccaagctgcagaacctgtcttacaccgaaatcctcaagatcaggcagagcgagagaatgaatcaggaggatttccagagtagacctatattggaactcaaggagaaaatacaacccgagatccttgaactgattaaacagcaacgcctgaaccggttggttgaaggcacctgcttcagaaagctcaatgcgagacgacggcaggacaaattttggtactgcaggctgtccccaaaccacaaagtcctgcattatggggatctggaagagtcccctcagggagaggtaccacatgattccctgcaggataagctcccggtcgcggatatcaaagctgtggtaacaggcaaagattgtccccatatgaaagagaaaggagctctcaagcagaacaaggaggtgctggagctggccttcagcatcttgtatgactccaattgccaactcaacttcatcgccccagacaagcacgagtactgcatttggaccgacggcctgaacgcactcctcgggaaggacatgatgtctgaccttacgaggaatgatttagacaccctgctttccatggaaataaagctgcggctgctggacctcgagaatattcagattccggacgctcctccccctattccaaaagagccgagcaactacgactttgtatatgactgtaactag

SEQ ID NO: 221980 - DNA, 1290 bp, synthetic construct
  misc_feature 1..1290: note = Description of Artificial Sequence: Synthetic coding sequence
  source 1..1290: mol_type = other DNA
atgtctgagcaccaaaaggagcaaaccttagacaccccctctctgcgaactgtgactctcaccgtgagggtgcacgggtttatactggaagttagcaaaacaaagaacccccctatccctgataccttttggccaccacggtgggaccaccgtccctcgcccggaggagaaacgaacgcatattgccagatgaaccatgtcaatcctgctatggacttcactcaaacgcccccagggatgctggcgctggacaatatgctgtattttgcaaaacaccaccaggatgcgtatattcggatagtgctcgaaaattcttcacgggaagacaagcatgaatgtcccttcgggaggagtagtatcgagctgaccaagatgctgtgcgagatccttaaggtcggcgagctaccatctgagacttgtaacgattttcaccccatgttttttacccatgaccgcagctttgaggaattcttttgtatctgtatccaactgctcaacaaaacttggaaagaaatgcgcgctacttctgaggactttaacaaggtgatgcaggtcgtgaaggagcaagtgatgcgggcacttacaaccaaaccatcgtccctcgaccagtttaagagcaagcttcagaacctgtcctacacagagatcctgaagataaggcagagcgagagaatgaaccaagaggacttccagtctagacctattttggagctgaaggaaaagatacaaccggaaattctggagcttatcaaacagcagaggttgaatagactggtcgaaggcacttgtttcaggaagttaaacgctaggaggcggcaggataaattttggtactgtcgacttagtcccaaccacaaggtgctgcattatggagatctggaggaaagtccacagggtgaagtcccccatgatagcctccaagataagctgcctgtggccgatatcaaggccgtggtaaccggtaaggattgtcctcatatgaaagaaaaaggtgccctgaaacagaacaaagaagtactcgagctggccttttcaatactctacgacagcaactgccaactcaatttcattgctccagacaaacacgaatactgcatttggacagacggcttgaacgccctcctgggaaaagacatgatgagcgacttgacccgcaacgatctagacactctcctgtccatggagataaagctgaggttgcttgatctggagaatatacaaatccctgatgccccacctcctatcccaaaagagccttccaattatgacttcgtctacgactgcaactag

SEQ ID NO: 221981 - DNA, 1896 bp, synthetic construct
  misc_feature 1..1896: note = Description of Artificial Sequence: Synthetic coding sequence
  source 1..1896: mol_type = other DNA
atggatgctaaactcgaggcgttgaaggatctggcctctctctctagagacgttacatttgcccaggagttcattaatcttgatggaatctctctcctcacacaaatggttgagtccggtacagaacgctaccagaagttgcaaaagatcatgaagccatgcttcggagatatgctctctttcactctgacagcattcgttgagttgatggatcacggaatcgtatcctgggatacattctccgtggcattcatcaaaaagatcgctagctttgtcaataagtctgccatcgatatcagtatactacagagatccctcgcaattctggaatccatggtgctgaattcacatgatttataccaaaaggtagctcaggagatcaccatcggccagctgattcctcacctgcagggaagcgaccaggagatccagacttacaccatagccgtcatcaacgcgctctttctgaaagccccagacgaacgacgccaggagatggccaacatccttgcccaaaagcagcttaggagtataatcctaacccacgtcatcagggcccagagggcaataaacaatgaaatggcgcatcagctttacgtgctgcaggtgttaacgttcaacctcctagaggacagaatgatgacaaaaatggacccacaggatcaggcccagcgagatataatattcgaacttagacggattgctttcgatgcggaatcagaacctaacaacagcagtggaagcatggagaagagaaaaagtatgtacacccgcgactataagaaactggggtttattaatcacgttaaccctgcaatggactttacacaaacaccccctgggatgcttgccctcgacaacatgctatattttgctaaacaccatcaggatgcgtatattcgtattgtcctcgaaaactcatcaagagaggacaagcacgaatgcccttttggcaggtcctccattgaattgaccaagatgctgtgtgaaattctcaaggtgggggagcttcctagtgagacctgcaatgatttccaccccatgttctttacgcacgaccggagtttcgaggagttcttctgtatctgcattcaattgctgaacaaaacatggaaggaaatgcgggctactagtgaggattttaacaaagtgatgcaggtagttaaggaacaggttatgcgggctctcacaaccaaaccctctagtttagaccagttcaaatcaaagttgcagaacctttcctatactgaaatcctgaagattcgacaatctgagcgaatgaatcaggaagactttcagtcccggccaatattggaactgaaggagaaaatacagccagaaattttagagctcatcaaacaacagcgcctcaacaggctggtcgagggaacttgctttcgtaaactcaacgctcgacggcgtcaggacaaattctggtattgtaggctgtctcccaaccataaggtgctgcactatggcgacctggaggagagcccccagggcgaggtcccccacgacagcttgcaggacaagctgccagttgccgatatcaaagctgtggtgaccgggaaagattgccctcacatgaaggaaaagggcgcactgaaacaaaacaaggaggtgctcgaattggcgttcagcattctttatgacagcaattgccagctcaatttcatcgccccagataaacatgaatactgcatttggactgacggactcaacgcactactcggcaaagatatgatgagtgatctgacaaggaacgacctcgacacgcttcttagcatggaaattaaactgcgactgctggatctagagaacatccagatccctgacgctccaccacctatccctaaggagccaagcaactatgatttcgtgtatgactgcaactag

SEQ ID NO: 221982 - DNA, 744 bp, synthetic construct
  misc_feature 1..744: note = Description of Artificial Sequence: Synthetic coding sequence
  source 1..744: mol_type = other DNA
atgcaagtggtgaaagagcaggttatgcgggctctcaccacaaagccctccagcctcgatcagtttaagagcaagcttcagaatttaagctacactgaaattctcaagataaggcaaagcgagcgaatgaaccaagaggacttccagagtaggcccatacttgaacttaaggagaagattcagcctgaaatcctggagcttatcaagcagcagaggttgaatcggttagtggagggcacctgtttcaggaagctcaacgccagacgtcgacaggacaaattctggtattgccggctatcccctaatcataaggtgttacactacggcgacttggaggagagtccacagggcgaggtgccccacgatagcctgcaggacaaactgccggtcgccgatatcaaggctgtggtcacgggaaaagattgtcctcacatgaaggaaaagggcgcactgaagcagaataaagaggttctagaacttgccttttcaatcctgtatgactccaattgccaattgaactttatcgcacctgacaaacacgagtactgcatctggacagatggcctgaatgctctcctgggcaaggacatgatgagcgacttgacacggaatgatctggatactctgctctccatggagatcaaattacgcctcctggaccttgagaatatccagatcccggatgcaccacccccaattcccaaggagccctcaaattatgactttgtatacgactgcaactag

SEQ ID NO: 221983 - DNA, 744 bp, synthetic construct
  misc_feature 1..744: note = Description of Artificial Sequence: Synthetic coding sequence
  source 1..744: mol_type = other DNA
atgcaggttgttaaggagcaagtcatgagagcactgactacaaagccctcgagcctagaccagttcaaatcaaagctccagaatttgtcttataccgagatactaaaaatacggcaatctgaaaggatgaatcaggaggacttccaatcaaggcctatcttggaattgaaagaaaagatccagcctgagatccttgaacttatcaagcagcagcgtctcaatcgccttgtcgaaggcacttgcttccggaagttgaacgcccgtcggcgacaggataaattttggtattgcagactgagccccaaccataaagttcttcactacggagacctggaagagtcacctcagggtgaggtgcctcatgacagcttacaagataagcttcctgttgcggacatcaaggccgttgttacgggaaaggattgtccccatatgaaggagaagggcgcactgaaacagaataaagaagtgttagaactagcattttctattctgtatgacagcaactgtcaactcaactttatcgctcctgataagcacgaatattgtatctggaccgacgggttaaatgcattgctgggtaaggatatgatgagtgatctgacaagaaatgatctggacacactgttgagcatggagattaagcttcggctgctggacctggaaaacatccagatcccagatgccccaccacccattcctaaggaaccctctaactacgatttcgtgtacgactgtaattag

SEQ ID NO: 221984 - DNA, 2184 bp, synthetic construct
  misc_feature 1..2184: note = Description of Artificial Sequence: Synthetic coding sequence
  source 1..2184: mol_type = other DNA
atgccccctcccgcagatatcgtgaaagtcgctatcgagtggcccggtgcctaccccaagcttatggaaattgaccaaaagaaacccctgtctgcgataatcaaagaagtgtgcgacggctggagcctggcaaaccacgaatacttcgcccttcagcatgcagacagcagtaacttctacatcaccgaaaagaaccggaatgaaattaaaaatgggacaatattaaggcttaccaccagcccggctcagaatgctcaacagctacacgagcgtatccagtcgtcctcaatggacgcaaagttggaggcacttaaggacttagctagccttagtcgcgacgtcacgtttgcgcaagaatttataaacctggatgggatttctttattaacacagatggtggaatctggaaccgagagataccagaagctccagaagatcatgaaaccgtgctttggtgacatgctctcatttacattaaccgcctttgttgagctcatggatcacggcatagtttcttgggatactttttccgtggctttcattaagaagatcgcgtcgtttgttaataagagtgccatcgacatctccatcttgcaaaggagtctggctattctcgagagcatggtgctgaattcacatgacctgtaccagaaggtggcccaggagatcaccatcggccagttgataccccatttacaaggctctgaccaggagatccagacatatacgattgccgtgatcaatgccctctttctgaaggccccagacgaaaggaggcaggagatggctaatatactggcccagaaacagctgagatctattatactgacacacgttattcgggcacagagggccattaataacgagatggctcaccaattgtacgtgctccaagtcctaacctttaatctgctggaggaccgtatgatgacaaagatggatcctcaggatcaagcccagagggacatcatctttgagctcaggaggattgcatttgacgcagagtccgaacctaacaacagctccgggagcatggaaaaacgcaaaagcatgtatacccgcgattacaagaaactcggcttcataaaccatgtgaatcctgcaatggactttacacagacacccccaggcatgcttgccttagataatatgttgtatttcgccaaacaccaccaggacgcatatattcggatcgtcctggaaaacagcagtcgcgaagacaaacatgagtgcccgttcggacggtcctctattgagctcaccaagatgctgtgtgagatactgaaggtcggcgaattgccctctgaaacctgcaacgattttcaccccatgttcttcactcatgatcgttcgtttgaggaattcttctgcatatgcatccagttacttaataaaacgtggaaggagatgagggcgaccagcgaggatttcaacaaagttatgcaggtggtgaaagagcaggtcatgcgggcactcacaacaaaaccatctagtctggaccaattcaaatcaaaattacagaatttgagttacacagaaattttgaagatacgccagtccgagcggatgaaccaagaagacttccagtctcgcccaattctcgagctgaaggagaagatccaaccagagatcctggaattgattaaacagcagagacttaacagacttgtggagggaacttgtttcaggaaacttaacgccaggagacgccaggacaaattttggtactgcaggctgtcacctaaccacaaggtgctgcattacggggatttagaggagtcaccccagggagaggtccctcacgatagtctgcaggataagctgcccgtcgctgatatcaaggcggtcgtgaccggcaaagattgcccacatatgaaagagaagggcgctttgaagcagaataaggaagtgctggagttggcgttctccatactgtatgattccaattgccagctgaattttatcgcccctgacaagcatgaatattgcatttggaccgacgggttgaatgcacttctgggaaaggacatgatgtccgaccttacgcgcaatgacctggacacactgctgtccatggagataaagttacgccttctggacttggagaacattcaaatccccgacgccccaccgcctattccaaaggaacccagcaattatgactttgtgtatgattgcaattag

SEQ ID NO: 221985 - DNA, 180 bp, synthetic construct
  misc_feature 1..180: note = Description of Artificial Sequence: Synthetic coding sequence
  source 1..180: mol_type = other DNA
atgcctccgccagcggacatcgtgaaagtggccatcgaatggcccggagcataccccaagcttatggagattgaccagaaaaagcccctgtcagccataattaaagaagtttgcgatgggtggtccctcgctaaccatgaatattttgcactgcaacacgccgatagctccaacttttag

SEQ ID NO: 221986 - DNA, 2184 bp, synthetic construct
  misc_feature 1..2184: note = Description of Artificial Sequence: Synthetic coding sequence
  source 1..2184: mol_type = other DNA
atgccacccccagcagatatcgttaaggtcgccatcgagtggcctggcgcttatcccaaacttatggagattgatcaaaaaaaacccctctctgccatcattaaggaagtgtgcgacgggtggagcttagccaaccacgaatactttgctttgcagcacgctgactcctctaatttttacattacagagaagaatcggaatgagattaagaatggcactatcttgcggttaactacgagcccagcccaaaatgcacaacagctgcacgaacgaattcaatcatcctcgatggacgcgaaattagaggctctcaaggacctcgcctctctgtcccgagacgttacatttgcccaggaatttattaatctcgacggtatatcgcttttaactcagatggtggaatccggcactgaaaggtaccaaaaattacagaaaattatgaaaccctgctttggggatatgctatctttcacattgaccgcgtttgtggaattgatggatcacggcatagtctcttgggatactttttcagtggcattcattaagaaaatcgccagcttcgtcaataaaagtgccatcgatatcagcatcctacaacgtagccttgccatcctggaatcaatggtgctgaatagtcatgacctgtaccagaaagtcgcccaagaaattactattggacagctgatcccacatctgcagggaagcgaccaggaaatccagacctacacaattgctgttatcaacgccctctttctgaaagctcctgacgaacgcagacaggagatggctaatatcctcgctcagaaacagctcaggtctatcatactgactcacgtcatcagagctcagcgcgctataaataacgaaatggcccatcagctgtacgttttacaggtcctgacattcaacctcttagaggacagaatgatgaccaaaatggacccacaagaccaggcccagcgggatatcatttttgagctcagacggatcgcctttgacgccgagagtgaacccaataatagttctggatcaatggaaaagcgtaagtccatgtatactagggattacaagaagctgggattcattaatcatgtcaatcctgccatggacttcacgcagactcctccaggaatgctggcccttgataatatgttgtatttcgcaaagcatcatcaggacgcctacataaggatcgtgctggagaactcgtcaagagaggacaagcacgaatgtccttttgggaggtcatctattgagttgaccaagatgctgtgcgagatcctcaaagtcggagagcttccatcagagacatgtaacgactttcaccctatgttcttcactcatgatcggtcatttgaggagtttttctgcatttgtatccagctgctgaataaaacatggaaggagatgcgggctacaagcgaagactttaacaaagtgatgcaggtcgtgaaggagcaggtcatgcgcgctcttacgaccaagcccagttctcttgaccaatttaagtctaagttgcagaacttgtcttacactgagatcctaaagattcggcaaagtgagcgcatgaatcaggaggacttccagagccggccaatcctggagctgaaagagaaaatccaacctgagatacttgagctcatcaagcagcagaggctgaacagactcgtggaaggcacctgctttcggaaactgaacgccagaagaagacaggataaattctggtactgcaggctgagccccaaccacaaagtcctccactatggtgacctggaggaatcccctcagggagaggtgccccacgatagcctgcaagataagctgcctgtggcggatatcaaggcggtcgtgacagggaaagattgtcctcatatgaaggagaaaggtgcactgaagcagaacaaagaagtattggaactcgcgttttctatcctgtacgatagtaattgtcaactcaacttcattgcccctgacaagcatgagtattgtatatggaccgatggcttgaacgccctcctgggcaaggacatgatgagtgaccttacaaggaatgatctggataccctgcttagcatggagattaagctaaggctgctggacctcgagaacattcagatacccgacgcaccccctcccatccccaaagagccaagtaattacgattttgtatatgactgtaattag

SEQ ID NO: 221987 - DNA, 246 bp, synthetic construct
  misc_feature 1..246: note = Description of Artificial Sequence: Synthetic coding sequence
  source 1..246: mol_type = other DNA
atgcccccaccagccgacatagtcaaagtggcgattgaatggccaggtgcctatccaaagcttatggagatcgatcagaagaagcctctgtccgccataataaaggaggtgtgtgatggctggtcgctcgctaaccatgagtacttcgccctgcagcacgccgacagcagcaatttctacatcactgagaagaatagaaacgagattaaaaatggaacaattctccggctgaccacctccccttag

SEQ ID NO: 221988 - DNA, 450 bp, synthetic construct
  misc_feature 1..450: note = Description of Artificial Sequence: Synthetic coding sequence
  source 1..450: mol_type = other DNA
atgccccctcccgcagacatcgtcaaggtggccattgagtggcccggagcatatcccaaactgatggagatcgaccagaagaagccccttagcgctatcattaaggaagtttgtgacggatggagtcttgccaatcacgagtattttgcgctgcagcacgcggacagctccaacttttacatcactgagaagaatagaaacgaaattaagaatggcaccatccttcgattaacgacatctcccgctcagaacgcccagcagctgcacgaacggatacagtcttcgtccatggacgctaagcttgaagcgctgaaagaccttgcatccctgtccagggatgtgacctttgcccaggaatttatcaacctcgacgggatctcccttctaactcagatggtggagtccggaaccgagagataccagaagttacagaagatcatgaaaccatag

SEQ ID NO: 221989 - DNA, 2163 bp, synthetic construct
  misc_feature 1..2163: note = Description of Artificial Sequence: Synthetic coding sequence
  source 1..2163: mol_type = other DNA
atgccaccacctagcgacattgtcaaagtcgccatagagtggccaggtgctaatgcccagttgctggagattgaccagaagcgaccactggctagcattataaaggaggtgtgtgatgggtggtctctgcccaaccccgagtactacacgctgcgttacgcagacggcccacagttgtacattactgaacaaaccagatccgatataaagaacgggacaatcctgcaactggctatctctccctctagggctgcgaggcagttaatggaacgcactcagtcctctaatatggagactaggctggacgcaatgaaagagctggctaaattgtccgccgacgtcaccttcgccaccgagtttattaatatggatggcatcatcgtgcttacgagattggttgaatctgggacgaagctcttaagtcactactctgaaatgctggcatttacactgaccgctttcctggaattaatggaccatggcattgtgtcttgggatatggtgagtatcacttttattaagcagattgcagggtatgtctcccagcccatggtagacgtgagtatccttcagagaagccttgccatcctggagtcaatggtgttgaatagccagtcgctgtaccagaaaatagctgaggagatcactgttggacaactgattagtcatctccaagtcagtaaccaggagatccaaacctacgcaatcgcacttattaatgctctctttctgaaggctcccgaagataagagacaggatatggctaacgcatttgcccagaagcacctgcggtcaatcattctgaatcacgttataaggggaaatagaccgattaagacagaaatggcccaccagctttacgttctccaggtgctgacatttaatctactggaagagcggatgatgaccaagatggatccaaatgaccaggcccagcgggatattatttttgaactgcggagaatcgcgtttgatgccgagtctgacccttcaaatgcgccaggttccggaacggaaaaacgaaaagcaatgtacacgaaagactataagatgctgggatttacgaatcatatcaaccctgccatggattttacgcagaccccacctgggatgctggccttggataatatgctctacctcgctaaggttcaccaggatacttacattcgcatagtcctggagaatagctccagagaggataaacacgagtgcccatttggcagatccgccattgagctgacaaaaatgctatgtgagatcttacaagtcggcgaactccccaacgaaggcaggaacgactatcaccctatgttcttcacccacgacagggcctttgaggaactgttcgggatctgtattcagctgctgaataaaacctggaaagagatgcgggcaactgccgaggatttcaataaggtgatgcaggttgttcgagaacagattactagggcactccccagcaaacccaattcgttggaccagttcaagagcaagctcagaagtctgtcctacagcgaaattctgaggctacggcagtccgagcggatgtctcaggacgacttccagagccccccaattgtcgagctaagagagaagatccagcctgagatacttgagttgatcaagcaacaaagactgaataggctctgtgaaggctcaagtttccgtaaaatcggaaataggcgtcggcaggaaagattttggtattgtcggcttgctctgaaccacaaggtgcttcattatggagaccttgacgacaatcctcagggagaggtaacctttgaaagccttcaggagaaaattcccgtcgccgacattaaggctatcgtaacaggcaaagactgtcctcacatgaaagaaaagagtgcacttaaacagaataaggaggtactggaactggccttcagcatcctgtacgatcccgatgagacactcaacttcattgccccaaacaagtacgagtactgcatctggattgatggactgtcagccctcctggggaaggatatgagcagtgagcttactaagagcgatctcgatacactgctgagcatggaaatgaaactgcggctgcttgacctggagaatattcaaatcccggaggcccctccaccgattcccaaggagccgtcttcgtatgatttcgtgtaccactatggctag

SEQ ID NO: 221990 - DNA, 2157 bp, synthetic construct
  misc_feature 1..2157: note = Description of Artificial Sequence: Synthetic coding sequence
  source 1..2157: mol_type = other DNA
atgccgcctcctagtgatatcgtaaaagtagccatcgaatggcctggtgctaacgcccagctgttagagatcgatcaaaagcgacccttggccagtatcatcaaagaagtgtgtgatggttggagcctgcctaaccctgaatactacacactgagatacgccgatggaccgcagctctacatcaccgaacaaactcgatctgatatcaagaacggaacaatcttgcaactcgccatctcgccaagccgagctgcaagacaattgatggaacgaactcaatccagcaacatggagacacgtctggatgcgatgaaggaactggcaaaattatctgcagatgtcacttttgccactgagttcatcaacatggatggaataattgtgctgacccgactcgtagaatctggcaccaagttgttatcgcatgaaatgctcgcctttacactgacggctttcctggagttaatggaccatggtatcgtcagctgggatatggtatcaataacattcataaagcagatcgccggttatgtgtcacaacccatggtcgacgtgtccatcctgcaaaggagcctggccatcctggaatcaatggtcctgaatagccagtctctgtaccagaagatcgcggaggaaatcaccgtgggacagctgatcagccacctgcaggtgtcaaatcaggaaatccaaacatacgctatagccttgataaatgcgctgttcctgaaggctcctgaggacaagcggcaggacatggccaatgcctttgcccagaaacacctcaggagcattatcctaaaccatgttattagaggaaatcgacccattaagacagagatggcccaccagctctatgtcctgcaggtcttgacgttcaaccttctcgaagaacggatgatgacgaagatggatcctaacgaccaggcccagagggacattatcttcgagttgaggcggatcgctttcgatgcggagtcggatccctccaacgcaccaggcagcgggaccgagaagcggaaagccatgtatacaaaagactacaaaatgttagggtttactaatcacatcaatccagccatggatttcacgcaaactccccctggtatgttggcacttgacaatatgttataccttgcaaaggtgcaccaagatacctacattaggattgttctggaaaattcctcccgggaagataagcacgagtgcccatttgggaggtctgccatcgagctgacaaaaatgctttgtgagatcctgcaagtgggtgagctccccaatgaaggtcggaacgactaccatcctatgtttttcacgcacgacagagcgtttgaagaattgtttggcatttgtatccagctgctgaataagacatggaaggagatgagggccaccgctgaggatttcaataaggtaatgcaggtggttagagagcagattacaagggccttacctagtaagcctaattcgctcgatcagtttaagagcaaattgagatcacttagctacagcgaaatcctcagattgcggcaatcagagcgcatgtcgcaggacgatttccagtccccaccaatcgtggagctgcgcgaaaaaatccagccagaaattcttgagctgattaagcagcagcggctgaatcggctatgtgaggggtcttcattcaggaaaattggcaaccggaggcgacaggagcgcttctggtattgcaggttagctctgaatcacaaggtgttgcactacggggatttagacgacaatcctcaaggcgaggtcaccttcgagagtcttcaggaaaagatacctgtcgctgacattaaagccatcgtgacaggtaaagactgcccccatatgaaagaaaagtccgcgctgaagcagaacaaagaagtcctcgagctcgccttctccatactctacgatcctgatgagactcttaacttcatcgcccctaataaatatgagtattgcatctggattgacggcctgagcgctcttctgggaaaagacatgtcttcagaactgacaaaatcagatctcgacactctcctgtcaatggaaatgaagcttcgcctattagatctggaaaatattcaaattcctgaggcacccccacccatccccaaggagccgtcctcctatgactttgtgtaccattacgggtag

SEQ ID NO: 221991 - DNA, 1899 bp, synthetic construct
  misc_feature 1..1899: note = Description of Artificial Sequence: Synthetic coding sequence
  source 1..1899: mol_type = other DNA
atggaaagaacccaatcatccaacatggaaacacgacttgatgccatgaaagagctggccaaattgagcgccgatgtgaccttcgccactgaattcattaacatggacgggatcatcgttctgacccggctggtagaatccggcaccaagctgttatcacactactctgaaatgttagccttcacattaacagcatttctggagctgatggaccatgggattgtgtcctgggacatggtgagtataaccttcatcaagcagattgccggttacgttagtcagcccatggtggacgtctctatcctgcagcgaagtcttgccattctggagtcaatggtgcttaatagtcagtcactctaccagaaaatcgctgaggaaattaccgtgggccagctgatcagccatctgcaagttagtaaccaggaaatccagacctacgcgattgctcttatcaatgctctctttttgaaagccccagaagacaaacgtcaagacatggcaaacgcttttgcacaaaaacatcttaggagcatcatcctgaaccacgttattagagggaaccgacctatcaagacggaaatggcccatcaactctacgttctgcaggtgctcaccttcaatttgctagaagagcggatgatgacaaagatggatcctaacgatcaggcccagagggacattatatttgagctaaggaggattgccttcgatgccgaatcagaccctagcaatgctccaggttctggaaccgagaagaggaaggcaatgtatacgaaagactataagatgcttggtttcacaaaccacatcaaccccgcaatggattttacccaaacgccacccggaatgctggcactcgataatatgctgtatttagctaaggtccaccaagatacttacattaggattgtgctcgaaaattcatcccgcgaggacaaacacgaatgcccgttcggaagaagcgcaatagaactcaccaaaatgttatgcgaaatactccaggtcggggagctgcctaatgaaggcagaaacgactaccaccccatgttcttcacccacgaccgcgctttcgaagagctgttcggtatttgcatccagctccttaacaaaacctggaaggaaatgcgagcaacagcagaggatttcaacaaggtaatgcaggtggtccgcgaacagatcacaagggccctgcccagtaagcctaacagccttgatcagtttaagtccaaattaaggtctctcagctattcagaaatcttgcgcctgcgacagtccgagaggatgtcccaagatgactttcagtccccgccaatcgtggagttgagagaaaagatccaaccagaaatcttagaacttataaaacagcaaagactgaatcgcctgtgcgagggctcgagtttccgtaagatcgggaatcggcgtcgccaggaaaggttctggtactgtcgcctggcattaaatcataaggtccttcactacggggatctggatgacaacccgcagggcgaggtcacattcgaaagcctgcaggagaagattccggtggcagatatcaaagccattgttacgggaaaggattgtcctcatatgaaggagaagtcagccctgaaacagaacaaggaagtactggagctagcctttagcatcctgtatgatccagacgagacccttaacttcattgcccctaacaagtacgaatactgcatctggattgacgggctctcagccctcttggggaaggacatgagtagtgaactgacgaagtccgacctagacactctgctgtccatggagatgaaattaagattactagacttggaaaacatacagatccccgaggcccctccacccatacccaaagaaccctcctcttacgattttgtctatcactatgggtag

SEQ ID NO: 221992 - DNA, 2163 bp, synthetic construct
  misc_feature 1..2163: note = Description of Artificial Sequence: Synthetic coding sequence
  source 1..2163: mol_type = other DNA
atgccacccccatcagacatcgtgaaggtcgcgatcgagtggcccggagctaacgctcagttgctagagatcgaccaaaaacgtccactggcatctattatcaaagaggtctgtgatggttggagcctgcccaaccctgaatactataccctccgctatgccgacggaccccagctgtacatcactgaacaaacgagaagcgatattaaaaatgggaccattctgcagttagccatttctccctccagagccgcacgtcagctgatggagagaacgcagagctcaaacatggaaacacgcctggacgccatgaaggagctggcgaaactgagcgccgatgtcacctttgccacggaattcatcaacatggacgggatcatcgtcctgactcggttggtcgaatctggcaccaaactcttgagtcactattcggaaatgctggccttcaccctgactgcatttttagagctgatggatcatggcattgtgtcctgggacatggtgagcattactttcattaaacaaatagctggctatgtatcccagcctatggttgacgttagtatactgcagagatcattggccattctggagagcatggtccttaatagccagtcgctataccagaagatagcagaagagatcacagtggggcagctgatctcgcatctacaagtctccaatcaggagatacagacatacgctattgctctgatcaatgcgcttttccttaaggcaccagaggataaacgtcaggatatggcaaacgcattcgcccagaagcaccttaggtccattatccttaaccatgtcatcaggggaaacaggcctatcaagactgaaatggcgcaccaactgtatgtactccaggttctgacctttaacctcctcgaggagagaatgatgactaaaatggacccaaacgatcaggcacaaagagatattatttttgaactgcgcaggattgcctttgacgccgaatccgatccaagtaacgcccctgggtccgggaccgagaaacggaaagccatgtacacgaaggactacaaaatgctgggcttcacaaaccacatcaaccccgcaatggacttcacgcagaccccacctggaatgctcgcattggacaacatgttataccttgccaaggttcaccaggatacttacattcgaatcgtcctggaaaactcttccagggaggataaacatgagtgcccttttggacgcagtgctatcgaacttaccaagatgctttgtgagattcttcaggtgggggagctgccgaacgaaggcaggaacgactatcacccaatgttttttactcatgatcgggctttcgaggaactgttcggcatctgcattcagctcttgaataaaacctggaaagagatgcgtgcaacagcggaggatttcaacaaagttatgcaggtcgtgagggagcagattacccgtgccctgcccagtaaacccaacagtctggaccaattcaagtcaaagttacggtctctaagctactccgaaattctgcgtctgcgacaaagcgagaggatgagtcaggacgacttccaatcaccacccatagtcgagcttcgggaaaagatccagccggagatccttgaactgattaaacaacagcgcctaaaccgcttgtgcgagggttctagtttccgaaaaatagggaataggaggcgccaggaacggttctggtactgccggctcgccctaaatcataaggtgctacactacggagatttggacgacaacccccagggagaggtgacatttgaatccttgcaggagaagattcctgtagccgatattaaagccattgtgaccgggaaggactgtccccatatgaaggaaaagagtgccctcaaacaaaacaaagaggtgctcgagctcgccttttctatcctgtatgaccctgatgagacattgaactttattgcacctaacaaatatgagtattgcatatggattgacggtctcagcgccttgctcggaaaggatatgagttcagagcttactaagtccgatctcgatactctcctctctatggagatgaaactccgcttgctcgacctagaaaacattcagatccccgaggcccctccaccaattcccaaagagccgagtagctacgattttgtgtaccattatggatag

SEQ ID NO: 221993 - DNA, 804 bp, synthetic construct
  misc_feature 1..804: note = Description of Artificial Sequence: Synthetic coding sequence
  source 1..804: mol_type = other DNA
gaagagataacagtggggcagttaattagccacttacaggtcagcaaccaggagatccagacatatgccatcgcactaatcaacgcactgttcctgaaagcaccagaggacaagaggcaggacatggcaaacgccttcgcccagaagcatttacgaagcattatcttaaatcacgtgatccgcggtaatagacctatcaagacagaaatggcccaccagttgtacgtcctccaggtgctgacatttaatctcttggaggagaggatgatgactaaaatggatcccaacgatcaggcccagagagacataattttcgaactgcggagaattgcattcgatgcagagtcagatcccagcaacgctccaggatcaggaaccgagaaaaggaaggccatgtataccaaggattacaaaatgctagggtttactaatcacatcaacccagccatggatttcacccagactccccctggcatgctcgccctcgataacatgctatatctggcaaaggtccaccaggatacatacattagaatcgtgctggagaatagctctagagaggataagcacgagtgtccattcggcagatctgcgatcgagctgacaaaaatgctttgcgagatcttgcaggtcggggagttaccgaacgagggcaggaacgattaccaccccatgttcttcactcacgacagggcatttgaggaactgttcggtatttgtattcagttactgaacaaaacctggaaggaaatgcgggcaaccgccgaggattttaataaggtatcagtctctggactgctttag

SEQ ID NO: 221994 - DNA, 2199 bp, synthetic construct
  misc_feature 1..2199: note = Description of Artificial Sequence: Synthetic coding sequence
  source 1..2199: mol_type = other DNA
atgcctcctccttcagacattgtgaaagtcgcaatcgagtggcccggagctaacgcccagcttctcgagatcgaccaaaagagaccattagcgtctataatcaaagaggtgtgcgatggctggagcctgcccaaccctgagtactacactctgcgatacgccgatggccctcagctttacatcacggagcagaccagaagcgacattaagaatggtacaatcctccaactcgcgatttctccctctcgggcagctcgccaactgatggagaggactcaaagctcaaatatggagacacgcctggacgctatgaaagagctcgctaagctgagcgctgacgtgacctttgccaccgagtttataaatatggatgggataatcgtcttgactagactggtggagtcaggcactaaactgctctcacattatagcgaaatgttagcattcacgctgactgctttcctggaattaatggaccacggcatcgtttcctgggacatggtgagcatcacgttcatcaagcaaatagccggatacgtcagccagcccatggtcgatgtctccattctgcagcgctctctagcaatcctcgagtcaatggtcttgaacagccagtccctatatcagaaaatagccgaggagatcacagtgggtcaactgatttctcatctccaggtaagcaaccaggagatccagacctacgccatagctctgatcaacgcactctttctgaaggctcctgaagacaagagacaagacaaacacctcaatccactcgaccttccggtcactgatatggccaatgcatttgcgcaaaaacatttgcggagcatcattctgaatcatgtcattagagggaaccgacctataaagaccgagatggcccaccaactgtatgtgctccaggtactcacctttaacttattagaggagcgtatgatgacgaaaatggatcccaatgatcaggctcagcgggacattattttcgagttgcggagaatcgcgtttgacgctgagtcagacccctctaatgcgcctggatccggaactgaaaagagaaaggcaatgtacactaaagactacaaaatgctggggttcaccaaccacatcaatcccgctatggatttcacccaaacacctcctggaatgcttgccctggacaacatgctctatctggccaaggtccatcaggatacatacatccgaatcgtcctggaaaacagctcacgcgaggacaaacacgaatgtccctttgggaggtccgctatagagctgacaaagatgttatgtgaaattctgcaagtgggagaactacctaacgagggacgcaacgattatcacccaatgttctttacccatgatcgcgcttttgaagaactcttcggcatctgcattcagctgctgaacaagacttggaaggagatgagagcgacagcagaggattttaacaaagtgatgcaggtggttagggaacagattactcgagccctgccctcaaaacctaactccctcgatcagtttaaaagtaaactgaggagcctgtcgtatagcgagattctgaggttgaggcagtctgagaggatgagtcaggatgatttccagtcacctcctatcgtggagctgagggagaaaatccagcctgagatactggaactgataaaacagcagaggttgaatagactatgtgaaggctcaagtttcaggaaaattggtaaccggcgtaggcaggagcgtttttggtactgtcggcttgctctgaatcacaaagttcttcactatggagatcttgatgataatccgcagggggaggtgacgttcgagagtctccaggagaagatccccgtggcagacatcaaagctatcgtgactggcaaggactgtcctcatatgaaggaaaaatccgctctgaagcagaataaggaggttttggagttggcatttagcattctatacgaccccgacgagactctgaacttcatcgcaccaaataagtacgagtactgcatctggatcgatggcctctccgctctgctgggaaaagatatgtcctctgagctgaccaagagcgacctcgatactttgctgagtatggagatgaaacttcgccttctcgatttagagaacattcagattcccgaggctccgcctcctataccaaaagaaccatcttcctacgatttcgtgtatcactatggctag

SEQ ID NO: 221995 - DNA, 1614 bp, synthetic construct
  misc_feature 1..1614: note = Description of Artificial Sequence: Synthetic coding sequence
  source 1..1614: mol_type = other DNA
atggtagacgtcagcatcctccagagatctctggccattttggaatccatggtactcaacagccaaagcctgtaccaaaagatcgctgaagagatcaccgttgggcagctcataagccacctacaggtgagcaaccaggaaatccaaacctatgccatcgcactcattaacgccctctttcttaaagcccctgaagacaagagacaggacatggctaacgccttcgcccagaagcatctgcggtctattattctgaatcatgtcattagaggaaaccgccctataaagaccgagatggcccatcaactttacgtccttcaggtgctgacgttcaatcttctggaggaaagaatgatgactaaaatggaccctaacgaccaggctcaaagggacataatctttgagctgaggaggatcgcctttgacgccgagtccgatccaagcaacgctcctgggagcggcacggaaaagcggaaagctatgtacaccaaagactacaaaatgttaggcttcaccaatcatataaatccagctatggactttactcagaccccaccaggcatgctcgctctggacaatatgttatacctcgcgaaagttcaccaggacacgtacataagaattgtcttggagaatagctctagggaggacaagcacgaatgcccattcgggagatccgcaattgaactgacgaagatgctttgcgagattctgcaggtaggcgagctgcccaatgaagggagaaacgactaccacccgatgtttttcacacacgacagggccttcgaagagcttttcggaatttgtatacagctgctgaataagacctggaaggagatgcgcgctacagccgaggacttcaacaaggtaatgcaggtcgtgagagagcaaatcacacgggcactgccttctaagcccaattctctagaccagtttaagagcaaactgcgcagtctgagctattcggagatcctgcgactgcgtcagtctgaaaggatgagtcaggacgattttcaatccccccctatcgtcgagctccgagaaaagattcagccagaaattctggagctgattaaacaacagagacttaatcgactgtgtgaaggatcgtcttttcgaaaaatcggaaataggcgacgtcaggaaaggttctggtattgtaggctggccttgaatcacaaggtgctgcactatggggacctcgacgacaacccgcagggagaggtgaccttcgagtcattacaggagaagatcccagtcgctgacatcaaggcaatcgtgacgggcaaggactgtccccatatgaaggaaaagagtgcattaaagcaaaataaagaggtcttggaactggctttttctatactgtatgaccccgacgagacgctaaattttatcgctcccaataagtatgagtattgcatatggatcgatggtctgtccgcgctgttgggcaaggatatgtcaagcgaactcaccaagtccgaccttgacacacttctgagcatggagatgaagctgcgcctcctggatctcgagaacattcaaatccccgaagcccctcctcccattccaaaggaacccagctcctatgacttcgtgtaccactacggctag

SEQ ID NO: 221996 - DNA, 1017 bp, synthetic construct
  misc_feature 1..1017: note = Description of Artificial Sequence: Synthetic coding sequence
  source 1..1017: mol_type = other DNA
atgcctcctcccagtgacatcgtgaaagttgcaattgagtggccaggtgcaaacgctcagttattagaaatcgaccagaagcgcccacttgcgagcattataaaagaggtctgcgacggttggtcgttgcccaatcccgagtactacacgcttagatacgccgacggtccccaactgtacatcactgaacagactagatccgatattaagaacggtaccatcctgcagttagctatcagtcccagccgtgctgcccgtcagttaatggaacgaacccaatcttccaacatggaaaccaggctcgatgcaatgaaggaactggccaagctgagcgccgatgtcacattcgcgacagagtttattaacatggatggcatcatcgtgcttactcggttggtcgagtctggtacaaaactgttatcacactattctgagatgctggcctttaccctgacagcctttttagagctgatggatcatgggatcgtgagttgggacatggtgtcaatcaccttcattaagcagatagctgggtacgttagtcagcccatggtggatgtgagtattctgcagaggtccctggctattctagagagtatggtgcttaacagccagagcctttatcagaagatcgcggaggagatcacagtcgggcagctcattagtcacctccaagtatcaaatcaggagattcagacgtacgccatcgctctcatcaatgccctgtttcttaaggcccctgaggacaaacgccaggacatggccaacgcgttcgcacaaaaacacctccgctcaataattcttaatcacgtgatccggggaaaccgaccaataaagaccgagatggcacaccaactgtatgtcttacaggtccttacctttaatctattggaggagaggatgatgacgaagatggatccaaacgaccaagcccagcgagacattatctttgagttgagaagaatcgcatttgatgctgagtccgacccaagcaacgcacccggttcaggtacttag

SEQ ID NO: 221997 - DNA, 852 bp, synthetic construct
  misc_feature 1..852: note = Description of Artificial Sequence: Synthetic coding sequence
  source 1..852: mol_type = other DNA
tatcacccgatgtttttcacacacgacagggcatttgaagaactgtttgggatatgtatccagctgctcaataagacctggaaggagatgcgggctaccgccgaggatttcaataaggtaatgcaggtagtgagagagcagatcacaagagccctcccgtccaaacccaatagtctggaccagttcaaaagcaagctgaggtcactgtcctatagtgagattctgcgcctgagacaaagtgagcgcatgtctcaagatgacttccagagcccaccaattgtagagctgagagaaaagattcagccggaaatcttggagttgatcaagcaacaacggctcaatagactgtgcgaaggatcaagttttcgcaagattgggaaccggagaagacaggaaagattctggtactgcagactggccttgaaccataaggtcctccactatggagaccttgacgacaaccctcagggggaagtcactttcgaatctttgcaggagaaaaatataaaagctattgtaaccggaaaggactgcccccacatgaaggagaaaagtgcactcaaacaaaataaagaggtgctcgagttagcgttctcaatcttgtatgatccagacgagaccctgaactttatagcaccaaataaatacgagtactgcatatggattgatggactgtccgccctgttgggaaaggatatgagctccgaactgaccaagtccgatcttgacacacttctatctatggagatgaaactgcgcttactcgacctcgagaatatacagatccctgaggctccgcctccgatccctaaagagccttcttcgtacgactttgtctaccactacggctag

SEQ ID NO: 221998 - DNA, 1359 bp, synthetic construct
  misc_feature 1..1359: note = Description of Artificial Sequence: Synthetic coding sequence
  source 1..1359: mol_type = other DNA
atgcatgtgatcaggggaaataggccaatcaagacagagatggctcaccagctgtatgtgctacaggtactcacgttcaatctcttggaggaaagaatgatgacgaagatggaccctaatgaccaggcccaaagggacattattttcgaattgcgcagaattgcgtttgacgccgaatcagacccctctaatgcaccgggtagcggcacagagaagaggaaagcgatgtacacgaaggactacaaaatgctgggatttactaaccacattaaccccgctatggatttcacacaaacgcctccagggatgctggctttggacaacatgctctacctggctaaggtgcaccaggacacttacattcgcatcgtcctcgaaaactccagccgcgaggacaagcatgagtgccccttcggaagatccgctatcgaactcacgaagatgctgtgcgagatcctgcaggttggagaattaccgaacgagggaaggaatgactatcatccaatgttttttacgcatgacagagccttcgaggagctcttcggaatttgtatccagctcctaaataaaacatggaaggaaatgcgcgctacagcagaggacttcaataaggtaatgcaggttgttagggaacagatcacccgtgccctgccatctaagccgaactcattggaccagtttaagtccaagctccggagtctgtcttattctgagatcctcaggttacgacaatccgagcgaatgagccaggatgacttccaatccccacctattgtcgagctgcgggaaaagattcagccggaaatcctggagctgattaagcagcagagactgaatcgcctgtgtgaagggtcttcattccggaagattggcaatagaaggagacaggagcggttttggtattgcaggcttgcattgaaccataaggtcctgcactacggcgacctcgacgacaatccccaaggggaggtgacatttgagagcttacaggaaaaaataccagtagcagatattaaagcgatagttaccgggaaggactgcccccacatgaaggagaaatcagctctgaagcagaataaggaagtgctcgaactggcattctccatactgtatgatccggacgaaaccctcaattttatagccccaaacaaatacgagtactgcatctggatcgatggcctctctgctttactgggaaaggatatgagtagtgaactaaccaaatccgacctcgacactctattaagcatggaaatgaaactgagattgctggacctggagaacatccagatccctgaagcaccccctcctatccctaaagagccaagcagttatgatttcgtgtatcattatgggtag

SEQ ID NO: 221999 - DNA, 2322 bp, synthetic construct
  misc_feature 1..2322: note = Description of Artificial Sequence: Synthetic coding sequence
  source 1..2322: mol_type = other DNA
atggctcggagtagctcgctgggtcgagaatgtggcacccccaggtcaggacttggcaagggcggtccacccagaccccagggcccacaggcacgctgtaccctgggccgtcggtgtaccgttagcggtaagtgccgtcgtccaaggccgtcatggaccatggcaccacctcggaatgtggtcaaaatagcaattaaaatgcgggacgcgattccccagctgattcagttggaccaggccaaacccctggccgcagtgctgaaagaagtatgcgacgcatggtctctaacccacagcgagcgctatgccctgcagtttgcagatggtcaccgcaggtacattactgagaataatagggctgaaataaagaatggttccatactgtgtctttctactgctcccgatcttgaagctgagcaactgctgggaggtctccagtctaatagcccggaaggaaggagggaggcattgcgcagattggtgcccttggcatccgacatgatcttcgcaagagaggttatctctagaaacggtctgcaaatactgggaaccatcatcgaagacggcgatgatctgggcgaagtactggcactgtcccttagagccttctcagagctaatggagcacggcgtggtttcatgggagacactgagtatacccttcgtgaggaaagtggtttgttacgtcaatatgaatcttatggatgcctcagtgcccccactggccctaggtctcttagagagtgtcacactaagctcgcccgctcttggccagctggtgaaaagcgaagtcccacttgatcgcctgctggtgcacttacaggtgatgaaccagcaactccaaaccaaggcaatggctttgctaactgctttacttcagggggcttcccctgtggagaggaaacatatgctggattacctgtggcagcgaaatctcagacaattcatctacaagaatatcatccactcagcggctcctatgggagacgaaatggctcatcatctttatgtgcttcaagccctcatgctcgggctactggagcctcgcatgagaactccgctggacccatatagtcaagaacagcgcgaacagttgcaggtgctccgccaggctgcatttgaagtggagggggaatcgtctggggctggactctctgccgacaggcgtcgcagtctgtgcgcccgagagtttcggaaattgggattcagcaactctaacccagctcaggacctcgaaagggtgcctccaggcctgttagctctggataacatgctgtatttttccaggaatgcaccaagcgcctactctagattcgtattggagaattccagcagggaggacaagcatgagtgcccattcgccaggggaagcatccaactgacggttcttctctgtgagttgctgagggtgggtgagccatgcagcgagaccgcccaggacttttcccccatgttcttcggacaagaccagtcctttcacgagttgttttgtgtcggcattcagctgttaaacaaaacatggaaggagatgcgtgccacccaagaagattttgacaaagtcatgcaggtcgtgcgcgaacagctagccagaaccctggctttaaagccaacgagcctggaactgttcagaaccaaagtcaacgcactgacttacggcgaagtccttcgcctaagacagacagagcggctgcaccaggaaggcacccttgccccacctattctggagctacgtgaaaagctgaaacctgaactgatggggctcatcaggcaacagagactgctgagactctgtgaagggaccctctttaggaagatctcctctcgccgtcggcaagataaactgtggttctgctgtttatcccctaatcacaaattattgcaatacggcgatatggaagagggcgcatccccaccaacgctcgagagccttcctgagcagttgcctgtagcagacatgcgggctctgttgacaggcaaggactgtcctcacgtgagggagaagggaagtggcaaacagaataaggacctctatgaactagcgttttccatctcgtatgatcggggtgaggaagaagcatatttgaacttcatcgcaccctctaaacgggagttctacctgtggaccgacggcctaagcgcattgcttggtagccctatgggttccgagcaaacacgcctggatcttgaacagctgctgaccatggagaccaagctccgccttctcgagctggaaaacgtccccatcccagagaggcccccacctgtcccaccccctcctacaaactttaacttctgttacgattgtagcattgctgagccatag

SEQ ID NO: 222000 - DNA, 2511 bp, synthetic construct
  misc_feature 1..2511: note = Description of Artificial Sequence: Synthetic coding sequence
  source 1..2511: mol_type = other DNA
atgtccaagctgagctttcgcgcacgcgcactcgacgcatctaaacctctgccagttttcaggtgtgaggacctccccgacttacacgaatatgcaagcattaatcgtgctgtccctcagatgcccacaggtatggaaaaagaagaagagtctgagcatcacctccagcgggcaatttctgcacagcaggtttatggtgaaaaaagggataatatggttattccagtgccagaagcagaaagcaacatagcctattatgaaagcatataccctggcgaatttaagatgcccaagcagttgatacacatccagccatttagcttagatgccgagcagcccgactatgaccttgattcagaagacgaggttttcgtgaataaactaaagaaaaagatggatatctgcccccttcagttcgaggagatgattgatcgacttgagaaagggtccggacagcagcctgtgtcgctgcaggaagccaaattgctcttgaaggaggatgatgagctgatcagagaggtgtacgaatattggatcaaaaaacgcaaaaattgtcgaggcccaagtttaatcccttccgttaagcaggagaaacgggatggcagcagcacaaatgacccctacgtggcctttcgacggaggacagaaaagatgcagacgagaaaaaatcgaaagaacgatgaggcctcatacgaaaagatgcttaaactgcgcagggacctctcacgtgcagttacaatccttgaaatgattaagcggagagagaagagcaaaagagaactcttacaccttaccctggaaattatggaaaaaagatacaacctgggcgattacaatggtgagatcatgtctgaagtaatggcccagagacagcccatgaagcccacgtatgctatccccataatccccatcaccaacagtagccaatttaaacatcaggaggctatggatgtgaaggagtttaaagtcaacaagcaggacaaagcagatctgatcagaccaaagcgcaagtacgaaaaaaagcctaaggtgctcccctcctccgcagctgccacccctcagcaaaccagccctgcagctctcccagtattcaatgccaaggatctgaaccaatacgattttccctcatcagatgaggagcctctgtctcaagtgttaagcggatccagcgaggcagaagaggacaatgatccagacggcccattcgctttcagaaggaaagcaggatgccagtattacgctccacaccttgatcaaacgggaaactggccatggactagccccaaggacggaggactgggagacgtgcggtatagatattgcttgactactcttacggtgccacagcggtgcattggttttgcacggcgaagggttggacggggaggcagagttctgcttgatcgcgctcatagcgactacgacagcgtgtttcatcacctggatctcgagatgctcagcagcccacagcactcccccgttaatcagtttgcgaataccagcgagacaaatacatctgacaaatcatttagtaaggatttatcacagatcctggttaatatcaaaagttgtcggtggcgacatttccgtccacgcaccccatctctgcacgactctgataacgacgaactgtcttgtaggaaattgtaccgttccatcaaccgaacaggcacagctcagcccggaacccagacctgctccacatctacacagagcaaatcctcctctggtagcgcccatttcgccttcacagcagagcagtatcaacagcatcaacagcagttagcactcatgcagaagcagcaactggcccagattcagcagcagcaagcaaattccaactcttccaccaataccagccaaaacctggcttccaaccagcaaaagtctggcttccgcctgaacattcagggactggaacgcactctgcaaggattcgtgtcaaagaccttggactccgccagcgctcagttcgcagcaagtgcactggtgactagtgagcaactgatgggtttcaagatgaaggacgacgtggtattaggcataggcgtcaatggcgtgcttcctgcttccggcgtttacaaaggtttgcacctctcaagtacgacgcctaccgctttagtccacacgagcccatccacggccggtagtgcacttctacagccttcaaatataacacagactagtagcagccactcagcgctgtctcaccaagtgaccgccgctaattcagccaccactcaagtgctgatcggaaacaacattcgactgaccgttcctagctctgtggctacggttaattccatagcgcctattaatgctaggcatatccccaggacgttaagcgcagtgccatcatcagccttaaaattagccgctgctgccaactgccaagtgagcaaagtaccctcctctagcagtgtggattccgtgccaagagagaaccacgagagcgagaagccagccctaaacaatatcgccgacaataccgtagcaatggaagtgacatag

SEQ ID NO: 222001 - DNA, 2442 bp, synthetic construct
  misc_feature 1..2442: note = Description of Artificial Sequence: Synthetic coding sequence
  source 1..2442: mol_type = other DNA
atgtcaaaactcagttttcgggctcgcgctctcgatgcctctaagccacttcccgtgttccgatgcgaggatctgccagacctccacgaatatgcctcaatcaatcgagccgtaccccaaatgcccactgggatggaaaaggaggaagagtctgagcatcacctgcagagagctatctctgcacagcaagtgtacggagagaaacgcgacaacatggtgattccggtgcctgaggctgagtcaaatatcgcctactatgagagtatatatccaggagagtttaagatgccaaaacagctaatccacattcagcccttctctcttgacgcggagcagccagactatgatctggacagcgaagatgaggtgtttgtgaataagctaaaaaagaagatggacatctgtcccctccagtttgaggagatgatcgatcgcctcgaaaagggcagtgggcaacaaccagtcagtctgcaggaggccaaattgctgttaaaagaggacgacgaactcattcgtgaggtttacgaatactggatcaaaaaacgcaaaaactgccggggtcccagcctaataccttccgtgaagcaagagaagagggacggttcctctaccaatgatccatacgtggccttccgacgacgcaccgagaaaatgcagacaaggaagaatcggaagaacgatgaggcctcttatgaaaaaatgcttaaactgcgtcgcgacctgagcagggcagtgaccattttggagatgattaagaggagggagaagtccaaacgtgaattgttgcacctcaccctggagatcatggaaaaacgatacaatctcggggattacaatggtgaaataatgtcagaggttatggcgcagaggcagcccatgaagccaacatatgcaatccctataatccccatcacaaactccagtcagtttaaacaccaggaagccatggacgtcaaggagtttaaagttaataaacaggacaaagcggatctaataaggcccaaacgcaaatacgagaagaaaccaaaagtgctgccttcgtcggcagccgcaacaccgcagcagacgtcccctgcggcactccctgtgtttaacgctaaagatctgaaccaatatgatttcccctcctctgatgaggagccactgagtcaggttctcagcggtagtagtgaagcggaagaagacaatgatcctgacggcccatttgcctttcggagaaaagccggttgtcaatactacgcccctcatctggaccagacgggtaactggccctggaccagccctaaggatggaggtctgggagacgtgcgatatcgctactgtctgacaaccctcaccgtacctcagcggtgcataggcttcgctcgaagaagggtcggacgcggtggacgcgtgctgttagatcgcgctcacagtgattatgatagcgtgtttcaccatctggacctagagatgttgagcagcccacagcactcccctgtgaaccagttcgcgaacacgtctgagaccaacacctccgacaaatcctttagcaaggacttatcccaaatcttggtgaacataaagagctgccggtggaggcacttccgtccccgaacaccaagtctccacgattccgataatgatgagctatcttgccgcaaactctaccggtcaatcaatagaaccggcaccgctcaaccaggcacccagacctgcagtacatccactcagtctaagagcagttccgggagcgctcatttcgctttcaccgctgagcagtaccagcaacaccagcaacagttggctcttatgcaaaagcagcagttagcacaaatccagcagcagcaggctaactccaatagcagcacaaatacaagccagggcttcgtcagtaaaacgttagactcagcctccgcgcagttcgccgcttccgctcttgtgacatcagagcagctcatgggatttaaaatgaaggacgacgtggtgctgggcataggggtgaatggagtgcttccagcatccggcgtgtataagggtcttcatctgtccagcactacacctacagctttggttcacacgtccccctccacagcgggttcagccttgcttcagcctagcaatatcacgcagacaagctcttctcactctgcgttaagtcaccaggtaactgcagctaactcggctacaacccaggtgctgataggcaacaatatcagactcaccgtgccgagctccgtggcaacagttaatagtatagcaccaatcaacgccaggcacataccacggacactgagcgctgtgcccagctccgccctcaaacttgcagcggcagctaactgtcaggtctccaaggtgccttcttcctcatctgtcgatagcgttcctcgtgaaaatcatgaatcggaaaaaccagcattgaacaatattgccgataacactgtggcaatggaggtgacttag

SEQ ID NO: 222002 - DNA, 2292 bp, synthetic construct
  misc_feature 1..2292: note = Description of Artificial Sequence: Synthetic coding sequence
  source 1..2292: mol_type = other DNA
atggaacatcacctgcaaagagcgataagcgctcagcaggtttacggcgaaaagagagacaacatggtcatcccagtgccagaggccgaaagcaacatcgcctactatgaaagcatctaccctggagagtttaagatgccaaagcagctgatccatatccagcccttttcacttgacgctgagcagccggactacgacctggattcggaagacgaggtcttcgtcaacaagcttaagaagaagatggatatatgcccactgcaatttgaggagatgattgaccgcctggaaaagggttcaggccagcaacctgtgtcacttcaagaagctaaactcctgttgaaagaggatgacgagctcataagagaggtgtatgagtattggattaagaagagaaagaattgtaggggccctagcctgattccaagcgtaaaacaggagaagagggatggctctagcaccaatgacccatacgtggctttccgcagacggacagaaaagatgcagaccagaaaaaatcgaaagaacgacgaggcttcttacgaaaagatgcttaagctgcggagagatctttctagggcagtgactattctggagatgattaaacgcagggagaaaagcaaaagggagcttctgcacctgacacttgaaatcatggaaaagaggtataaccttggcgactataatggcgagatcatgtccgaggtgatggcccaaagacagcccatgaagccaacatatgctatccccatcattcctatcacaaattctagtcagttcaagcaccaggaagcaatggacgttaaggaatttaaagtgaataaacaggacaaggcggacctgattaggccaaagaggaaatacgagaagaaaccgaaggtgttaccctccagtgcggctgccaccccacagcagacaagccctgccgctctgccagtattcaatgcaaaggatctgaaccagtacgacttccctagttccgacgaagagccactgagtcaggttctcagcgggtcctcagaagcggaggaagacaacgatcctgacggaccttttgctttcaggagaaaggccggatgtcaatattatgccccacacctcgatcagactggtaattggccttggacaagtccaaaggatggaggactaggggatgttcggtatcggtactgtctgaccactctcactgtgccccaacgctgcatcggcttcgctcgcagaagggtgggaagagggggtcgcgtgctcctggaccgcgctcattccgactacgatagtgtatttcatcatctagatctggaaatgctgagttctcctcagcattctcctgtgaaccagttcgcaaatactagtgagaccaacaccagcgacaaatcattctctaaagacctgagtcagattctcgttaatataaagtcctgccgctggaggcacttcagacctcgcacacccagtttgcacgattctgataacgatgaattgtcgtgtcgtaagttgtatagatccataaacagaacggggacagctcagcccggaacacagacctgcagtacgtccacgcagagtaaaagcagttctggcagcgcgcactttgctttcacagcagaacagtaccaacaacatcagcagcagctggcactgatgcaaaagcagcaactggcccagattcagcaacagcaggccaattctaatagtagcactaatacctcgcagggctttgtgagtaagactttagattctgcctctgcgcaatttgctgcttcggctttggtcacatcagaacagcttatgggcttcaagatgaaagatgatgtagttctgggtatcggagttaacggagtgttgccagcctccggagtctacaagggcctgcacctcagttccaccaccccaaccgcccttgtccatacatccccaagtactgccggaagtgccctcctgcagccttccaacatcactcagacttctagctctcattccgctctaagccaccaggtgacggccgcaaattccgccaccacccaggtgctcatcggaaataacatcagactcacagtccctagtagtgtggcgaccgtcaacagcattgccccaatcaatgccagacacatcccacggacgttgagcgccgtcccttcctccgcattaaagctcgcagcagccgcaaattgccaagtctcaaaggtgccctcaagtagctccgtcgatagtgtaccgagagaaaaccacgaatccgaaaaacccgcattgaacaatattgcagacaacactgtagcgatggaggtgacttag

SEQ ID NO: 222003 - DNA, 2424 bp, synthetic construct
  misc_feature 1..2424: note = Description of Artificial Sequence: Synthetic coding sequence
  source 1..2424: mol_type = other DNA
atgagcaagctgtccttccgagctagggcactagacgccgcaaaaccgctgcccatttatcgcggaaaggatatgcctgacctaaacgattgcgtgtctatcaatagagcagttccacaaatgcctaccgggatggaaaaagaagaagaatcggagcaccacctccagcgggcaatttccgcccagcaagttttccgcgagaagaaggaatcaatggtcattccagtgccagaagctgaatccaacgtcaattattacaacaggctgtacaaaggggagttcaaacaacccaaacaatttatccacatacagcccttcaatttggacaatgagcagcccgattatgacatggacagcgaagatgagactctgttaaatcgtttaaatagaaaaatggaaataaagcctctacagtttgaaatcatgattgacagactggagaaagctagtagcaatcagctggtgaccctgcaggaagcaaaactgctgctcaatgaagacgattatctcattaaagcagtttatgactactgggtgcgcaaacgcaagaattgccgtggcccatcactgatccctcaaatcaagcaagagaaacgtgatgggtccacaaacaatgacccctacgtggcctttcgccgacgaacggaaaagatgcaaacaagaaaaaatagaaagaatgatgaggcttcctacgaaaaaatgttgaagctccggagagagtttagcagagcgataactattttagaaatgatcaaaagaagagaaaagactaaaagagagctgctccacttaacactcgaagtggtggaaaaacgataccacctcggtgattacggcggagagattctgaatgaagtcaagatttctaggagcgaaaaggagctttacgcaacccctgctactttgcacaatggcaatcatcacaaagtacaggagtgcaagaccaaacatccccaccatttaagtctcaaggaggaggctagtgacgtagtgcgacagaagaaaaaatacccaaaaaagcccaaggctgaggctttgattacctcccagcaaccaacaccggaaaccctcccggtcatcaacaaatcagacatcaaacagtacgactttcacagtagcgacgaggatgagtttccacaagtgctcagcccggtctctgaacccgaagaagaaaatgaccccgacggcccatgcgcgttccgtcgacgagcaggctgccagtattacgccccaaggttagaccaggccaaccactcctgtgagaattcagagctcgcagacttggataagctaaggtacagacattgccttaccactttaaccgtcccaagaagatgcattggctttgcaagaagacgtattgggagggggggtagggtgatcatggacaggatcagtacagaacacgaccccgtgttgaaacaaatcgacccagagatgctcaactctttctcctcctccagtcagacaatagacttttcttctaatttctctcggactaacgcaagctctaagcactgtgaaaatagattatctctctccgagattctgtccaatatacgatcttgcagacttcagtgctttcagccaaggttgctaaacctgcaagactccgactcggaagagtgcacatcccgcaagcccggacagaccgtgaacaacaaacgggtgagcgccgcatcagtggccctgctaaacaccagtaaaaacggcatcagtgttacgggcggaattacggaggagcagtttcagacacatcagcagcagctggtccagatgcaacgccaacagttggctcagttgcagcaaaagcagcagtctcaacattccagtcagcaaacgcaccctaaagctcaaggatcatctacttcagactgtatgtcaaagacacttgacagcgcctccgctcatttcgctgcatctgcagtagtttctgccccagtgccctctaggtccgaagtcgccaaggagcagaataccggccacaacaacataaatggcgtggtccagccaagcgggaccagtaagaccctgtactctactaatatggcattatcctcttcacccggtatttccgccgtgcagctggtgagaactgttggacacaccaccacaaatcacttaataccagcactgtgcacctcaagtccacaaacgctccctatgaacaatagttgtcttactaacgcagtgcacctgaataatgtttccgtggtgtcccccgttaatgttcatattaacacccggacttctgccccaagtcctaccgcactgaagttggccactgtggcggctagtatggaccgcgttcctaaagtcaccccttcatctgccatatcctctatcgccagggaaaaccacgagccagagcggttaggtttaaatggtatagctgaaaccacggtggctatggaagtaacctag

SEQ ID NO: 222004 - DNA, 315 bp, synthetic construct
  misc_feature 1..315: note = Description of Artificial Sequence: Synthetic coding sequence
  source 1..315: mol_type = other DNA
atgagccacacaatcttactggtgcagcccactaagcggccagagggcaggacatacgctgactacgaatcagtcaatgagtgcatggaaggtgtgtgcaagatgtacgaagagcacctgaagaggatgaacccaaattccccctcaatcacctacgatatatctcagctgttcgactttattgatgacttagctgatctatcttgtctggtgtatcgtgccgatactcagacttatcaaccatacaataaagattggataaaggagaaaatctatgttttactgcggagacaggcacagcaggccggtaaatag

SEQ ID NO: 222005 - DNA, 2253 bp, synthetic construct
  misc_feature 1..2253: note = Description of Artificial Sequence: Synthetic coding sequence
  source 1..2253: mol_type = other DNA
tactctaagatggagattcctaatccccctacctcaaagtgcattacatactggaagagaaaggtcaaatcagaatatatgaggctgcgtcaactcaaacgactacaggctaacatgggcgcaaaagcgctgtatgtcgccaacttcgcaaaggtgcaggaaaaaactcaaattcttaacgaggagtggaaaaagctcagggtccagcccgtgcagagcatgaaacctgtctcaggccatccatttttgaaaaaatgtactatcgagtcaatcttccctgggtttgcttcacagcacatgttgatgagaagtctcaatactgttgcgctcgtgcccattatgtattcatggtcacctttgcagcagaattttatggtggaggacgagactgtcctctgcaatataccatatatgggagacgaggtcaaggaggaagatgaaacctttattgaagagctgatcaataattacgatggtaaggtgcatggcgaggaagaaatgatccccggttctgtgttgatttccgacgctgtgtttttagagcttgtggatgctctgaatcagtactcagatgaggaagaagagggccacaacgacacgtccgacgggaagcaggatgattctaaggaagatctgcctgtgacccgcaaaagaaaacgtcatgccatagaggggaataagaagtcatctaagaagcagttcccaaatgacatgatcttctctgccattgccagcatgtttccagaaaacggggtgccagatgatatgaaggaacgctatcgggagctgaccgaaatgtcggacccaaatgctctgcccccacagtgcaccccaaacattgacggtcctaacgcaaagtcggtgcagagagagcaaagtctccattctttccacacactcttttgcagaaggtgttttaagtatgattgcttcttacacccgttccatgccacccccaacgtttacaagcgcaaaaataaagagatcaagatcgagcccgaaccatgtggtactgattgctttctgttgctcgagggtgctaaggagtacgccatgctacataaccccaggtccaaatgctctggccgtcgacggagacgccaccatattgtgtccgcttcatgctccaatgcctccgcctccgcggtggctgagacaaaggaaggagactccgaccgtgataccggtaatgattgggcaagctctagcagtgaagctaacagtcgctgccaaacccccacgaagcagaaggctagcccagcccctcctcagttgtgcgtagttgaggctccttcagagccagtagagtggacaggtgctgaggaatcactatttagggtttttcacggcacatactttaataacttctgctctatcgcgcgtctgctggggactaagacatgtaagcaggtgttccagtttgcagtgaaagagtccttgattctgaagcttcccacagatgagctcatgaatccctcccagaaaaagaagcgaaaacaccgactgtgggctgctcactgtaggaaaatccagcttaaaaaggacaacagtagcacgcaagtctacaactaccagccatgtgaccacccagaccggccttgcgactccacctgtccgtgtattatgactcagaatttttgtgagaaattctgtcagtgcaaccccgactgccaaaaccgtttcccaggctgccggtgcaaaacgcaatgcaatacaaaacagtgtccatgttatctggctgttagggagtgtgatcctgacctgtgcctgacatgtggagcctcagaacactgggactgtaaagtggtgtcctgcaaaaactgctcaatccaaagaggcttgaagaaacatcttcttttggcaccctcagatgtcgcaggatgggggaccttcattaaggaatccgtgcaaaagaacgagtttatctctgaatattgtggcgagctgatctcccaggacgaggcggaccgcaggggcaaggtttacgataagtacatgtctagtttcttgttcaacttaaacaacgactttgtggtggacgccacacgtaaggggaacaaaatccgcttcgccaatcatagtgtcaatcccaattgctacgctaaagtggtgatggtgaatggcgaccatagaattggcatctttgcgaagagggccatccaagcgggagaagagctgttctttgactaccgctatagtcaggccgacgcattgaagtatgtcggaattgaacgggaaactgatgtgctctag

SEQ ID NO: 222006 - DNA, 2124 bp, synthetic construct
  misc_feature 1..2124: note = Description of Artificial Sequence: Synthetic coding sequence
  source 1..2124: mol_type = other DNA
atggagattcctaaccccccaacttctaagtgcattacctattggaagcgaaaggttaagagtgagtacatgcggttaaggcagctgaaacggctccaggctaatatgggagccaaggcattgtatgttgctaacttcgctaaggtccaagagaagacccagatccttaacgaagaatggaagaagttacgagtgcagcctgtgcagtctatgaagccggtgagtggacacccgttcctcaagaaggtagaagacgaaactgtattgtgtaacataccttatatgggtgacgaagtgaaggaggaagacgagaccttcatcgaagagctgatcaacaattatgacggaaaggtgcatggggaggaagagatgatccctggctcagtgctcatcagcgacgcagtcttccttgagctcgtagatgccctgaatcagtatagtgacgaggaggaagaagggcataatgacactagtgatgggaaacaggacgacagtaaggaagatcttcctgtgacgagaaaaaggaaacggcatgcaatcgaggggaacaagaagagcagcaaaaagcaatttcccaacgacatgatttttagcgctattgcttccatgttccccgaaaacggcgtcccagatgacatgaaggagcggtaccgcgagctgactgagatgtcggatcccaatgcgttacctccacagtgcacccctaatatcgacggtccgaacgcgaagagtgtgcagagagaacagtctctccattccttccacactttgttttgtcggcgttgtttcaaatacgattgctttctgcacccttttcacgctacccccaacgtatacaagcgaaagaacaaagagattaaaatcgagccagaaccctgtggcaccgactgttttctgttgctggaaggagcaaaggagtacgctatgctgcataacccgagatccaagtgctccggcagacggcgacgcagacatcacatcgtgtctgcatcatgctccaatgcttctgcttctgccgtcgcagagaccaaggaaggtgactcagacagagacacgggtaatgactgggccagttcctccagcgaggcgaatagccggtgtcagacaccaaccaagcagaaggctagccctgcccctccacagctgtgcgtggtcgaagccccttccgaacccgtggaatggactggtgccgaggagtccctgtttcgggtgtttcacggcacctatttcaataatttctgttctatagcacgactcctcggcaccaagacctgcaagcaagtttttcagtttgccgttaaagaatccttaatcctcaagctgcctaccgatgagctcatgaacccttcccagaagaaaaaaaggaagcatagactgtgggcagcacactgccggaagattcagcttaagaaggataactcaagcactcaggtgtataattaccagccttgtgatcatccagatcgtccatgcgatagtacttgcccctgtattatgacacagaatttctgcgagaagttctgccagtgtaaccccgattgccagaatagattcccaggctgtcggtgcaagactcagtgtaatacaaagcagtgtccttgctacctcgccgtgagggagtgcgaccctgatctttgcctgacctgcggggcttcggaacactgggattgtaaggtggtcagctgcaagaattgttcgattcagagaggcctgaaaaaacacttgctccttgcaccaagtgatgtggcaggctgggggaccttcataaaagaaagtgtacagaagaatgagtttatttctgagtattgtggagagctcattagtcaagatgaggctgaccggaggggaaaagtttatgataaatacatgtcctcattcctgtttaatctgaacaacgactttgttgtggacgcaactagaaagggaaacaagattcgatttgcaaatcactcggttaatccaaactgctacgccaaagttgtcatggttaatggggatcatcgtatcggcatcttcgcaaagcgggctatccaagcaggagaggaactgttcttcgactaccggtatagtcaagccgatgccctgaaatatgttggtatcgaacgggagaccgatgtgctgtag

SEQ ID NO: 222007 - DNA, 2244 bp, synthetic construct
  misc_feature 1..2244: note = Description of Artificial Sequence: Synthetic coding sequence
  source 1..2244: mol_type = other DNA
atggaaattcccaaccctcctacttccaagtgtataacatattggaagagaaaagtcaaaagcgagtacatgaggctccgccaattgaaaagattgcaggccaatatgggtgctaaagccctttacgtggcgaacttcgccaaggtgcaagaaaaaactcagatactgaatgaagaatggaaaaaactccgcgtacagcctgtgcagtccatgaaaccagtgtcggggcacccctttctgaagaaatgtactatcgagtcaatcttcccgggatttgcatctcaacatatgctgatgagaagcctcaatacagttgccctggtgcctatcatgtattcttggtcgcctttacagcaaaactttatggtggaagatgagacagttctttgcaacatcccctacatgggcgacgaagtcaaagaagaagatgaaacattcatcgaagagttaatcaataattatgacggtaaggtgcatggtgaggaggagatgatccccggaagcgtcctgattagcgatgccgtctttctcgagctggtggatgccctcaaccagtattcagacgaagaagaggaaggccataatgacacaagtgacggcaaacaggatgacagcaaagaggacttgcccgtcaccagaaagcgcaagcgacatgctatagaggggaacaaaaaaagctcaaaaaaacagttcccgaacgatatgatcttcagcgcaattgctagcatgttccccgaaaacggcgtgccagacgatatgaaagagaggtaccgggaactgacagagatgagcgatccaaacgccctcccacctcaatgcacccccaacatcgacggcccaaatgccaagagtgtgcagcgagagcaatcactccacagtttccacacactcttctgccggaggtgttttaagtacgactgcttcctgcatccctttcatgccacccccaacgtgtacaagcggaaaaacaaggaaatcaagatcgagcctgaaccttgtggaaccgattgtttccttctgctggagggagccaaagaatacgccatgctccacaacccgagatcgaagtgtagcggacggagaaggagacgtcaccacatagtcagtgcttcatgttccaatgcttctgcctcggctgtggcagagaccaaggagggcgacagcgatcgcgataccggcaacgactgggcctcatcctcctccgaggctaactccagatgccaaactcctactaaacagaaggcatctccagctccacctcaactctgcgtggttgaagctccttcagagccggtagagtggaccggcgctgaggaaagtctgtttagggttttccatgggacctatttcaacaatttttgttccatcgccagactgctgggtacaaagacctgcaagcaggtctttcagttcgcagtgaaggagagtctgattttaaagcttcctaccgacgagctgatgaaccctagtcagaagaagaagagaaaacataggctgtgggcggcacactgccgtaaaatccagttgaagaaggataactcctctacgcaagtgtacaactatcagccctgcgaccatccggaccgaccctgcgatagcacctgtccatgtatcatgacgcagaatttttgtgaaaaattctgtcaatgcaatcctgattgtcagaatcggttccctgggtgcagatgtaagactcaatgtaacaccaagcagtgcccatgttatctggctgtacgcgagtgtgatcctgacctctgtctcacttgtggcgctagcgagcattgggactgtaaggtggtgtcttgtaaaaactgcagtattcagcgcggattgaaaaaacatctcctcctggccccttctgatgtggccggttgggggacatttatcaaagagagtgtacaaaaaaacgaattcatctctgagtattgcggcgagctgataagtcaagacgaggctgatcgcaggggaaaagtctatgacaagtatatgagttcctttctgttcaatctcaacaatgacttcgtggtggatgcgactaggaaaggtaacaagattcgttttgctaaccattccgtgaacccaaattgctacgccaaagtggtcatggtgaatggcgaccatagaattggaatctttgcgaagcgggctatccaggctggcgaagaactcttcttcgattataggtacagccaggccgacgcccttaagtacgtcggcattgaaagggagacagatgtcctgtag

SEQ ID NO: 222008 - DNA, 1827 bp, synthetic construct
  misc_feature 1..1827: note = Description of Artificial Sequence: Synthetic coding sequence
  source 1..1827: mol_type = other DNA
atggaagaggcttcatgcccaacttgctctgttaacgaggcctgcgagtggactccttttagccagaaggaaatgatcccaggcagcgtgctcatcagcgacgcggtatttttggagttggtggacgcacttaatcagtactccgacgaagaagaagagggacataacgacacgagcgatggtaaacaggacgactctaaagaagacttaccagttacccgtaaaaggaagcgccatgccatcgagggcaataaaaaaagttctaagaaacagtttcccaacgacatgatcttttctgctatcgcaagtatgtttccagagaatggcgtgcctgatgatatgaaagagagatatcgcgaattgaccgaaatgagcgatcctaatgctttgcctcctcagtgcacccctaacatcgatgggcctaatgccaaatccgtgcagcgcgaacaatctctgcattcctttcacacgctcttttgccgcaggtgctttaagtacgattgcttcctacacccttttcacgcgacaccgaacgtctacaaaagaaagaataaagagattaagattgaaccagagccctgtggcacagattgctttcttttgctcgagggtgccaaagagtacgcgatgctccacaaccctcgttctaagtgcagcgggcgtaggcgacgcagacatcacatcgtgtccgccagctgtagcaatgcttcagccagtgccgtggctgagactaaagagggagactccgaccgcgacactggaaatgattgggcttcctcttcttcagaagccaacagcaggtgtcagacccctaccaagcagaaggccagcccggcaccaccacaactctgcgttgttgaggctccctcggaaccagtagaatggacaggcgcagaagagtctcttttcagagtgtttcacggcacctatttcaacaacttttgtagtatagcaaggctgttgggaacaaaaacctgcaaacaggtgttccagtttgccgtgaaggaaagcctgatactgaaactgccaacagatgaactgatgaacccttctcaaaaaaaaaaacgcaagcatcgattatgggcagcgcactgtcggaagattcagctcaaaaaggacaactcctcaacacaggtctataattatcagccgtgtgatcaccctgacagaccctgcgactccacctgcccctgtatcatgacccaaaacttttgcgaaaaattttgtcagtgtaacccagactgccagaacaggtttcccggatgtcggtgcaaaacgcagtgcaataccaagcaatgcccctgttacctggccgttcgcgagtgcgatcctgatctttgtcttacatgcggcgcttcagaacattgggattgcaaggtagtttcctgcaagaactgctcgattcagcgcggactcaagaagcacctgctgctggcccctagtgatgtagcaggctggggtacctttattaaagaaagcgtgcaaaagaatgagttcatttccgaatactgtggagagttaatcagccaggatgaggctgataggcggggaaaagtatatgataagtacatgagctcgtttctgtttaacctgaacaacgactttgttgttgacgccacccgtaagggcaataaaatccgctttgccaatcatagcgttaacccaaactgctatgcaaaagtggtgatggtgaacggagatcatcgtatcgggatttttgctaaacgggcaatccaggctggcgaagagctttttttcgattacaggtactcgcaggccgacgccctgaaatacgtgggcatcgagcgcgagactgatgtgctgtag

SEQ ID NO: 222009 - DNA, 2256 bp, synthetic construct
  misc_feature 1..2256: note = Description of Artificial Sequence: Synthetic coding sequence
  source 1..2256: mol_type = other DNA
atgggccagacaggtaagaagtccgagaaaggacctgtttgttggaggaaacgagtgaaatcggagtacatgcgactgcgacagctgaaacgattccggagggccgatgaggtcaagtctatgttttcctccaacagacaaaaaatactcgaaagaactgagattctcaaccaggagtggaagcagcgtaggatccagccagtacatatcctaacttctgtgtctagcctaaggggcactcgggaatgctccgtcacctcggacctggactttccgacccaagtgataccgctgaaaacactcaacgcagtcgctagtgtgcctattatgtacagctggtcacccttgcagcagaattttatggttgaggatgagaccgtgttacataacattccatacatgggagacgaagttctggatcaggatggtacattcattgaagagctgatcaaaaactatgacgggaaggtccacggagatcgagaatgcggtttcatcaatgatgagatcttcgtagagctcgtgaacgcccttggccaatacaacgacgacgatgatgacgatgacggagatgacccagaagagagagaagaaaaacagaaagatcttgaagaccacagagatgacaaggaaagccggccacccaggaagttcccaagtgataaaatctttgaggccatttcatccatgtttccagataaaggcacagccgaggaactgaaggaaaagtacaaggaactgactgagcagcaactcccaggagcactgccacccgagtgtacccctaacattgatgggccaaatgcaaaatccgtccagcgggagcagagtctccatagcttccacactcttttttgccgcaggtgcttcaagtacgactgtttccttcatcgaaaatgcaactactcttttcatgccactccgaacacttacaaaagaaaaaatactgagaccgcccttgacaacaaaccttgcggcccacagtgctaccagcacctggaaggcgcaaaagagtttgccgcagctttgacagcagaaagaattaaaaccccacccaagcggcctggcggaagacgcagaggccgactgcccaacaactcctcaaggccaagcaccccaacaattaacgtgcttgaatcaaaggacacagattcggacagggaagcaggaaccgaaacaggcggtgaaaataacgataaagaagaggaggagaagaaggatgaaacctccagcagtagtgaagccaatagtcgctgccagacacccataaagatgaagccaaacattgagcctcctgagaatgtcgagtggtctggggcagaggcatctatgttccgcgtgctcataggcacgtattatgataacttttgtgctatcgcgcgactgatcggaacaaagacgtgccgccaggtctatgagtttcgcgtgaaagagagttcaatcatcgcccctgctccagctgaagacgtagatacccctcccaggaagaaaaaaagaaaacatcggctgtgggccgcacattgcagaaaaattcagttaaagaaggacggatcatccaatcacgtttacaactatcagccctgcgaccacccgcgacagccttgtgactctagttgcccctgtgtcatagctcagaatttttgtgaaaaattctgccagtgcagcagcgagtgccagaaccgcttcccgggatgtaggtgcaaggcacaatgcaatacgaaacagtgtccatgctacctggccgtgagagaatgtgatcccgatctttgtctcacctgtggggctgctgaccattgggactccaagaacgtgtcctgcaagaactgctccattcaacggggttccaagaagcacttgctgctagccccaagtgacgtggccggatggggcattttcattaaggaccctgtgcaaaagaatgagtttatctcagaatattgcggcgaaataatctcccaggatgaggctgaccgacgcggaaaagtgtatgacaagtacatgtgctcattcctgtttaaccttaataatgatttcgttgtggacgccactaggaaaggcaacaaaattagattcgccaatcatagcgtgaaccccaattgctacgcaaaagtaatgatggtgaatggggaccatagaatcggaattttcgcaaaaagggccattcagacgggggaggagttgttcttcgattaccggtatagccaagccgacgctctgaagtacgttggaattgagagagaaatggaaattccttag

SEQ ID NO: 222010 - DNA, 2124 bp, synthetic construct
  misc_feature 1..2124: note = Description of Artificial Sequence: Synthetic coding sequence
  source 1..2124: mol_type = other DNA
atgggccagacaggcaaaaaatccgaaaaggggccagtgtgctggcgtaaaagggtgaaaagtgaatatatgcgcctgagacagctcaaacggtttcgaagggccgacgaggtcaagtctatgttctcatctaatcgtcagaaaatattggaacggaccgaaatcctgaaccaggaatggaagcaacggaggattcagccggtgcacattttgacctcagtttcctctctccgaggaacacgagaagtggaagacgaaacagtcctccacaatattccctacatgggcgatgaggtgttggaccaggacggcacgttcatcgaggaacttatcaagaattacgacggtaaagtacacggagacagggagtgcggcttcattaatgatgaaattttcgtggagctggtgaatgccctgggccagtacaacgatgacgatgatgatgacgatggggatgatccagaggaaagagaagaaaagcagaaggatctggaggaccatcgggacgataaggaatcccgtccccctaggaagtttccctctgataaaatcttcgaggcgatctcaagtatgttccctgataaaggaactgccgaggagctgaaggagaagtacaaggagctgaccgaacagcagttgccaggcgcattgcctcccgaatgcacacctaatattgatggccctaacgccaaatccgtgcaacgcgagcagagcctccacagctttcacacacttttctgtcgacgatgtttcaaatatgactgcttcctgcacccgttccacgccactcccaacacctacaaacggaagaacacggaaactgctctggataacaaaccatgcggccctcagtgttatcagcacttggagggtgcaaaagaattcgccgcagctttaacagcggaacggattaagaccccacctaaaagacctgggggtcggagacggggtagactcccaaataattctagccgaccctccacaccgaccattaacgtgctggagtcgaaagacactgacagtgacagagaggctggaacagagaccggcggagagaacaacgacaaagaggaagaagaaaagaaggatgagacaagtagcagctcagaggctaacagcaggtgtcagacacctataaagatgaagccaaacatcgaacccccagaaaacgttgagtggagcggggcagaagcctccatgtttcgagtattgatcgggacgtactatgataacttctgtgcgattgcgagactgattggaaccaagacctgccggcaagtgtacgagttccgagtgaaagagagcagcattatcgcgccagcacctgctgaggatgtcgacactcctccacggaagaaaaaacggaagcacagattgtgggctgctcactgtcgcaagatacagctcaagaaggacggctcctcgaatcacgtgtataattaccaaccctgtgatcaccctcgacaaccatgcgattcgtcttgtccgtgtgtgatcgcacagaacttttgcgaaaaattctgccagtgttcctccgaatgtcagaaccgtttccctggatgcaggtgtaaagctcagtgcaacaccaaacagtgtccttgttacctcgctgttcgcgagtgtgatcccgatctctgccttacatgcggggctgctgaccactgggatagcaaaaacgtgagctgcaagaattgttcaattcagcggggaagcaaaaaacacctgctcttggccccttcggatgttgccggatggggaatcttcatcaaagacccagtccagaagaacgaattcatttccgagtattgtggagagatcatctctcaagacgaagccgaccggagaggaaaagtgtacgacaaatatatgtgcagcttcctcttcaaccttaataatgattttgtcgttgacgctacccgtaaaggaaacaagatccgttttgctaatcatagtgttaatcctaactgctatgctaaggttatgatggttaacggcgatcaccgcattggtatattcgccaagcgcgcaatccaaacaggagaagaactcttctttgactaccgctatagtcaagcggacgccctgaaatatgtgggaatcgaacgtgaaatggaaattccttag

SEQ ID NO: 222011 - DNA, 2241 bp, synthetic construct
  misc_feature 1..2241: note = Description of Artificial Sequence: Synthetic coding sequence
  source 1..2241: mol_type = other DNA
atgggccagacaggaaagaagtccgagaaggggccagtgtgttggcgaaagcgcgttaagtctgagtatatgagactcaggcagttgaagcgctttcgccgtgcagacgaagttaagagcatgttttccagcaatcggcagaagatactggagagaactgaaatcttaaatcaggagtggaagcagcgaaggatccagccggtccacattctcacaagcgtgtcaagcctcagagggaccagagaatgctccgtgacctcagacctggactttcctacacaagtcatcccactcaagacactgaacgcggttgccagcgttccgatcatgtacagctggagccccctgcaacagaacttcatggtggaggacgagacagtgctgcataatatcccatatatgggtgatgaggtgctggaccaagatgggactttcattgaggagttaattaaaaattacgatggcaaggtgcacggcgatagagagtgtggattcatcaacgatgaaatcttcgtcgagctggtgaacgcactggggcagtacaatgatgacgacgacgacgacgatggggacgatcctgaagaaagagaggagaaacagaaagatctcgaagaccacagggacgacaaagaaagtaggccccctaggaaatttccatctgacaaaatttttgaagcaatcagcagcatgtttcctgataagggcacagccgaagaactgaaggagaagtataaggagctgaccgagcagcagctgccaggtgccctaccgcctgagtgcacgccaaacatcgacggtccaaacgccaagagcgtgcagagagaacagagtctccattcatttcacacactgttttgtcgccgttgtttcaaatacgattgctttctgcacccattccacgccacccccaatacgtacaagcgaaaaaacaccgagacggcattagacaacaagccctgtggaccccagtgttaccagcatcttgagggtgcaaaggagtttgccgctgccttaactgccgagaggatcaagacgccacccaaacgccctgggggacgacggagagggaggcttccaaacaactccagcagacctagtacacccactattaacgtgctggaaagtaaggataccgatagtgatcgtgaggccggaactgagactggaggagagaacaatgataaggaggaggaggagaagaaggacgaaactagctcaagctcagaagcaaatagccgctgccaaacaccgatcaaaatgaaacctaacatcgagcctccagagaacgttgaatggtccggcgcagaggcttctatgttcagggtgctgattggaacctactacgataacttttgcgccattgccagattaattgggacgaagacgtgcagacaggtgtacgaatttcgtgtcaaggaatcgtctatcatcgcaccagcccctgcagaagatgttgacacacctccaagaaagaaaaagaggaaacatcgtctgtgggctgctcactgtcgaaagatccaactcaagaaagacggaagttccaaccatgtctacaactatcagccatgcgaccatcccaggcagccctgcgactcttcatgtccatgcgtcattgctcagaatttctgcgagaaattctgccagtgttcatctgagtgccagaaccggtttcctgggtgccggtgcaaagcgcagtgcaatacgaagcaatgtccatgttaccttgccgttcgcgaatgcgaccctgacctttgtcttacctgtggagctgccgaccactgggattccaagaatgtgtcctgcaagaattgttcaatccagcgcggatcaaagaagcacctcctacttgccccttccgatgtggcaggctggggaatctttatcaaagaccctgtccagaaaaacgagtttatttctgagtactgcggagagatcattagtcaggacgaggccgataggagggggaaggtgtatgacaagtacatgtgtagcttcttgttcaacctgaacaacgattttgtcgtggacgcaacacgcaagggcaataagattcgctttgcaaaccatagcgttaacccaaactgttacgctaaggtgatgatggtcaacggcgatcatcgcattgggatctttgccaagcgggctatacagacaggcgaggaattattcttcgactaccgctacagccaagcagacgctctgaagtatgtgggcatcgaacgcgagatggagatcccgtag

SEQ ID NO: 222012 - DNA, 678 bp, synthetic construct
  misc_feature 1..678: note = Description of Artificial Sequence: Synthetic coding sequence
  source 1..678: mol_type = other DNA
atgtactcatggtcccctcttcagcaaaatttcatggtcgaggatgagactgttttgcacaatatcccatatatgggcgacgaagttctcgatcaggacggcacttttatcgaggaactgatcaaaaactatgacggcaaagtccacggggaccgggaatgcggtttcatcaacgatgagatcttcgtggagctggttaatgccctagggcaatacaacgatgacgatgatgacgacgatggagatgatccagaggagagagaggaaaaacagaaggatctagaagaccatcgggacgacaaagagtcgaggccccctcgcaagttcccaagtgataagatctttgaagcgatttcaagtatgttcccggacaaggggacggccgaggaattgaaggagaagtacaaggagctgactgagcagcagctgccaggcgctctgccccctgagtgcacacccaacattgacgggccaaacgccaagtcggtgcagcgggaacagtcactacattcatttcacactctgttctgtcgaagatgtttcaaatatgattgtttcctccacccattccacgcaaccccaaacacctataaacgcaagaacactgagacggcgctggacaacaaaccatgtggccctcagtgttaccagcatcttcccctcttgcccagaaattag

SEQ ID NO: 222013 - DNA, 2088 bp, synthetic construct
  misc_feature 1..2088: note = Description of Artificial Sequence: Synthetic coding sequence
  source 1..2088: mol_type = other DNA
atgggtcagaccggcaagaaatccgagaagggtccagtgtgttggagaaagcgtgtgaaatctgagtacatgcggttgcgccagctgaagaggtttagaagagctgatgaagtaaaatccatgttctcaagtaacagacaaaagattctggagagaacagagatactcaatcaagaatggaaacagcgcaggattcagccggtgcacatcctcacctcttgctccgtgacctctgatctggactttccaacccaggttatccccctcaaaacacttaacgcggttgcctcagtaccaatcatgtattcttggagtccattgcaacagaacttcatggtcgaagatgagactgtactccacaatatcccctatatgggggatgaggttctcgatcaggacgggaccttcatagaggaacttatcaaaaattatgacggcaaggttcatggcgaccgcgagtgcgggttcatcaacgacgaaatctttgttgaactggtcaacgcactgggccagtacaacgatgacgacgatgatgacgatggagatgaccctgaggagcgcgaggaaaagcagaaagatctagaagaccaccgggacgacaaagagtctcgcccaccaaggaagttccctagcgataagatcttcgaagccatttcatctatgttccccgacaaaggcacagctgaggagcttaaggaaaaatacaaggagctgaccgagcaacagctgccgggtgccttacccccagaatgcacacccaacatcgatggcccaaacgccaagagcgtccaaagagagcagagcttgcactctttccacacactattctgtcgtcggtgttttaaatatgattgcttcctccatccgtttcacgcaacacccaatacctacaagagaaagaatactgagactgcgctggacaacaagccttgtggccctcaatgctaccaacatctggagggggctaaggaatttgctgccgcactgacagctgagagaataaaaactcctcctaaaaggccaggagggaggagacggggaaggctgccaaacaattcctctagaccaagcacgccgactataaatgtactggaatcaaaagacactgactcagacagggaagcgggaaccgagactggaggggagaataacgacaaagaagaggaagaaaaaaaggacgagacatccagctcttctgaggccaactcaaggtgtcagacgcctattaaaatgaagcctaatattgaacctcccgagaatgtcgagtggtcaggagccgaagcctccatgttccgagtgctaattgggacatactacgacaacttttgtgccatcgcccgactcatcggcactaagacatgcagacaggtatacgaattccgggtaaaggagtcaagtataatagcacctgctccggctgaagatgtggacacacctcccaggaaaaaaaagaggaagcatcgcctttgggctgctcattgtcgcaagattcagcttaagaaggggcagaatcgcttccctggctgcaggtgcaaagctcagtgcaacacgaagcagtgcccttgctacttggcagttcgtgaatgcgatcccgatctgtgtctgacctgcggagctgccgaccattgggactcgaagaatgtcagttgcaaaaattgctccattcagaggggtagcaaaaagcatttattgctggccccaagcgacgttgccggttggggcatttttatcaaagatcctgtgcagaagaatgagttcatctccgagtactgtggggaaatcatcagtcaggatgaagcagaccgccgtggcaaagtgtatgataagtatatgtgtagcttccttttcaaccttaacaatgactttgtcgtcgatgctacacgcaagggcaacaagattcgttttgcaaatcactccgtaaatcccaactgttatgctaaggtgatgatggtgaacggggaccacagaatcggcatctttgccaagcgtgccatccaaacaggcgaggaacttttcttcgattaccggtattcccaagccgacgcgctgaagtatgttggaatagagcgggaaatggagataccttag

SEQ ID NO: 222014 - DNA, 2088 bp, synthetic construct
  misc_feature 1..2088: note = Description of Artificial Sequence: Synthetic coding sequence
  source 1..2088: mol_type = other DNA
atggggcaaacgggtaaaaaatccgaaaaaggaccagtgtgctggaggaaacgcgtaaaatcagagtatatgcgtttgcgacagcttaagcgctttcggagggcagatgaggtaaaaagtatgttttcgagtaaccgacagaaaatcctggaaaggactgaaattctaaaccaggaatggaaacagcgtcgcatccagccagtgcacatcctcacctcatgcagcgtgacctctgaccttgattttcccactcaggtcattccactcaaaaccctgaacgctgttgccagcgtgccaataatgtattcttggtctccccttcagcaaaacttcatggtcgaggacgagaccgtacttcacaatataccatacatgggagatgaagtgcttgatcaggacggcaccttcattgaggagttaatcaaaaactatgatgggaaagttcacggagaccgcgaatgtggattcattaatgatgaaattttcgtcgagcttgtgaatgcgctggggcagtacaatgacgacgatgacgatgacgacggtgatgacccagaagagagagaagagaagcaaaaggatctggaagatcaccgcgacgacaaagagtcccgccctccgaggaagttcccctctgataagatttttgaagcaatttcttccatgtttcccgataaaggaaccgcagaggagctgaaggaaaaatacaaagagctaaccgaacagcaactacccggtgccctgcccccagaatgcaccccaaatatcgatggcccaaatgccaaatccgtgcagcgcgagcagtctctgcactctttccacacactcttctgccggaggtgtttcaagtacgattgtttccttcacccttttcacgcgaccccgaacacgtataaacgcaaaaacactgaaacagctctggataataagccttgcggcccacagtgctaccaacaccttgaaggagcaaaagagttcgccgctgcactcactgctgaacggataaagacccctcctaagagaccgggaggcagaaggcgcggaagactgcccaacaatagttctaggcccagcacacctactataaatgtcttggagagcaaggatactgattcggaccgcgaggcaggcacggaaacagggggagaaaataatgataaggaggaagaggaaaagaaggatgagacatcatcgtcatcagaggccaatagccgctgccagaccccaatcaagatgaaacctaacatagagccacccgagaacgtcgagtggtccggagccgaggcatccatgtttagagtattgatcggaacctattacgataacttttgcgccatcgccaggcttatcggtaccaaaacgtgtcggcaagtgtacgagttccgagtgaaggagtctagtatcattgccccagctcccgcagaggacgtggacaccccgcctaggaagaagaaacggaaacacagattatgggccgcacattgccgaaaaatccaattaaaaaagggacagaacagattcccaggctgtcggtgcaaagcacagtgtaacaccaaacaatgcccctgttacctggctgttcgcgaatgtgatcctgatctgtgtctcacctgcggcgctgccgatcattgggattctaagaatgtttcatgtaaaaattgcagtatccagagaggctctaaaaaacatcttctcctggcgccttccgacgttgctggttggggtatctttattaaggatccggtccagaagaacgagtttatcagcgagtactgtggcgagatcatctctcaggacgaggccgacaggcgtggcaaagtttatgataaatacatgtgctcattcctgttcaacctgaataatgactttgtggtagacgccactcgaaaagggaacaagatacgctttgccaaccactctgttaaccctaactgctacgctaaagtgatgatggttaatggggaccatagaattggtatcttcgctaaacgcgctatccagaccggggaggagctcttcttcgactaccggtattcccaggctgatgctctgaagtacgtgggaattgagcgggaaatggagattccgtag

SEQ ID NO: 222015 - DNA, 2214 bp, synthetic construct
  misc_feature 1..2214: note = Description of Artificial Sequence: Synthetic coding sequence
  source 1..2214: mol_type = other DNA
atgggccagactgggaaaaagtctgagaaaggtcccgtctgttggcgtaaaagggttaagtccgagtacatgaggctcagacagctgaaaaggttccgcagggctgatgaggtgaagagcatgttctcctccaataggcaaaagatcctcgagaggactgaaatcttaaatcaggaatggaaacagcgcagaattcagccagtgcacattctcacctcatgcagcgtgacatccgatcttgatttccccacccaggtcataccccttaaaaccctgaatgcggtcgcatccgtgcctatcatgtatagttggagccccctgcagcagaacttcatggtggaagatgagaccgttctgcacaatatcccctacatgggcgacgaagttctcgatcaagatggcaccttcattgaggagctgatcaaaaactatgacgggaaggtgcacggagatcgtgagtgcggattcatcaatgatgaaattttcgtggagctggtgaatgccctaggtcaatacaatgacgatgatgacgatgatgacggagacgatccagaagagagagaggaaaagcagaaagacttagaagaccacagagatgataaggaatcccgacctccccgtaagttccccagcgacaagatttttgaggctatcagctctatgtttccagacaaaggcacagctgaagaactcaaagaaaagtacaaagagctgacagagcaacaactgccaggcgctctcccacctgaatgtaccccaaatattgatgggccaaatgccaagtccgtgcagcgagagcaaagcctacacagcttccacacacttttctgccgccgttgttttaagtacgattgttttctgcatccctttcatgcgaccccaaatacctacaaaagaaagaatacagaaacagctcttgataacaagccttgcggcccacaatgctatcagcacctggagggcgctaaagagtttgccgcagcactcaccgccgaaaggatcaagaccccccctaaacgcccaggcggacggagacgagggcgactacctaataactccagcagacccagcaccccaacaataaatgtccttgagtctaaggacacggatagcgacagggaggctgggactgaaaccggcggagagaataacgacaaagaagaggaagagaaaaaagacgaaacctctagctcgagtgaagctaattcaagatgtcaaacccccattaagatgaaacccaatattgaacctccagagaatgtggaatggagtggagctgaggcgagcatgttccgtgtgttgatcgggacatactacgataatttctgcgcaatcgctagactgatcggcactaagacctgcaggcaagtgtacgagttcagggttaaggaatccagcatcattgccccagcccctgccgaggacgtcgacactcctcctcgtaagaagaaaaggaaacaccgcctgtgggctgcgcactgtaggaaaattcagctgaagaaggatggatcctctaaccatgtgtataactaccagccatgcgatcacccaaggcagccttgtgattcttcatgtccttgtgtcattgcacagaatttttgtgagaagttttgtcagtgcagctccgagtgccagaatcgttttcccggatgtcgctgtaaagcccagtgcaataccaagcagtgtccctgttatctcgctgtgcgggagtgcgatccagacctctgtctgacctgtggggctgcagatcattgggattcaaaaaatgtgtcttgcaagaattgcagtattcagcggggttcgaagaagcacctcttgcttgctccctctgatgtagccggttggggtatcttcattaaggacccagttcagaaaaacgaattcatttcggaatactgtggggagatcatctcacaggacgaggccgatcgacgtggaaaagtctatgataaatacatgtgctcctttctgttcaacctcaacaatgacttcgtggtagatgcgaccagaaaaggcaataagattaggttcgctaaccactccgttaacccaaactgttatgctaaagtgatgatggtcaacggcgatcatcgaatcggcatttttgctaagcgggcaatccaaaccggcgaagagctgttttttgattacagatattctcaggccgacgccctgaagtacgtcgggatcgagcgagagatggagattccctag

SEQ ID NO: 222016 - DNA, 939 bp, synthetic construct
  misc_feature 1..939: note = Description of Artificial Sequence: Synthetic coding sequence
  source 1..939: mol_type = other DNA
atggccgcactttatgcctgcaccaagtgccaccaaaggtttccattcgaagctctgtctcagggacagcaactctgcaaggagtgtcgtattgcacatcccgtggtgaagtgcacctattgccggaccgaatatcagcaggagagactggaatgcaacgggactatttctgcacactgtaacctgcacctacctggaagctccgacagcccagcaagcagctcccgagtggctgggatcacagggatcaagactaacactatctgtaaaaaatgtgctcagaacgtgcagctctacgggacacctaagccctgccagtactgtaatatcattgcagcttttatcggaaacaagtgccagaggtgcaccaacagcgaaaagaaatatggtccaccttatagctgtgagcagtgcaaacaacaatgcgcctttgaccgtaaagacgaccgtaaaaaggtagatggaaagctcctctgctggctgtgcaccttgagctacaaaagggttctgcagaaaactaaggagcagaggaagcatctgtcaagctcgagtagagctggccatcaagagaaagagcaatactcccggctcagtgggggaggtcattacaactccttcagcccggatttggcactggactcaccgggtacagaccatttcgtgattatcgcccaactcaaagaagaagttgcgacactcaagaaaatgcttcatcaaaaagatcaaatgattcttgagaaggaaaagaaaatcaccgagctcaaggctgactttcaatatcaagagagtcagatgagagccaaaatgaaccagatggagaaaacccataaagaggtgactgaacagcttcaagccaagaatcgggaactactgaagcaggccgcagctttatccaagtcgaagaaaagtgaaaaatccggcgctatcacatcgccatag

SEQ ID NO: 222017 - DNA, 861 bp, synthetic construct
  misc_feature 1..861: note = Description of Artificial Sequence: Synthetic coding sequence
  source 1..861: mol_type = other DNA
atggcggaggatggggaggaagcggagtttcatttcgccgcactctacattagcgggcagtggccgaggcttagggcggacactgatctacaaagactggggtcttccgctatggccccttccaggaaattcttcgtgggtgggaactggaaaatgaatggcaggaagcaaagcctgggcgaactcatcgggactttaaatgctgccaaagtccctgccgatacagaagttgtatgtgctcctcccacagcatacatcgactttgcaaggcaaaaactcgatcctaagattgccgtcgccgcacagaattgctacaaggtcacaaacggggcattcacaggagaaatcagccctggcatgatcaaagattgtggcgctacttgggtcgtgttagggcactctgaacggcgtcatgtgtttggcgaatccgacgaattaattggccagaaggtggctcacgctttggctgagggcctgggggtgatagcctgtattggggaaaaactggacgaaagagaagctgggataactgaaaaagttgtgttcgagcagactaaggtaatcgcagataatgtcaaggactggtccaaggttgtgcttgcctacgaaccggtctgggcaatcgggacaggcaagaccgccaccccacagcaggcacaggaagtgcacgaaaagctgagaggctggctcaagtctaacgtcagcgatgctgtagcgcaatcaacacgcatcatttatggcggaagtgtgacaggagccacttgtaaggaactcgcctcccagcctgatgtcgacggtttcctggtcggtggcgcttccctgaagcccgaatttgtcgatatcattaacgccaagcagtag

SEQ ID NO: 222018 - DNA, 1305 bp, synthetic construct
  misc_feature 1..1305: note = Description of Artificial Sequence: Synthetic coding sequence
  source 1..1305: mol_type = other DNA
atgtccattgagaagatatgggcaagggagatattggactctagggggaatcctacggtcgaggtcgacctgtacacggctaaagggctgtttcgagccgcagtgccttccggagcatcaacaggcatttacgaggccctggaactccgggacggggacaaacagcgatatctaggcaaaggcgtacttaaggcagttgatcacataaacagtacaattgcccctgctcttatcagcagtggactcagcgtggtggagcaggaaaagctggataacttaatgctcgaactcgacggtactgagaataagagtaagttcggtgctaatgcaatattgggggtttcactcgctgtttgcaaagccggtgcggctgaaagagagctacccctctataggcacattgcccagctcgctgggaactcggatctgatactccccgtgcctgcttttaatgtgatcaacggcggaagccacgccggtaacaagctcgcaatgcaagagtttatgattctcccagtgggagccgaatctttcagggacgctatgcgccttggggctgaggtctaccacaccctgaagggggtgatcaaagataagtacggaaaagacgcgaccaatgtaggagacgaaggaggctttgcccctaatatcctggagaactcggaggcactagagctcgtgaaggaggcaattgataaggccggatatacagagaagatcgtgatcgggatggacgtggcggcatcagagttctacagggatggcaaatatgatctggatttcaaatcccctaccgacccctctcgctacataacaggggaccagctcggagccctctatcaagattttgtacgagactaccctgtggttagtattgaggacccttttgatcaggacgactgggccgcatggtctaagttcacagccaatgttggcatccaaatcgtgggggatgacctgactgttaccaaccctaaacgcatcgagcgcgcagtggaagagaaggcctgcaattgtctgctcctcaaggtgaatcagatcggctctgtaacagaagcaatacaggcatgtaaactggcccaggagaacgggtggggcgtcatggtgagccataggagcggtgagactgaggacacattcatcgccgacctcgttgtaggcctgtgcaccggccaaatcaagaccggcgctccttgtaggtctgaacgacttgcaaaatacaaccagttgatgcgcatagaggaggagctgggcgatgaagcacggttcgctggccacaactttcgcaatcccagcgtcctctag

SEQ ID NO: 222019 - DNA, 1176 bp, synthetic construct
  misc_feature 1..1176: note = Description of Artificial Sequence: Synthetic coding sequence
  source 1..1176: mol_type = other DNA
atgtcaattgagaagatatgggcccgagagatcctagattctaggggcaatcccacagtggaggttgacctctatactgccaagggactgtttcgagctgccgtgccatccggagcctctaccggcatctatgaagcgttggagctgcgggatggagataagcagaggtacctgggcaaagcaaagtttggcgctaatgccatcctgggcgtgagtttggcagtctgcaaagctggcgcagcagagcgtgagctgcccctttaccgccatatagcccaattggccggaaacagtgatctgatactcccagtcccagcgttcaatgtgatcaatgggggtagccacgcgggaaacaagttggccatgcaggagttcatgattctcccagtgggggctgagagcttcagagatgctatgcgacttggtgcagaagtgtaccacacgttaaagggcgtgattaaagataagtacggcaaggacgcaaccaatgtgggggatgaaggtgggttcgcccctaacattctggagaatagcgaggcgctggagcttgttaaagaggctatcgataaagccggttacaccgagaagatcgtcatcggaatggatgtggccgctagcgaattctatcgggacggcaagtacgatctcgattttaagtccccaacagaccctagtagatacatcactggcgaccagctaggggcactgtaccaggacttcgtgagagattatcctgttgtttcaatagaagacccctttgatcaggacgattgggccgcatggagcaagtttacagctaatgttggcattcagattgtgggtgatgacctgacggtaaccaacccaaaacgcatcgagcgcgctgtggaggagaaagcttgcaattgtcttttgttaaaggttaaccaaattggcagcgttacagaggctattcaggcgtgcaagctcgcccaggagaatgggtggggagtcatggtctctcaccggtccggcgaaacagaggataccttcatagccgatctagtggtaggcctgtgcacaggccagatcaaaaccggagctccctgtcgctctgaacgactggcaaagtataaccagctaatgcggatagaagaggaactgggcgatgaggctaggtttgctgggcacaattttcggaacccctccgtgctctag

SEQ ID NO: 222020 - DNA, 1305 bp, synthetic construct
  misc_feature 1..1305: note = Description of Artificial Sequence: Synthetic coding sequence
  source 1..1305: mol_type = other DNA
atgtccatagaaaagatctgggctcgcgagattttagattctcggggtaaccctacagtggaagtcgacctttatacagctaaggggctgtttcgggctgcggtgcctagcggcgcaagcactggcatttacgaagctctggagctacgtgatggggataaacagcggtacctaggaaagggggtcctgaaggccgtagatcatattaactcgaccatcgccccagcgttgataagctccgggctgagcgtggtcgagcaagaaaaactagacaatttaatgctagagctcgacggcacagagaacaagagcaagttcggcgcaaacgcaatcttgggagtttctctcgccgtctgtaaggccggtgccgcagagagggaactgccgctgtatcgccatatcgcccaattggcgggtaattcagacctgattctccctgtgcccgctttcaatgttatcaacggcggatcacatgcgggaaacaaattagcaatgcaggaatttatgatccttcccgttggggctgagtctttccgggacgctatgcgtctcggcgcagaagtataccataccctgaagggcgtcatcaaggacaagtacgggaaggacgccaccaatgttggagatgaggggggtttcgctcctaatatcctagagaacagtgaggcgcttgagctggtgaaagaagcaattgacaaagcagggtacactgaaaagatcgtgataggcatggacgtggctgccagcgagttctatagagatggtaagtacgatctggattttaaatcccccaccgacccatcacgatacatcacaggggaccagctgggagccctttatcaggactttgtccgcgactatcccgttgtgtctattgaggaccccttcgatcaggatgattgggcggcttggagcaaattcacagctaatgtgggaatacaaatcgtcggtgacgatttaaccgttactaaccccaagagaatcgagcgagccgtcgaggagaaggcatgtaactgtcttctgctgaaggtgaaccagattggctctgtcactgaggccatccaggcctgcaaactggcccaggaaaatgggtggggggtcatggtgagtcacagatcgggagagactgaagacacgtttattgcagatctggtcgtgggactctgcacaggacagatcaagacaggagccccttgtcgttcagagaggctcgccaaatataaccagctgatgaggatcgaggaagaactcggggacgaggccagatttgcgggacacaacttccgaaatccatcagtgttgtag

SEQ ID NO: 222021 - DNA, 1176 bp, synthetic construct
  misc_feature 1..1176: note = Description of Artificial Sequence: Synthetic coding sequence
  source 1..1176: mol_type = other DNA
atgagcatcgaaaaaatctgggccagagagattttggactcacgagggaacccgaccgtcgaagtggacttgtatacagctaagggcctgttccgagcggcagtgccctccggcgcatcgaccggaatctatgaagcccttgaactgcgtgacggagacaagcagcggtatctcgggaaggctaagttcggagccaacgccatcttaggtgtgagcctggcagtatgcaaagccggtgctgcagagcgcgagctccctctgtaccggcacatagcacagctagctggtaattccgaccttatactgcccgttccagccttcaacgtgataaatggtgggagccacgcaggtaataagctggccatgcaggaattcatgattctccccgttggtgctgagtctttcagagacgctatgaggttgggtgcagaggtctaccatacactaaagggtgtgattaaagataaatatggcaaagatgcaaccaacgtgggagatgaaggtgggttcgcccctaatattttagaaaactccgaggctcttgagttggttaaggaggcgatagacaaggccggatatacagaaaagatcgtgattggtatggacgtcgctgcctctgaattctatagggacggaaagtatgaccttgacttcaagtctcccaccgacccctcccggtatatcaccggcgatcagctcggcgctctttaccaggatttcgtgcgggactatcctgttgtgagtatcgaggaccccttcgatcaggacgattgggccgcttggagtaaattcactgcgaacgtcggcatacaaatcgtcggggacgatttgacagtgacaaaccccaagcgaatcgagcgtgctgtggaggagaaggcctgtaactgcctgctcctcaaggttaaccagatcggtagcgtgaccgaagctatccaggcttgtaaactcgctcaagaaaatggatggggtgttatggtgtcacaccgatccggcgaaaccgaggatacgttcattgcagatttggtcgtcggcctgtgtacaggccagataaagacaggcgctccctgccgttcagagcggctggccaaatacaatcaactcatgaggattgaagaagagttaggagatgaagcccgttttgcgggtcataacttccgcaacccctctgtcctgtag

SEQ ID NO: 222022 - DNA, 1176 bp, synthetic construct
  misc_feature 1..1176: note = Description of Artificial Sequence: Synthetic coding sequence
  source 1..1176: mol_type = other DNA
atggccatgcagaagattttcgcaagagagatcctagattccaggggtaaccctacagtggaagtggatcttcataccgctaaaggccgtttcagggcggctgtcccctcaggggcttctacgggcatttatgaagccctggagctcagagacggggataagggaaggtatcttggtaaagcaaagtttggcgctaacgccatactgggtgtgagcttggccgtctgtaaagccggagcggctgagaagggggtccccctctatcggcatatcgccgacctcgccggaaaccccgacctgattttacccgttccagcatttaatgttattaatggagggagtcatgccggtaacaagctagccatgcaggaatttatgattttgcccgtaggggcaagctcatttaaagaagccatgagaatcggggctgaagtgtaccaccacctaaaaggcgtgattaaagccaaatacggaaaagacgcaacaaatgtgggcgatgagggtggatttgcacctaacatcctggaaaacaatgaagcactggaactcctgaagaccgctattcaggcagccggttatcctgataaggtggtgattggaatggacgttgcagcaagcgagttttaccggaatggaaagtacgacttagattttaaatctcccgacgatccagccaggcacatcaccggggagaagttaggtgaactgtataagtcatttattaaaaattacccggtggtgagcattgaggatcccttcgaccaggacgactgggctacgtggaccagcttcctgtcaggcgtaaatattcagatcgtcggagatgacctgacagtgactaatcccaagcgcattgcccaagcggtcgagaagaaagcatgcaattgcttgctacttaaagtcaaccagataggcagcgtgaccgagagcatccaggcatgtaagcttgcccagtcaaacgggtggggtgtgatggtatctcatagaagtggagaaactgaggatacattcattgccgatctcgtcgtgggcctttgtactggacagatcaaaaccggtgctccgtgcaggagcgagcgactcgccaagtacaaccagctgatgaggatagaagaggccctaggcgacaaggccatcttcgcgggacgcaagttccgaaatcctaaagccaagtag

SEQ ID NO: 222023 - DNA, 1305 bp, synthetic construct
  misc_feature 1..1305: note = Description of Artificial Sequence: Synthetic coding sequence
  source 1..1305: mol_type = other DNA
atggctatgcagaagattttcgccagagagatccttgacagcagagggaatcccaccgtcgaggtcgatcttcacacggctaaggggagattccgggctgccgtgccatctggcgcatctaccgggatctatgaggctctggagttgagggacggggataagggtcgctacctgggaaaaggagtacttaaggccgtcgaaaatatcaacaacaccttggggccagccctgctgcagaaaaaactctccgtggtggatcaggagaaggtggacaaatttatgatcgagctggacggcaccgagaataagtcaaagttcggggctaacgccatcctgggtgtcagcttggcagtgtgtaaggccggtgccgcagagaaaggagtgcccctctaccggcatattgccgacctggcaggtaatccagatctgatccttcccgttccagcatttaacgtgatcaatggcggtagccacgccggaaataagctggcaatgcaggagttcatgatcctgccagtgggcgcatccagttttaaggaggcaatgaggattggcgcagaagtgtaccatcacctaaagggagtgattaaggctaagtatggcaaagatgcaactaacgtgggcgacgaaggtggatttgcacctaatatattggagaacaatgaggccctggagctcctcaaaacggccatacaggccgcaggttatcccgacaaggtggtgattggaatggacgttgccgcatccgaattctatcggaatggtaagtacgatcttgactttaagtcgccggatgaccctgccaggcacataaccggagaaaagttaggcgaactgtacaagtcatttatcaagaattaccctgttgtaagcattgaagatccctttgatcaagacgattgggcgacctggacttcctttctgtccggggtgaatatccaaattgtgggagacgacttgacagtaaccaatcccaaaaggatagcccaggccgtggaaaaaaaagcatgtaactgcctattactgaaggtcaaccagatcggaagcgtgactgagagtattcaagcgtgcaagctggcacaatccaatggatggggtgtgatggtcagccacaggagcggcgagaccgaagatacattcattgcagacctggttgttggcctctgtactggccaaattaagaccggggcaccatgtcggtccgagagactggccaaatataatcagttgatgcgcatcgaggaggcgctcggtgacaaagctatattcgccggaagaaagttccgcaacccaaaggccaaatag

SEQ ID NO: 222024 - DNA, 1305 bp, synthetic construct
  misc_feature 1..1305: note = Description of Artificial Sequence: Synthetic coding sequence
  source 1..1305: mol_type = other DNA
atggctatgcagaagatcttcgcccgtgagatccttgactcacgaggcaatccaaccgtcgaagtcgacctgcatacagccaaaggacggtttagggctgcggtgccctctggcgctagtactggaatctacgaggcactagagttacgcgatggggataaaggcaggtacttaggcaaaggagttttgaaggccgttgagaacattaacaataccctgggtccagcactgttacagaagaaactgagcgtcgtggatcaggagaaggtggataagtttatgattgaactcgatgggactgagaataaatctaagttcggagctaatgctattcttggtgtgagtctggccgtgtgcaaggcaggagcggcagagaaaggagttcccctatatagacatatcgctgacctagccggaaatccggatctgatcttgcctgtacccgcattcaatgtgattaacggtggtagccatgcaggcaacaaactagccatgcaggagttcatgatcttacccgtcggggctagctcctttaaggaagcgatgagaataggggcagaggtttatcatcatctgaaaggcgtgatcaaggctaaatatgggaaggatgccaccaatgtgggtgatgagggcggatttgcgcctaatatccttgagaataatgaggcccttgaattactgaagactgccatccaggctgccggatatcccgataaagtcgtgatcggtatggatgtcgctgcctcagagttctatagaaatgggaaatacgatttagacttcaaatctcctgatgatccagcccgacacattacaggtgaaaaactgggcgagctttacaaaagctttataaagaattatccagttgtgtcaattgaggatccttttgatcaagatgactgggccacctggacaagctttctgtcaggcgtaaatatccagatagtgggcgatgatctgacggtcactaaccccaagaggattgcgcaagccgtcgagaagaaagcatgtaactgccttctactcaaggtcaaccagattggcagcgtaacagagtccattcaagcttgcaaattggcccagagtaacgggtggggggtgatggtgtctcatagaagcggcgagactgaggacacattcatcgccgatctggtggttggcctgtgcactggccagattaaaacaggggctccttgcaggtctgaaaggcttgccaagtacaatcagctgatgagaattgaggaagccctgggtgacaaagctatcttcgctggtagaaaatttcggaatcccaaggctaagtag

SEQ ID NO: 222025 - DNA, 852 bp, synthetic construct
  misc_feature 1..852: note = Description of Artificial Sequence: Synthetic coding sequence
  source 1..852: mol_type = other DNA
atggccatgcaaaaaatctttgcaagagagatccttgactcacgtggtaaccccacggtcgaagtggacttacacacagctaagggacgcttccgcgctgccgtcccctccggagctagcaccggaatttacgaggctctcgagttgagggacggcgataaaggtagatatctgggcaagggggtgctaaaggctgttgaaaacattaacaacactttgggcccagctttgttacagaagaagctcagcgtggtggaccaggaaaaggttgataaattcatgatagagctggatgggaccgaaaataagtcaaagtttggtgctaatgccatcctgggggtgtcgctggcggtttgtaaagcgggtgccgctgaaaaaggagtgcccctgtatagacacatcgccgaccttgcgggtaacccagacttgatcctccccgttcccgcattcaacgtcataaatgggggatcccacgctggcaacaagctggcaatgcaggagttcatgattctgccagtcggggcatccagctttaaggaggctatgcgtattggagccgaagtttaccaccatttaaagggcgtcattaaagccaaatatgggaaggacgccaccaacgtgggcgatgaaggcggattcgctccgaacatactggagaataatgaggccttggagctattgaaaactgcaatccaggcagccggttatcccgataaagtggtgatcggcatggatgtagcagcctctgaattttatcggaatgggaaatatgatctggattttaaatcacctgacgacccagctcgacacattacaggagaaaagctaggcgaactttacaaatcattctag

SEQ ID NO: 222026 - DNA, 465 bp, synthetic construct
  misc_feature 1..465: note = Description of Artificial Sequence: Synthetic coding sequence
  source 1..465: mol_type = other DNA
atggccatgcagaagatatttgcccgtgagattcttgatagtcgcggaaaccccacagtagaggtcgacctgcacaccgcgaagggtagattcagagccgctgtgccatctggcgcatcaactgggatctacgaagccctagaactaagagacggtgataaggggaggtacctggggaaaggcgtgttgaaggccgttgaaaacatcaataacactctaggacccgctcttctgcagaagaaactgagcgtggtggatcaggagaaggtcgataagttcatgatcgagctcgacggtaccgaaaacaagtccaagtttggtgccaatgcaatcctcggagtgagcctggccgtgtgtaaagcgggagcagccgagaaaggggtgccgctatatcgacacatcgcagacctggctggaaacccagacttgattctcccggtcccagcctttaacgtgatcaattag

SEQ ID NO: 222027 - DNA, 447 bp, synthetic construct
  misc_feature 1..447: note = Description of Artificial Sequence: Synthetic coding sequence
  source 1..447: mol_type = other DNA
atggcaatgcagaagatcttcgcgagggaaattctagatagtagggggaatccgacggtggaggtggatctgcatactgctaaaggtcgctttagagcagcagttccatctggtgcaagcaccggcatctacgaagcactagagctcagggacggagacaaggggaggtacctgggcaaaggtgtgcttaaagctgtggagaatataaacaacacgctgggaccagctcttctccagaaaaaactgtcagtcgtggaccaggagaaggtggataaatttatgatcgagctcgacggaactgagaacaagagcaaatttggtgccaatgcaatcctcggagtgtccttggccgtctgtaaagcaggtgccgctgaaaaaggggtccccctgtaccgacatatcgctgacctggcaggcaacccagacctaattcttcctgtgccttag

SEQ ID NO: 222028 - DNA, 1332 bp, synthetic construct
  misc_feature 1..1332: note = Description of Artificial Sequence: Synthetic coding sequence
  source 1..1332: mol_type = other DNA
atggttcgcggacggatctcccggctgagcgtgcgggacgtccggttccctacctcgctgggagggcacggtgccgacgcaatgcatactgaccctgactattcagccgcttacgtggtgatcgaaactgacgcagaggatggaataaagggatgcggtattactttcaccctgggtaaggggacagaggtggtagtttgtgccgtaaatgcacttgctcaccacgtgctgaacaaagatctcaaggatatagtgggagactttagaggcttctaccgacagttgacttctgacggccagctccgatggatcggacctgaaaaaggggtggttcacttggcaacagctgcggtgctgaatgcggtctgggatctttgggccaaacaagaggggaaacccgtgtggaaactgctcgtggacatggatccccgtatgctggttagctgtattgactttcgatacatcaccgacgtgctgaccgaagaggatgcattagagatcctgcagaagggacagattggcaaaaaagaaagagaaaagcagatgctcgcccagggataccctgcctatactacttcatgtgcatggttaggctactccgatgatactctgaaacaactctgtgcccaggctctaaaggacggttggacacggtttaaggtgaaggttggtgccgatctgcaggacgacatgcgacggtgccagatcattcgcgatatgatcggccctgaaaagaccctgatgatggatgcaaaccagcgttgggacgttccagaagccgtggaatggatgtcaaagctggccaagttcaagcctttatggatcgaagaaccaaccagcccggacgatatcctggggcatgctaccatctccaaagcacttgtacctctcggaattggaatcgcgaccggcgaacaatgccacaacagggtgatcttcaaacagctgttgcaagccaaggctctgcagttcctccaaattgatagttgtcgcctcgggagcgtgaacgaaaatctttccgtgctcctgatggcaaaaaagtttgagatacccgtgtgccctcatgccggaggagtcggactgtgcgagctcgtgcaacacctgattattttcgactacatctccgtgtccgcttcccttgagaaccgtgtgtgcgagtacgtggatcatcttcacgagcactttaaataccccgttatgatacagagggcttcatacatgccaccgaaggaccccggatattccacagagatgaaagaggagtcagtcaaaaagcaccaatatcccgacggcgaggtgtggaaaaagttactgccagcccaggagaactag

SEQ ID NO: 222029 - DNA, 642 bp, synthetic construct
  misc_feature 1..642: note = Description of Artificial Sequence: Synthetic coding sequence
  source 1..642: mol_type = other DNA
atgaggcgttgtcagatcatacgcgacatgataggcccagagaagactctgatgatggatgccaatcagagatgggacgtgcctgaggcagtggaatggatgtctaaactggctaagtttaagcccctgtggatcgaggaacccacgagccctgacgatatcctcggccatgctactatctctaaagccctcgtacccctcggaatcggtatagccactggcgaacagtgtcacaacagagttattttcaaacagctgctgcaggccaaggccctgcaatttttgcagattgattcttgtagactggggtcagtgaacgagaacctgtctgttctcctgatggcaaaaaaattcgagattccagtatgcccgcatgccggaggtgttgggctttgcgagctggtgcagcaccttattatctttgattacatctccgtgagtgcctcgctggagaaccgggtgtgtgagtacgtggatcacctgcacgagcactttaaatatcctgtgatgatccagagagcatcctatatgccacctaaagaccctgggtacagcaccgagatgaaagaagagtctgtgaaaaaacatcagtaccctgacggagaagtctggaaaaaactactgcccgcacaggagaactag

SEQ ID NO: 222030 - DNA, 1353 bp, synthetic construct
  misc_feature 1..1353: note = Description of Artificial Sequence: Synthetic coding sequence
  source 1..1353: mol_type = other DNA
atggtcagtgccgacgcaatggtgtctgctgacgccatggtgtccgctgatgccatggtgtccgcagatgccatggtgagtgccgacgcgatggtaagcgccgatgccatggtctctgccgacgccatggtaagcgctgacgctatgcataccgatccagactactccgcggcttacgtggtgattgagaccgacgcagaggacggaataaagggctgtggcatcactttcactttgggcaaaggaactgaggtggtggtgtgcgcggttaacgcactcgctcatcacgttctgaataaagatctcaaagacatcgtgggcgacttcagaggtttttatcgacaactcacgtcagacggccagctcagatggatcggtcctgaaaagggagttgtacatcttgccacagcggcagttctcaacgctgtctgggatttatgggcaaaacaggaaggaaagccagtctggaaactgttggtggacatggacccgagaatgcttgtgtcgtgcatcgatttccggtatattaccgacgtgctgactgaggaggatgcccttgaaatcctgcagaaggggcaaatcggaaagaaagagagagagaagcagatgctggctcaaggctacccagcctacacaacctcttgcgcctggcttgggtattcagatgacaccttaaaacagctttgtgcacaagccttgaaggatggctggacgcggtttaaagttaaagtcggcgcagacctgcaggatgacatgcgaaggtgccagattataagagacatgattgggccagaaaaaactttgatgatggatgctaaccaacgctgggacgtgccagaggcggtagaatggatgtcaaagctcgctaaatttaaaccgctgtggatcgaagaacctacctctcccgatgacatcttgggtcacgctacaatctcaaaatgccacaaccgggtcatcttcaagcagctcctccaggctaaggccctgcagttcctgcagatcgacagctgccggttggggtcagtgaatgagaacttgtccgtactgctcatggcaaagaaattcgagattccggtttgcccacatgctggcggtgtcggtctgtgtgagctggtccagcatcttatcatcttcgactatatttccgtatccgcctctctggaaaatagagtctgtgagtacgttgaccacttgcacgagcactttaagtatcctgtgatgatccagcgggcaagctacatgccccctaaggacccaggatattccaccgagatgaaagaagagtctgtcaagaagcatcagtacccagacggagaggtttggaagaaactacttccagctcaggagaactag

SEQ ID NO: 222031 - DNA, 1086 bp, synthetic construct
  misc_feature 1..1086: note = Description of Artificial Sequence: Synthetic coding sequence
  source 1..1086: mol_type = other DNA
atgcagaaaatggagagcagaggagttgagcttccttcactgtgggaaaaagcattgaaattgataggacccgagaagggcgtagtgcacctggcaactgccgcagtgctgaatgccgtttgggatttgtgggctaaacaagaaggcaagcccgtgtggaaattgttagtggacatggatcctagaatgctagtgagctgtatcgacttcagatacatcactgatgtgctcactgaggaagacgccctcgaaattcttcagaaaggtcagatcggtaagaaagagagagaaaaacagatgctggcacaaggatatccagcatataccacatcttgcgcctggttagggtactcggatgacaccttgaagcagctgtgcgcccaggctcttaaggacgggtggaccagattcaaggttaaggtgggggcagacctccaggacgacatgcgcaggtgtcagataatcagagatatgattggcccagaaaaaactctgatgatggacgccaaccagcggtgggacgtgccagaggccgtcgaatggatgtccaagctggcgaaattcaagcctttgtggattgaagagcccacaagcccagatgacatcctgggccacgctaccatatcaaaggcactggtacctcttggaatagggatagcaacaggagagcaatgtcataacagagtgattttcaaacagctcctccaggccaaggccttacagtttctgcagattgatagctgcagattaggctcggtcaacgaaaatctatcggtgctgctgatggctaagaagtttgaaattcctgtttgtccacatgcgggaggtgtgggtctatgcgagctggtgcaacatctcattatcttcgactatatttcagtctccgcctcattggagaatagagtctgcgagtatgtagatcaccttcatgaacactttaaataccctgttatgatccagcgcgcaagctatatgcctcctaaggatccgggatactccactgaaatgaaggaggaatctgtgaagaagcaccaatacccagacggtgaggtgtggaaaaaactgctgcccgcacaggaaaattag

SEQ ID NO: 222032 - DNA, 429 bp, synthetic construct
  misc_feature 1..429: note = Description of Artificial Sequence: Synthetic coding sequence
  source 1..429: mol_type = other DNA
atggtcagagggaggatcagtcgcttaagcgttagagatgtgcgctttccgactagtctggggggacacggagccgacgccatgcacacagacccagactacagtgccgcatatgtggtcattgaaactgatgcagaggacggaattaagggatgcgggatcaccttcacgcttggcaagggtactgaagtcgtggtgtgcgccgtcaacgcattggcccaccatgtgctgaacaaggatcttaaggacatagttggggactttcgagggttttacaggcagctcacgtccgatggacagctccgctggataggaccagagaagggtgtcgtccacctggcaacggctgcggtgttgaacgctgtatgggacctctgggccaagcaggaggggaagcctgtttggaagctgttggtggatatgggctag

SEQ ID NO: 222033 - DNA, 1392 bp, synthetic construct
  misc_feature 1..1392: note = Description of Artificial Sequence: Synthetic coding sequence
  source 1..1392: mol_type = other DNA
atggctaccgtgactgcaaccacaaaggttcccgaaattcgggatgtgaccagaatcgaacgcataggagctcacagtcacattagggggctcggtcttgacgacgctctggagccaaggcaagcttcccagggcatggtcgggcaactggcggcacgtcgcgctgccggagtggtgctggagatgattagagaggggaagatagccggaagggctgttctgattgcaggacagccaggcaccggcaaaactgccattgccatggggatggctcaagctctggggcctgatacgccttttaccgctattgcaggcagtgaaatcttctccctcgaaatgtccaagacggaggcacttacacaggctttcaggcggagtattggcgtgcgcatcaaggaggagaccgagattattgagggtgaggtagttgagatccaaatcgatcgtccagcaacaggaacagggtcaaaggtggggaaacttactctgaaaaccactgaaatggagaccatatacgatttagggactaaaatgattgaaagcctcacaaaggacaaggtgcaggccggagatgtgatcaccatcgacaaagccaccggaaagatctctaaattgggcagaagcttcaccagagcacgcgactatgacgcaatgggttcacaaacaaaattcgtccagtgccctgatggagagttgcaaaagaggaaagaggtagtgcatactgtctctttgcacgagattgatgtcataaatagtagaacacaggggttcctggcgttattctctggagacaccggagaaattaagtccgaggtgcgagaacagatcaacgcaaaagttgcggaatggcgggaagagggtaaggcagaaatcatcccgggagtactatttattgacgaggtgcatatgcttgacattgaatcattttcatttttgaatcgggcattagagagcgatatggcacccgtgctgatcatggccacgaacagaggaattacaagaatcagaggaaccagctaccagtcacctcatggcattcccattgacctgctggaccggctgttaatcgtcagtacaactccatactctgaaaaggatacaaagcagatccttcgcattcgatgcgaagaagaggacgtggaaatgagcgaagatgcctacactgtattgacaagaattggcttagaaactagcttaagatatgcgatacagctcatcactgcagccagcttagtatgtagaaaacgcaaggggacagaagtgcaggtcgatgacattaagcgcgtatattctttgtttttagatgagagccgcagcacccagtacatgaaagagtatcaggacgcgttcctgtttaatgagctgaagggtgaaaccatggatacaagttag

SEQ ID NO: 222034 - DNA, 855 bp, synthetic construct
  misc_feature 1..855: note = Description of Artificial Sequence: Synthetic coding sequence
  source 1..855: mol_type = other DNA
atggccaaaagcctcttaaaaaccgcaagcctgtccggcaggacgaagctgcttcaccagactggcctttctctttattccaccagccacgggttctacgaggaggaagtgaaaaagactctgcagcaattccccggagggtcaatcgatctccagaaagaagacaacgggattggcattctaaccctgaacaatcctagtcgaatgaatgccttttccggcgtgatgatgctgcagctgctcgagaaggttatcgaactcgaaaattggacagagggaaagggattgattgtaagaggcgctaaaaacacgtttagttccggctccgacctgaacgctgtcaagtcccttggtctgcagaggcgactgccacttatttcagtcgcactggtgcagggctgggcattaggcggaggtgcagagttcaccacggcatgtgacttccgcctaatgactccagaatcaaagatccgttttgtgcacaaggagatgggaattattccgtcttgggggggtaccacacgcctggtggaaattataggcagcagacaggcactcaaagtgctgtcgggcgctctgaaactcgacagcaagaacgcccttaacatcgggatggttgaagaggtgctccaatcaagcgacgaaactaagagcctcgaggaagcacaagagtggctgaagcaattcatccagggacccccagaggttataagagcgctgaagaagtccgtatgctcaggaagggagctctatctagaggaagccctgcagaatgagagggacctcctcggcactgtgtggggcggacctgcaaacctggaggccattgcaaaaaaaggaaagtttaataagtag

SEQ ID NO: 222035 - DNA, 438 bp, synthetic construct
  misc_feature 1..438: note = Description of Artificial Sequence: Synthetic coding sequence
  source 1..438: mol_type = other DNA
atggcaaagtctctcctgaagacagcttccctgtccgggcgaactaaactgctccaccaaacaggacttagtctgtactccaccagtcacggcttctacgaagaggaagttaaaaaaaccctacagcagtttccgggaggcagcattgacctacagaaagaggataacgggatcggcattctcaccttaaacaatccctcacgcatgaatgccttctctggcgttatgatgcttcaattacttgaaaaagtgatcgaacttgaaaattggactgagggcaaaggtctgatcgttagaggcgcaaagaatacatttagttccggaagcgacctgaacgctgtcaagtccctcggaactcctgaaaccagcttcaacaaatgctgcgccggaagcagactaggtattggctggcgatcgcgcatatattattccatgtag

SEQ ID NO: 222036 - DNA, 441 bp, synthetic construct
  misc_feature 1..441: note = Description of Artificial Sequence: Synthetic coding sequence
  source 1..441: mol_type = other DNA
atggccaaaagtctgctcaagaccgcatctctgtccggaagaactaagctgctgcatcagaccggactgtcactgtatagtacctcacacggtttttatgaagaggaggtgaaaaaaacgctgcagcagttcccaggcggtagtatcgacttacagaaggaagacaatggcattgggatcctgacgctcaataacccatcgcgaatgaacgcatttagcggcgtcatgatgctacagttgttagaaaaagtgatcgaactcgagaactggactgaggggaaaggcctcatcgtgagaggcgctaaaaataccttcagttccggcagtgatctcaacgctgtgaagtctcttggtacacctgaggagacctcctttaataaatgctgtgctggaagcagactggggattggttggcggtcgaggatctattacagcatgtag

SEQ ID NO: 222037 - DNA, 438 bp, synthetic construct
  misc_feature 1..438: note = Description of Artificial Sequence: Synthetic coding sequence
  source 1..438: mol_type = other DNA
atggctaaatccctcttaaaaaccgcctctctctccggccgaacaaaactgctgcatcagacagggttgagcttgtactcaaccagccacgggttctacgaagaagaggtgaaaaaaactcttcagcagtttcccggaggttcaatagatcttcagaaggaggacaatggaatcgggatattgacgctaaataaccccagtcgcatgaatgcgtttagtggcgtgatgatgttgcaattactggaaaaggttatcgaattagagaattggaccgagggcaagggattgatagtgcgaggagctaaaaacaccttctcatcagggtccgacctcaacgcagtaaagtctctgggtaccccagagacttcctttaacaaatgttgcgcaggcagtagactgggtatcggctggagatcaaggatctattattctatgtag

SEQ ID NO: 222038 - DNA, 642 bp, synthetic construct
  misc_feature 1..642: note = Description of Artificial Sequence: Synthetic coding sequence
  source 1..642: mol_type = other DNA
atgaatgccttttctggggtcatgatgttgcaactgttggagaaagtaattgaattagagaactggaccgagggaaaaggtttgatagtgagaggtgccaagaataccttttcttccggcagcgacctcaatgctgttaaatcacttggtactccagaagagagttgcaggtggaacactgagttcctgtacaccctgcaccccgtttccccttttattaacatcctgtactcttacgggtggaacggaagaatgcacgtgcatgctaagcaccttaataagatttatgaagttaaaaaacaacgcggaaagattctgctgggactttcacgcctcccactgataagtgttgccctcgtccaggggtgggctctagggggaggggcagaatttaccacggcctgtgacttcaggctgatgacgccggagagcaaaatacggttcgtccataaagagatgggaattattccatcatggggcggaacgacgcgattggtcgagatcataggtagccggcaggccctcaaagtcctgtccggggctctcaagctcgatagcaaaaacgctcttaatattggcatggtggaggaagtgctgcaatctagtgacgagacaaaaagcttggaagaagcccaagaatag

SEQ ID NO: 222039 - DNA, 906 bp, synthetic construct
  misc_feature 1..906: note = Description of Artificial Sequence: Synthetic coding sequence
  source 1..906: mol_type = other DNA
atggctaagagtctgttgaaaacagcgtcactgagcgggagaacgaaacttctgcatcagaccggcctatctctgtatagtacctcccacggattttacgaagaggaagtgaagaaaactctgcagcaatttcccggtggatcaattgacctccagaaggaggacaatggtattggtatcctgaccctcaacaatcccagcaggatgaatgcattcagcggagtgatgatgctgcagctcctggaaaaagtcatcgaactggagaactggaccgaaggcaaaggcctgatcgtgagaggtgccaaaaacacattctcttccgggtctgaccttaatgctgtcaaaagtcttggcacacccgaggatgggatggctgtatgtatgttcatgcagaacaccctcactcgatttatgcgcctgccccttatatcagtggcgctggtgcagggttgggctctcggcggtggggctgaatttacaactgcttgcgatttcagattaatgacccccgaaagcaaaatccgttttgtccataaggagatgggaattatcccatcctggggaggcacaactcgcctagtcgagatcatcggatccagacaggccctaaaggtgttaagcggggctctgaagttggattcgaagaacgccctcaatatagggatggttgaggaggtgttgcaaagcagcgatgagaccaaaagtctggaggaggctcaggagtggctcaagcagttcatacagggacctccagaagtgatccgggctctcaaaaaatccgtctgctcaggacgggaactctaccttgaggaagccttgcagaatgagcgagacctgctggggacagtctggggtgggccagccaacttagaggcgatcgctaagaaaggtaaatttaataagtag

SEQ ID NO: 222040 - DNA, 681 bp, synthetic construct
  misc_feature 1..681: note = Description of Artificial Sequence: Synthetic coding sequence
  source 1..681: mol_type = other DNA
atgatgttacagttactggaaaaagtgatcgagttagagaattggaccgaggggaagggactgatcgtgcgcggagcaaagaacaccttcagcagcgggtcagatctgaatgctgtgaaaagtctgggcacccccgaagatggtatggcagtgtgcatgtttatgcagaatactctgacgcggttcatgaggctgcctctgatatcggtagcgttagtgcagggctgggcactgggcggaggcgctgaatttaccaccgcatgcgactttaggttaatgacaccggagtctaaaattcgtttcgtccataaggagatgggtatcattccttcctggggagggactactaggctcgtggagatcattggctctaggcaagccctgaaggtcctcagtggtgctctcaaattggactccaagaacgccctgaatattggaatggtggaagaggtgttgcagagtagcgatgaaacaaaaagtctggaggaggcccaggagtggctgaagcagtttattcagggaccgcctgaggtcatacgggctctcaagaagtcggtctgttccggcagggagttgtacctcgaggaagcacttcaaaatgaacgagatttgctgggcacagtctggggcggtcctgcaaatctggaagcgatcgccaaaaaggggaagttcaacaagtag

SEQ ID NO: 222041 - DNA, 906 bp, synthetic construct
  misc_feature 1..906: note = Description of Artificial Sequence: Synthetic coding sequence
  source 1..906: mol_type = other DNA
atggctaagtcccttctgaagactgcatccctctctggcaggactaaactccttcatcagactgggctgtcgttatattctacttcccatgggttctacgaggaagaagtgaagaagactctccagcaatttccaggcggtagtatcgatctacaaaaggaagacaatggaatcggaatattgactctgaacaacccctccagaatgaatgccttttctggggtaatgatgctgcagctgttagagaaggttattgagctggaaaactggacagagggcaaggggctgatcgttagaggagccaaaaatacctttagtagtggctccgacctgaatgccgtgaagtccctgggaactcccgaagatgggatggctgtctgtatgtttatgcagaacacactgactcgctttatgagactgcccctgatctcagtggcgctggtccaggggtgggcattgggagggggagccgagtttaccacagcatgtgattttcgcctgatgactcctgaatccaagatccggttcgtgcacaaagagatgggaataatccccagctgggggggtactaccagactagtggagatcatcggctcacgtcaggcactgaaggtgctgagcggcgcactaaagctggattctaaaaatgccctgaatattggcatggtcgaggaggtgttgcaatcctcagacgagacgaaaagtctcgaggaggcccaggaatggttgaaacagtttatacagggcccacctgaagtgatacgcgctttaaaaaaaagcgtatgtagcgggagagagctttacctggaggaagctctccagaacgaacgggatctgctcgggactgtttggggcggaccagcaaatctagaggccatcgctaaaaagggaaagttcaataaatag

SEQ ID NO: 222042 - DNA, 906 bp, synthetic construct
  misc_feature 1..906: note = Description of Artificial Sequence: Synthetic coding sequence
  source 1..906: mol_type = other DNA
atggcaaagtcactgttgaagaccgccagcttgagcggtcggactaagctattacaccagacgggcctttccctctattctactagccacggcttttatgaggaggaggttaaaaagacgttgcaacaattcccgggaggcagcatcgatctgcaaaaagaggacaacggcattggcatcctgaccctcaacaatcccagcagaatgaatgccttctcaggagtgatgatgctccagctcctggaaaaggtcatcgagcttgagaactggaccgaaggcaaaggcctgattgtccggggtgctaaaaataccttttcctccgggtccgacctcaacgctgtgaaatctctcggaacacctgaggatggaatggctgtgtgtatgtttatgcagaacacactgacgcgcttcatgaggcttcccctgatctctgtggctctcgttcaggggtgggccctgggtggcggagccgaattcacaacagcttgcgactttcggctgatgacccctgagagtaagatccggttcgtgcataaagaaatgggtattattccctcgtggggagggacaacgcgcctcgtcgagattatcgggagccgccaggcactgaaagtacttagcggagctctgaagctggattccaaaaatgccctaaacatcggtatggtagaggaggttctgcaatctagtgatgagactaaatccctagaagaagctcaggaatggctgaaacagttcatccagggccctcccgaggtcatcagggcattgaagaaatctgtgtgctccggcagagaactttacctggaggaagccctccaaaatgaacgcgacctactgggcacagtctggggcggtcctgccaatcttgaggctattgcgaagaaggggaagttcaacaaatag

SEQ ID NO: 222043 - DNA, 408 bp, synthetic construct
  misc_feature 1..408: note = Description of Artificial Sequence: Synthetic coding sequence
  source 1..408: mol_type = other DNA
atggctaagagtctcttgaaaacggcttccttgtcaggtagaactaagctgctacaccagacagggttatccctgtattccaccagtcatgggttttacgaagaggaggtgaaaaagactctgcagcagtttccaggcggatccatcgatctgcaaaaagaagacaacggaatagggattctgactctgaataacccatcaagaatgaatgcatttagcggtgtaatgatgctccagctgctggagaaggtgatagaactggagaattggaccgaaggcaagggccttattgtgcgcggtgccaagaatacgttttcttcaggcagcgatcttaatgccgtcaagtccttggggacccccgaggatggcatggcagtgtgcatgttcatgcagaacaccctgacgtag

SEQ ID NO: 222044 - DNA, 924 bp, synthetic construct
  misc_feature 1..924: note = Description of Artificial Sequence: Synthetic coding sequence
  source 1..924: mol_type = other DNA
atggcgctgaaacaagaaatggcaaaatctctcctgaaaacagcctccctctcagggcgtactaagctgctgcatcagaccggtctctctctgtactccacctcacatggcttctacgaagaagaggtaaaaaagaccctgcagcagttccccggaggctccatcgacttgcagaaagaagataatggaataggcatcctgaccctgaacaacccttctcggatgaacgctttctcaggcgtgatgatgctgcaattgctagagaaggtgatcgagctggagaactggactgaaggtaaagggctgattgtgaggggagcaaagaacacctttagctctggctccgacctgaacgccgtgaaaagcctgggcactcccgaagacgggatggccgtctgcatgttcatgcagaacaccttgactcgcttcatgcgcctgcctcttatttcagttgctcttgtgcagggctgggcactcggaggaggagctgagttcaccaccgcatgcgacttccggcttatgacccccgagagcaaaatccgctttgtgcataaagagatgggcatcataccaagttggggaggtactacacgtctggttgaaataattgggtcccgccaggcactgaaagtcctcagcggcgctctaaagctggattccaaaaatgccttgaatataggcatggtggaggaggttctgcaatcaagtgatgaaactaaaagccttgaagaagcccaagagtggctaaagcaattcatacaaggaccacccgaggtcattagagctctgaagaaaagtgtttgttcgggtcgggaactttaccttgaagaagctctacagaatgagcgcgacctgttaggcactgtgtggggcggacctgcgaatttggaagccatcgcaaaaaagggcaagtttaataaatag

SEQ ID NO: 222045 - DNA, 456 bp, synthetic construct
  misc_feature 1..456: note = Description of Artificial Sequence: Synthetic coding sequence
  source 1..456: mol_type = other DNA
atggccaagagcctgctcaagaccgcaagcttgagcggtaggacgaagctgctgcaccaaaccgggctgtcactttatagtacatctcacggcttttacgaggaagaggtgaagaagactcttcagcagttccccggaggttcaatcgacctgcaaaaagaggataacgggataggaatcctcactctgaataatccttcccgtatgaacgccttttctggggtgatgatgctccaattactggagaaggttattgaactggaaaattggactgagggcaaaggcctgattgtgagaggagcaaagaacactttctcatccggatccgacctgaacgctgtgaagtctctgggcacacccgaggacgggatggcagtgtgtatgtttatgcaaaataccctcactaggttcatgcgcctgcccctgatctctgtggccttagttcaaggatggtag

SEQ ID NO: 222046 - DNA, 378 bp, synthetic construct
  misc_feature 1..378: note = Description of Artificial Sequence: Synthetic coding sequence
  source 1..378: mol_type = other DNA
atggcaaaatctcttctgaaaaccgcaagtctctccggcaggactaaactccttcatcagacaggtctttcgctgtactcgacctcacacggattttacgaggaggaggtaaagaaaaccctgcagcaattccctggcggttctattgatctgcaaaaagaggacaatgggatcggcatcttgactcttaataacccctcccgcatgaacgccttctctggagtcatgatgctccagctgttggaaaaagtgatcgaactggagaactggacagaaggaaaaggacttattgttagaggcgcaaaaaatacatttagtagtggtagcgacctaaacgcagtgaagagccttggcacccccgaggcgaattttctttag

SEQ ID NO: 222047 - DNA, 213 bp, synthetic construct
  misc_feature 1..213: note = Description of Artificial Sequence: Synthetic coding sequence
  source 1..213: mol_type = other DNA
atgatgctgcagctccttgaaaaggttattgagttggagaattggacggaggggaagggcctgattgtcagaggagctaaaaacactttctcatcgggcagtgacctaaatgctgtgaaatccctaggaacgcctgagacgtcctttaacaaatgttgtgccggatcacgactgggaatcggttggcgtagcagaatttattattccatgtag

SEQ ID NO: 222048 - DNA, 873 bp, synthetic construct
  misc_feature 1..873: note = Description of Artificial Sequence: Synthetic coding sequence
  source 1..873: mol_type = other DNA
atggcggctctgagggtgctcctttcatgtgtgcgtggacccttgcgcccaccggtaaggtgtcccgcatggcgaccgttcgcttcgggagccaatttcgaatacataatagcagaaaaaaggggcaaaaacaacacagtgggcctgatacagctcaatagacccaaggccctgaacgctctctgcgacggactcatcgacgagctaaaccaggccctcaaaacgtttgaggaggatcccgcagtaggagccattgttctgaccggtggagacaaggcctttgcggctggcgcagatattaaagagatgcaaaatctgtcatttcaggattgctattcttcgaaatttcttaagcattgggaccatctgacccaggtaaaaaagcctgtgatcgctgccgttaacggatacgcgttcgggggaggatgcgaacttgctatgatgtgtgacatcatctatgcaggggaaaaagcccagttcgctcagccagaaattctaatcgggaccatacctggagcaggcggtacccaacgcctgacacgagcagtcggcaagtcattggctatggagatggtgctcacgggggatcgaatttcagctcaggacgcaaagcaagctggcctcgtcagtaaaatctgccctgtcgagaccctggtggaggaagctattcaatgtgccgagaaaatagctagcaactctaagattgtggtggccatggctaaggagagtgtgaacgcggcatttgagatgactctcactgaaggctccaagttggaaaagaaattgttttactccacattcgcgaccgatgatcgtaaagagggcatgactgccttcgtggagaaacgaaaggccaactttaaggaccagtag

SEQ ID NO: 222049 - DNA, 2271 bp, synthetic construct
  misc_feature 1..2271: note = Description of Artificial Sequence: Synthetic coding sequence
  source 1..2271: mol_type = other DNA
atgtcgtttgtggctggggtgatacgcagactagatgagaccgttgtcaacaggattgcggctggggaggtgattcagaggcctgcaaacgcgattaaggagatgatcgagaactgtctggacgccaagagcaccagcatccaggtgattgtgaaagaaggaggcctcaagctcattcagattcaggataacgggaccgggattcgcaaggaggatctggacattgtctgtgagcgattcacaacatctaagctgcagtcattcgaagacctcgcttcaatctctacctacggattcagaggggaggctctggcctccatcagccatgtggcacacgttaccatcaccactaaaacagccgatggcaagtgcgcatatcgggcaagctactctgacgggaagctgaaagccccacccaaaccctgcgccggtaatcagggcactcagataactgtagaggaccttttctataacatcgccacaagacgaaaggctctgaagaacccgagcgaggagtatgggaaaatcctggaagtggtaggtcgctactccgtacacaacgccggtatctcattcagcgtgaaaaaacagggggagaccgttgcagacgtcaggacattgccaaacgccagcaccgtggataacatccggagcatcttcggtaacgcagtgagtcgcgagctcatagaaattggatgtgaggacaagaccctagcattcaagatgaatggctatatctctaatgccaactattccgtcaaaaagtgcatctttctgctctttattaaccacaggctcgtggaaagcacctcgttaagaaaagccattgaaactgtgtatgctgcatacctgcccaaaaatacccatccctttctttatctgtcactggagatttcaccgcaaaatgttgacgtgaatgtgcaccctacaaagcacgaggtgcattttctgcacgaggagtcaatcctggagagggtccagcaacatattgagtcaaaactgttgggttccaacagctcacggatgtatttcacacaaacattacttcccggactggcaggcccttctggcgagatggtgaaatctaccacaagcctgacatcctcttcgaccagtgggtcttccgataaggtctatgcacaccagatggtgcggaccgactctcgagagcaaaaacttgatgcattcctacagccactttcaaaacccttgagcagccagcctcaggcgatcgtgacagaagataaaacggatatctcatccggcagagcaaggcagcaagatgaggagatgctggagctgcccgctcccgctgaagtcgctgcaaagaatcagagtctggagggggacactaccaaaggcacttcagaaatgtccgagaagaggggaccgacttccagcaatccacgcaaacgacatagggaggactctgacgtggagatggtggaggatgatagccggaaagagatgaccgccgcttgcaccccaagacgccgtatcatcaacctcacaagcgtgctgtctctgcaagaagagatcaatgagcagggacacgaggtactccgcgagatgttgcacaatcatagcttcgttggctgtgtgaatccccagtgggccctggcccagcatcagactaaactctatttactgaacacgactaaacttagcgaagagctcttctaccagatccttatttatgacttcgctaattttggagtgctacggctgagtgagcccgctcctttatttgacctcgcgatgctggcactcgattctcctgagtctggctggaccgaagaagacggcccaaaagagggcttggccgagtacatcgtcgagttcctgaagaagaaagctgaaatgctggccgactatttcagtctggagattgatgaagaaggaaatctgatcggattgcctcttctcattgacaactacgtcccaccgctcgaaggactgccaatcttcatcctgaggttggcgacggaagtgaactgggacgaagaaaaggagtgtttcgagtcgctgtccaaagagtgtgccatgttctactcaattcgcaagcagtacatcagcgaagagtcaaccctgtctggacagcagtccgaggtacctggcagtatcccgaactcctggaagtggaccgtggaacacatcgtgtacaaggctcttcgctcccatatactccctcccaagcattttacagaagacgggaatattttgcagcttgcaaatctgccagatctgtataaagtttttgagagatgttag

SEQ ID NO: 222050 - DNA, 1884 bp, synthetic construct
  misc_feature 1..1884: note = Description of Artificial Sequence: Synthetic coding sequence
  source 1..1884: mol_type = other DNA
atggcgtttggtggcggtctggagctggctcttggatgccactacaggatagctcacgctgaagctcaggtgggattgcctgaagtgacattagggctgcttcccggtgcccgaggtactcagctactgccacgcctcaccggcgtgcctgcggctctggatctcataacatcaggtagacgcatcttggccgacgaggcattaaagctggggatcttggacaaggtagtgaattcggacccagttgaggaggctatccggttcgcccagagggtgagcgatcagcctttggagtcccggagactgtgtaataaaccaatccaatcgctgcctaacatggattccatcttttctgaggctctcttgaaaatgcgtcgtcagcacccgggatgcttggctcaggaggcgtgtgttcgggcagtacaggccgctgtgcagtatccttacgaggtggggattaaaaaagaggaagagctctttctgtacctactgcagagcgggcaggcaagagcactgcagtatgcctttttcgccgagagaaaagctaataaatggtccaccccgtcgggagcctcatggaagacggcctctgcgagaccagtatcctcagtgggtgtggtcgggctgggaacaatgggcaggggtattgtaatttcgttcgctcgggctcgcattcctgtgatcgctgtcgatagcgataaaaatcagctggcgactgcaaataagatgattacaagtgtgcttgaaaaggaagcctcgaagatgcagcagagcggccacccctggtccgggcctaagcctcggttgacatccagtgtcaaagaacttgggggagtagatttggtgatcgaggcagtgttcgaggagatgtcactgaagaaacaggtgttcgcagagctcagtgcagtatgcaaacccgaagcattcttgtgtactaatacaagtgctctcgatgtggacgagatcgccagctctaccgatcgtcctcatcttgtgataggaacacacttcttcagccccgctcatgtcatgaagcttttagaagtcatccccagccaatattccagccccactacaatagccaccgtaatgaacttgtctaaaaaaattaaaaaaattggggtagtcgtgggaaattgctttggttttgtcggaaaccgaatgctcaatccctattacaatcaagcctacttccttctcgaggaaggctcaaaacccgaggaggtagaccaggtgctagaagaatttgggtttaaaatgggcccattccgagtgagcgacctggctggcctggatgtgggatggaaatcgcgtaagggccaaggtctgaccggaccgacactgctgcctgggaccccagctcgcaagcgcggaaatcggaggtattgtcctattcctgacgtgttatgcgagcttggcaggttcggccaaaaaaccgggaagggctggtaccaatacgacaagcccctggggagaattcacaaacccgacccatggctgagcaagttcttgagtcgatatagaaagacccatcacatcgagcccaggaccatcagtcaggacgaaatcctggaacgctgcctttacagcctaatcaatgaggctttcagaatcctgggggaggggattgcggctagtccagagcatatagatgtggtgtacctgcacggctacggttggcctaggcacaaggggggtcctatgttttacgcaagcacggtcggcctccccactgtcttggagaaactacagaagtattaccgccagaacccagatattccgcagctggagccttctgattacctcaagaaacttgccagccagggcaatcctccactgaaagagtggcagtccctagctggcagtccttcctctaaactatag

SEQ ID NO: 222051 - DNA, 1464 bp, synthetic construct
  misc_feature 1..1464: note = Description of Artificial Sequence: Synthetic coding sequence
  source 1..1464: mol_type = other DNA
atggccgagtatacaaggctgcataacgctttagcccttataaggctacgcaaccccccagttaatgcaatttctacaacacttctgagggacataaaagaaggactacagaaggccgtaatcgaccacacaatcaaggctattgtgatctgtggcgcagaaggcaagttctcagcgggagcagacattaggggattcagcgctccccgtacatttggcctgactcttgggcacgtggtggacgaaatccagcgcaatgagaagcctgtcgttgcggcaatacagggtatggcctttgggggaggtctggaactggccctgggatgccattacagaatcgcacatgcggaggcccaggtgggtctgcccgaagtgaccctcggattactgcccggagcccgaggcacccagcttctgccaaggttgacgggcgtgccagcagctctggatttgattacctctggtcgccgaattctggctgatgaagccctgaaactaggtatactggataaggtggtaaactccgatccggttgaggaggcaatcagatttgctcagcgcgtgtctgatcaaccactggagagtagaagactttgcaataagccgatccagagcctgcccaatatggatagcatcttctccgaggccctcctcaaaatgaggaggcaacatcctggatgtctcgcccaggaggcatgtgtacgtgctgtgcaggctgccgtccagtacccatatgaggtaggaatcaagaaggaagaggagctgtttctctacctactccagtctggccaggctcgcgcactgcaatacgccttcttcgcggagaggaaggccaacaaatggtcgacaccatctggtgcgtcttggaagaccgcctcggccagacccgtgagttccgtgggcgtcgttggacttggcaccatgggaagaggaatcgtgatttcctttgctagggcccgaatcccagttatcgcagtggatagcgataaaaaccagctggccaccgcaaataaaatgattaccagtgttctggagaaagaggcaagtaaaatgcaacaaagcggccatccgtggagcggacccaaacctaggctgacatcctcggtgaaggaactcggcggagtcgacctcgtgatcgaggctgtttttgaggaaatgtctctaaaaaagcaggtttttgctgagctgagcgcagtctgcaagccagaggcctttttgtgcaccaacaccagcgcactggatgtggacgagattgcgagcagcacagacagaccgcacctggttattggcacacacttcttttcgccagcacacgtcatgaaactcctggaagtcatccccagtcaatattcctctcccaccactatcgcaacagtgatgaacctgtctaagaagataaaaaagatcggcgtagttgtgggaaattattcagtctccaagaaaaagaagaagaaaaaaaaatag

SEQ ID NO: 222052 - DNA, 6101 bp, synthetic construct
  misc_feature 1..6101: note = Description of Artificial Sequence: Synthetic coding sequence
  source 1..6101: mol_type = other DNA
atgttcaagggcctgtccaaaggctctcagggaaaaggatcaccaaagggatcacccgcaaaaggttcaccaaaaggctctccatcccgtcacagccgcgctgcaactcaggagctggccctgctcatttcccgcatgcaggcaaacgccgatcaagttgaaagggacatcctggagactcaaaagcgcctgcagcaggatcggctgaattccgagcagagtcaggctctccagcaccagcaggagacggggcgatccctcaaagaggccgaggtcctcctgaaagatctgttcctcgacgttgacaaagctagacgattgaaacaccctcaggccgaagagattgaaaaagacattaagcagttacacgaacgggtcacccaagagtgcgccgagtatcgtgcactgtacgaaaaaatggtgctgcctcctgacgtgggcccaagagtagactgggcacgagtattggagcagaagcagaaacaagtgtgcgcaggccagtatggcccagggatggccgaacttgagcagcagatcgccgaacataatatacttcagaaggaaatcgatgcgtacggtcagcagttgagatccttagtagggcctgacgccgcaacaatccggtctcaatatagagacttactgaaggccgcttcttggcgcggtcagtccctcggcagcctgtatacacatttgcagggctgtactcgacagctgtctgccttggcggaacagcaaagacggattctgcagcaggattggtccgatttgatggctgaccccgcaggcgtacgaagagagtacgagcacttcaaacagcatgagctgctgtcccaagagcagtcggtcaatcagttagaagatgacggcgaaagaatggtggagcttagacatcccgcagtgggccctatacaggcccaccaggaggccttaaagatggagtggcagaatttccttaatttgtgcatatgtcaagaaactcagcttcaacacgtggaggactacagacggttccaagaggaagctgatagcgtcagccagacgctagcaaaactgaattctaatctggacgccaagtactcaccagcccctggaggtcctcctggggctcccactgaattgctgcagcaactggaggccgaggaaaaacgtttggccgtgacggagcgggctaccggtgacctgcagcggagaagccgggacgtcgccccactgccccagcggcgtaacccccctcagcagcctcttcatgtggacagcatttgtgactgggacagtggagaggtgcaactgctgcagggcgagcgatacaagttagtagacaacactgacccacatgcctgggttgtgcaaggacccggaggagaaactaaaagagcccctgcggcttgcttctgcattccagccccagaccccgacgcagtggcccgagcaagcagactggctagcgagttgcaggctttgaagcagaaacttgccacagtgcagagtcgactgaaagccagtgccgtagagtcattacgcccatctcagcaggctccatccggctccgacctggccaacccacaagcccagaagttgctcactcaaatgactaggctggacggggaccttgggcagattgagaggcaggtcctggcctgggcgcgtgcacccctgtccagacccactccccttgaagacttggaaggcagaattcattcccacgagggcacagcccaaaggctgcaatctctgggcaccgaaaaggagactgctcagaaggaatgcgaagcttttctctcgacccgccctgtgggacccgcagccctgcagttgccagtggctctcaactccgtcaaaaacaaattttcagacgtacaagttctttgcagtctctacggagagaaggccaaagcagccctggaccttgaacgccaaattcaggacgctgaccgggtgattcgcggatttgaagcaacgcttgtgcaagaagccccaatccctgctgagccgggtgcactccaggagcgcgttagtgagcttcagcggcaaagacgggagctgcttgaacaacaaacctgtgtgttgcggctacatagagcgctgaaagcgtcagaacacgcctgtgctgcactccagaataactttcaggagttctgtcaggacctcccaagacagcagcgccaggtacgagcactgacggacaggtaccacgctgttggtgatcagttagatctacgggagaaggtagtccaagacgcagctctgacttatcaacagttcaaaaattgtaaagacaacttgtcaagttggttggagcacctgcccagaagccaggtcaggccgtcagatgggcctagtcaaatagcctataagcttcaggcccagaagagattgactcaggagatccagtcccgggaaagggaccgggctactgcctcacaccttagccaggcccttcaagccgctctgcaggattatgagctgcaggcggatacctatcgctgcagtcttgaacccacactcgccgtgtcggcccctaagcgcccacgcgtggcccctcttcaggagtcaatccaggctcaggagaaaaatctagccaaagcatacactgaggtggcagcggcacaacagcagctactgcagcagctggagtttgcacgaaagatgctggaaaagaaggagctgagcgaggacattcgtagaacccacgacgccaaacagggttctgaatctcccgcacaggcagggagggaaagtgaggccctgaaagctcagcttgaagaagagagaaaacgggtggcgagggtccaacatgaactggaggctcagcggagccagctgctgcagctgcgtacccaacgacccctggagagattagaggaaaaagaagtggtggaattttaccgggatcctcagctcgaagggtcgctgtcaagggtgaaagcacaagtggaggaagaaggaaaaagacgggctggactgcaggctgatctggaagtcgctgcccagaaggtcgtccagctggagtctaagagaaaaactatgcagccgcatctgctcacgaaggaggtcactcaggtggagagagacccaggactcgactcgcaggcagctcaattaaggattcagatccaacagctgagaggagaagacgctgtgataagcgctcggctcgaaggcctgaagaaggagctcctggcgctggagaaacgcgaagtagacgtcaaggaaaaggtggttgtcaaagaggtggtgaaagtcgaaaagaatctcgagatggtcaaagctgcgcaagctctgagactccagatggaagaggatgccgctagacgcaagcaagccgaagaggcagtggctaaattacaggcgagaattgaagacttagaaagagccattagctcggtcgaaccaaaagtcatcgtgaaagaggtaaaaaaggtggagcaggaccccggattactgcaagaatccagtcggttgaggagcctgcttgaagaggaaaggacaaagaatgccactttggcacgcgaactgtctgacctgcattcaaagtactctgtagtggagaagcagaggcctaaagtgcagttacaggagcgggtgcatgagattttccaggtggatcccgaaacggagcaagaaatcacaagactgaaagctaaattgcaggagatggccggaaagcggtccggcgttgagaaagaggtcgagaaactgcttcccgacctcgaggtgctgagggcccaaaagccaactgtggaatacaaagaagttacccaagaagtggttcgacatgagcggtcgccagaagtactcagggagatcgacagactgaaagcccagctcaatgagctggtcaattcacatggtcggtctcaggaacagctcattcgcctccagggggagcgggacgaatggagacgcgagcgagccaaggtagagaccaaaaccgtgagcaaggaagtggtgagacacgagaaggaccccgtgctggagaaggaagctgagcgcctgcggcaggaggttagagaggccgcacagaagaggagggccgcagaagatgcagtgtatgagctccagtcgaaaagactcctgctcgaacgccgaaaacctgaggagaaagtcgtggtccaggaagtagttgtaacccagaaggacccaaagttgcgagaggagcacagccgcctgtccgggtcgctggacgaggaagtgggtcggcgtcgccagttggagctggaggtgcagcagctccgcgctggtgtcgaagagcaagaaggactactgtctttccaggaggaccggtccaaaaaactggcagtcgaacgagaattacggcaattgaccctccgcattcaggaactggagaagaggccacctactgtgcaggaaaaaatcatcatggaggaggtcgtcaagctggaaaaagatccagatttggagaagtctacagaagcgctgcggtgggatttggaccaagaaaagacacaagtcacagagcttaaccgagagtgtaaaaatttgcaggtgcagatagatgtactgcaaaaggccaagtctcaggagaaaaccatatacaaggaggtgatcagggttcagaaggaccgggtcctggaggacgagagagcacgggtatgggagatgttgaatcgagaaagaactgctaggcaggcccgagaagaggaggcacgccgtttgagagagaggattgatcgggctgaaacacttggaaggacgtggtcgcgcgaggagagcgagctgcagagagcccgtgatcaggcagatcaggagtgtggcaggctgcagcaggagctacgtgccctggagagacagaaacagcagcaaactctgcaactgcaagaggagagcaagttgctcagtcagaaaacagaaagcgagagacagaaagcagcccagaggggtcaagagttgtcaaggctagaagcagcgattctgcgagaaaaggaccaaatatatgagaaggaaaggactcttagggatcttcatgctaaagtgtcacgagaggaactgagccaggaaacccagactcgcgagactaacctgagcacaaaaatatcaatactggagcccgaaaccggcaaagacatgtccccctacgaagcttataaacggggaatcattgaccggggtcagtacctgcaattacaggaactggaatgcgattgggaagaggtgaccacatcaggaccatgtggcgaagagtcagttctcttggatcggaagagcggcaagcagtattctatagaggctgccctgcgctgcaggcgaatcagtaaggaggagtaccatttatataaggacggccacttaccaatcagtgagtttgctttgttggtggccggagagacaaaacccagcagctccctctcaatcggaagcatcatctccaaaagtcccctcgccagccccgctcctcaatcaacctctttcttttcaccatcattctctttaggactaggtgacgacagtttccccatcgccggaatctacgacacaaccacagacaataagtgttcaattaagactgccgttgcaaaaaatatgctggaccccataaccggtcagaaattgctggaggctcaggctgccacgggaggcatagttgatttgctatctcgcgagaggtacagcgtccacaaggccatggagaggggtctgattgagaacacttctactcagcgattgctcaatgctcagaaggcattcaccggaatcgaggaccctgttactaagaagagactgtctgtcggcgaggctgtgcagaaggggtggatgcctcgcgaatcagtccttccccatctacaggtgcagcatctcactggagggcttatagatcctaagagaacaggtcgtattcctattcagcaggccctcctcagcggaatgatcagcgaggaactggcgcaattgctgcaggacgagtcctcatatgagaaggatctcaccgaccccatcagcaaggagcggctgtcatacaaagaggctatgggcaggtgtcgcaaagatccattgagtggcctgctcctgttaccagccgcattggaaggctatcgctgttaccggtcagcctcgccaaccgtaccacggtcgctgcggta

SEQ ID NO: 222053 - DNA, 2061 bp, synthetic construct
  misc_feature 1..2061: note = Description of Artificial Sequence: Synthetic coding sequence
  source 1..2061: mol_type = other DNA
atgcaactgggtgagcagctgctggtcagcagtgtgaacctccccggagcacacttttacccactcgagtcagcaagagggggtagcgggggttctgcaggtcatctgccatccgcggctccgtcacctcaaaaactcgacctcgataaggcctcaaagaagttctccggcagtctgtcttgcgaggcggtcagtggggagcccgcagccgcaagtgccggagcacccgctgctatgttgtccgatactgatgccggagatgctttcgcgagcgcggcagccgtggcgaagccaggaccacctgatggtagaaaggggtcaccttgcggcgaggaggagctacccagcgcagcggctgcagccgcagccgcagccgcagccgctgccgcaacagcgcgttactcgatggacagtttgtccagtgagagatactacctgcaatcacccggaccccaggggtctgagctcgccgcaccatgctcgctctttccgtaccaggcagcggcaggggcaccgcatggcccagtgtacccagccccaaatggcgcacgctacccctatggatctatgcttccgccaggaggctttccagcggctgtgtgtccccctgggagagcccagttcggtcctggggcaggtgccggatcaggtgccggaggatcttcaggcggagggggtgggccaggcacctaccagtacagccagggagctcctctctacggcccttatccaggcgcagccgctgccggatcgtgcgggggactgggcggtctcggcgtgcctggttccggcttcagagcccacgtctatctctgtaacaggcccctttggttaaagttccaccgacaccagactgagatgattatcacaaaacaaggacgtcgcatgttccctttcctgagctttaatattaacggactcaaccccactgcccattacaatgtgtttgtcgaggtggttttggccgaccctaaccactggaggttccaagggggaaaatgggtaacctgtggtaaggcagataacaatatgcaggggaacaaaatgtatgtgcacccggagagtcctaacactggatcccattggatgcggcaagagattagcttcggaaaactgaaactaactaataacaaaggtgccaacaacaacaacacgcagatgattgttcttcaatctctgcataagtaccagcccaggctccacattgtggaagtcactgaggatggagtagaggatctgaacgagcccagtaagacacagactttcactttctctgagactcagttcatagccgtcactgcctaccagaacacagacatcacacagctgaagatcgatcataatccattcgctaaaggcttccgcgataattatgattcctcacaccagatcgtgccagggggacgatacggggtgcaatccttctttcccgaacctttcgtcaataccctgcctcaagccagatactacaatggagagaggactgttccacagacaaacggacttctctcgccacaacagtccgaagaggttgcaaatccaccgcagcgctggctagttactcccgtgcagcaaccaggcacaaacaagttggatataagctcctatgagtcagagtatacgtcaagtaccctcctgccctatggcattaagagcctgcccctgcagacttcacacgccctgggctactatcctgaccctaccttcccggcaatggccggatggggtgggaggggatcataccaacgcaagatggcagcgggactcccttggacttccagaacaagcccgaccgtgttctctgaggaccagttgtctaaggaaaaggttaaggaggaaattgggtccagttggatagagacgccgccaagtatcaaatccttggactccaatgactccggcgtctacacatctgcgtgcaaaaggagacgattaagcccatcaaattcaagcaatgaaaattcccctagtatcaagtgtgaggatatcaatgcagaggaatattcaaaagacaccagcaaggggatgggaggatactatgctttttatactacaccctag

SEQ ID NO: 222054 - DNA, 2118 bp, synthetic construct
  misc_feature 1..2118: note = Description of Artificial Sequence: Synthetic coding sequence
  source 1..2118: mol_type = other DNA
atgcagctgggagagcagcttctggtgagtagtgtgaacctgccaggggctcacttctatcctctcgagagtgccagaggcggttccggcggttccgctggtcatctgccttccgctgcaccgagcccccagaaattggacctcgataaagcatctaaaaaatttagcggatcgctgagttgcgaggctgtctcgggggaacccgcagccgctagcgccggtgcccctgctgctatgctgtccgatacggatgctggcgatgcctttgccagtgcagctgccgtggctaagccagggccacctgatggcagaaagggtagtccatgcggcgaggaggagttgcctagcgccgctgcggcagccgcagcagcagcggctgctgctgccgctactgctagatactctatggatagcctcagcagtgagcgatattacctccagtcccctggtccccagggttccgagctggcagccccttgttctcttttcccttaccaggccgcagccggagcacctcacggtccagtttaccccgcaccaaatggcgctaggtacccatacggatcaatgttgccccctggcggtttcccagccgctgtttgtcctcccggtcgtgcacaatttggcccaggcgcaggtgctggctccggagctgggggatcctcaggaggaggcggaggcccaggaacgtaccaatattcccagggcgctcccctctacggtccctacccaggcgctgcggcagcaggcagctgcggtggcttgggcggattgggggtgccaggttccgggttcagagctcacgtgtacctgtgtaaccgccctctgtggttgaaattccatcggcaccaaaccgagatgattatcactaaacagggcaggcgcatgttcccttttttgagctttaatattaacgggctgaaccccaccgcacactacaacgtgttcgtggaagtggtactggccgatcccaaccattggcggttccagggaggcaagtgggtgacttgtgggaaagccgacaataacatgcaaggcaataagatgtacgtgcaccccgaatcaccaaatactgggtctcactggatgcgccaagagatttccttcggcaaactgaagttgacaaacaacaagggtgctaacaataacaacacccaaatgatcgttctgcagtccctgcacaaataccagcctcgactgcatattgttgaggtgactgaagatggcgttgaggatttaaacgaaccaagcaagacacagacattcacgttctccgaaacacaattcatagccgtcacagcttatcagaacacagacattacacagcttaaaattgaccataatccctttgccaagggattcagggacaattacgacagtatgtacaccgcctcagagaatgacagactgaccccatcccctacagactcccctcgatcccatcagatagttcccggtggtcgctatggcgtgcagtcgttcttccccgaaccgtttgttaacactcttccacaagccagatactataacggagaacggacggttccacaaaccaacgggctactgtcaccgcaacaaagtgaggaggttgccaacccgcctcagcgatggcttgttacacctgtacagcagccaggcaccaacaaattggacatttcaagctatgaatctgagtatacgagtagtactctgctgccatatgggattaagtcattgcccctgcagacctctcacgccctcggatactatccagatccaactttcccagctatggcgggatggggtggacgcggatcatatcagcggaagatggcagctggattaccatggacatctagaacaagcccaaccgtgttctctgaggaccagttgagtaaggagaaagtaaaggaggagatcggaagtagttggatagaaacccccccatccattaagagtctggacagcaatgatagcggggtctacacatccgcctgtaaacggagaaggttgtcaccatcaaattcatcgaacgagaactcccctagcattaagtgtgaggatataaatgccgaggaatatagcaaagatacatcaaaaggaatggggggatattacgccttctacacaaccccttag

SEQ ID NO: 222055 - DNA, 1713 bp, synthetic construct
  misc_feature 1..1713: note = Description of Artificial Sequence: Synthetic coding sequence
  source 1..1713: mol_type = other DNA
atggatagcctaagctcagaacgctactacctccagtcccccggaccacagggcagtgagctggcagccccttgttccctgttcccataccaggccgcagcaggggcaccccacggtccagtctatcccgctcccaatggagcaaggtatccatatggcagcatgctgcctccagggggattccccgcagccgtctgtccccctggccgagcccaattcggcccaggcgctggtgcagggtcaggcgctgggggatctagcgggggaggaggagggcctggcacatatcaatatagtcagggcgctcccttatatgggccttatccaggcgctgccgcagctggaagctgcggcggattgggcggattaggggtacctggctccggtttccgggctcacgtgtatctgtgcaatagaccattatggttgaagttccatcgccaccaaactgaaatgatcatcacaaaacagggtaggagaatgttcccctttctgtcttttaatatcaacgggctgaatcctacggctcactataacgtcttcgtagaggtagtgttagctgaccctaatcattggcgcttccagggcggtaaatgggtcacatgcgggaaggctgacaataacatgcaaggtaacaaaatgtacgtgcacccagagtctccaaacaccgggagccactggatgcgtcaggagatctcattcggcaagctcaagttgaccaacaataaaggggctaataacaacaacacacaaatgatcgtgctgcagagcttgcataaataccagccaagactccacatcgtggaggtaaccgaagacggagtggaagacctcaatgagcccagtaagacccagacattcacattctcggagactcagttcattgccgttaccgcgtatcaaaacacagacatcacacagcttaaaatagatcacaaccctttcgcaaagggattccgggacaattatgacagtatgtatacagcatcagaaaacgaccggctaacaccaagtcctacagatagccctcggtcacatcagattgtgccaggcggacgctacggcgtccagagcttcttccccgagccatttgtcaatacacttccacaggctagatactataacggtgaaagaactgttcctcaaaccaacggcttgctttccccgcaacagtccgaagaagtggcaaacccccctcaacggtggctggtgaccccagtgcagcaacctggcaccaataaactggacatctccagctacgagtccgaatatacctcttcaacacttctgccctacggaattaagagcctgcctttgcagacatcgcatgccctgggatactaccccgacccaacctttcccgctatggccggatggggtggacggggttcctatcagcgcaagatggcggctgggctcccttggacctctcggacaagtcccaccgtcttttccgaggaccagctaagcaaggaaaaggtgaaagaggagatcgggagcagctggattgagacacctccgtccattaaatcgttggattccaatgattctggcgtctacacttccgcgtgtaaacgcagacgtctctccccttccaactcttccaacgagaatagcccttcgattaagtgtgaggatattaatgcagaagaatacagcaaagacacttcaaagggcatgggcggttactatgccttttacaccaccccttag

SEQ ID NO: 222056 - DNA, 1233 bp, synthetic construct
  misc_feature 1..1233: note = Description of Artificial Sequence: Synthetic coding sequence
  source 1..1233: mol_type = other DNA
atgtttccatttctgtcttttaacattaatgggctcaaccccactgcccattacaatgtctttgtcgaagtcgttctggccgaccccaaccactggagatttcaagggggaaagtgggtcacatgtggcaaggcggataacaatatgcagggcaataaaatgtatgtccacccagagagtccgaatacaggatctcattggatgcgacaggagatctctttcggcaaactcaaacttaccaacaataagggcgctaataataataacacgcagatgatcgtactgcagtccctgcataagtatcaacctagactgcatatcgtggaagtgaccgaggatggagtggaggatctgaatgagccatctaagacgcagaccttcacatttagcgaaacccagttcatcgctgtgactgcttatcagaacacagacatcactcagctgaaaattgaccacaatccgttcgccaaggggttccgcgataactacgactcaatgtataccgcctccgagaatgatcgtctcaccccatccccgaccgactcgcctaggtctcaccagattgtaccaggcggtaggtatggtgtccagtcatttttcccagaaccgtttgtgaataccctcccacaggccaggtattacaatggcgaaaggaccgttccccagacaaatgggcttctttctccgcagcagagtgaagaagtcgctaatccccctcagagatggctggtgacccccgttcaacagccgggtaccaataaactggacattagcagctacgagagtgagtacactagcagcaccctactcccttacggaattaaatcattaccacttcagacctcacacgcactagggtattacccagacccgaccttcccagcaatggccggatggggagggagggggagctatcaacgcaaaatggctgcaggcctgccatggacaagtagaacatcacccacagttttttctgaggatcagctcagcaaggagaaagtcaaagaagagatcggctctagctggatcgaaaccccaccatcaatcaaatctttagactccaatgattccggggtatatacctcagcctgtaagagacggaggttgagcccctcaaacagctccaatgagaattctcccagcattaaatgtgaagacatcaacgcagaggagtattcaaaagacaccagcaagggtatgggtggatactacgcattctataccactccctag

SEQ ID NO: 222057 - DNA, 1269 bp, synthetic construct
  misc_feature 1..1269: note = Description of Artificial Sequence: Synthetic coding sequence
  source 1..1269: mol_type = other DNA
atgggacaagccggatgcaaaggcctatgtctgtccttgttcgactacaaaacagaaaaatacgtgattgccaagaacaaaaaagtgggcctgctgtaccggctcctgcaggcctcaatccttgcgtatctggtcgtctgggtgttcctgatcaaaaagggatatcaggatgtggatacttccctgcagagcgctgtgatcacgaaagtgaaaggcgtggcatttacaaacacttccgacttagggcagaggatttgggacgtggcagactatgtcatccctgcacagggcgaaaacgtatttttcgtcgtaactaatcttatcgtgacacccaatcaacgtcagaatgtttgcgcggaaaatgagggcattcccgatggggcatgctccaaggactctgactgccatgctggcgaagccgttaccgccggtaatggagttaagaccggcaggtgtctgaggagggagaatctggcaagaggtacctgcgagatctttgcctggtgcccgctggagacatcttcccggccagaagaaccattcttgaaggaagccgaggatttcacaatatttatcaagaaccatattcggtttcctaagttcaattttagcaagagcaacgtgatggatgtcaaggacaggagttttttaaagtcctgtcactttgggcctaagaatcattactgcccgatctttcggctcggctctgtgatcaggtgggcgggttccgatttccaggacattgccttggagggaggtgtgattggtatcaatatcgagtggaactgcgatctggacaaggctgcaagcgagtgccacccacactatagtttcagtcggctggataataaattgtcgaagagcgtgtcctctgggtataatttccgcttcgccaggtattacagggatgccgctggcgtggagttcagaacgctcatgaaggcttatggcattcggttcgacgtgatggtcaatgggaagggcgctttcttttgcgacttagtcctgatttacttgataaaaaaacgcgaattttacagagataagaagtacgaggaggtacgcggtctggaggattctagccaggaggctgaggacgaggccagtggtttggggttgagtgagcagttgactagtggcccagggttactcggcatgcctgaacagcaggaacttcaggagcctccagaggccaagcgtggctccagtagccagaagggtaatggatccgtgtgtcctcagctgctagagccacaccgatcaacctag

SEQ ID NO: 222058 - DNA, 564 bp, synthetic construct
  misc_feature 1..564: note = Description of Artificial Sequence: Synthetic coding sequence
  source 1..564: mol_type = other DNA
atgagcgaaatggccgagctgtccgaattatacgaggagtctagcgacctgcaaatggacgtgatgcccggagagggagacttgccacagatggaagtgggctccgggagccgagaattatcactccggccaagcagatccggagcccagcagctggaggaagaagggcctatggaagaagaggaggcgcagccaatggcagccccagaggggaaacggtcgctagctaacggcccaaacgcaggtgaacaaccagggcaggtggcgggagcagactttgaaagtgaagacgaaggagaagagtttgatgactgggaagacgattatgattaccctgaagaagaacagctgtccggggctggttatagagtgtccgcggcactcgaggaggccgacaaaatgttcttgcgtactcgcgaacctgccctcgacggagggtttcagatgcattacgaaaagactccctttgatcagctcgcgttcatcgaggaactgtttagtctgatggttgttaaccgcctgaccgaggagctcggctgtgatgagataattgatcgggagtag

SEQ ID NO: 222059 - DNA, 711 bp, synthetic construct
  misc_feature 1..711: note = Description of Artificial Sequence: Synthetic coding sequence
  source 1..711: mol_type = other DNA
atgtcaaagctacccgctgatagctccgttccccagacgggggcagcgaacggggatcgggacgtcccacaggctgaggtgggcaggggaaggagagagcccgcacctgcccaaccagaagaggcaggagagggcgcaatggccgctgccagaggtggccctgttcctgcggctcgcgaggggagaatggctgcggctagggccgcacccgcagccgcagcccgaggggctcccgtggctgcagcagcactggccagagctgccgctgcgggaagggaaagcccagcagccgctgctgccagggaggccagaatggcagaagttgcgaggctgctaggcgaaccagtggatgaggagggaccagagggaaggcctagatcccgacacggtaatggcggattggccgctctgccatatcttaggctgcggcatccactctccgtcctggggataaattatcagcagttcctcaggcactacttggagaactacccaatagcccctggtcgaattcaggaactggaggaaaggcgtaggaggttcgtcgaggcatgcagagccagagaggccgcattcgacgcggagtatcagcgaaatccgcaccgcgttgacttagacatcctcactttcacaatcgctctcacggcgagtgaggtcataaaccctctcatcgaagagctaggatgcgacaagtttattaaccgcgagtag

SEQ ID NO: 222060 - DNA, 564 bp, synthetic construct
  misc_feature 1..564: note = Description of Artificial Sequence: Synthetic coding sequence
  source 1..564: mol_type = other DNA
atgtccaaactgcctgccgattcctccgtgccccaaaccggcgctgcaaacggggaccgagatgttccacaagcagaggtgggcagaggcagacgagagccagctccagcccagcctgaagaagcaggggagagccccgctgcagctgctgctagggaggcacgaatggcagaggtggctaggctccttggtgagcccgtagacgaggaagggcctgaaggccgacctcggtcccgacatggaaacgggggtctggctgctcttccctacctgaggctgaggcacccactgtcagtgcttggcatcaattatcagcaattccttagacactacctggagaactacccaatcgctcccggaaggattcaagagctggaggaacgacgacggaggttcgtggaggcctgtagagcacgagaagccgctttcgacgcagagtaccagcggaacccacaccgagtagatctggacattctgaccttcacaatagccctcactgctagcgaagtcataaatccgctgatcgaggagttgggctgtgataaattcattaacagggaatag

SEQ ID NO: 222061 - DNA, 1002 bp, synthetic construct
  misc_feature 1..1002: note = Description of Artificial Sequence: Synthetic coding sequence
  source 1..1002: mol_type = other DNA
atgaaaatggatgtaagcgtcagggctgctggttgtagtgatgacctcagctcaggcgaggctgatgtggacccgaagttgctcgaactaaccgctgatgaagagaaatgcagaagcatcagaagacagtatcgacagctgatgtactgtgtgcgacagaaccgtgaggacatcgtgtcctcggccaacaactctctcacggaggctctcgaagaagccaacgtcctatttgatggggtgtcacgtactagggaggctgccctggatgcaaggttcttggtaatggcaagcgatttgggaaaagagaaggccaaacagctgaactctgacatgaacttcttcaatcagttagccttttgcgacttcttgtttctctttgtgggtttaaattggatggagggagacccggacaaactctcagattgcgacgattctattgccctgtcgttctggaaggccattgagaaagaagctaccagttggatggtgaaggccgagacctttcatttcgtgtttggctccttcaaactcgaaagatcagcaccgaaaccaagactcgagcaccagaaaaaggtgcgaaagatggaggagaatggaaacatgcccaccaaattgcagaagttagatctgtcatcatacccggaggctaccgagaagaatgttgaacgcattctgggcctactgcagacatacttccgcaagtatccggatacgcccgtgtcctattttgagttcgtcattgacccaaactccttttccagaacagtggagaatattttctatgtttcattcattgtccgcgacggattcgcgagaatcaggctggatgaggaccgcctcccaattctcgaaccaatgaacgtgaaccagatgggtgagggcaacgactcctcttgtcacggcagaaagcagggcgtcatttcccttaccctacaagaatggaaaaatatcgtcgctgcatttgagattagcgaagcaatgatcacgtactcgtcttactag

SEQ ID NO: 222062 - DNA, 2931 bp, synthetic construct
  misc_feature 1..2931: note = Description of Artificial Sequence: Synthetic coding sequence
  source 1..2931: mol_type = other DNA
atggagcgtcgatggcctctagggctcggactggtcttgctcctgtgcgcaccattgccacccggtgcacgagcgaaggaagttaccttgatggacacctctaaggctcaaggtgagttgggctggctcctagatcctccaaaggacggatggtctgagcagcaacaaattctcaacgggactccactatacatgtaccaggattgtccaatgcaaggcaggcgcgacacagatcactggcttcggtctaactggatttaccggggagaagaggcatcccgcgtgcacgtggagcttcagttcacagttagggattgcaagtctttccccggtggggctggcccacttggatgcaaggaaacctttaatcttctgtatatggagagcgatcaagatgtgggcatccaactgcgtcgtccgctgtttcagaaggtcaccaccgtggcggctgaccagtcttttacaatccgagacttagtgagcggctccgtcaagcttaatgtggaaagatgctccctgggtaggctgaccagacggggactttatttagccttccataaccctggcgcttgtgtcgccctcgtatctgtgcgtgtgttttaccagaggtgcccagaaacattgaacggcctggcacaattcccagacactcttcctggaccagcgggtttagtggaagtcgccggtacctgcctgccgcatgcgagggccagcccacgcccttccggcgcaccacggatgcactgtagtcccgacggagagtggctcgtgccagtcgggagatgtcattgcgagcccggatacgaggaaggcggatcaggcgaagcttgtgtcgcctgtcccagcgggtcctacagaatggacatggacaccccacattgcctcacctgtcctcagcaatccacagccgagtcggagggggctacaatctgcacctgcgagagtgggcattacagagcacctggggaaggccctcaggtggcgtgtacaggtccaccaagcgcccctcggaatcttagtttcagtgctagcggtacccagttgtccctgcgctgggaaccccctgctgacaccggcggaaggcaggacgtcagatatagtgtcagatgttctcagtgccaaggaactgctcaggatggcggaccttgccagccctgcggtgtgggggttcacttctcacccggagccagaggcctgacaacacctgctgttcacgtgaacggtcttgaaccctacgcaaattatacctttaatgttgaagcccaaaatggtgtctctggcctgggttcatctggacacgcttctacatctgtctccatctctatgggtcacgccgagagcctgtcgggattgtcactgcggctggtgaagaaagagccgaggcagctggaactgacctgggctggcagccggccaaggtccccaggggcaaaccttacctacgagttgcacgtcttaaaccaagatgaagaacgctaccagatggtactggagcccagggtgctgctgacagaactgcagcccgacactacctacatcgtacgggtacggatgcttactccgttgggtcccggacctttcagccctgatcatgaattccgcacatctccacctgtgtctagagggctcactggcggagaaattgtggcagttatctttggtttgctcctcggtgcagccctactcctaggtatccttgtgttcagatcccgacgggctcagcgccagcggcaacagagacagcgtgacagagcaactgacgtcgaccgagaagacaagttgtggctgaagccttatgtggacttgcaggcttatgaggacccagcacagggtgcactggatttcacccgagagcttgaccctgcttggctgatggtcgatacagtgattggcgagggagagttcggggaagtgtatcgagggaccctcaggctcccttctcaggactgcaaaaccgtggcaatcaagacactcaaagacactagtcccggaggacagtggtggaacttcctgagagaagcaaccataatggggcagttttctcatcctcacattctacatttagagggtgtagtcacgaaacgcaagccaataatgataatcaccgagttcatggaaaacggcgcactggatgcgttcctgagagagagggaagatcagctcgttcccggacagctggtggctatgctgcagggcatcgctagcggtatgaactacttgtctaatcacaattacgtgcacagggacctagccgcacggaatatactcgtaaatcagaacctttgttgcaaagtcagtgatttcggcctgacacgcctgctggatgactttgacgggacttatgagactcagggtggaaagattccaatacgctggacagcccctgaggccatcgcccacagaatctttacaactgcctcagatgtctggagcttcggcatcgtaatgtgggaggtgctctctttcggcgacaaaccttacggagaaatgtccaatcaggaagttatgaagtcaatcgaggatggttatcggttgcccccacccgtcgactgtcctgcccctctgtacgagctgatgaaaaactgttgggcctatgaccgagcacgacgtccccacttccagaaactccaggcccatctcgaacaattgcttgccaatcctcatagcctccgcaccatcgctaattttgacccaaggatgactttaagactcccaagcctgtccggcagcgatggcatcccttacagaaccgtgagcgagtggctcgaatctatccgaatgaagcgctatattctgcacttccacagtgccggtttggatactatggaatgtgtgcttgaactgacagctgaggatctgacacagatgggcatcaccctaccgggacatcaaaagaggatcctctgcagcatccagggattcaaggactag

SEQ ID NO: 222063 - DNA, 888 bp, synthetic construct
  misc_feature 1..888: note = Description of Artificial Sequence: Synthetic coding sequence
  source 1..888: mol_type = other DNA
atggaaacttgtgccggacctcatccactcagattgttcttgtgtagaatgcagctttgtctcgccctattgctaggcccttggcggccaggtaccgccgaagaggtgatcctcctcgacagcaaggcaagccaggctgagctgggctggactgctctgccttccaatgggtgggaggagatctccggcgtagatgagcacgataggcctattcgcacttaccaagtgtgcaacgtgctggagccgaaccaggataactggcttcaaactgggtggatcagtcgcggaagggggcagcgaatcttcgtggaactacaattcaccctcagggattgtagctctatcccaggagctgcaggtacctgtaaggagacctttaacgtatactacctggagaccgaggctgacctggggcgtggacggcctcgtctgggaggatctaggccacgaaaaattgacacgattgctgcggatgagagtttcacacaaggtgatcttggcgaaagaaaaatgaagctcaataccgaggtgcgtgaaataggcccactttctagaagaggctttcatctggccttccaggatgtgggcgcttgcgtggcattggtgtcggtcagggtatattataaacagtgtcgggctactgtgagggggctggccacgttcccagctactgccgcagagagcgcattttctactctggtcgaggtcgctggtacatgcgtcgcccacagcgagggagagccaggctctcccccacgcatgcattgtggggcagacggggaatggctggtgcccgtcggacggtgtagctgcagtgcaggcttccaggagcggggtgatttctgcgaaggcattcaactggccggaggacgtggcgtcggagtgtag

SEQ ID NO: 222064 - DNA, 1632 bp, synthetic construct
  misc_feature 1..1632: note = Description of Artificial Sequence: Synthetic coding sequence
  source 1..1632: mol_type = other DNA
atggtcaagacaggtgccccaaccgttacagtgacaaatcttaagcccgctactcggtacgtcttccagatccgggcagcctctcctggtcccagttgggaagcccagagtttcaatccatccatcgaggtgcaaactctgggcgaggccgcaagtggctcgcgcgaccagagccctgctattgtggttacagtcgtgaccatttcagccctcctggtcctcggatctgttatgagcgtgctggctatctggcgcaggccatgtagttatggaaagggtggcggagatgcccatgatgaagaagaactgtattttcacttcaaggtgccaaccagacgtacctttttagaccctcagagctgcggagacctgctccaggccgtgcatctgtttgcaaaggagctagatgcaaagtccgtgacattagaacgctccctgggtggcggaaggtttggcgagctttgctgcggatgtctccagcttccaggcaggcaggagcttttggttgccgttcatatgctccgggattcagcctcagatagccagaggttgggtttcctggccgaggcactaaccctgggacaattcgatcattcccatatcgtgaggctggagggcgttgtgactcgcggttcgaccctgatgatcgtaacagagtacatgagtcacggtgcactggatggatttctcagacgtcacgagggtcagttagtggctggtcaactgatgggcctgctcccaggactcgcatctgccatgaagtacttgtccgaaatgggatatgtgcacagaggcctggccgcacgtcacgtgcttgtcagcagcgacctggtgtgcaaaatatcagggtttggtagaggtcctcgggacaggtccgaggccgtttataccaccatgtccgggcgtagccccgcactttgggccgctcctgaaacgctgcagtttggccatttcagctctgcttcggacgtgtggagttttgggataatcatgtgggaggtgatggcctttggggagaggccatattgggatatgtctgggcaggacgttatcaaggccgtggaagatggatttcgcctgcctccacccagaaactgccccaatctgctacataggctcatgttagactgctggcagaaggatccgggagagagacctagattctcccagattcacagtattttgtctaagatggtccaggatccagaacccccaaaatgtgctctgactacttgcccacggcctcccacccccctagcggatcgtgcttttagtacctttccctcctttgggtctgtcggagcttggttagaagcactggatctgtgtcgctataaggacagctttgccgctgcaggctatggctcactggaggcagtcgcagaaatgactgctcaggacttggtatcgttgggtatctctctggccgagcatcgggaggctctcctgagcggcattagcgctctgcaggcccgagtactgcagctccagggacagggagtgcaagataataaaaaccttagcgtgatatggtgcctgtttgagtggcagcttctggatcactgcatagcaggcgttgaaggcttgctgccaccttcatccagaaccggagtgtcccgcatttgcgtgtag

SEQ ID NO: 222065 - DNA, 3027 bp, synthetic construct
  misc_feature 1..3027: note = Description of Artificial Sequence: Synthetic coding sequence
  source 1..3027: mol_type = other DNA
atggagacatgcgctggccctcacccactgcggctgttcctttgtcggatgcaactgtgtttggcgcttctcctgggcccatggagaccagggacagcagaggaggtgatcctgttagattccaaggcttcacaggccgagttgggttggactgcattgcccagtaatggatgggaagagatttcaggcgtggatgagcatgatcggccaatacggacatatcaggtctgtaacgtcttggagccaaaccaggataactggttgcagacaggatggattagccggggaaggggccagaggattttcgtggaactgcagttcacactcagagattgttcttccatccccggagctgcaggcacgtgcaaggagactttcaatgtgtactaccttgaaacagaagccgacctggggaggggccgacctagactggggggatctagacctcgaaagattgacaccatagccgctgatgagagtttcactcagggggacttaggtgaacgcaaaatgaaactgaatacggaggttagggaaattggtcctctttctcggaggggtttccacctcgcttttcaggacgttggagcgtgtgtggcattagtgagcgtgcgcgtatactataagcagtgccgtgccactgtcaggggactggccactttccccgcaactgctgctgaaagtgccttcagtactctagtggaagtggctgggacatgcgttgcacattctgagggggaacccggatctcctccccgaatgcactgtggcgcagacggcgaatggctagtccctgtgggacgctgctcttgcagcgcaggatttcaggagcgaggcgacttctgcgaagcctgccctcctggtttctacaaggtttctccgagacgcccactctgtagcccttgtcccgagcatagcagggcactcgagaacgctagtaccttctgtgtctgtcaagacagctatgctcggtcgcctacagacccaccttctgcctcctgcactcgacctccatccgccccacgtgatctgcagtactctctcagccgatcccccctggttctgagactgagatggctgccacctgcggacagtgggggtcgcagcgacgtgacttattcgctgctctgtctgcgttgcggcagggagggccctgccggagcttgcgaaccttgcggacctagggtggcctttctgcctcggcaggctgggttacgggagagggctgccaccctgctgcacttgaggccaggtgccaggtatacagtgcgggtggcagccttaaacggcgtgagtggaccagccgctgccgctggcactacttacgcgcaggtcaccgtttccaccgggcctggggcaccgtgggaggaagacgaaatcagaagggatcgcgtggagccacagagcgtatctctgtcatggagggaaccgattcctgcaggagcaccaggggcaaatgacacagagtatgagattaggtactacgaaaaaggccagagcgaacagacatactctatggtcaagacgggcgctcctacagtcacagtgaccaacctgaaacccgctacaagatatgtctttcagattagggcagcaagcccagggccttcatgggaggctcagtctttcaatccatccattgaagtacagacattgggtgaggctgcctctgggtctcgcgatcagagtcccgcaattgtagtgaccgtggtcacgatctctgcactgctcgtgctggggagtgtgatgtcagtgttggcaatttggcggcgaccttgctcttacgggaagggtggtggcgacgctcacgatgaagaggagctgtactttcattttaaggtccctacccgcagaacttttctcgatccacagagctgtggcgatctgctgcaggcagtccatttgtttgctaaagaactggacgcgaaaagcgtcactctggaacgttcattaggtggcggaaggtttggagagctttgttgcggctgcctgcagcttcctggacgccaagaactgctagtggcggtccacatgttacgggacagcgcctcagactctcaacgcctggggtttcttgcagaagctctgaccttagggcagttcgaccacagccacattgtgcggctggagggggtggttactcggggaagcacgctcatgatagtgactgagtatatgagccacggtgcacttgatggcttcttacgacggcatgaggggcagctggtggctggccaacttatgggcctgctgcccggtctggccagcgccatgaagtatttgtctgaaatgggatatgtgcacagaggcctggcagcccgacatgtcttagtcagttctgatttagtgtgcaaaatcagcgggttcgggagaggcccaagggaccgctcagaggctgtttatactaccatgtccggcaggagccctgctttatgggccgctcctgaaacgctgcagtttggccacttttctagcgcctcagacgtgtggagtttcggtattatcatgtgggaagtgatggcatttggagaacgcccttactgggacatgtccggccaggacgtgattaaagccgtcgaggatggttttcgcctcccacctcccaggaattgtcctaatctgctccacagattgatgctggattgctggcagaaagatcccggagaaagacctcgcttcagccagatccatagcatcctgtctaaaatggtgcaggaccctgaacctcctaaatgcgctctgactacatgccccagaccccctacgcccctggccgatcgtgccttttcgaccttccccagtttcggtagtgttggagcatggcttgaagccctcgatttatgtcgttataaggattcttttgcagctgccggatatggctcattggaggccgtggctgagatgacggctcaggatctggtatccctgggcatctccttagcggagcacagagaggccctcttgtccggtatcagcgcattacaggctcgcgtgctgcagcttcaaggccagggcgtacaagtgtag

SEQ ID NO: 222066 - DNA, 3045 bp, synthetic construct
  misc_feature 1..3045: note = Description of Artificial Sequence: Synthetic coding sequence
  source 1..3045: mol_type = other DNA
atggagacctgcgctggtcctcatccacttcgcctgtttttgtgtaggatgcagctgtgccttgcactactcctgggcccatggagacctgggacagccgaggaggttatcctcctggactccaaggcttctcaggccgaacttggctggaccgctctgccatcaaacggatgggaagaaatatccggcgttgatgaacacgacagaccgattcgcacttaccaagtatgtaatgtgctggaacctaaccaggataactggctgcagaccggttggattagccgcggtcgcggtcagagaatatttgtggagttgcaattcacgctgcgggactgttcatctattcccggagctgccggaacctgtaaagaaaccttcaatgtgtactacctggagactgaagcagatctgggcagaggaagaccacgactggggggaagccgtcccaggaaaattgatactatcgctgccgacgagtcttttactcagggcgatttgggtgaaagaaagatgaaactcaacaccgaggtccgagagattggacctttatctaggaggggtttccacctcgctttccaagacgtgggggcttgcgtcgcgctcgtatctgtgcgcgtgtattataagcaatgcagggctacagtgagaggcctggccacctttccggcaacagctgcagagtctgctttcagcaccctcgtcgaggtggctggcacctgtgtcgctcactcagagggggagcccggaagtcctcccaggatgcattgtggggctgatggggagtggctcgtgccagtgggccgttgtagctgctctgcaggtttccaggagagaggtgatttctgcgaagcatgccccccaggattctataaagtgtctcccaggcgtccactttgcagcccatgtccagagcatagtagggctctcgaaaatgccagcactttttgtgtgtgtcaggattcatatgctcggtctcctactgaccccccaagcgcaagttgcaccagacctccctctgcccctcgcgatctgcaatattccttatcaaggtctccactcgtgctgaggctgagatggctcccacccgcagacagtgggggacgttctgacgtaacttactctctactgtgtctaagatgtggcagagaggggcctgcaggcgcttgcgagccctgtgggcctcgagtagcttttctgcccagacaggcgggtcttcgagagagggccgcaaccctgctgcatcttagacctggcgcacgttatactgttcgcgtcgccgctttaaacggagtctccgggccagccgcagctgccggaaccacctacgcccaggttacggtctccacaggccctggcgctccgtgggaagaagacgagatccgacgtgacagagttgaaccacaatccgtgtcactgagttggagagaacccattcccgctggggctccaggcgctaatgacacagaatacgaaattcgctattatgaaaaaggccagagtgagcagacttattcaatggttaagaccggggctcctactgtcaccgtgacaaatcttaaacccgctacccggtacgtctttcagatccgtgctgcaagccctggcccatcatgggaggcgcagagttttaacccctcaattgaggtacagacgcttggagaggccgcaagtgggtcacgggatcagtcccctgctattgttgtgactgtggtaacaataagcgcgttgttggtactgggctccgtcatgagcgtcttagccatctggagacggccatgcagttacggcaagggtggcggagacgcccacgatgaggaagaactgtactttcattttaaggtcccgacccgccgaactttcttggaccctcagtcatgcggcgacctgctacaagcagttcatctgttcgcaaaggagctagacgccaagagcgttaccctcgagaggtccctcgggggaggcaggttcggggagttgtgctgtggatgcctgcagttgcctggccgacaggagctcctcgtggcagtccatatgctgcgcgactctgcttccgattcccaacgactcggattcctggcagaggctctgacactgggccaatttgaccactcccacatcgttcggctggaaggtgtggtcacaaggggaagcacactcatgatagtgacagaatatatgagtcacggggctctcgatgggttcctgcgcaggcatgaaggtcagcttgtggccggacaactgatggggttattacctggtctcgccagcgctatgaagtatctgtcagagatggggtatgtgcaccgcggactcgctgcccgacatgtccttgtgtcgtctgacctagtctgtaaaatcagcggctttggtcggggacccagggatagaagcgaggcggtgtatactaccatgagcggtaggtctcctgcgctgtgggccgctcccgaaacccttcagttcgggcactttagctccgcttccgatgtgtggagctttggaattattatgtgggaggtgatggcttttggcgagagaccctattgggatatgtcaggtcaggacgtgattaaagcagtcgaagatgggtttcgactgccccctcctcgaaactgcccaaatctcctgcacagactgatgctggattgttggcaaaaagatcctggagaacgcccaaggtttagccaaatacattccattttatccaagatggtccaagatccagaaccccctaagtgtgcactgactacttgtccaaggccgccaacccctttagccgaccgagctttttcaactttccccagctttggaagcgttggggcatggctagaggccctggacttgtgccggtataaggatagttttgcagccgctggctacggttcattggaggctgttgctgaaatgaccgcccaagatctcgtgtccctgggaatcagtttggcagagcacagagaggcattgctaagcggtatcagcgcattgcaggcgagagtgctgcaactgcaaggacagggtgtccaggtcattataaaaacatgcctttag

SEQ ID NO: 222067 - DNA, 468 bp, synthetic construct
  misc_feature 1..468: note = Description of Artificial Sequence: Synthetic coding sequence
  source 1..468: mol_type = other DNA
atggtgaaaacaggggcaccgacggtgactgtgaccaatctgaagcctgccactcggtatgtgtttcagatccgcgctgcctcccccggtccctcatgggaggctcagtcttttaacccgagtatagaggttcagactttaggcgaagcagcatctggcagtcgggaccagtccccggctattgtggtgactgtcgtgacgataagtgcactattagtgcttggatcagtgatgtcggtactggcaatatggcggcgaccgtgttcctacggaaaaggaggtggcgacgcccacgacgaagaggagctgtactttcacttcaaggtcccgacacgccgaacctttttagatccccaatcttgtggcgatcttttacaggctgtgcatctctttgcaaaggaacttgacgccaagtccgtgacattggaacggtctctcggaggcggtcttgaaacatccccccactag

SEQ ID NO: 222068 - DNA, 2931 bp, synthetic construct
  misc_feature 1..2931: note = Description of Artificial Sequence: Synthetic coding sequence
  source 1..2931: mol_type = other DNA
atggagctacaggccgcacgggcatgtttcgcactattgtggggatgcgccttggccgcagcagctgcagctcagggtaaagaggtcgtgctactggatttcgccgcagccggaggtgaactcggctggctcacacatccatatggcaaaggttgggatttgatgcagaacataatgaacgatatgcctatttatatgtattcagtgtgtaacgtaatgtcaggagaccaggataactggctaagaactaactgggtgtatcggggtgaagccgaaaggatcttcatcgagctgaagtttaccgtgcgtgactgtaatagttttcctggcggtgcaagttcatgtaaagaaaccttcaatctgtattatgcggagtctgacctagactatggtaccaacttccagaagagactgttcaccaaaatagatactatcgcgcctgacgaaatcaccgtatccagcgattttgaggcacggcacgtcaagttaaacgtcgaggaacgttctgtgggaccacttaccaggaagggcttttacttggctttccaggacattggagcttgtgtggcccttctgtctgttcgcgtgtactataagaaatgccccgagttgctccagggcctggcccactttcctgagacaatcgcgggatccgatgctccttccctggcaaccgtcgcagggacgtgtgtggaccacgctgtggtgccgcctggtggagaggaaccaaggatgcactgtgccgtcgatggagagtggctcgtgcctattggccagtgtctgtgtcaagccggttacgaaaaagtcgaggacgcttgccaggcttgttctcctggcttctttaagttcgaagcaagcgagtctccctgcttggagtgccccgagcataccctcccatctcccgagggagcaacatcatgcgagtgcgaggaagggttctttagagcccctcaggaccccgcatccatgccttgtacgcgacctccttctgcccctcactatttgacagcagtgggcatgggtgctaaagtggagctccgatggactccaccccaggacagtggaggcagggaagatattgtctattccgttacctgcgagcagtgctggccagagtcaggggagtgcggtccatgcgaggcctccgttcgctatagcgaaccccctcatggcctgacacgcacttccgttacagtgtcagatctggagcctcatatgaactacacgttcacagtggaggcgagaaatggtgtgagcggactcgtaaccagtcgcagcttccgaactgcctcagtaagcataaatcagaccgaacccccaaaggtgcgcttagaagggcgttcgaccacctcgctctctgtttcatggagtatcccaccgcctcagcaatctcgcgtatggaaatacgaggttacgtacagaaagaagggggattcgaattcctacaacgtgcgacgtactgagggctttagtgtgacactcgatgacctggcccctgataccacatacctcgtacaggtccaggccctgacacaggaaggccagggagcgggttctaaggtccacgaatttcagacactcagccctgagggaagtgggaatcttgcagttatcggcggtgtagctgttggcgtggttctactgctggtcctcgccggagtgggcttttttattcacagacgcagaaagaaccagcgtgcaagacagtcacctgaggacgtatatttctccaagtctgagcagctcaagccactgaagacctacgtagaccctcacacttatgaggacccaaatcaggcggtccttaagtttaccacagagatacacccaagctgcgtgacccggcagaaggtgatcggtgccggagagttcggggaagtgtacaaggggatgctgaagacgtcatcagggaaaaaggaagtccctgtggccatcaagacactgaaagctggatacacagagaaacagcgcgtggactttctaggcgaggcagggattatgggtcagttttcccaccacaacattatccggctcgaaggcgtgattagcaaatataagcccatgatgataatcacagagtacatggaaaacggggctcttgataaatttctgcgggaaaaagacggggaattctccgtcctccagctcgtgggcatgcttcggggtattgccgcagggatgaaatacttagctaatatgaactatgtgcatagagatctcgctgctagaaatatcctggtcaactccaacttggtatgcaaggtcagtgactttgggctgtcgcgcgtgctcgaggatgatcccgaagccacctatacaacctctggagggaaaattcctattcgctggacagcaccagaagctatctcttaccgcaagtttacgtctgcttctgatgtgtggtcttttgggattgtgatgtgggaggtgatgacctacggtgaacgcccttactgggaactcagtaaccatgaggtcatgaaggcaattaacgacgggtttagacttccaacccctatggactgtccctcagctatttatcaactgatgatgcaatgttggcaacaggaacgcgctaggagaccaaagttcgcagacatcgtgtcaatcctagacaagctgatccgcgctcctgatagccttaaaaccctggcggactttgatccaagggtttccatacgccttccctccacttcagggagcgaaggcgtacctttcaggaccgtcagcgaatggctagagtccatcaaaatgcagcagtacaccgaacactttatggcggctggctacactgccatcgaaaaggttgtgcagatgacaaacgatgacatcaagcggattggcgtaaggttgcctggccaccaaaagaggatcgcctactctcttctcggccttaaagaccaggttaatacagtgggaatccccatctag

SEQ ID NO: 222069 - DNA, 2952 bp, synthetic construct
  misc_feature 1..2952: note = Description of Artificial Sequence: Synthetic coding sequence
  source 1..2952: mol_type = other DNA
atggactgccaactgagtattttgctgctactgtcctgcagtgtgttggatagttttggtgagctgattccgcagcctagtaacgaggtgaatcttctggactccaagacgatccaaggggaactcggctggatcagctatccttcccatgggtgggaggaaatctctggtgttgacgagcactataccccaattcgaacctaccaagtttgtaacgttatggaccactcacagaataactggctgagaactaattgggttccgcgaaattctgctcagaaaatttacgttgagctgaagttcacacttcgggactgtaacagcattccgctggtgttgggcacctgcaaggaaacctttaacctatactatatggagtccgacgacgaccatggagtgaaattccgcgagcaccagttcaccaagatcgacacgatagcagctgacgaatcatttacccaaatggacctgggtgaccgaatactcaagctgaatactgaaatacgagaagtcggcccagtgaataaaaaaggcttctatttggccttccaggatgtaggcgcttgcgtggcactggtatcagtcagggtgtatttcaagaagtgccctttcacagtaaagaatctggctatgttccccgacacagtacctatggatagccagtctctggtagaggtccgagggtcatgtgttaataactcaaaggaagaggaccccccacgcatgtactgctccaccgaaggggagtggttagtgcccatcggaaagtgcagctgcaatgctgggtatgaagagaggggttttatgtgtcaagcttgtcgtcccggtttttacaaagcattagatgggaacatgaagtgtgcaaaatgcccacctcattcctccacacaggaagacggaagcatgaactgtcgttgtgaaaacaattacttccgagcggacaaggaccctccttcaatggcctgtacgagaccaccttcatccccaagaaacgttatttccaatatcaacgaaacctcagtcatcctggattggtcctggccactggacacgggtggacgaaaggacgtaactttcaacatcatttgtaaaaaatgcggttggaatattaagcaatgtgagccttgttctcccaatgtccgattcctgccccgtcagttcggcctgacaaacaccaccgtgacagtgacggacctactcgcgcacaccaactacaccttcgagatcgacgcagtcaatggagtgagtgagctgtcatctccaccgcgacaatttgcagctgtgtccattacgactaaccaggctgccccatcaccggtcttgaccataaaaaaggatagaacttccaggaatagcatttctctatcctggcaagaacctgagcatccaaacggcatcatcttggactatgaggtgaagtattacgagaagcaggaacaagaaacctcctacacgatactgagggccaggggtacaaacgttactatttcctctcttaagcctgacactatctatgtctttcaaattagagccaggacggcagcaggttacgggaccaactctagaaagttcgaattcgagacgtccccagactcgttcagtatctctggcgagtcgtcccaggtggttatgatagcaatttctgcagccgttgccattatcctccttaccgtagtgatctacgtgctcattggccgtttctgtggctacaaatccaaacatggtgccgatgaaaagagactgcacttcggcaatggccacttgaagctgcccggtctgcgaacgtacgtcgaccctcatacgtacgaggaccctacccaagcagtccatgagttcgcaaaagaactcgatgccaccaatattagcatcgataaagtggttggagccggagaattcggagaagtctgctctggaaggctgaaattaccctctaaaaaggagatttccgtagcaattaagaccctcaaggtggggtataccgaaaaacagaggagagactttctgggagaagccagcataatggggcaattcgatcatcccaacattatccgcctggaaggcgtcgtgactaagtcaaaaccggtgatgatcgttacggagtacatggagaacggcagcctagacagcttcctgcggaagcatgacgctcagtttaccgtgatccagttggttgggatgctgcgcggtatagcctccggaatgaagtacctcagcgacatgggttacgtccaccgcgacctggccgctagaaacatattgataaacagcaatctggtctgcaaagtttcggactttgggctttcgcgcgtgttagaggacgaccccgaggctgcctacaccacacgcggaggcaaaatccctattcgatggacatccccggaggctatcgcttacaggaagttcacaagtgcgagtgacgtgtggtcctatggtatcgtcctgtgggaagttatgagttacggagaaagaccatattgggagatgagtaaccaggacgttatcaaagccgtagacgaaggctacaggctgccaccaccaatggattgtcccgctgcgctgtaccagttgatgctagactgctggcagaaggatcgtaacaatcgtcccaagttcgagcaaatcgtgtctattttggacaaacttattagaaatcctggttcgctgaaaatcatcacctcagccgctgcacgtcccagcaacctactgctggatcaatccaatgtggatatcaccaccttccggacgacaggggactggcttaacggcgtctggactgctcactgcaaagaaattttcactggggtcgagtactcaagttgcgataccatcgcaaagatcagtactgatgacatgaagaaggtgggcgtgaccgtggttggacctcagaaaaagatcatcagttccattaaagcactcgagacccaaagcaaaaacggtcccgtgcccgtctag

SEQ ID NO: 222070 - DNA, 1620 bp, synthetic construct
  misc_feature 1..1620: note = Description of Artificial Sequence: Synthetic coding sequence
  source 1..1620: mol_type = other DNA
atggactgccaactgtccatcctgcttctactgtcatgcagcgtccttgatagctttggggagttgattccacagccctctaacgaagtgaatctgttagacagcaaaacgatccaaggagaattaggctggattagttatccatcccacggctgggaggagatcagcggcgtggatgagcactacacccccatcagaacataccaggtctgtaacgttatggatcattcgcaaaataactggttaaggacaaattgggtgccccgaaatagtgcccagaaaatctatgtagagctgaagtttactcttagggattgcaattcgattcctctggttttgggaacctgcaaagaaacattcaacctgtactatatggaaagtgatgacgaccacggtgtgaaattccgggaacaccagttcaccaaaattgacacaattgcggcagacgagtcatttacccagatggatctcggggatagaattttaaagctgaacaccgagatacgggaagtggggcctgttaataagaaaggattttacctggccttccaggatgtaggcgcttgtgtagcccttgttagcgttcgagtttacttcaagaagtgtcccttcacggtgaaaaatcttgcaatgtttccagacaccgtcccaatggactcacaatctctggtcgaagtgcgcggttcctgcgttaataactctaaggaagaggatcctccgaggatgtattgcagcacggagggagagtggctggtgccgatcgggaagtgcagctgtaacgcagggtacgaggaacgcggattcatgtgccaggcgtgccggcctggattttacaaggccctcgatggtaacatgaaatgtgccaagtgtcccccacattcatccacccaagaagacgggagcatgaattgccggtgtgaaaacaattattttagagcagacaaggaccctccatcaatggcctgtaccaggccaccctccagccctaggaacgtcatatctaacataaatgagaccagcgtgattctcgattggtcgtggccactcgacaccggtgggagaaaagacgttacttttaatatcatctgtaagaaatgtgggtggaatatcaaacagtgcgaaccatgtagcccaaacgtccgttttctgccaagacagttcggcctgacgaacaccacagtgaccgttactgatctcctggcccacacaaactatacatttgagatagatgccgtgaacggcgtgtcagaactgagctcgccccctaggcaattcgcggcagtgtctataaccactaatcaggctgccccaagcccggtgctcaccataaagaaagatagaactagtcgaaactcaatcagcctttcttggcaggagccggagcaccccaacggaattatactggactatgaagtaaagtactacgaaaagcaggagcaggaaacttcttacaccattctccgtgctcggggaaccaatgtgacgatcagctccctaaaacccgacactatctacgttttccaaattcgcgctcgcacggccgcaggttacggaacgaattctcgcaaattcgagttcgaaacttctcccgattgtatgtattactttaacgctgtgtag

SEQ ID NO: 222071 - DNA, 3114 bp, synthetic construct
  misc_feature 1..3114: note = Description of Artificial Sequence: Synthetic coding sequence
  source 1..3114: mol_type = other DNA
atgcgcggttccggaccaagaggagctggccgacggagacctcccagtggcggtggcgatactccgataacacccgcatccctggcaggatgttactccgcacccaggagagcgcctctctggacgtgtctgttattatgcgcagccctgcgaacactgctcgcatctcctagcaacgaggtgaacctgctggactcccgaactgtgatgggtgatttaggctggatagcatttcctaaaaacggctgggaggaaatcggggaggtggacgagaattatgccccaatccacacctatcaggtttgtaaggtcatggagcagaatcagaacaactggctcctgacttcctggattagtaatgagggggctagcaggatcttcatcgagctgaagttcacattgcgggattgcaatagtttgccgggtggccttggaacctgcaaggagaccttcaacatgtactactttgagtctgacgaccagaatggcaggaacatcaaagaaaatcagtacattaaaatcgataccatagccgctgacgagagctttacagagctggacttgggcgaccgggtcatgaagctcaataccgaagtacgggatgttggaccgttatccaaaaaagggttttacttagcgtttcaggacgttggagcgtgtattgcactggtgtcagttagagtgtactacaagaagtgcccctcggtggtaaggcatctagcagtattccctgataccatcactggagccgactcttctcagctactggaggtgtcaggaagctgtgtgaatcattccgtgaccgacgagccccctaaaatgcactgtagcgcagaaggtgagtggctggtccccattggaaagtgcatgtgtaaggcaggatacgaagagaagaatggaacctgccaggtttgtcgaccaggattcttcaaggctagcccccacatacagtcttgcggaaagtgccccccacactcgtacacccacgaggaagcctcaacaagctgtgtgtgtgagaaggactattttaggagggaaagcgacccgcctaccatggcttgcaccaggccaccttcagccccacgtaacgctatcagtaatgttaatgaaactagcgtatttctcgagtggatacccccagctgatacaggaggaaggaaagacgtgtcttactatatcgcgtgcaaaaagtgcaattcccacgccggagtctgtgaagagtgtgggggacacgtacgttatcttcccaggcaatcagggctgaagaatacaagcgtgatgatggtggacctcctggctcatactaactacacatttgagatcgaggccgtcaacggcgtgagtgacttgtcaccgggagccagacagtatgtgagtgtgaacgtcacaacaaatcaggccgctccatcccctgttactaatgtcaagaaagggaagattgcgaagaatagtatctccctgagctggcaggagccagaccgccctaatgggatcattttggagtatgagattaagtactttgaaaaggatcaggagacctcttacaccataattaagagcaaggagaccaccatcacagcagagggcctgaagcctgccagcgtgtacgtgtttcagataagagcacgtacggccgcaggctacggtgtgttcagtagacgatttgagtttgaaaccactcctgtattcgcagcaagcagcgatcaaagccagatcccagtaatagctgtctcagtcacagttggcgtgatcctactggccgtagtgatcggggtactcctcagtggatcttgttgcgagtgcggctgtggtcgagcatcatctctctgcgcagttgcccatccatcgttaatttggcgttgcggctactcgaaagccaagcaggatcccgaggaagaaaagatgcacttccataatgggcacatcaagctcccaggcgtgcgcacctatattgatccacacacatacgaggatccaaatcaggctgtgcacgagtttgcaaaagaaatcgaggcaagctgcattaccattgagagagtcataggggcaggggaattcggggaagtttgttccggcaggcttaagctgcccggtaagcgagagctgccagtggccatcaagaccctcaaggttggctatactgagaagcagcggagagacttcctgggggaggcatcaataatggggcagttcgatcaccctaatattattcacctggagggggtggtgaccaagagcaagccagtcatgatagtcaccgagtacatggagaacgggtccctggacacattcttgaagaagaacgacggacagtttactgtcatccagttggtgggcatgctgcggggaattagcgccggtatgaagtacttgagcgacatgggctacgtacaccgagacctggccgctcgcaacatccttataaactcaaacctggtctgcaaggtgagtgatttcggtctgagccgcgtactagaggatgaccctgaagccgcatatactacccgaggaggcaagattcccattagatggaccgcacctgaagcgatcgcctttcgcaaatttacttccgcaagcgacgtttggtcttacggcattgtgatgtgggaggtcgtgtcttacggcgaaagaccttactgggagatgactaaccaagacgtcattaaggcagtggaggagggttaccgtttgccttcgcccatggattgccccgctgccttataccaactgatgctggactgttggcaaaaagaaaggaactccaggccaaagtttgacgagatagtgaatatgctcgataaactcataaggaacccctcttcactcaaaacgctggtaaacgcgagctgtcgagtgtcaaacctgctggccgaacacagccctctgggaagcggagcttaccgaagcgtgggagagtggctcgaggctatcaaaatggggcgatatacggagatatttatggagaacggatactcatcgatggacgcagttgcccaagtgaccctcgaggatctgagaaggctgggggtcactcttgtgggccaccagaagaaaatcatgaacagtctccaggagatgaaagtgcagttggtaaacggaatggtgccgctgtag

SEQ ID NO: 222072 - DNA, 3048 bp, synthetic construct
  misc_feature 1..3048: note = Description of Artificial Sequence: Synthetic coding sequence
  source 1..3048: mol_type = other DNA
atgcgcggaagtgggccacgcggtgctggacgacgcaggcctcctagtggcggtggagacactcccattacccctgcgagtctagcgggttgttactctgcgccaagaagagcaccactgtggacgtgccttctcctgtgtgccgcactcagaactctccttgctagccctagcaatgaggtgaacctgctggacagcagaacagtgatgggtgacctgggctggattgcctttcctaagaatgggtgggaggagattggtgaagtggatgaaaattacgctcctatccacacatatcaggtctgcaaggtgatggagcaaaaccagaacaactggctccttacttcatggatcagcaacgagggtgcgtcacgcattttcattgaattgaaatttactttgagagactgtaatagcctacccggaggtctcggaacctgtaaagaaacttttaacatgtattatttcgagtcagacgaccaaaacgggaggaatattaaggagaatcagtacattaagatcgatacgatagctgcggacgaaagcttcactgagctggacctgggggatcgcgtcatgaagttaaataccgaggtccgggatgttggcccactttctaaaaaggggttttaccttgcctttcaggacgttggggcatgtatagcactggtgtctgtgagagtttactataaaaagtgtcccagcgtggtgaggcatttggccgtgtttcccgacactatcactggcgctgatagttctcagctgttggaagtgagtggtagctgtgtgaatcacagcgtcaccgatgagccgcctaagatgcattgttccgccgagggtgaatggctcgtgcccataggtaagtgtatgtgtaaagccggttacgaggaaaagaatgggacgtgtcaggtgtgtcgcccagggttttttaaggccagcccacacattcaaagttgcggcaaatgtcccccacactcgtacactcacgaagaggcatctacatcctgcgtgtgtgaaaaggattatttcagaagggagagcgatccccctaccatggcttgtactaggcctccctcggctcccagaaacgccatctcgaacgtgaatgagacaagtgtgttcctggagtggattcccccagcagatactggaggccgtaaagatgtcagctactatattgcctgcaaaaagtgtaattctcatgcaggcgtgtgcgaggaatgtggcggacacgttcgatacctcccacgccagtctgggctaaaaaataccagcgtgatgatggtggacctgctggcccacaccaattacacctttgaaattgaagctgtcaacggagtgtccgacttgtctcctggggctcgacagtatgtctcggtcaacgtcacaacaaaccaggccgctccaagcccggttactaatgttaagaaagggaagatcgcaaagaattctatatccctctcatggcaggaacctgatcggcctaacggcataattctcgagtacgagataaagtacttcgagaaagaccaagagacgagttatactataataaagtctaaagaaactaccatcacagcggaaggcctgaagcccgcatctgtgtacgtgttccagattcgagcacgcactgctgccggttacggagtgttttctcgaagattcgagttcgagaccacccccgtcttcgctgcttcttcagaccaatcccagataccagtgatcgcagtttccgtcactgtgggcgtgatcctgctcgctgttgtcattggcgtacttttaagcggacggcgatgtggatattccaaggccaaacaagatcccgaggaagaaaaaatgcattttcacaacggccatatcaagctgcccggtgttcggacttacatcgatcctcacacttacgaggatccaaaccaggccgtccatgaattcgctaaggaaattgaggcctcctgcatcacgatagagcgagtcataggcgcaggggagttcggcgaggtgtgttccggcagattgaaactgccagggaagcgggaattgccagtagctatcaagaccctgaaagtgggatacacagagaagcagcggagggactttctgggagaggcgtctatcatgggacaattcgaccaccctaatatcatccaccttgagggagtcgttaccaaatccaaacctgttatgatagtaaccgagtatatggagaacggaagtttggatacttttctgaagaagaacgatggacagtttaccgtcattcaactcgtcggcatgctccgaggaatctccgctggcatgaaatatctctccgatatgggctatgtccatcgtgatctggcggcaagaaatatcctgatcaatagcaacctggtgtgcaaagtgagtgactttggcctgtctcgggtgctggaggatgacccagaggctgcctacactacaaggggcggtaaaattccaattcggtggacagcgccagaggcgattgcctttcggaagttcacatctgccagcgatgtttggtcgtacggtatcgtcatgtgggaagtggtatcctacggagagcgcccttattgggaaatgacaaaccaggatgtgatcaaggccgtggaggaaggctaccggctcccgagccccatggactgccccgctgcattgtatcagctgatgcttgactgttggcaaaaggaacgcaattcgagacccaaatttgatgagattgtgaacatgttggacaagcttatccggaacccaagttccctcaagactctagtgaacgcaagctgccgcgtgagcaacctgctggccgagcatagcccgctgggctctggtgcctaccgatcagtcggggagtggttggaggcgataaaaatgggcagatacacggagatctttatggagaatggctactcctccatggacgcagtggcacaggtgacgctcgaggacctgcgcaggctgggcgtgactcttgtcggccatcaaaagaaaatcatgaattcacttcaggaaatgaaggtgcagctggttaacgggatggtgcccctatag

SEQ ID NO: 222073 - DNA, 3015 bp, synthetic construct
  misc_feature 1..3015: note = Description of Artificial Sequence: Synthetic coding sequence
  source 1..3015: mol_type = other DNA
atgagaggcagcggccctaggggagccggacgccgacgaccaccatctggaggaggtgacacgcccatcacgcctgccagccttgcaggctgttacagtgcacccaggcgagcccctttgtggacctgcttattattgtgcgccgcactcagaaccttactcgcctccccatccaacgaagtgaatctgctcgacagtagaaccgtgatgggagacttggggtggatagcgttccctaaaaatggatgggaggagatcggtgaggtggacgaaaattatgcaccaatccacacctaccaggtgtgtaaggtgatggagcagaatcaaaacaattggcttctgacctcatggattagtaatgagggcgctagccggattttcattgaattgaagttcacactgcgggactgcaattccctccccggaggtctgggaacttgcaaggagacgtttaacatgtattattttgagtctgatgaccaaaacggaaggaatattaaggagaaccagtacatcaagatcgacacaatcgctgcagatgagtctttcactgaactggatctgggggatcgggtcatgaagctgaatacggaggtgagggacgtgggtcccctgtccaagaagggattctacctcgctttccaagatgttggcgcatgtattgccctggtctccgtgcgggtctattacaaaaaatgtccaagtgtggtcaggcacctcgcggtgttccccgacaccatcaccggggctgatagctcacagctcctggaagtgtcaggtagttgcgtgaatcatagcgtcacagatgagccacccaagatgcattgttcagcagaaggggagtggctagtgcccataggaaagtgcatgtgtaaagcgggttatgaggagaaaaatggaacatgccaagtgtgtcgaccaggcttcttcaaagcaagcccgcacatacagagttgcggcaagtgtcctccccattcctacacacacgaggaagcgagcacctcatgtgtctgcgaaaaggactacttcagaagagaaagcgatccccctacaatggcttgcacacgtcctccatcagccccacgcaatgccatctccaacgtgaatgagactagcgtcttcttagaatggatcccaccggctgacaccggcggtcgcaaagatgtgtcttactatattgcctgcaagaaatgcaacagccacgcgggagtgtgtgaggagtgcggaggtcacgtccgctatctgccacgccaatcaggcctgaagaataccagcgttatgatggtggatcttttagcccatactaattatactttcgagatagaggcagtcaacggtgtctccgatttgtcacccggtgctcggcagtatgttagcgtgaatgtgacgaccaaccaagctgccccttcccctgttactaacgtgaagaaaggaaagatcgcgaagaattcaatctctttgtcctggcaggagccagatcggccaaatggcatcatcttagaatacgaaattaagtacttcgagaaggaccaggagacctcctacactattattaaaagcaaggaaaccaccattaccgctgagggactgaagcccgcttccgtctacgtattccagatccgtgctcgcactgctgccggatacggcgtgttctccaggcggtttgaattcgaaacaacgcccgtatcggtggctgcaagctcagatcaatctcagattcctgtgatagcagtgagcgtgaccgtaggcgtgattcttttggctgtggtgatcggcgtgcttctgtctggatcctgttgtgagtgcggctgtggcagagccagcagtctctgtgctgtggcacatccatcactaatctggagatgcgggtattccaaagccaagcaagacccggaggaggaaaagatgcatttccacaacgggcatataaaactgccaggggtgcggacgtatatcgatccacacacttacgaggatcccaatcaagccgtgcacgagttcgcaaaggaaatcgaggcaagctgcataactatagaacgggtaatcggcgctggtgaatttggggaagtgtgctcaggcagactcaagctgcccggtaaacgcgaactccccgtagccatcaaaactctgaaggtaggatacacggaaaagcagagacgagatttcctgggggaggctagtattatgggacaatttgatcaccccaatatcattcacctggagggcgttgtgaccaagagcaagcccgtcatgatcgttaccgaatatatggaaaacggcagcctggacacttttctaaagaagaacgacggccagtttactgtgattcagctggtggggatgctaagaggtatcagtgctggaatgaagtatctcagcgacatgggatacgttcatagggacctggccgctagaaacatcttgattaactctaatcttgtttgcaaggtgtctgacttcggattatcacgagtgctcgaggacgatcccgaggccgcatacaccacccggggtggcaaaatcccaatcaggtggacagctcctgaggccatcgccttccgcaaattcaccagcgccagtgacgtgtggtcatacgggatcgtgatgtgggaggttgtgagttacggcgaacggccatactgggaaatgaccaaccaggacgttatcaaggcggtagaggaaggctatcggttgccctccccaatggattgtccagccgcactgtaccaattgatgcttgattgttggcagaaagaaagaaatagccgccctaagtttgacgaaatcgttaacatgctagataaacttatccgaaatccaagttccctgaagaccctggtgaacgcatcctgtcgggtgtctaacttattagccgagcactcacctctggggtccggggcatatcgctcagtgggtgagtggttggaagctatcaagatgggcaggtacactgaaatcttcatggaaaacggatactctagcatggacgccgtagcccaggttacgctggaatag

SEQ ID NO: 222074 - DNA, 3018 bp, synthetic construct
  misc_feature 1..3018: note = Description of Artificial Sequence: Synthetic coding sequence
  source 1..3018: mol_type = other DNA
atggctccagccagggggcgattgcccccagcgttgtgggtagttactgctgccgcagccgcagccacttgcgtgagcgctgcacggggagaagtgaatctacttgatacaagtacaattcacggagactggggttggttaacctaccccgctcatggatgggactctattaacgaggttgatgagagctttcagcctattcatacgtatcaggtgtgtaacgttatgtccccaaaccaaaataactggctcagaactagttgggttccacgggatggagcacgacgcgtgtatgctgagatcaagttcactcttcgggattgcaacagcatgcctggcgttcttgggacctgcaaagaaacctttaatttgtactatctcgagtcggaccgggaccttggcgcatctacacaggagtcccagtttctgaaaatcgatacgatcgccgcagatgaaagtttcactggcgctgacctgggagtacgcaggctgaaattaaacacagaagtgcgcagtgtcgggccactaagtaaacgcggattctatctagcattccaagatattggggcttgtctggcaatactgagcttgcgcatttattataaaaaatgccctgccatggtgaggaatcttgctgctttcagtgaagccgtgaccggggctgactcctcttctctggtggaggtacgtggacagtgcgtcagacactctgaagaaagggacactcccaagatgtattgtagtgccgagggggaatggctggttccgataggcaaatgtgtgtgctctgcgggatacgaggagcgacgcgatgcatgtgtggcatgcgaactggggttctacaagtccgcgcctggagatcagttgtgcgcgaggtgtccaccacattcgcacagcgcggctccggctgcccaggcttgccactgcgatttgtcgtattatcgcgctgctctagaccccccatccagcgcatgcaccagacccccaagcgccccagtgaacctgatcagcagtgtcaatggaacatcagtgacgctggagtgggcacctccactggatccgggaggtcgctcagacatcacctataacgctgtgtgtaggcggtgcccatgggcactctcacggtgcgaggcctgcggatccggaactcgttttgtgccccagcagacctctctcgtgcaggcttctctgctagtggctaacctgctggcccacatgaactattcattttggattgaggccgttaatggggtgtccgatctttcgcccgagcctcgccgtgccgctgtggtaaatataacgacaaatcaggcagctccatctcaagttgttgttatccgtcaggaaagggccggtcaaactagcgtttcactactatggcaagagcctgagcaacccaatggaattattctcgagtatgaaataaaatactacgaaaaagataaagagatgcagagctatagcactctcaaagccgtcaccacccgagcgacggtttccggcctcaagcccggaacaaggtacgtgttccaggtccgggctcggacttcagctggctgtgggaggtttagccaagctatggaagtggaaacaggaaaacctagaccacgttacgacacacgcacaatcgtgtggatatgtctgactttaatcactggactcgtcgtccttcttctgctgctgatttgtaagaagcgacactgtgggtatagcaaggcattccaggactccgacgaagagaaaatgcattaccaaaatggacaagcaccaccccctgtctttctgcctctgcatcaccctccaggaaagttgccagagcctcagttctacgctgagccacacacatatgaggaacccggtagagccggacgctcttttacaagagagatagaagcctcccgtattcatatcgaaaagatcataggcagtggcgattctggggaagtgtgctacggcaggttaagagtacccggacaacgcgatgttcctgtagccattaaagcattgaaggctggctacacggaacgtcagaggagagattttctgtcagaggcttcgattatgggccaattcgaccatcctaatattatccgcctggaaggggtagtaactcgcggtcgcttagctatgattgtgaccgaatatatggagaatggctcgctcgacacctttcttcgtactcatgatggtcagttcactatcatgcaactcgtggggatgcttagaggcgttggcgctggcatgcggtatttgagtgacctgggctacgtgcaccgagaccttgcggcaaggaatgtcttggtggacagtaacctggtttgcaaagtgtccgacttcggactttctagggtgttggaagatgaccccgatgctgcttacaccactaccgggggtaagatccccatacgatggaccgctccagaagccattgcgttccgtacctttagtagcgcttctgatgtgtggtcattcggcgttgtcatgtgggaggtccttgcatatggtgaacgcccttactggaatatgacaaaccgcgatgtcatttcttcagtggaggagggttaccgacttccagccccaatgggctgtccgcacgcactgcatcaactgatgctcgattgctggcacaaagaccgggctcagaggccacgctttagccaaatagtcagtgtgctggatgcactcatcagaagcccagagtcacttagagccacagctaccgtttcgcgttgcccgcctcccgcattcgtcaggagctgctttgacttacggggtgggagcggcggagggggtggcctcactgttggcgattggcttgacagcatccggatgggaagatacagggaccactttgctgccggtggctactcctcactgggaatggtgctgcgaatgaatgcccaggatgtgagggcgctaggcattaccctgatggggcaccagaagaagatcctcggttctatacaaactatgcgcgctcagctcacctcaacccagggccctaggagacatctatag

SEQ ID NO: 222075 - DNA, 1488 bp, synthetic construct
  misc_feature 1..1488: note = Description of Artificial Sequence: Synthetic coding sequence
  source 1..1488: mol_type = other DNA
atggctccagcgagggggaggctgcctccagctctgtgggtcgttactgcagccgctgcagccgcaacctgcgttagcgcagcacggggagaagtaaacctgctggatacctccaccattcatggagactggggatggctcacatacccagcccacggttgggacagcatcaacgaggtggatgaatcctttcagcctatacatacataccaagtctgcaatgtcatgagccctaatcagaataactggctcaggacaagttgggtccctcgcgacggcgctcgcagggtctacgccgagatcaaattcacccttcgcgactgcaacagcatgcctggtgtgctcggaacatgcaaagagactttcaacctgtattaccttgagagcgacagggaccttggagctagcacccaggaaagtcagtttctgaaaatcgacaccatcgccgcagacgaaagtttcacaggcgctgatctgggcgtgcggcgattgaagctgaatacagaggttcggagcgtgggtccattgtccaagcggggtttttacctcgctttccaggatatcggcgcttgcctcgccatactgtctctgagaatctactataagaagtgccccgcaatggtacgcaatctcgccgcttttagcgaggccgtgaccggggcagacagtagctctctggtcgaggtacgtgggcagtgtgttcggcatagcgaagaacgcgacacccccaagatgtactgcagtgccgagggggaatggcttgtgccaatcgggaagtgtgtttgttccgccggttacgaggagaggcgagatgcctgtgtggcgtgcgaattgggcttctataaatccgcccctggtgatcagctgtgtgcccgttgccccccacactcacattcagccgctcctgcggcacaggcttgccactgtgatctgtcttactatcgtgcagctctggatccaccctcgagcgcatgtaccagacctccttctgcccctgtaaatctaatctcctccgtgaatggtaccagtgtgacgttggaatgggcgcctcctttggatcctggtggtagaagcgatatcacgtacaatgctgtgtgtcgtcgctgtccgtgggccctgtctcggtgcgaggcttgtggctccggaacgcgtttcgttccgcagcagacaagcttagtgcaggcctcccttctcgtcgccaatcttctcgcccacatgaattatagcttctggatcgaagctgtcaatggtgtgagcgacttgtctccagagccccgtagagccgcagttgtcaatatcacgacaaaccaggcaggaagaagaaggaactccgtcccacagagacctggtccgccagccagccccgctagtgatccctcccgcgatcagtcatccgccggtgacgttctctgggcctttaggcaggtgcctctgtggccatgcgctccgcaccaggatcccgaattagaggcactgcactgcctatag

SEQ ID NO: 222076 - DNA, 1488 bp, synthetic construct
  misc_feature 1..1488: note = Description of Artificial Sequence: Synthetic coding sequence
  source 1..1488: mol_type = other DNA
atggctcctgctagagggaggttaccaccggctctctgggtggtgacagccgctgcagctgcagcaacctgcgtctctgcagctcgaggggaggtgaacctgctggacactagcacaatccacggagattggggatggcttacttatccagctcacggctgggactctatcaacgaagtggacgagagctttcagccaatccacacctatcaggtttgtaatgtgatgtcccctaaccagaacaactggttgagaaccagctgggtacccagggacggtgccaggagagtgtatgctgagatcaagtttaccctgagagactgtaacagtatgccaggagtattagggacttgcaaagaaacctttaatctctactacttagagagcgatcgggacctaggggcttccacacaggaatcgcagttcctcaagattgacaccatcgctgcggatgaatcattcacaggcgcagacctgggcgtgcggagactgaaactcaacacagaggtccgttcagtcgggcctctcagtaagcgcggattctacctcgcatttcaggatatcggggcatgcctggccattcttagcttgaggatttactacaaaaagtgcccagccatggtgaggaatctggcagcttttagcgaagcagttacaggggctgattctagcagcttggttgaggtgagaggccagtgcgtgcgccactctgaagagcgagatactcccaagatgtattgttcggccgagggggaatggctcgtccccattggaaagtgtgtgtgttctgcagggtacgaagaacgcagagatgcttgcgtggcttgtgagttgggtttctataaaagcgctcccggtgatcaactgtgcgccagatgccccccacacagtcattcggccgcaccagccgctcaggcatgccactgcgacctgtcttattacagggcagccctcgaccctccatcaagcgcatgcaccaggcctcccagcgcccctgttaatctgatttcttcagttaatgggacctccgtaaccctagagtgggcaccccctctcgaccccggaggcagatccgacattacatacaatgctgtctgtcggaggtgtccgtgggctctctcacgatgtgaagcttgcggtagtggcactcgcttcgtgcctcaacagacttccctagtgcaggcttccctgctagtagccaacttacttgcccatatgaattacagtttctggatcgaggcggtcaatggggtgtctgatttgtcacctgaaccaagaagagccgctgtcgtaaacataactaccaaccaggccggacgacgtcgcaactccgtccctcagcggccaggccctcctgcctcaccagcctctgaccccagcagagatcaatccagcgcaggggatgtgctctgggcctttcgccaggtgcctctctggccttgtgcccctcaccaggatccagagctggaagccctccactgtctgtag

SEQ ID NO: 222077 - DNA, 2955 bp, synthetic construct
  misc_feature 1..2955: note = Description of Artificial Sequence: Synthetic coding sequence
  source 1..2955: mol_type = other DNA
atggccctggactacctcttgttgctgttgttggcgagtgccgtcgccgcaatggaagagacactcatggacaccaggactgcaacggctgagttaggctggacagccaatcctgccagtggctgggaggaggtgtccgggtatgacgagaacctgaacacaatccgcacctatcaagtttgcaatgtgttcgagccgaaccagaacaattggctccttacgacattcatcaacaggcgcggtgcacacagaatttataccgaaatgagattcacagtgagagattgttcttctctgccaaacgtgccaggatcttgcaaggaaacttttaacctatattattacgaaaccgattcagtcatagccactaagaaatccgcgttctggtcggaggcgccttatctgaaagtcgatacaattgccgcagacgaatccttttctcaggtggatttcgggggacgcctgatgaaggtgaacaccgaggttcgttcttttggacctctgacacgtaacggcttctatctcgcctttcaagactacggcgcttgcatgtccctgcttagcgttagggtatttttcaaaaagtgtcctagtatcgtccagaatttcgccgtttttccagaaactatgaccggagcagaaagtacatccctcgtgatcgcgaggggtacttgtatcccaaacgccgaagaggttgatgtccctattaagctctattgtaacggcgacggagaatggatggtccctataggacggtgtacatgcaaacccggatatgagccagagaactctgtagcttgcaaagcttgccctgccggaaccttcaaggcaagtcaagaggcagaagggtgctctcactgcccctcgaactcaagaagccctgctgaggctagcccgatatgcacctgccgaactggctactatcgggctgattttgatccgcctgaggttgcgtgtaccagcgtgccttcaggtcctaggaatgtgatctcaatcgtgaatgagactagtatcatcctagagtggcatcctccccgtgagaccggaggcagggatgacgtaacctacaacatcatctgcaagaaatgtagagcggacagacgctcgtgctcacgatgcgacgataatgtggaattcgtgcctcgccagctcggcctgacagagtgcagagtgtcaataagttcactgtgggcccacaccccctatacttttgatatacaggcaataaacggagtgagcagtaagtctccctttccccctcagcatgtgagcgtcaacataacgacgaatcaggccgcaccttccacagtgccaatcatgcatcaagtaagtgccactatgcggagcattacactgagctggccacagcccgaacaaccaaacggcattattctcgattatgagatcaggtactacgaaaaggagcacaacgaattcaacagctcaatggccagaagccaaacaaacaccgccagaatcgacggactgagacccggtatggtctatgtggtgcaggtgagagctcgcacagtggcaggctacggaaagttttctgggaagatgtgcttccagactcttacagacgacgactacaagagtgagctgcgtgagcagcttcctttgatcgccggtagtgcagccgctggcgtcgtttttgtcgttagtcttgtcgcaatctcaatagtgtgtagtcgcaaacgggcatatagtaaagaggctgtgtacagtgataagttacaacattacagcactggtcgtggctctccaggcatgaagatatacatcgacccattcacctacgaagatcctaatgaggccgttcgagagtttgctaaagaaatcgacgtatcattcgtgaagattgaagaagtgatcggggcaggcgagttcggggaggtgtataagggcaggcttaagctgcctggcaagcgcgaaatctacgtcgccatcaaaactcttaaagccggttatagcgaaaaacagaggcgggatttcctttctgaagcaagcatcatgggccagtttgaccatccaaatatcatcagattggaaggcgtagtgacaaaaagccggcctgtcatgatcattaccgagtttatggagaacggagcactcgattcctttctccgacaaaacgacggtcagttcaccgtcattcaactcgtcggcatgttacggggaattgccgcaggcatgaagtacttggccgagatgaattacgtgcatagagacttggccgctagaaacatactggttaacagtaacttagtttgtaaagtatctgatttcggtctgtctagatatctgcaggacgacacatcggatcctacatatacaagctctctgggcggtaaaattcctgttcgatggacagccccagaggcaatcgcctatcggaaattcacgtctgcttctgacgtctggagctacgggatcgtgatgtgggaggtgatgagtttcggagaacgaccctattgggacatgtctaatcaggatgtgattaatgccattgagcaggactaccgactgccgcctcccatggactgccctgctgcgttgcaccagctgatgcttgattgctggcagaaagacaggaactcacgcccacgattcgccgagatcgtcaatactctggacaagatgataaggaacccagccagcctgaaaacggtcgcgacaatcacagcggtcccctcccagcctctgttagaccgtagcattcccgattttaccgcttttacaacggtggacgactggctcagtgccataaaaatggtgcagtacagggattccttccttacggctggcttcacgagcctccaacttgtgacccagatgacatccgaggaccttttacgaatcggaattaccttggcagggcaccagaaaaagattctgaattctattcactcaatgcgggtgcagatttcacaatcccctacggccatggcctag

SEQ ID NO: 222078 - DNA, 1638 bp, synthetic construct
  misc_feature 1..1638: note = Description of Artificial Sequence: Synthetic coding sequence
  source 1..1638: mol_type = other DNA
atgcaccaagtgagtgctaccatgcgttccatcacactgagttggccacaaccagaacagccaaatggcattatcctggactacgagatccgctactacgagaaggaacacaacgagtttaatagctccatggcacggtctcaaacaaatacagccaggatcgatggtctgcgcccaggtatggtgtacgtggtgcaggtgagagccagaacagtcgccggttacgggaagttttctggcaagatgtgctttcagacactgaccgatgacgattataagtcagaactgcgcgaacagctgcctctgattgctggcagcgcagcggctggagtcgttttcgtggtctccctggtggctatatccatcgtatgttccaggaagagggcatactctaaggaagccgtttattccgacaaactgcagcactattccacagggcgagggagccccggaatgaaaatttacattgacccgtttacgtacgaggatccaaacgaagctgtccgagaattcgcaaaagagatcgatgtaagctttgtcaaaatcgaagaggtgatcggtgccggtgaattcggtgaggtgtacaaggggaggcttaaactgccaggcaaacgtgagatctacgttgccatcaagaccctcaaagcgggatactctgagaagcagaggagggactttctgagcgaggccagcattatggggcagttcgaccatcccaatattatcagactggaaggcgttgtgaccaagtcacggcctgtgatgatcatcactgagttcatggagaatggggctctggattccttcttgcgccaaaatgacggacagttcaccgtaatccagttggtcggaatgttacggggaattgccgctggaatgaaatacctcgcagagatgaactatgttcatcgggacctggccgctcgcaacatcctagttaattcgaacttggtctgcaaagtctccgattttggcctctcccgctatctccaggacgataccagcgaccctacctacacatcctcgctcggcggtaagatccctgtgcgctggaccgctccagaagccatcgcctacaggaagttcacgtccgccagtgacgtgtggagctatggaatcgtgatgtgggaggtcatgagctttggtgaaagaccatattgggatatgtctaatcaggacgttatcaatgctatcgagcaggactaccgcctgcccccaccaatggactgtcccgctgctctgcatcagctcatgctggactgttggcaaaaggacaggaactcccgccctcggttcgccgagatcgtaaatactcttgataagatgatccggaaccctgccagtctgaaaaccgtagcaaccattaccgccgtaccttcccaacccctactcgatcgatccatccctgactttactgcgttcacaaccgtagacgactggctatctgcaatcaaaatggtccaatatcgagattcttttttgactgcaggattcacatctctgcagctggtcactcaaatgactagcgaggacttactgcgcatcggtattactctcgctggccaccagaagaagatccttaattccattcactccatgagggttcagatctctcagtcacctaccgccatggcgtag

SEQ ID NO: 222079 - DNA, 2997 bp, synthetic construct
  misc_feature 1..2997: note = Description of Artificial Sequence: Synthetic coding sequence
  source 1..2997: mol_type = other DNA
atggcgcgagcacgacctccaccacctccctctcctcctccagggttactgcccctattgccacccttgctgctgctccctcttttactcctgcctgccggttgtcgagctttggaagaaactctgatggacacaaagtgggttacatcagagcttgcctggacatcacacccagaaagcgggtgggaagaagtgtccggctatgacgaagccatgaaccctatcaggacctaccaggtgtgcaatgtgcgggaatcatctcagaacaactggctcagaacgggttttatctggagacgggacgtccaaagggtctacgtcgagctgaagttcactgtgagggattgcaacagcatacccaacattccaggatcctgtaaggagaccttcaatcttttttattacgaagctgattcagacgttgccagcgcatcctccccattctggatggaaaacccttacgtgaaagtggataccattgctccagatgagagcttctctcgattggatgcagggcgagtgaatacaaaagtgcgtagttttgggccactcagcaaagccggattttacctggctttccaagatcagggggcatgtatgagtctaatcagtgtaagggcattctacaaaaaatgtgctagtaccacagccggttttgccctgttccctgagactctgaccggtgcagagccaacaagcctggtcattgctcctgggacttgcattccaaacgcggttgaggtaagtgtgcctctaaaactgtattgtaacggagatggggagtggatggtccctgtgggcgcatgtacttgtgctacgggacacgagcctgccgctaaagaaagccagtgtagaccctgtccacctggatcctacaaggcaaagcagggggagggcccatgtctcccctgtccaccgaactccagaactacatcccctgctgcatccatctgcacatgtcataacaacttttaccgggcagactctgacagcgcagattcggcctgtacgacggtgccaagccccccacgcggagttatatccaacgtcaatgagactagccttatcctcgagtggagcgagccacgagatctgggaggcagagatgatctcttatacaacgtgatttgtaagaagtgccacggcgctggcggtgctagtgcttgtagcagatgtgacgacaacgtggaattcgtgcctaggcagttaggtctcaccgaaaggcgcgtgcatatctcacatctcctggcacacactaggtatacatttgaggtgcaggcagtcaatggtgtgtccggtaagtcacctctgcctcccaggtatgctgccgtgaacattactacgaaccaggccgctccgtcggaggtccccacccttcggctgcactcttcatccggcagcagcttgaccctcagctgggcccctcccgagcgcccaaatggcgttatcctggactatgagatgaaatacttcgaaaaatcagaagggattgcaagtactgtgacgtctcaaatgaactctgtgcagctcgacgggctccggcctgacgccaggtatgtagtccaggtgcgtgcccgtactgtcgcagggtacggacagtactctagacccgcagagtttgaaacgacctctgaacggggatccggcgcacagcagctgcaagagcagctccctctgatcgtgggttccgccacggcgggactggtatttgtggtggctgttgtggtgattgccattgtatgcctgcggaaacagcggcacggaagcgactcagaatacaccgagaagttgcagcaatacattgcgccagggatgaaggtctacatagatcctttcacttatgaagacccgaacgaagccgtcagggaattcgctaaggagattgatgtgtcctgcgtgaagattgaggaagtgatcggcgctggtgagttcggtgaggtttgcagggggcgtctgaagcagccaggcaggcgcgaagtgtttgttgctatcaaaacattgaaggtcgggtatactgagagacaacggagggactttctctctgaggcctctatcatgggtcagttcgaccaccccaatatcatccggctcgaaggcgtcgttacaaagtctcggccagttatgatcctgacagagttcatggaaaactgcgcactcgattctttcctgcgccttaacgacgggcagtttactgtcattcagctagtggggatgctgaggggcatcgctgccggaatgaaatacctcagcgagatgaattatgttcatcgtgatttggccgctcgcaacatcttggtcaacagtaacctggtttgcaaggtgtcagactttggcctgagtcgcttccttgaggatgacccctctgaccccacttacacttcgtctctggggggaaagattcctattcgttggacagcccctgaagcaattgcctacaggaaattcaccagcgcaagcgatgtatggagctacggcatcgtgatgtgggaggtgatgtcctacggagagaggccctattgggatatgtccaaccaggacgttatcaacgctgtagagcaggattatcgactgccccctcccatggactgcccaaccgccctgcaccaactcatgctggattgttgggtgagggataggaacctccggcctaaattttcacagatcgtcaatacactagacaagcttatccgaaacgccgcttctctcaaagttatcgcctccgcccagtcggggatgtcccagccgcttttagacaggacggtgcccgattacaccacattcacaactgtcggcgattggcttgacgccatcaaaatgggcagatacaaagaaagcttcgtgagcgctgggtttgcaagcttcgatttagtagcccaaatgaccgcagaggatttgctgcggattggggtaaccctcgctggacatcagaaaaagatcctgagctctatccaagacatgagactacagatgaaccagactctgcctgtacaggtgtag

SEQ ID NO: 222080 - DNA, 3066 bp, synthetic construct
  misc_feature 1..3066: note = Description of Artificial Sequence: Synthetic coding sequence
  source 1..3066: mol_type = other DNA
atggctaccgagggcgctgcacagctggggaatcgcgtggctgggatggtttgtagtctatgggtacttcttctcgtgtcatccgtcctcgccctggaagaggtcctgctcgacacaacgggggagacatccgagataggatggctgacttaccccccaggcggttgggacgaagtaagcgtgttagatgaccagcggagactaacccggactttcgaagcgtgccacgttgctggcgcacccccaggaacaggacaggacaattggctgcagactcacttcgtcgagcgacgcggagcccaacgcgctcacattcgactccatttctccgtaagagcctgtagctctttaggtgtttctggagggacatgtcgagagacttttaccctgtattacaggcaagctgaagagcctgactcgcccgacagcgtgagctcctggcatttaaagcggtggactaaggtggacactatagcagctgacgagtcattcccgtcatcatcttcaagctcatcttcctcttccagcgccgcttgggctgtgggcccacacggagccggtcaacgcgctggtctgcaactgaacgtgaaagagcgcagctttggtccgctcacccaacgaggattttatgtagcattccaggataccggcgcttgtctggccttggtggcggtcaggttgtttagctatacatgtcccgcagtcttgaggtctttcgcttcattccctgaaacccaggctagcggtgctggtggagccagtctcgtggctgccgtgggcacatgtgtcgcacacgctgagcccgaggaagacggggtgggaggacaggcaggcggtagccccccacggctgcactgtaatggggagggcaagtggatggtcgccgtgggtggctgtcgctgccagccaggctaccagccagcacgaggcgacaaggcttgtcaagcatgtccaagagggctctataaaagcagtgccggaaatgccccttgctccccctgccctgcacgaagccatgctccaaatccagccgctccagtctgtccatgtctggaggggttctaccgagccagcagtgacccccctgaagccccttgcaccggacccccttccgcacctcaggaactgtggtttgaagttcagggaagcgccctcatgcttcactggaggcttccgagagaactgggtggacgaggagatcttctgttcaatgtggtctgtaaggagtgcgagggcagacaggaaccggcttcaggagggggaggaacatgccacagatgccgagatgaagtccactttgaccccagacaacgcggactgacagagtctcgggtcttagtgggaggcctgagagcacatgtcccttacatcttggaagtacaagcggtgaacggcgtcagtgaacttagtcccgatccaccccaggccgctgcaatcaatgtgagcacttcccacgaagtgccttctgcggtgccagtggttcatcaagtcagtagagcctctaacagcattaccgtcagttggccacagccagatcagactaacggcaatattctggactaccagcttagatactacgatcaggcagaagacgaatcccattcattcacacttaccagcgagaccaacacagcgacagttacacaactcagcccaggtcatatctacggtttccaggtgcgggctagaacagctgctgggcatggcccatatggcggaaaagtgtattttcagactctgccacagggggagctgagctctcagctgcccgaaagactttctctggtgatcgggtcaattttaggcgctcttgcctttctcctcctagcggctataactgtcctggcagtcgtgttccagcggaaacgtcgagggactggttacaccgaacaactgcagcagtatagctctcctggtctgggcgtgaaatactatattgacccttccacctacgaggacccatgccaggccataagagagctcgcacgggaagtagaccccgcatatatcaagattgaggaggtgatcggtaccggatccttcggtgaggtcagacaggggagactgcagccccgagggcgacgagagcagaccgtagccattcaggccctctgggcaggaggagccgagtccctgcaaatgacatttctgggcagagccgctgtgctgggccagtttcagcatcccaatattttaagactcgaaggggtggtgaccaaaagtagacctctgatggtcctcactgagttcatggagttaggacctctggattcctttcttcgacagcgcgaaggtcagttcagcagcttgcagctggttgccatgcagaggggggtggcagctgccatgcagtacctgagttccttcgctttcgttcaccgaagcttatcagctcactccgtgctggtgaacagccacctggtgtgcaaagtggctcggctggggcatagtccacaagggccatcttgcctgctcagatgggcggcacctgaagtaatcgctcacggaaagcatacaacttcctctgacgtatggtcctttggcatactgatgtgggaggtcatgagttacggagagcgcccttattgggacatgagcgaacaagaagtgctcaacgctattgagcaggaattcagattaccccctcctcccggttgtcccccaggcctacacctgcttatgttggacacctggcagaaggacagagctaggcggcctcatttcgaccaattggtcgctgcattcgacaaaatgatccggaaacccgacacccttcaggccggaggcgatccaggggaacgacccagccaagctttactgacacctgtggccctggacttcccctgcctcgacagcccccaggcctggttatcagctattgggcttgaatgttaccaagacaattttagtaaatttgggctctgcactttcagtgatgtggcccagctaagcctcgaagatctgccagcactgggaattaccctcgccggacatcagaaaaaattattacaccacattcaactgttgcagcagcacctgcgtcagcagggatcagtcgaagtatag

SEQ ID NO: 222081 - DNA, 2235 bp, synthetic construct
  misc_feature 1..2235: note = Description of Artificial Sequence: Synthetic coding sequence
  source 1..2235: mol_type = other DNA
atggccacagagggggctgcccagctgggaaacagggtggctggcatggtgtccgtcggcggttgtagatgccagccgggataccaacctgccaggggcgacaaagcttgtcaggcatgccccagaggcctttacaagagcagcgcaggtaacgccccatgttctccttgccccgcacgaagccacgctcctaacccagccgcacctgtttgcccgtgtctcgagggattttacagagcaagcagtgatcctcccgaggcaccatgcaccgggcctccatccgctccacaagaattgtggttcgaagtgcaagggtccgccctcatgcttcactggagattgcctagggagctggggggtcgtggcgacctgctgtttaatgttgtatgtaaggaatgtgaagggaggcaggaacccgctagtggcggaggcggtacttgtcaccggtgtagggatgaggtccacttcgatcctaggcagcgcggactgacagaatctagagttctagtagggggtctgagggcccatgtgccatatatccttgaagtgcaagcggtgaatggcgtctccgaattgtcgcctgaccctccgcaggccgctgctattaacgtgtccacaagccatgaagtgcctagcgcagtgcccgttgtccaccaggttagccgtgcttccaactccataaccgtgtcttggccgcaaccagaccagacaaatggtaatattttggactatcagctgagatactatgaccaggccgaggatgaatcccattcattcacccttacttcagaaactaacaccgcgaccgtaacccagttaagtcccggacacatctatggctttcaagtaagagccagaactgctgccggtcatggcccatacgggggtaaggtatacttccagactcttccccagggcgagctgagctcacagctgcctgaacggctgagtctggtgatcggctccatcctgggcgctttagcatttcttctgctggcagccatcacagtattagccgtcgtgtttcagcgtaagagaagaggaacagggtatactgaacagctgcagcaatattctagcccgggtctgggcgtgaaatactatattgatccgtccacatatgaggatccctgtcaggcgatcagagagctggccagagaggtagaccccgcttatatcaagatcgaggaggtcataggtaccggttcttttggagaggtcaggcagggcaggctacagccaaggggaaggcgggaacagaccgtggcgattcaggctctgtgggcgggtggtgctgagtccttgcaaatgacgttcttgggtagggcagccgtgttgggtcagtttcagcatcctaacattctgcgattagagggagtagtgaccaaatcacggccactgatggttctgaccgagttcatggagctgggccctttagattcctttctgcggcagcgggagggtcagttcagctcgctgcagctggtggctatgcagcgaggcgtggccgctgccatgcagtatctgtcttcttttgctttcgtgcataggtccctctctgctcactctgtgctcgtaaactctcatctcgtctgtaaggtcgcccgactcgggcacagcccccaagggccttcctgtctgctacggtgggcggctcctgaggtgatcgcgcatggtaagcacactacctcgtccgacgtatggtcattcggtatactcatgtgggaggtcatgtcttacggcgaaaggccatactgggacatgagcgagcaggaggtgttaaacgccattgagcaggaattcaggcttcctccacctcccggttgccctccagggttgcacctgttgatgctggatacgtggcagaaagacagagcgcgaagaccccactttgaccagctcgttgccgctttcgacaaaatgatccgaaaacctgacactttacaagccggaggtgaccccggagagagaccatcccaagccctcttgacccctgtggccctcgactttccttgtctggactccccccaggcctggctcagcgctattggcttagagtgttaccaagacaatttttcaaagtttggcctctgtacctttagtgatgttgcccaactgtcactggaggatctgcctgccctggggatcacactcgccggacaccagaagaagctccttcatcatattcagttgctgcaacaacacctaagacaacagggaagtgtagaggtgtag

SEQ ID NO: 222082 - DNA, 3066 bp, synthetic construct
  misc_feature 1..3066: note = Description of Artificial Sequence: Synthetic coding sequence
  source 1..3066: mol_type = other DNA
atggcaaccgaaggggctgcacagctcggcaaccgcgtggcgggtatggtgtgttccctgtgggtgctgttgttggttagcagtgtcctggcgctcgaggaggtgttgcttgataccaccggcgaaacttcagaaattggatggctgacttatcctcccggaggctgggacgaagtaagcgtgcttgacgatcaacgtagattaacccgtactttcgaggcctgccacgtcgccggagccccacctggaactggacaggacaattggctgcaaacccactttgtggagcggagaggagctcagagggcacatataaggctacatttcagtgtcagggcatgttctagcttgggcgtaagtggcggaacctgtcgggagaccttcactttatactacaggcaagctgaggagcctgatagtcccgattctgtgtccagttggcacctgaaaaggtggacaaaggttgacaccatagccgctgatgagtcctttccatctagctcctcaagcagtagctcaagcagctccgcggcttgggcagtggggccacacggcgctggccaacgagcaggcctacaattgaatgttaaagagcgctcctttggtccactgactcagcgcggattctatgtcgcattccaggacactggtgcatgtctggccttggtggctgtcagactgttttcatacacatgcccagctgttctcaggtcctttgcctcttttcctgagacgcaagcctctggtgccggtggggcttccctggtcgcagctgtaggaacttgcgtcgcacacgcggagcccgaggaagatggggttggtgggcaggccggtggcagtcccccacgtctgcactgcaacggcgaagggaagtggatggtggctgtcggcggatgtcgttgccagccagggtaccagccggcacgaggggataaggcttgccaggcctgccctcgcggtctttataaatcatcggcaggaaatgccccttgttctccatgccccgcaaggagtcacgcacctaacccagccgctccggtctgcccttgcctagaaggattctaccgcgcatcttccgaccccccagaggcaccttgcacgggccctccttcagctcctcaggagctatggtttgaagtacagggtagtgcattgatgctgcactggcgactgcctcgcgagctgggtggcaggggggacctgctgttcaacgtcgtgtgcaaagaatgtgaaggtcgccaagagccggctagcggtgggggaggaacatgccacaggtgcagggacgaagtgcactttgaccctagacagagaggactcactgagtcacgggtgctagtggggggacttcgtgcccatgtgccatacatcttagaggtacaggctgtgaacggggtgtcagagttaagccccgatcccccacaggcggctgcaatcaatgtgagtacgtcccatgaggtgccaagcgccgttcctgtggtgcatcaggtgagtcgcgcttctaacagtatcactgtctcatggccccagccagatcagacgaacggaaacattctcgactatcagctacgttactacgatcaggctgaggatgaatctcatagttttacattgaccagcgagaccaacaccgctacagttacccagcttagccctggccacatttatggcttccaggttcgagccagaacagctgctggtcatgggccatacggcggaaaggtctacttccaaaccctcccacagggtgagctgagttctcagctcccagagcggctctcactggtcatcggcagcattctgggggcacttgctttccttctgctcgccgctattactgttctcgccgtggtctttcagcgaaaaaggcggggaaccgggtataccgagcaactgcagcagtactcctcccctggcctgggagtgaagtattacattgaccccagcacgtatgaagatccttgtcaggctatcagggagctggcccgtgaggtggatccagcctacatcaaaatcgaagaagtgatcggcaccggatcattcggcgaggtgcgacagggcagactgcaacccaggggccgacgtgaacaaacagtcgcaatccaggcactttgggcaggcggagccgaaagcctgcagatgacctttctcggtagggctgctgtcctgggccagttccagcatccgaatatcctccgccttgagggtgtggtgacaaaaagtcggcctctgatggtgcttaccgaattcatggagttgggcccactggattctttcctacgccagagggaaggacagttttccagcctccaactggttgcaatgcagcgaggggtggcagcagcgatgcagtatttgagtagttttgcctttgtgcacaggagtctgtcggcacattccgtgctggtgaattcccacctggtctgtaaggtggcacgtctcgggcatagcccccagggcccttcttgcctgttacgatgggctgcgccagaggtaattgcccacggtaagcatacaactagttctgacgtctggagctttggcattctcatgtgggaggtgatgagctatggcgagaggccctattgggatatgtctgagcaggaggttctgaacgccatcgaacaggagtttcgcctgccacccccacctggatgccctcctggactccatctgctgatgctcgacacctggcagaaagaccgcgcacgcaggccacatttcgaccagttggtggccgctttcgacaagatgattcgcaaacccgacacactgcaggccggtggcgacccgggtgaaagacctagccaggccctcttgacccccgttgccctggatttcccctgccttgacagcccccaggcctggctatctgctatcggattggagtgctaccaggacaattttagcaagttcggcctgtgcacattttctgacgtggcccagctgtccttggaggatctgccggctttaggaattaccttggccggtcatcagaagaagttgctgcatcatatccagctgctccagcagcatctccgccagcagggtagcgtggaggtgtag

SEQ ID NO: 222083 - DNA, 654 bp, synthetic construct
  misc_feature 1..654: note = Description of Artificial Sequence: Synthetic coding sequence
  source 1..654: mol_type = other DNA
atggccggacggaccgtgagggcggagacaaggagtcgcgcaaaggatgacattaagaaggtaatggccacaatcgagaaagtaagacggtgggaaaaacggtgggtgacagtgggagacactagtcttcggatctttaagtgggttcctgtagtggatcctcaggaagaagagcggcgaagagcaggaggcggagccgagcggtcacggggtcgtgagagacggggacgaggtgcctctccacgagggggtgggcctttgattttgctggacttgaacgatgagaactccaaccagagcttccatagcgaaggcagtctgcagaagggaactgagccctcccctgggggaaccccacagccaagccggccagtgagccccgcaggaccacctgaaggggtgcccgaggaggctcaacctcctcgactaggccaggaacgggacccaggcggtattactgcaggcagcaccgatgaaccccctatgctcacaaaagaggaacctgtgcctgaactcttagaggcggaggctcctgaggcttaccccgtgtttgagcccgttcctccagtcccagaggccgcacagggggataccgaagatagtgagggtgcacccccactgaaaagaatttgccccaatgctccagatccgtag

SEQ ID NO: 222084 - DNA, 717 bp, synthetic construct
  misc_feature 1..717: note = Description of Artificial Sequence: Synthetic coding sequence
  source 1..717: mol_type = other DNA
atggctgccgcacccttacttctgctgctgctcctcgttccagtgccattactgccccttctcgctcagggccctggaggagcgctgggcaaccgtcacgcagtgtactggaattcaagtaaccagcacctgcggagagaaggctacaccgtgcaagttaatgttaacgactatttagatatctactgtccccactataactcatcgggcgtgggcccaggtgctgggccaggacccggaggtggcgctgagcaatatgttttgtatatggtgagcagaaacgggtacagaacttgcaacgctagtcaaggatttaagaggtgggaatgtaacaggccacatgccccacattctccaattaaatttagcgaaaaatttcagaggtattcagccttctcgctggggtatgagttccatgcgggtcatgaatattattatattagtacaccgacccataatctgcattggaaatgtctccgcatgaaggtgtttgtttgctgcgccagcacatcccatagtggagagaagcccgtcccaaccctaccacagtttacgatgggacccaacgtgaagataaatgtgctggaggacttcgaaggggagaacccacaagtcccaaagctggagaagtcaatctcggggaccagccctaaaagggaacatttacctcttgctgtggggattgcttttttcctgatgacattcctcgctagttag

SEQ ID NO: 222085 - DNA, 639 bp, synthetic construct
  misc_feature 1..639: note = Description of Artificial Sequence: Synthetic coding sequence
  source 1..639: mol_type = other DNA
atggcggcagctcctcttctgctcctcctcttgctcgtccctgtgcctctcctgccactgttggctcaggggccagggggtgctttgggaaaccgccatgcagtttattggaacagtagtaaccagcacctcaggagggagggatatacggtacaagtgaacgtgaatgactacctggatatttactgcccccactacaactccagtggagtcgggccaggggcagggccaggtcccggtggaggcgcagagcaatatgtcctttacatggtgtccaggaacggctaccgcacatgcaatgcgagtcagggatttaaacgctgggagtgcaacagaccacatgcaccccatagccctataaagttctcggaaaagttccaacgctattccgcattctcgctgggttatgagttccatgccggtcatgaatactattacatttctacacctacccacaacctgcactggaagtgcctgcgaatgaaagttttcgtctgttgcgcctccaaagacttcgagggggagaacccacaggtccccaaactagagaaaagcatttcaggaacctcccccaagcgcgaacacctgcccctagccgtggggatagccttcttccttatgaccttcctagcatcctag

SEQ ID NO: 222086 - DNA, 702 bp, synthetic construct
  misc_feature 1..702: note = Description of Artificial Sequence: Synthetic coding sequence
  source 1..702: mol_type = other DNA
atgcggctcttacctttacttcgcaccgtgttgtgggccgcattcctgggctcgcctctgcgcggaggttcgtctctgcgtcatgtggtatactggaattcttccaatcccagcctgaggcgcgaaggctacacggtccaggtgaatgtcaacgactacctggacatttactgtcctcattataatagcagtggtgtgggacccggtgcaggcccagggcctgggggtggagctgagcaatacgtcctgtacatggtgagccgtaacgggtatcgaacctgcaacgctagtcaagggttcaagcggtgggagtgtaacagaccgcacgctccccactctcctattaagttcagcgagaaatttcagcggtactctgccttttctctgggctatgagttccacgcagggcatgagtactattacatttccaccccaacccacaacctccactggaagtgtttgcgaatgaaggtctttgtgtgctgtgccagcacaagtcattctggagaaaaaccggttccgactttacctcaattcactatgggtcctaatgttaagattaatgtactagaggacttcgaaggggaaaatccacaagtgcccaagctggaaaaatcaatctctggaacgagccccaaacgcgaacaccttcccctggctgtcgggatcgcattttttctcatgacatttctggctagttag

SEQ ID NO: 222087 - DNA, 582 bp, synthetic construct
  misc_feature 1..582: note = Description of Artificial Sequence: Synthetic coding sequence
  source 1..582: mol_type = other DNA
atgagactgctgcctctcttgcgcaccgtgctatgggcagctttcctcggtagccccctcaggggcggttctagcctgcgacacgttgtgtactggaattcatctaatcccagactgctacggggtgacgcagtcgtcgagctgggactgaacgattaccttgatattgtgtgtcctcactacgaaggaccgggtccaccggagggtccggaaactttcgctctgtatatggttgactggccgggttacgagtcttgccaggccgaagggcctcgagcatataagagatgggtgtgttcgctaccctttggccacgtgcaattctccgagaagattcagcggttcactcccttctctctggggttcgagtttttgccaggtgagacctattactacatttcagtcccaacccctgaatcttccggccagtgtttgcggttgcaggtctctgtctgttgcaaggaacgtaaccttcctagtcatcctaaggagcccgagtcaagtcaggaccccctcgaagaggaaggctcccttttgccagcgctcggggtcccaattcaaaccgacaagatggaacattag

SEQ ID NO: 222088 - DNA, 606 bp, synthetic construct
  misc_feature 1..606: note = Description of Artificial Sequence: Synthetic coding sequence
  source 1..606: mol_type = other DNA
atgaggttactccctctgttgagaacagttctttgggctgccttcctgggatcccctttgagagggggaagcagcttgcgtcatgtggtgtactggaactccagcaatcccaggctcctgaggggagacgccgtggtggagctgggactgaacgactacctggacatcgtgtgtcctcattacgaaggacctggcccacccgagggacctgaaacattcgctctgtatatggtggactggcccggatacgagtcatgccaagccgaggggccaagggcttataaacggtgggtctgcagccttcccttcggacatgtccagttttcagaaaagatccagcggtttaccccatttagtctgggctttgagtttctgcccggagaaacctactattacatttcagtgcccaccccagaaagcagcggccagtgtctccggttgcaggtgagtgtgtgttgtaaggaaaggaagtcagaaagcgcgcatcccgtaggatccccaggcgagtcgggtacgtcaggctggaggggaggtgatacaccatcacccctctgccttctgctgttgctgctccttttaatactgaggttgctgcgtattctatag

SEQ ID NO: 222089 - DNA, 624 bp, synthetic construct
  misc_feature 1..624: note = Description of Artificial Sequence: Synthetic coding sequence
  source 1..624: mol_type = other DNA
atgaggttgctgccactccttcgcaccgtgctgtgggctgcttttctgggctcccccctcagaggtggcagcagccttcgccacgtcgtctattggaatagcagtaacccaagactgctcaggggagacgcagtggtggaactgggtctgaatgactatttggacatcgtctgtccgcattacgagggcccaggcccacccgagggccctgagacatttgccctttacatggtcgattggccaggatacgagtcctgccaagctgagggacctagagcttacaaaaggtgggtttgcagtttgcctttcggtcacgtacagtttagtgagaaaatacaaagattcacgcctttctctttagggtttgagtttctgcccggagagacctattactatattagcgtgcccaccccggagagttcgggacaatgcctgcgactgcaggtgtccgtgtgttgtaaggagaggagggcacgagtcctaccacgcagtcctggaggaggagggattcctgccgcttgtactggaggcgctaactcagatcggcaggatggggctctgatgggggagatccggggttcggaagtgacactggctggggcttgccctctgattaccggctag

SEQ ID NO: 222090 - DNA, 1083 bp, synthetic construct
  misc_feature 1..1083: note = Description of Artificial Sequence: Synthetic coding sequence
  source 1..1083: mol_type = other DNA
atgagtgactcaaaagaacctcgcctgcaacagcttggacttctggtgtccaaagtaccatcttcgattagtcaggagcagtcgcgacaagacgccatttatcagaacctgactcagctgaaagcagccgtgggggagttgagcgagaaatccaaactccaggaaatctatcaagaactcacccagctgaaggccgcagtcggagagcttccggagaagtccaagttgcaggagatttatcaggaattgacacgccttaaagccgctgttggggaactgccggagaagtccaaacttcaagagatctatcaggaactaacatggctgaaggctgccgtgggtgaactgcccgaaaaatccaaaatgcaggagatataccaagaactcacaaggcttaaagcggctgtcggcgagcttcctgaaaagtctaagcagcaggagatctaccaagagctcacaaggctcaaggctgccgtcggagaactccctgagaagtccaagcagcaagaaatctaccaagaactgacccgcttgaaagccgcagtgggcgagctccccgagaaatccaaacagcaggagatttaccaggagttgacccagctgaaggccgctgttgagcgcctgtgtcatccctgcccatgggagtggaccttttttcagggcaattgctacttcatgtctaattcacagcgtaattggcatgattcaatcaccgcatgcaaggaggttggcgcacagttagtggtcattaaatccgcagaggagcagaacttccttcaactccagagtagccgttcaaatagatttacctggatgggtctgagcgacctaaatcaggaggggacttggcaatgggtcgatgggagccccctgttgcctagttttaaacaatactggaaccgcggtgagccaaacaacgtaggtgaggaagattgtgccgaattctcggggaatggatggaacgacgacaagtgtaatctggctaagttttggatttgcaaaaaatccgcggcttcttgtagcagagacgaggagcagttcctgtctccagcacccgcaacacccaatcccccaccggcatag

SEQ ID NO: 222091 - DNA, 888 bp, synthetic construct
  misc_feature 1..888: note = Description of Artificial Sequence: Synthetic coding sequence
  source 1..888: mol_type = other DNA
atggagaagatgagtcgaccactacctctgaaccctactttcataccccctccctatggcgttctgagatctctattggaaaatccactgaagctaccacttcaccacgaggatgcgttcagcaaagataaggataaggaaaaaaaactggacgacgagagcaacagtcccacagtcccgcagtccgcattccttggtcccacactgtgggacaaaacattaccttacgacggcgatacatttcagctggagtatatggatctggaagagtttctttccgaaaacggcatccctccctctccctcgcagcacgatcattctccacatccccctgggctccagcccgctagcagcgccgctcctagtgttatggatctctcctcgcgggcttctgcgcctctccaccccggaatcccttccccaaattgtatgcagtctcccatccggcctggccagttactcccggcaaatagaaatacaccttccccaatagaccctgacaccatccaggttccagtaggctacgagcctgacccagccgacctggcgctctcctctatccccggtcaggagatgtttgatcctcgtaaaaggaagttctctgaggaggaactcaagccacaaccaatgatcaagaaagcacgtaaagtgtttatccccgatgacctgaaggatgacaaatattgggcacgcagaagaaagaataatatggccgcaaagcggagtagggatgccagacgtctaaaggagaaccagatagccataagagcatccttcctggaaaaggaaaattccgctcttaggcaggaagtggcagacttaagaaaagagttaggaaaatgcaaaaacatcttagcaaaatacgaggccagacatggacccctttag

SEQ ID NO: 222092 - DNA, 780 bp, synthetic construct
  misc_feature 1..780: note = Description of Artificial Sequence: Synthetic coding sequence
  source 1..780: mol_type = other DNA
atggccgctgctgctcagctctcactgactcagctgagttccgggaatccggtctacgagaagtattaccgccaagtcgacacaggaaacactggcagggtccttgccagcgatgccgctgcatttctcaaaaagtctggcctgcctgacctgatcctcggaaagatttgggatttagccgacacagatggaaaaggaatcctgaataaacaggaattctttgtggctctgaggctggtcgcctgtgcacagaatggtctggaagtgagcctgtcctctctgaaccttgcggtacctccgcctaggtttcatgacacctcttctccccttcttatcagtggcacttctgccgcagagctaccttgggctgttaagcccgaagacaaggcaaagtacgatgctatattcgattcactgtcaccagtgaatggctttctgagcggggacaaagtgaagcccgtactactaaattcaaaactgcccgtagatattttggggagggtgtgggagttgtccgacatcgaccacgatggaatgttggaccgggacgagttcgctgtgaccgaaagccactccgtgacccaggctggagtacaatggagggacctgtcctctctgcagccccgacctccgggtttcaaattattcttccacctttccttactacgatcatgggactaccgtcatgcacctcccccaccagctaatttttatatcttttcccgcgattcggtgtcaccgtgccttcctgactggtccagggccccagataatcgttag

SEQ ID NO: 222093 - DNA, 2289 bp, synthetic construct
  misc_feature 1..2289: note = Description of Artificial Sequence: Synthetic coding sequence
  source 1..2289: mol_type = other DNA
atggctgcagccgcacagctgtccttgacccagctgagctcaggcaatcctgtatatgagaagtattatcggcaggttgacacaggcaatactggcagagtgcttgcttctgacgccgctgctttcttgaaaaaaagcggcctacccgatctgatcctgggcaagatctgggacctggctgacaccgatggaaagggaatcctgaataaacaagagttctttgttgccctccggcttgtggcatgtgctcagaatgggctcgaggtcagcttgagtagcctgaacctcgccgtgcctccaccacgcttccacgataccagttcaccacttctaatcagcgggacaagtgctgccgagctcccatgggccgtgaaacctgaggataaagctaaatatgatgcgattttcgattctctcagtccagtgaacggcttcctttcaggagataaggtcaagcctgtgttgctcaattctaaactgccagtggacatcctaggacgtgtttgggagctgtccgacatcgatcatgacggtatgttagatcgggacgagttcgctgtggcgatgtttctggtgtactgtgcactggagaaagaaccagtccctatgagcctgcctccagctctggtccccccaagtaagagaaaaacctgggtggtgagccccgcagagaaggcgaagtacgatgagattttccttaaaactgacaaggatatggatggttttgttagcgggctggaggtgagggagatctttcttaagactggcttgccctcaacactgttggcacatatttggagcctgtgtgacaccaaggactgtggcaaactgtctaaggatcagtttgctctagctttccatttgatcagccaaaaattgattaaggggatcgatccaccccacgtgcttacaccagagatgatcccaccctccgatcgtgcatccctgcaaaaaaacataatcggcagcagcccagtggccgacttttctgccattaaggagctggacactttgaacaacgaaattgtagacttgcagcgcgagaaaaacaatgtcgagcaggatttgaaggagaaggaagacaccatcaagcagagaaccagtgaggtccaagacctgcaggacgaagttcagcgggagaacacgaacttacaaaaactgcaggcccagaaacagcaggtgcaggagctgctggacgagctggacgagcaaaaagctcaattggaagaacagctgaaggaggttagaaaaaaatgcgcagaggaggcccaacttgcacggagctcaccggagctcctccctagtggagttacagatgagaatgaggttaccactgccgtcactgagaaggtctgctccgagctagataataatcggcactcgaaagaggaggacccattcaatgtcgattcatcaagtctcacgggaccagtggctgatacaaacctggatttcttccaatctgaccccttcgtggggtctgacccatttaaggacgatccgttcggtaaaattgacccatttggtggtgatcccttcaaaggatctgatcccttcgccagcgactgtttcttccgtcagagcaccgatcctttcgctacctcatcaaccgatccattctcggccgcaaacaattctagcatcacttccgtggaaactctaaagcacaacgacccttttgcccctggtggaacagttgttgccgctagcgacagcgccaccgatccattcgcctccgtctttgggaacgagtctttcggtggtgggttcgccgacttcagcacgttgagcaaggtgaacaatgaggatcctttcagatccgctacatcttcctccgtctcaaacgtggttataaccaagaatgtgttcgaagagactagtgtcaaatccgaggatgagccccctgccttaccccctaagataggcacgcccactcgtccatgcccactccccccaggtaaacgctctatcaacaagctcgattcgcccgacccatttaagctgaatgacccgtttcagccgttccctgggaacgactctccgaaggagaaggatcccgagattttctgtgaccctttcacttcagccactaccactactaacaaggaggccgatcctagcaattttgccaacttcagcgcttaccccagcgaggaggacatgatcgagtgggccaagcgtgagtcagagcgtgaggaggaacaacggctcgccagactcaatcaacaggagcaggaggacctggaactggctattgctctttctaagagtgagatctccgaagcttag

SEQ ID NO: 222094 - DNA, 2691 bp, synthetic construct
  misc_feature 1..2691: note = Description of Artificial Sequence: Synthetic coding sequence
  source 1..2691: mol_type = other DNA
atggcagctgctgcgcagctgagcctgactcaactcagctccggcaatcctgtctatgagaaatactaccgccaagttgacaccggtaataccggacgggtattggcatcggatgccgctgccttcctgaagaagtcaggtcttcctgatctcatcttggggaagatttgggatctggccgacactgacgggaaaggaatactgaacaaacaggaatttttcgtggcactcaggctggtggcctgcgcccaaaacggcttagaggtgagtctgtcctccctgaatctcgccgtcccgccaccacgctttcatgatacttcttcacctctgctgatctctggcacaagcgccgcagaactgccttgggccgtgaagccggaagacaaagcgaaatatgacgccatatttgacagtcttagtcctgtgaacggcttcctgagcggcgacaaggttaaaccagtgctcctgaactcgaaactccctgttgacatcctggggagagtctgggagctgtcagatatcgaccacgatggaatgctggatcgggacgagttcgcagtggctatgttcctggtgtactgcgctctggaaaaggagcctgtgccgatgagcctccccccagccctggtcccaccctctaagcgaaaaacttgggtcgtctccccagccgaaaaggctaaatatgacgagatttttctgaaaactgacaaagacatggacggcttcgtgagcggattggaagtcagagagattttcctcaagacagggctaccgagcacattgctcgctcacatttggagtctgtgcgacactaaggattgtgggaagctgagtaaggatcaatttgccctggcgttccaccttatatcacagaagcttattaaggggatagatccgcctcatgttctgactcctgagatgatccccccttctgatagagccagtctgcaaaagaatataatcggttcttctcctgtcgccgattttagcgccataaaagaacttgacaccttgaataatgaaatcgttgacctgcagcgggaaaaaaacaatgtggagcaggatctgaaggaaaaggaggataccatcaagcagcgcaccagcgaagttcaggatttacaggacgaagtgcagagagagaacaccaatctgcaaaaactgcaggctcagaaacagcaggtgcaggagctccttgacgaattagacgagcaaaaggcacagttggaggagcagctcaaggaggtacgtaaaaagtgtgccgaagaggcacagttgatatcctccctcaaggccgaactcacaagccaggagtcacagatatccacttacgaggaagaattagccaaggcgcgtgaagagctatccaggttgcagcaggagactgcagagttggaagagtcagtggagtctggcaaggctcagctagagcccttgcagcaacatctgcaggatagccagcaggagattagcagcatgcagatgaagctcatggagatgaaagatttggagaaccataactcccagttaaattggtgcagcagccctcacagtatcttagtcaatggtgccaccgactactgtagtttgagtacaagttctagcgagacagctaacctgaacgagcatgtagaggggcaatcgaacttggaatctgaacccattcatcaggagtcccctgccaggagcagccccgaactacttccgtccggcgtgaccgacgaaaacgaggtaacaacagcagtcaccgagaaagtgtgttctgagcttgataacaacaggcattctaaggaggaagaccctttcaacgtcgactcatctagcctcacaggtccagtcgccgataccaatctcgacttttttcaatccgacccatttgttggctctgatcccttcaaggacgatcctttcggaaagattgacccctttggtggggacccctttaagggatctgacccgtttgcatccgattgcttctttaggcagtctactgatcctttcgcaacatccagtaccgatccattttctgctgcaaataatagctccatcacttccgtggaaacactcaagcacaatgacccattcgcgcctggaggaaccgtggtggcagcatccgactccgccactgatcctttcgcctcggtcttcggtaacgagagcttcggaggcggatttgcggactttagcaccctttcaaaggtgaataacgaagatccttttcgtagcgcaacatctagcagcgtgagcaacgtggttattaccaaaaacgtcttcgaggagacttcggtcaaatccgaggacgagccacctgccctacctccaaaaattggcaccccaaccaggccttgtccgctgccaccaggcaaaaggtctatcaacaaactggattcccctgatccttttaagctgaatgatccctttcagccatttccaggaaatgattcacccaaggaaaaggacccggaaattttctgcgacccgttcacgagcgccaccaccactacaaataaggaagcagacccgagcaacttcgcaaacttttctgcttacccttccgaagaagatatgattgaatgggccaaacgggaatctgagcgcgaagaggagcaacggctagccaggctcaaccagcaagagcaggaagacctcgaactggccattgccctgagtaagtcagaaatcagcgaggcctag

SEQ ID NO: 222095 - DNA, 1722 bp, synthetic construct
  misc_feature 1..1722: note = Description of Artificial Sequence: Synthetic coding sequence
  source 1..1722: mol_type = other DNA
atgatcttgatggtgcgggactgtctcaagtcccaacaccgtgacccgcactgcgatcccagcgataaacgcgagaaaaacaacgtggaacaggacctgaaggagaaagaggacactattaagcaaagaacttccgaagtgcaagatctccaggatgaggtacagcgagagaatacaaatctgcagaagttgcaggcgcagaagcagcaagtgcaggagctgcttgatgagctggacgagcaaaaagctcaattggaggaacagctgaaagaggtcaggaaaaaatgtgccgaggaggcccagctgattagtagcctgaaggcagagctcacatctcaggagtcacagatcagtacctacgaagaagagctggccaaggcgcgagaggagctgtcaagattgcagcaggaaactgcagagctggaggaaagtgtagaaagtgggaaagcccagctggaaccactgcagcagcaccttcaggactcgcaacaagaaattagctctatgcaaatgaagctgatggaaatgaaggacctcgagaaccacaacagccaactcaattggtgctcctctccgcattcaatactggtgaatggggctactgactactgctctctcagcacatcctccagcgagacagctaacttaaacgaacatgtggaggggcagtccaatctggaaagcgagcccatccaccaagaaagtccggctcgatctagccccgagctcttgcccagtggcgtaaccgacgaaaacgaagtgactaccgccgtgaccgaaaaagtatgctctgagttggataacaacagacattccaaagaggaggacccattcaatgtggacagttcatccctaactggacccgtagcagacactaacttggacttctttcagagcgatccttttgtggggtctgatccatttaaagacgatccatttgggaaaattgaccccttcggcggagacccatttaaaggcagcgaccctttcgcttcagactgtttttttaggcagtcgactgaccctttcgccaccagctcaactgatccattttctgccgctaacaacagcagcatcacttctgtggagaccctcaagcataacgaccccttcgcgccaggaggcaccgtggttgccgcttcggacagcgccaccgatccctttgcctctgtgttcggaaatgagagtttcggaggaggattcgcagatttttctacactctccaaggtaaacaatgaagaccctttccgtagcgcaacttcttcctcagtttccaacgtggtgatcacaaaaaacgtgttcgaggaaacttccgtgaaatctgaagacgaacctccagcgctgccacccaagattgggacacctactcgcccttgccccttaccgcctgggaaacggagtataaacaaacttgatagcccagatcccttcaagctcaatgatcctttccagccattcccgggaaacgacagcccaaaagagaaggatccggagattttttgtgatccttttacatccgctaccaccaccactaacaaggaagcagaccccagtaactttgccaacttttccgcctatcccagcgaagaagacatgatcgaatgggccaagagggagtcagaacgggaagaggaacagcgcctggctcgcctaaaccagcaggaacaagaggatctggaactagcaattgctctgtctaaatcggaaatcagcgaggcttag

SEQ ID NO: 222096 - DNA, 2469 bp, synthetic construct
  misc_feature 1..2469: note = Description of Artificial Sequence: Synthetic coding sequence
  source 1..2469: mol_type = other DNA
atgaatgggcacattagcaatcacccctcttccttcggaatgtaccctagccagatgaacgggtacggaagcagccctacattttcacagaccgatagggaacacggctctaagacatctgccaaagcactctatgagcagcgcaaaaattatgccagggattcagtttctagcgtatccgacatctctcagtaccgtgtcgaacacttaacaacctttgttctggatcggaaggacgctatgataaccgttgatgatgggatccggaagctcaaacttctggatgcaaagggaaaggtgtggacacaggatatgatcctgcaggttgatgacagggcagtttcgctgatcgacctggagtcaaagaacgagctcgaaaactttcccctgaatactatacagcactgtcaagccgtcatgcattcttgttcttatgattccgtcctcgcgctggtttgtaaggagcccacgcagaataagccagatctgcacctcttccagtgtgacgaggttaaggccaatttgatcagtgaagacatcgagagcgcaatatcggactccaaagggggaaaacaaaaaagacgcccagacgccctgaggatgatttcaaatgcggatccttcaataccacccccaccgagggccccagccccagctccacccggaacagtgacacaggtcgatgtgcgatctcgggtcgccgcttggtccgcctgggcagcagaccaaggcgactttgagaaacccaggcagtaccatgaacaagaggaaactccagagatgatggcagcacgaatcgaccgcgatgtccaaatactcaatcacatcctggatgatatcgagttcttcattactaaactacaaaaggccgctgaagcattcagcgagctgagcaagcggaagaagaataagaaggggaagcggaaagggcctggagaaggcgtcttaacactgcgggctaagccacctcctcccgacgaattcttagattgtttccagaaatttaagcacgggttcaatctcctcgctaagttgaaatcacatatccaaaatccaagtgccgctgaccttgtccatttcctctttacccccctgaatatggtggttcaggccacaggaggcccagaacttgccagcagcgtactatcgcccctgctgaacaaggacacgattgattttctgaattacaccgtaaatggagatgagcgacagctgtggatgtccctggggggtacttggatgaaagctagagcggagtggcctaaggagcaattcatccctccctacgtccctagatttcgcaatggatgggagcctccaatgctgaactttatgggggcaaccatggaacaagacttataccagctggctgagagcgtcgctaatgtcgccgagcaccagaggaagcaggagattaaacgcctgagcactgagcacagcagcgtgagtgagtaccaccctgccgatggatatgctttctcttctaacatttacacacggggtagtcacctcgaccagggcgaggctgcagttgctttcaaacctacctcaaatcgccacatcgaccgcaattacgagccactcaaaactcagcccaaaaagtacgcaaaatctaaatacgacttcgtggctaggaataattctgagctttccgtgctgaaggacgacattctcgaaattttagatgataggaagcagtggtggaaggtgcgtaatgccagcggggattcaggatttgtccccaacaacatcttggatatcgtccggccacccgaatccggtttgggacgggctgatccaccttatactcacactatccagaagcagagaatggaatacgggccacgaccggcagacaccccccctgcaccaagcccaccacctactcccgcacccgtgcccgtgccactgcctcccagcacgccagcaccagtacctgtctccaaagtgcctgcgaatataacacgccaaaactcgagctcttctgatagcggaggaagcattgtgagagattcccagcgtcataaacagttaccagtggatcggcgtaaatcacaaatggaggaggtacaggatgaattaatacataggctgaccataggcaggagcgccgctcagaagaagttccacgtgccaaggcagaacgtccccgttatcaatattacttacgacagcacaccagaggatgtgaagacctggctccaaagtaaaggatttaacccagttactgtgaacagtttaggcgtgctaaacggggctcagttgttttctctgaataaggatgagttgcgaaccgtatgtccagaaggggcaagagtgtacagccaaatcacggttcaaaaagcagcgttggaggactcctccgggtcatcggagttgcaagagatcatgcggaggcgccaggaaaagatatcagcagctgcttccgatagtggagttgaatccttcgacgaaggttcgtctcactag

SEQ ID NO: 222097 - DNA, 366 bp, synthetic construct
  misc_feature 1..366: note = Description of Artificial Sequence: Synthetic coding sequence
  source 1..366: mol_type = other DNA
atgaacgggcacattagtaaccatcctagctcctttggtatgtacccatcccaaatgaatggctatggtagttcacccactttctcccagacagatcgggaacacggtagtaaaacaagcgctaaggcactgtacgagcaacggaagaactacgcaagagacagtgtttcatctgtctcggatatctcacagtacagagtggaacatctgaccactttcgtgttagacaggaaggatgccatgatcacagtcgatgatggcattcgaaagttaaagttactggacgccaagggaaaagtctggactcaggatatgatcctgcaagtggatgaccgcgcagtgtctctcatcgatctggagtcctag

SEQ ID NO: 222098 - DNA, 207 bp, synthetic construct
  misc_feature 1..207: note = Description of Artificial Sequence: Synthetic coding sequence
  source 1..207: mol_type = other DNA
atgaacggccatataagcaatcacccatcttccttcggcatgtatccgagccagatgaacggctatggcagcagtccgacctttagtcagacagaccgagagcatggcagtaaaacatccgctaaggcactctatgagcaaagaaagaattacgcccgagattctgtgtcttctgtctctgacatctctcagtaccgggtggagtag

SEQ ID NO: 222099 - DNA, 1689 bp, synthetic construct
  misc_feature 1..1689: note = Description of Artificial Sequence: Synthetic coding sequence
  source 1..1689: mol_type = other DNA
atgatggcggctaggatcgaccgggacgtacagatcctcaatcatatattagatgacattgaattttttatcacaaagctgcagaaggccgcagaagccttttcggaactctctaaacgaaagaaaaacaagaagggcaagcggaaaggccctggcgagggcgtgctgaccttgagagcgaagcctcctcctcccgatgaattcctggactgctttcagaagtttaagcatggtttcaatctccttgctaagttgaagagccatattcagaatccatcagccgcagacctcgtgcacttcctgtttaccccacttaatatggtggtccaagcaacagggggacccgagctcgcttcttctgtgctgtcacctcttctcaacaaagataccattgactttctcaactacactgtgaacggtgacgaaagacagctctggatgtctctcggagggacatggatgaaagcaagagccgaatggccaaaggagcagtttatcccaccttacgtgccgaggttcaggaatggctgggaaccccctatgctgaattttatgggtgccacaatggagcaggacctctaccagttagccgaaagcgtcgctaacgtagctgagcatcagagaaagcaagaaatcaaacgactatctactgagcactcctccgtgtctgaataccatcctgctgacgggtacgccttttcaagtaatatatataccaggggttcacacctggaccagggtgaagctgcggtcgcctttaagccgacttctaacagacacatagatcgcaattacgaacctcttaaaactcagcccaagaagtacgctaaatcgaagtacgactttgtggcccgaaacaattctgaactgtccgtactgaaggacgacatactggagattttggacgacaggaaacagtggtggaaggtcaggaacgctagcggggattcaggatttgtgcctaataacattctggatatagtgaggcctcccgagtcaggactcggacgcgcagacccaccttatacccacaccatccagaaacaacgcatggagtatgggccacgccctgctgatacaccaccggcaccttcacctccaccaaccccggctccggtccctgttcccctgcctccgtcaacacctgcccctgtccctgtttcaaaagttcccgctaacataaccaggcagaatagttcctccagcgattcggggggatctattgtgagagacagccagaggcataaacagctgccagtggatcgccgaaagagtcaaatggaagaagtccaagatgaattgatccatcgtctcacaatcgggaggtccgccgcacagaagaagttccatgtgccaagacagaacgtccccgtcatcaacatcacctatgactccacacccgaagatgtgaaaacatggctccagagcaagggcttcaacccggtgacggtgaacagtttaggggtcctcaacggcgcacaacttttctccctgaacaaagacgagcttaggacagtctgtcctgagggtgccagggtctattcacagattacggtgcagaaagctgctctcgaggatagctccggttcttccgaactgcaggagatcatgcgtcggagacaggagaagatcagtgcggctgctagtgactcaggagtggagagcttcgatgaggggagcagccactag

SEQ ID NO: 222100 - DNA, 1689 bp, synthetic construct
  misc_feature 1..1689: note = Description of Artificial Sequence: Synthetic coding sequence
  source 1..1689: mol_type = other DNA
atgatggccgctagaattgatagagacgtgcagattctcaatcatattttggacgacatcgagttcttcatcactaaactgcagaaggctgccgaggctttcagtgaactctccaagaggaaaaaaaataaaaagggtaagcgtaagggcccaggggaaggagttctcacccttagagccaagccgccacctcccgacgaattcctggactgtttccaaaagtttaagcatggctttaatctgctcgctaagctgaagtcgcacatccagaacccctcagcggcagacctggtccactttctgttcacccccctcaatatggtagtgcaagccacaggaggcccagaacttgcttcttctgtgttgagtccacttctgaataaagacacaatagactttttgaactacacagtcaacggagatgagagacaactgtggatgtctctggggggaacatggatgaaggctcgggctgaatggcccaaagagcagttcattcccccatacgtccccaggtttcggaatgggtgggaaccccctatgctcaacttcatgggtgccacgatggagcaggatctgtatcagctggccgaatctgtggccaatgtggcggaacaccaacggaagcaggagatcaaaaggctgagcacagagcattcttccgtgtctgagtatcacccagccgatggatatgctttctcatctaatatctatacacgtggctcccatttggaccagggagaagccgctgtggcctttaagcccacttccaaccggcatatcgatcgcaattatgaaccactaaaaacacagcctaaaaagtacgccaagtccaagtacgactttgtggcacgcaataacagtgagctaagtgtactcaaagacgatatactagagatacttgacgacagaaagcagtggtggaaggttagaaatgcgagcggagattcaggcttcgtgccgaacaatatactcgacatcgtaagaccccctgagagcggccttggcagggctgatccaccctacacacatactattcagaagcaaagaatggagtatgggccaagacccgctgatacgccccctgctcctagtccacccccaactcctgccccagtaccagtccctttgcccccaagcaccccagctcccgtgccagtgtccaaggtgcctgctaatatcaccaggcaaaatagcagctccagcgactctgggggaagcatagttagggactcccagcgtcataagcagctcccagtggaccggaggaaaagccaaatggaggaagtgcaagacgagttgatacacaggttgactatcgggagatctgccgctcagaaaaagtttcatgtgcctaggcaaaacgtccccgtaatcaatattacttatgattctacacctgaggatgtaaagacatggttacagagtaaaggtttcaaccctgtgaccgtgaacagcctcggcgttttgaacggagcacagttgttcagccttaacaaggacgaactcagaaccgtgtgtccagagggcgctagggtgtatagccaaataacagtccagaaggccgcactcgaagattcgagcgggagcagcgaactacaggagatcatgagacgcagacaggagaagatttctgcagccgctagcgacagcggagtggaaagctttgacgagggctcctcccactag

SEQ ID NO: 222101 - DNA, 2076 bp, synthetic construct
  misc_feature 1..2076: note = Description of Artificial Sequence: Synthetic coding sequence
  source 1..2076: mol_type = other DNA
atgaacgggcatatctcaaatcaccctagcagcttcggcatgtatccaagtcagatgaatggctatggctcttccccaaccttctctcagactgaccgggagcatggcagcaagacttctgctaaggcactgtacgaacagcgcaagaactacgctagggattctgtcagctctgtcagtgatatctcgcagtaccgcgttgaacatctaaccacgttcgttctggataggaaggacgccatgataaccgtggatgacggcattcggaaactgaagctgctagatgctaagggaaaggtttggacacaagacatgatcctgcaggtggacgatagggcagtgagcctgatcgatctcgaatcaaaaaacgagctggaaaactttccactcaacaccatccaacactgccaagctgtcatgcactcctgctcctatgacagtgtactggctctggtctgcaaggagcccacacagaacaagccagacctccatctgtttcagtgcgatgaagtgaaagccaatctgataagcgaggatattgaatctgccataagcgacagtaaggggggaaaacaaaaacggagacccgacgccttgaggatgatctcaaacgccgaccccagtataccccctccaccacgcgctccagcccctgcgccacccggaaccgtaacgcaggtggacgtgagatcgcgcgtggcagcttggtcagcctgggcagcggatcagggcgacttcgagaaacccaggcaatatcacgaacaggaggaaactcccgagatgatggccgctaggatagatcgagacgtccagatcttgaatcatattctggatgatatcgagtttttcatcacgaagcttcagaaagccgcagaggccttttcggagcttagtaagcgcaaaaaaaacaaaaaaggcaagcggaaggggcctggtgagggagtcctcactctcagggccaagcccccacccccagatgagtttcttgattgctttcaaaagtttaagcacgggttcaacctgcttgcaaaactgaagagtcatattcagaacccctctgccgctgacctcgtgcactttctgtttaccccgctgaacatggttgtccaggctacggggggtcccgaactcgcgagcagtgtcctgtcccccctccttaataaggatacaatcgactttctcaactacacggtgaatggggatgaacgccagctctggatgtcgttaggaggaacttggatgaaagcccgtgccgagtggccaaaggaacagttcatccccccttacgtacccagattccggaatgggtgggaaccaccaatgctcaactttatgggggcaacaatggaacaggatctctaccagcttgccgagagtgtggctaatgtggcagagcaccagaggaagcaagaaatcaagcgactctccaccgaacatagttccgtgtcagagtatcatccagcagatgggtacgctttctcaagtaacatttatacacgcggaagtcacctagatcagggggaagccgctgtcgcctttaaacccacgtctaatcgccatatcgaccgaaattatgagccccttaaaacccagcctaagaagtatgcaaaaagcaaatacgacttcgtcgccaggaacaattccgagctgagtgtactgaaagatgacattctggaaattttggacgatcgcaagcagtggtggaaagtgcgcaatgcttctggcgacagcggattcgtcccaaacaatattttggacattgtgagacctcctgagagtggactaggaagggcagatcctccgtacacacatacaatccaaaaacaaagaatggaatacggtccacgcccagcagataccccccctgcccctagccccccacccaccccagccccagtgcctgtcccactgccaccttcaacaccagctccagtccccgtctcaaaggtgcctgccaacattacccgtcagaattccagctcatccgatagtgggggatcaatcgtgcgcgactcacagaggcataagacatctggcggtcctaaagaaatctcagatgggggaagcgcaaggtag

SEQ ID NO: 222102 - DNA, 207 bp, synthetic construct
  misc_feature 1..207: note = Description of Artificial Sequence: Synthetic coding sequence
  source 1..207: mol_type = other DNA
atgaacgggcacatctctaaccacccatcctccttcgggatgtatccatcacagatgaatggatacgggtccagccccacttttagtcaaactgacagggaacacgggagcaagacatccgctaaggccctgtacgagcagcgaaaaaattacgctcgggactccgtttccagcgttagcgacattagccagtatcgtgtggagtag

SEQ ID NO: 222103 - DNA, 2469 bp, synthetic construct
  misc_feature 1..2469: note = Description of Artificial Sequence: Synthetic coding sequence
  source 1..2469: mol_type = other DNA
atgaatgggcacatctccaaccacccctcgtctttcggcatgtaccccagccagatgaacggttacggcagctcgcctaccttcagtcagaccgatcgcgaacacgggtccaaaactagtgctaaggccttatatgagcagaggaagaattacgctagggatagtgtttcttccgtgtcagacataagccagtacagggtggaacaccttacaacatttgtcctcgaccgaaaggacgccatgatcaccgtggatgatggaatccgcaagctgaagctcctggacgctaagggcaaggtctggactcaagatatgatattgcaggtagacgacagggccgtatcccttattgacttggagtcaaagaacgaactcgaaaacttccccctcaataccatccagcactgccaagccgtgatgcattcttgctcatacgatagcgtcctcgcgctcgtgtgtaaagaacctacacaaaataagcccgatctgcatctgtttcaatgcgatgaggtaaaggccaacttgatatccgaggacatagagtcagcaatctctgacagcaaaggcggaaagcagaaacgacgtcccgatgctttgcgaatgatttccaacgcggatccgtcaatccccccaccacctcgggcacccgcacccgcacctcccggtaccgtcactcaagtagacgtcagatcacgggtggccgcatggtctgcctgggccgcagatcagggcgacttcgagaaaccccgacagtaccatgagcaggaggaaacaccagagatgatggcagccaggatagacagagacgtgcagatcctgaaccatatcctcgatgatattgagttctttataacaaaattgcagaaggctgctgaagccttctctgaactctcgaagagaaagaagaataagaaaggaaaacggaaaggtcctggggagggagtactcaccctgcgtgcgaagccacccccacctgacgagttcctggattgcttccagaagtttaagcatggctttaatctgttggccaaactaaagagtcatattcagaatcctagcgcagctgacttagtgcacttcctgttcacacccctgaatatggtggttcaggctacagggggtcctgagcttgcctctagcgttctgtcccctctgctcaataaagacacaattgacttcctaaattacactgtgaacggcgacgagagacagctctggatgtcactgggaggcacttggatgaaggccagagcggagtggcctaaagagcagtttatccccccttacgttccccgattcaggaatggctgggagcctccaatgctgaatttcatgggggctacaatggaacaggacttgtaccagctggcggaaagcgttgcaaatgttgccgagcatcagaggaaacaagagataaagagactgtcaaccgaacactctagcgtttctgaatatcacccggcagacggctacgcgtttagctctaatatatacacccgcggttcccacctggatcaaggcgaagcagcagtcgcattcaaacccacaagcaacaggcacatcgaccgcaattacgagccacttaaaacccagccaaagaaatatgcgaagtccaaatatgattttgtggcaaggaacaacagtgaactcagcgtgctcaaagacgacatactggaaattctagatgaccggaaacagtggtggaaagtccgcaatgctagcggcgatagcggctttgtgcctaataacatcctggacatagtgcgtcctcccgaaagcgggctgggaagagccgatccaccttacacccataccatccagaagcaaaggatggaatatggtccccgacccgcagacacacccccagccccatcacccccacctactccagctccggtgcccgttcctttgcctccgagcacgcccgctccagtgcccgtgagcaaggtaccggctaatattacaagacagaactcttctagcagcgattctggcggatctattgtgagggatagtcagaggcataaacagctgcccgttgacagacggaagagccagatggaggaggtgcaggatgaactcatacatcgactcacaattggaagaagcgccgctcagaaaaagttccacgttccacgccagaacgtgcctgtgatcaatatcacttacgactcaacgcccgaggacgtcaagacttggttacagtctaaaggctttaatcccgtgacggtgaatagtctaggcgtgctgaacggcgcacagttattttctctgaataaggatgagctgcgcactgtgtgcccagagggcgcacgagtctatagccagattaccgtgcaaaaggccgcactcgaggacagctccggctccagcgagctccaggagatcatgaggaggcgccaagagaaaatcagcgccgctgcatcagacagcggggtggaatcatttgacgaaggctcttctcattag

SEQ ID NO: 222104 - DNA, 2469 bp, synthetic construct
  misc_feature 1..2469: note = Description of Artificial Sequence: Synthetic coding sequence
  source 1..2469: mol_type = other DNA
atgaacgggcacataagtaatcatccaagttctttcggcatgtatcctagccagatgaatggttatggtagttcccctactttttctcagacagacagagagcatggaagtaaaacaagcgcgaaagctctgtatgagcagcgaaaaaactatgccagggatagtgtttcctcggtgagtgacatctctcagtacagggtggaacaccttactactttcgtgctggatagaaaagacgccatgataacagtggatgacggaatacgtaagctgaagttgctcgatgcaaaaggcaaggtctggacccaggatatgatccttcaggtggatgacagagcagtgagccttatcgatctggagtccaagaacgagctggagaactttccacttaatacaatacagcactgccaggcagttatgcacagttgcagctatgattccgtactcgcgctagtgtgtaaggaacctacacagaataaacctgacctgcacctcttccagtgtgatgaagttaaagccaacctgataagtgaagacatcgagagcgccatttccgattcaaagggagggaagcagaaaagaagacctgacgccctgcggatgataagcaacgccgatccctctattccgcctcctcccagagcaccagctcctgccccaccaggcaccgttactcaggtcgatgtacggtcgcgggtcgctgcctggagcgcttgggccgctgaccagggggatttcgaaaagcccaggcaatatcacgaacaggaggaaacgcccgagatgatggcagcgaggatagaccgtgacgttcagattctgaaccatatactggacgatatagagttcttcattaccaaactgcagaaggctgccgaggcgttctctgagctaagcaagagaaaaaaaaacaaaaagggcaagagaaagggaccgggagagggggtgctgacactccgtgctaaacctccaccccctgatgagtttctggactgcttccagaagttcaagcacggcttcaatcttctggcgaagttaaaatctcatatccaaaatcccagtgcagcagatctggtccatttcttgttcactcccctgaacatggttgtgcaagccactggaggtccagaactcgcatcgagcgtgttaagccctttgctgaacaaagacacgatcgattttctgaattatactgtaaatggcgacgagcggcaactatggatgtccctggggggaacctggatgaaggctagagctgagtggcctaaagagcagtttattccaccttatgtaccacgctttagaaatgggtgggagccaccaatgctgaacttcatgggagctacaatggagcaggatctttatcagctggcagagagcgtcgccaatgtggcagaacatcagcgcaaacaggagattaaacggctcagtacggagcacagctcagtgtcagagtatcatccagccgatgggtacgccttcagctcaaacatttacacgagaggatctcaccttgatcagggggaggccgcagttgcttttaagccaactagcaacagacatattgatcgtaattacgaacccttaaagactcagccgaagaaatatgccaagtctaaatatgacttcgtggcgagaaacaatagtgaattgtccgttctcaaggatgatatccttgagatactggacgatagaaaacaatggtggaaagtgcggaacgcatcaggggattccggtttcgtgcccaataacatactcgatattgtcagacccccagaaagtggactgggcagagctgacccaccctacacccacactatccaaaagcagcggatggagtatggcccacgaccggctgacactccccctgccccatcaccccctccaacaccagccccagtgccagtcccattacctccctcgacccctgcacccgtgcccgtgagcaaagtgcctgccaacattacgcgacaaaattctagctcctccgactccggtgggagcattgtgcgggacagtcagagacacaagcagctgcccgtggaccgtaggaaatctcagatggaagaagtgcaggatgaacttatacatcggctgacaatcgggcgatctgccgcacaaaagaaattccacgttcctagacaaaatgtccccgtgattaatatcacctacgattcaacgccagaggacgtaaaaacatggttacagtcaaaagggttcaatccagttactgtgaacagcttgggggtcttgaatggggcacagctattttcactcaataaagacgaactgaggactgtatgtcctgagggcgcaagggtctactctcagatcaccgtgcagaaggctgcactggaggattcttccggatcgtccgagctgcaggaaatcatgcgaagaaggcaagaaaagatctcagccgctgcctctgactcaggcgtcgagtccttcgacgagggcagcagccactag

SEQ ID NO: 222105 - DNA, 204 bp, synthetic construct
  misc_feature 1..204: note = Description of Artificial Sequence: Synthetic coding sequence
  source 1..204: mol_type = other DNA
atgaacggccatatttccaaccacccatccagctttggtatgtacccatcccagatgaacggatatggtagctccccgacattctctcaaacagatcgggagcacggaagtaagaccagcgcaaaagctttgtatgagcagcgaaaaaactacgctcgggacagcgtgtctagcgttagcgacattagccagtaccgagtgtag

SEQ ID NO: 222106 - DNA, 387 bp, synthetic construct
  misc_feature 1..387: note = Description of Artificial Sequence: Synthetic coding sequence
  source 1..387: mol_type = other DNA
atgaacggccatattagcaaccatccttctagcttcggaatgtacccatcccaaatgaatggatatggctctagtcctacatttagccaaacggacagggaacacggttccaagacatctgccaaggcactgtatgagcagcgaaaaaattatgcgcgtgacagcgtgtcttccgtgagcgacatttcccaatatcgcgtcgagcacctaactacctttgtccttgatagaaaagatgcaatgataactgtggatgacggcattcggaaactcaagcttttggatgccaagggcaaggtatggactcaggatatgatcctccaggtggatgaccgggctgtgtccctgattgacctggaatctaagaacgagctggaaaatttctag

SEQ ID NO: 222107 - DNA, 996 bp, synthetic construct
  misc_feature 1..996: note = Description of Artificial Sequence: Synthetic coding sequence
  source 1..996: mol_type = other DNA
atgcggttcaggttcggcgtggttgtcccccctgccgtcgccggagcacgtccagagcttctggtggtcggctctcgccctgaactaggccgatgggaaccgaggggggctgtcagattgcgccctgcgggaaccgctgcaggggacggcgcactggccttgcaggagcccggattgtggctcggggaagtggagctcgctgccgaggaggccgctcaggacggggctgagatcggggctacacctaagctgccctccacaatattcccatggttcgtgcttagacaggggctgattctcgggaatggccctcatcacgacagatgttgtacctataatgagaacaacctcgtggatggggtgtactgtctgcccatagggcactggattgaagccactggtcatacgaacgaaatgaagcacactacggacttctattttaacatcgctggccatcaggcaatgcattattcccggatcctgcctaatatttggctcgggtcctgtccaaggcaggtggaacatgtaactattaaactcaagcacgaactgggaatcacagccgtgatgaacttccaaactgaatgggacattgtgcaaaacagctcaggctgcaatcgttaccctgagccaatgacccctgatacaatgatcaaactttacagagaagaaggcctcgcctatatctggatgccaacccctgacatgtcaactgagggtagagtccagatgctgccacaggctgtgtgcttactgcatgctctgcttgagaaggggcacatcgtgtacgtgcattgtaatgccggagtcggcagaagtaccgcagccgtgtgtggatggctgcagtatgtcatgggctggaacttgagaaaggtacagtattttttaatggctaaaaggcccgctgtttacatcgatgaggaggctctggcacgcgctcaggaagacttctttcagaagttcggcaaggttcgctcatccgtttgcagcctgtag

SEQ ID NO: 222108 - DNA, 996 bp, synthetic construct
  misc_feature 1..996: note = Description of Artificial Sequence: Synthetic coding sequence
  source 1..996: mol_type = other DNA
atgcggtttaggtttggggtagtcgtgccgccagccgtagccggtgcacggccagagcttctcgtggtgggctcccgccctgagctaggaaggtgggagcctagaggagccgtgaggctgcgacctgctggcacggccgcaggcgacggtgcgctcgccctgcaggagccagggctctggctgggggaggtagaactggccgcagaggaggcagctcaggatggtgctgaacctggacgagtcgatacattctggtacaaattcctcaaaagggagcccggtggggagctcagttgggaggggaacggaccccaccacgatcgatgttgcacatacaatgaaaacaacctggtggatggagtatactgtctgcccattggccactggatagaggctactgggcataccaatgaaatgaagcacaccacagacttctacttcaacatagctggtcatcaggccatgcattactctcgcatccttcccaatatttggttagggtcatgcccgaggcaggtggagcatgtgactatcaaactcaaacacgaactgggtattactgccgtgatgaattttcagaccgagtgggacatagtacagaattcaagcggctgcaaccgctacccggaacctatgacacctgataccatgatcaaattgtatagagaggaaggtctggcatacatttggatgcccacacccgacatgtctacagaggggcgagtacagatgctgcctcaggctgtgtgtttactccacgctctcctggagaaggggcacattgtatacgttcactgcaatgcgggagtgggccgaagcacagccgcagtttgcggatggctccagtatgtcatggggtggaatctgcgcaaggttcaatattttttgatggcaaagcgtcccgcagtttacattgatgaggaggctctggccagagcccaagaagatttttttcagaaattcgggaaagtcagaagttcggtgtgtagcttgtag

SEQ ID NO: 222109 - DNA, 954 bp, synthetic construct
  misc_feature 1..954: note = Description of Artificial Sequence: Synthetic coding sequence
  source 1..954: mol_type = other DNA
atgagatttcgcttcggagtggtggtgcctcccgcagtcgctggagccagaccagagctcctggtggtgggcagccgcccagagctcggtagatgggagccccgtggggcagtgaggctgagaccggctggcaccgccgctggcgacggcgcattagcactacaggagccaggcctgtggctgggggaagtggaattagccgctgaagaagctgctcaagacggagctgagcctggcagagtagacacattttggtataagtttcttaagcgggagccgggaggcgaattgagctgggaagggaatggtccacatcatgacagatgctgcacctataatgaaaacaatctcgtagacggcgtctattgcctgccaatcgggcactggatagaagccactggacacactaatgaaatgaagcatacaaccgatttttactttaatatcgcaggtcatcaggcaatgcattactccagaattctcccaaacatctggctcggctcttgccccaggcaagttgagcacgtgaccattaaattaaagcatgagcttgggattacggccgtcatgaatttccagaccgagtgggacatcgtgcagaattcctccgggtgcaataggtatcctgagcctatgacacccgacaccatgatcaaactctacagggaagaaggcctcgcttacatttggatgcccactccagatatgagcaccgaaggacgggtgcaaatgttgcctcaggctgtatgtctcctgcatgctctgctggagaagggacatatcgtgtacgtgcactgcaacgccggagtgggcagaagtactgcggcagtgtgcggctggctgcaatatgtgatgggctggaatctccgcaaggtgcagtattttctgatggcaaaacgacctgccgtatatatcgatgaggaagctgctagccaggacacatttccgctgtag

SEQ ID NO: 222110 - DNA, 714 bp, synthetic construct
  misc_feature 1..714: note = Description of Artificial Sequence: Synthetic coding sequence
  source 1..714: mol_type = other DNA
taggacacattctggtataagttcctaaaaagagagcccggaggggagctcagctgggaggggaatgggcctcaccacgatagatgctgtacctacaatgaaaacaatctcgtggacggagtgtattgtctcccaattggacattggattgaggccaccggacacacaaatgagatgaaacatacaacagacttctattttaatatcgctgggcaccaggcgatgcactacagccgcattctgccaaacatttggctgggaagctgtcctcggcaggtggagcatgtgacaatcaagcttaagcacgaattggggataacggcagtcatgaattttcagaccgagtgggatatcgttcaaaatagctccggatgtaataggtatccagagcccatgactcccgataccatgattaaactctacagagaggaggggctagcatatatatggatgcctacccctgatatgtccacagaaggcagggttcagatgctcccacaggcagtgtgtctattgcatgccctacttgagaaaggacatatcgtgtacgtccattgcaatgctggcgtgggacggtcgaccgcagcagtatgcggctggctgcagtacgtcatggggtggaacctacggaaggttcagtacttccttatggcaaagaggcccgctgtttatatcgacgaggaggccgcatcgcaggatacttttcccctttag

SEQ ID NO: 222111 - DNA, 513 bp, synthetic construct
  misc_feature 1..513: note = Description of Artificial Sequence: Synthetic coding sequence
  source 1..513: mol_type = other DNA
tgaaacggaccccaccatgaccgatgctgcacgtataacgagaataacctagtggacggggtctattgcttgcctattggtcattggatcgaggcaaccgggcacaccaacgagatgaaacacacaactgatttttactttaacattgctggccaccaggctatgcactattcccgtattcttcccaacatctggctgggaagctgcccgaggcaagtagagcatgttacaatcaagctcaagcacgaacttggcattaccgctgttatgaattttcagaccgagtgggacattgtacagaactcttcaggatgcaacagataccccgagcccatgacaccagacactatgatcaagttatatcgcgaagaaggtctggcatacatttggatgcctaccccagacatgtctacagaggatgagaaacgcactgctgatatgtgttgctcaggcatgtgggaagaaacagcagatttcggcctgggcattctggattacttgaaacaaaagtag

SEQ ID NO: 222112 - DNA, 813 bp, synthetic construct
  misc_feature 1..813: note = Description of Artificial Sequence: Synthetic coding sequence
  source 1..813: mol_type = other DNA
atgcgatttaggttcggggtggtggtgccgccagccgtggccggtgctcgacccgagctcctggtggtgggtagccgcccagaactagggagatgggaaccccgtggcgcagtccgactgagacccgctggaacggccgctggggatggagcactggctctacaagagcccggtctgtggctgggggaggttgaactggccgctgaggaagccgcacaagacggcgcagagcctgggcgagtagacaccttttggtataaatttttaaaacgggaacctggaggtgagctgtcatgggagggcaatggccctcatcatgatcggtgttgtacatacaacgaaaacaacttagtggatggggtctactgtctcccgattggccattggatagaggcgactggccacactaatgagatgaagcatactaccgacttctattttaacatcgcgggtcatcaggccatgcactatagtaggatcctgcccaatatctggctgggatcctgcccaagacaggttgagcatgttacaatcaaactgaagcatgaacttggcatcaccgccgtgatgaattttcagaccgaatgggatattgtgcaaaactcaagtggctgtaaccgatatccagagcccatgacccctgatactatgataaaattgtaccgagaggaagggctggcctacatatggatgcccactccggatatgtcaacagaggacgagaaacggacagctgacatgtgttgcagtggtatgtgggaggaaacagcggactttggactgggcatcttggattacctgaaacagaagtag

SEQ ID NO: 222113 - DNA, 945 bp, synthetic construct
  misc_feature 1..945: note = Description of Artificial Sequence: Synthetic coding sequence
  source 1..945: mol_type = other DNA
atggcccctccccaggttttggcttttgggctactgttagccgctgccactgccacattcgccgcagcacaggaagagtgcgtttgcgaaaactataaactggccgtcaattgctttgtgaataataatcgccagtgccaatgcaccagtgtgggggctcagaacacagtgatatgcagtaagcttgccgcaaaatgcttggttatgaaggctgagatgaatggctcaaaactgggcaggcgagccaaacctgaaggagcccttcagaataacgatggcctttatgaccccgactgtgacgagtctgggcttttcaaagctaagcaatgcaacggaactagtatgtgttggtgtgtcaatacagccggagtgcgcagaacagataaggatacagagataacttgctcagagcgggtccggacctattggatcattattgagctgaagcacaaggcccgtgaaaagccatatgactctaagtcactgcggacggcactgcagaaggaaatcacgaccaggtaccagctggaccccaaattcatcacctcgatactgtacgagaacaacgtcatcaccattgatcttgtgcagaactcctcccagaaaacacagaatgatgtcgatatcgccgatgtggcgtactattttgagaaagatgtgaagggcgaaagcctgtttcactccaaaaagatggatctcaccgtgaacggggagcagctcgatcttgatccaggacagacccttatttactacgttgacgaaaaggcaccagaattcagtatgcagggactgaaagccggagtgattgccgttatagttgtcgttgtgatcgctgttgtcgcgggaatcgtagtgctcgtgattagtaggaagaagcgcatggccaagtacgagaaagccgaaattaaggagatgggagagatgcaccgggaactgaacgcctag

SEQ ID NO: 222114 - DNA, 474 bp, synthetic construct
  misc_feature 1..474: note = Description of Artificial Sequence: Synthetic coding sequence
  source 1..474: mol_type = other DNA
atgcttgtgctgcttgccggtatctttgtcgttcacatcgccaccgtgattatgttattcgtcagcaccatcgcgaatgtgtggctcgtttcgaacactgtggacgcgtcagtgggactatggaagaactgtacgaatatcagttgttccgattcattgagttacgcaagtgaggacgccctcaaaacagtgcaggccttcatgattttatctattatattttgtgtgatagccttgctggtgttcgtgttccagttgtttactatggagaagggcaataggtttttcctttctggcgctacgaccctggtgtgctggctttgtatccttgtcggagtgagtatttataccagccattatgctaaccgagatggcacacaataccaccacggttacagttacatactggggtggatctgcttttgtttcagtttcatcattggcgtgttgtacctcgtactgaggaagaaatag

SEQ ID NO: 222115 - DNA, 426 bp, synthetic construct
  misc_feature 1..426: note = Description of Artificial Sequence: Synthetic coding sequence
  source 1..426: mol_type = other DNA
atgctcgtcctattagcgggtattttcgtagtccatattgctacagtcattatgctgttcgtgtctacgattgccaatgtctggctcgtatctaataccgtggacgccagcgtgggcctgtggaaaaactgcacaaacataagctgctctgacagcctgagttacgcttccgaggatgcattgaagactgtgcaagcattcatgatcctgtccattatcttttgtgtaattgccttactcgtgtttgtcttccaactctttactatggaaaaggggaaccgcttttttctctcgggggctaccacgctggtgtgctttattatgagaattgtgatggaacggagcatcacgaccgctataccgacctcttgggctggctccgctagcgctagcgccagttctagcgccttctcgatctggagctag

SEQ ID NO: 222116 - DNA, 12 bp, synthetic construct
  misc_feature 1..12: note = Description of Artificial Sequence: Synthetic coding sequence
  source 1..12: mol_type = other DNA
atgctggtgtag

SEQ ID NO: 222117 - DNA, 504 bp, synthetic construct
  misc_feature 1..504: note = Description of Artificial Sequence: Synthetic coding sequence
  source 1..504: mol_type = other DNA
atgctggtcctcctggccttcattatcgcgttccacattactagcgccgctcttctgttcattgcgacagttgacaacgcctggtgggtgggagacgaatttttcgcggacgtctggcggatttgtacaaataatactaactgcacggtgatcaacgactctttccaggaatattctactctgcaagccgtccaggctaccatgattctctctaccatcctatgttgtatagctttcttcatttttgtgctgcagctttttagacttaaacaaggagaaaggttcgttctgacttcgatcattcagctcatgagctgcctgtgtgttatgattgctgctagcatttatactgaccggagggaagacattcatgacaagaatgccaaattctatcccgtgaccagggaggggtcctacggttactcatatattctagcctgggtcgcttttgcgtgtaccttcatcagcggaatgatgtacttgatactaagaaagcggaaatag

SEQ ID NO: 222118 - DNA, 504 bp, synthetic construct
  misc_feature 1..504: note = Description of Artificial Sequence: Synthetic coding sequence
  source 1..504: mol_type = other DNA
atgctcgtgcttttagccttcattatcgcgttccacatcacttctgctgccctgctctttattgccactgttgacaacgcctggtgggtcggcgatgaattttttgccgatgtctggcggatctgcacgaataatacgaattgtacagtgatcaatgattcctttcaggagtactctacactccaagcggttcaggccactatgatcttgagcacaattctctgttgcattgcctttttcattttcgtgctgcagctttttcgactgaaacagggagagcgctttgtgctgacttccattatccagctcatgagctgtctgtgcgttatgatcgccgcttccatatatactgacagacgcgaggacatccatgataaaaatgcaaagttttaccctgtaaccagggagggctcctatggatacagctatattctcgcctgggtcgcttttgcgtgtacctttatttcagggatgatgtacctcattctgaggaaaaggaagtag

SEQ ID NO: 222119 - DNA, 492 bp, synthetic construct
  misc_feature 1..492: note = Description of Artificial Sequence: Synthetic coding sequence
  source 1..492: mol_type = other DNA
atgtcactgctgctgctcgtagtgtccgctctgcatattctgatactgatccttcttttcgttgccacactggataagtcttggtggaccctgccaggaaaagagtccctgaacttgtggtacgactgcacatggaacaacgacactaaaacttgggcctgtagcaacgtgtcagagaacgggtggctgaaagcagttcaggtgctcatggtgctgagcctcatcctctgttgcctatcgtttatcctgttcatgtttcagctgtacacgatgcgccgagggggacttttttatgcaactgggctgtgccagttgtgcacgagcgtagctgtcttcacaggagccttgatctatgcaattcatgccgaggagatcctcgagaaacatcccagaggcggaagtttcggatattgcttcgctcttgcctgggtggcattccctctggctctggtctctggtatcatctacattcatttacgcaagagagagtag

SEQ ID NO: 222120 - DNA, 2034 bp, synthetic construct
  misc_feature 1..2034: note = Description of Artificial Sequence: Synthetic coding sequence
  source 1..2034: mol_type = other DNA
atgaccgcctcaccggactacttggtcgtgctgttcggtatcacagcaggcgctacaggggcaaagctcggctccgacgaaaaagagctgatattgttattctggaaggtcgtcgatctcgccaacaagaaagttgggcagctgcacgaggtcctcgtcaggccagatcagcttgaactaacggaagattgtaaagaagaaacaaagattgacgtagagtcccttagtagcgctagtcagctggatcaggcactccgtcagttcaaccagagtgtcagcaacgagctgaacattggtgtcgggacctccttttgcctttgcactgatggccagctgcatgtccggcaaatcctgcacccagaggcctcaaagaaaaacgttctgctcccagaatgcttctactctttttttgacctaaggaaggagttcaaaaagtgttgccccggatcccccgatatcgataagctggatgtagccactatgacggaatacctgaattttgagaaatcaagctcagtctcgaggtacggcgcaagccaggtggaggacatggggaatataatcctggcaatgatttctgagccctacaatcataggttctcagaccccgagcgagtgaactacaagtttgaatcagggacctgctcgaagatggagctaatcgacgacaataccgtggtgcgagccagaggactgccctggcagagctcagaccaggacattgccaggttttttaagggactgaatatcgcaaagggcggtgcagctctgtgtctgaacgctcaggggagacgcaatggcgaagcccttgtcaggttcgtgtctgaggagcacagagacttagctctgcaacgccacaagcaccacatgggcactcggtacatagaggtttacaaggccacaggtgaagacttcctgaagatagcaggcggtacttccaacgaagttgcacagtttctctccaaggaaaatcaggtgatcgttaggatgagaggtctgcccttcacggcaacggcggaagaggtcgtggccttcttcgggcagcattgccccatcactgggggaaaggaagggatactcttcgtgacttatcctgatgggagacccaccggggacgcattcgttctgtttgcttgcgaggaatatgcacagaacgcacttagaaagcataaggacttactgggaaaacggtacatagaactgttccgctctacggcggctgaagtgcagcaggtcttaaaccgtttttccagcgctccccttatcccactcccgacaccccctattatcccagtgcttcctcagcagtttgtgccacccacaaacgtaagggactgtattcggctgcgcggtcttccgtacgccgctacaattgaagacatattggacttccttggagaattcgctactgatatccggacacacggtgtgcacatggtgctgaaccatcaaggtagaccaagcggcgacgctttcatccagatgaaatctgcagacagagcctttatggcggcacagaaatgccacaaaaagaacatgaaggaccggtatgttgaagtcttccagtgttctgccgaggagatgaatttcgttttgatggggggaactttaaacagaaacggtttgtccccccctccatgtttatcccccccatcatacacgttccccgctcctgcagctgtaatcccaacagaagctgccatctaccaaccatcagtcatcttgaaccctagagccctgcagccttcgacagcctactatccagctgggacccagcttttcatgaattataccgcctattacccttcacccccaggttctccaaactctttggggtacttcccaaccgcagcgaacttatcaggcgtccctcctcagccaggcactgtagtcaggatgcagggcctagcctataacacaggcgtgaaggagattctgaacttcttccagggctaccagtacgccacggaagatggactgatccacacaaatgaccaggctaggacacttccgaaggagtgggtttgcatctag

SEQ ID NO: 222121 - DNA, 1980 bp, synthetic construct
  misc_feature 1..1980: note = Description of Artificial Sequence: Synthetic coding sequence
  source 1..1980: mol_type = other DNA
atgactgctagtccagactatcttgtagttctgttcggcattacagcaggcgcaactggcgctaagttggggtcggacgaaaaggaactcatccttttattctggaaggtggtggacctcgccaacaaaaaagttggccagctgcacgaagtcctggtccggccagatcaactggagctgactgaagactgcaaggaagagactaagatcgatgtggaatctctttcctccgctagtcagctggatcaggcccttaggcagttcaaccagtcagtgtccaacgagctgaacatcggggttggtacctccttctgcctatgcactgatggacaactgcatgtgcgtcaaatcctgcatcccgaggcctcaaagaaaaatgtgttgctgcccgaatgtttttattccttctttgacctgcgcaaagaatttaagaaatgctgccccggtagccccgatatcgataagctggatgttgccacaatgactgaatatctgaactttgagaaatcatcttctgtttccagatacggcgctagccaagttgaagatatgggcaatatcatcctggcaatgatttccgagccttataatcatagattctccgatccggaaagagtgaactacaagtttgagagcggtacctgctcaaaaatggagcttattgacgacaacactgtagtgcgagctcgtgggttaccctggcagtcaagcgatcaggatatcgcaagatttttcaagggcctcaatatcgcgaaggggggagccgctctctgtctaaatgcacagggcaggcggaacggcgaggcactagtccgctttgttagtgaggaacatagggacctcgcactgcaacgccacaagcatcacatggggacacgctatatcgaggtctataaggcaaccggggaagactttcttaagatcgcaggaggcacctccaacgaagtagcacagtttcttagcaaagagaaccaggtgattgttcgaatgagaggacttccttttactgccactgcagaagaagtggtcgccttcttcggacagcattgcccaattacggggggaaaagaaggcatcctcttcgttacatatcccgatggcagacccaccggagatgcctttgttctgttcgcctgcgaagagtacgcccagaatgccctgcgcaagcacaaggacctcctcgggaagagatacatcgaactgttccgaagtaccgcagccgaagtgcagcaggtattgaatcgattctctagcgccccacttatccccctgccgactccacccatcatccccgtcctgccccaacagtttgttcccccaacaaacgtccgtgattgcattcgcttacggggtctcccatatgctgccacaatcgaggacatcttagatttcctgggcgagttcgcaaccgacatcagaactcatggtgtgcacatggtgctgaatcatcaagggagacctagtggtgacgcattcatccagatgaaatcagctgaccgagcattcatggcagctcaaaaatgtcataaaaagaacatgaaggaccgttacgtggaggtgtttcagtgttctgctgaggagatgaactttgtgctgatgggtgggactctgaaccgtaatggcttatctcctcctccttgtctctcgcccccttcctacacttttcccgcacctgccgctgtgatccctaccgaagctgccatttaccagccatctgtaattcttaatccccgagctctgcagccgtctaccgcgtattaccccgctggcactcagctatttatgaattacacagcgtactatccatcacctccaggctctcctaatagcctgggctacttccccacggccgcaaacctctcaggcgtgccacctcaaccaggaacagtcgtgcgcatgcaaggtctcgcatataacaccggagtgaaagagatcctgaactttttccagggctaccaatgtctgaaggatgtctggtag

SEQ ID NO: 222122 - DNA, 2046 bp, synthetic construct
  misc_feature 1..2046: note = Description of Artificial Sequence: Synthetic coding sequence
  source 1..2046: mol_type = other DNA
atgacggcttcccccgactacctcgtcgtactctttggcataactgcaggagctacaggggctaaactggggagcgacgaaaaggaattgattctcctgttttggaaagtggtcgatctggccaacaaaaaagtggggcagcttcacgaagtgctcgtgcgcccagaccagttggagttaactgaagactgcaaagaggagactaagatagatgtggagtccttaagctctgcttcacaattagaccaggctctgcgccagttcaatcagtctgtgagtaacgagctaaatataggcgtcgggacaagtttttgtctgtgtaccgacgggcagctccatgtacgacagatcctgcatccagaggccagcaagaagaatgtgttgctacccgaatgtttttattcttttttcgacttacgcaaggagtttaagaagtgctgccccggatctccagacatcgacaaactggacgtggccactatgactgagtatctcaacttcgaaaaaagctctagcgtgtctcggtacggagcaagccaggtggaagacatgggtaacataatcttggccatgatttccgagccctataaccatcgcttttccgaccccgagcgggttaactacaaatttgagagtgggacctgttccaaaatggagctgatcgacgacaatacggtagtgcgcgcaaggggtttgccctggcagtcaagtgaccaggacatagccagatttttcaagggcttgaacattgccaagggcggagccgctctctgcctgaatgcacaggggagaagaaatggtgaggccctggttcggtttgtgagtgaggagcacagggaccttgcattgcagcggcacaaacaccacatgggaacacgctatatagaggtctacaaagcaaccggagaggatttcctcaagattgcaggaggcacctctaacgaggtagcacagtttctcagtaaagagaatcaggtcattgtccgaatgcgaggcttgcccttcacagccaccgcagaagaagttgtggccttctttgggcagcactgtcccattacaggtggaaaagaaggcatccttttcgtaacatatccagacgggcgacctaccggagatgcatttgtgctgtttgcttgcgaagaatacgcccagaatgcacttagaaagcacaaggacctgttgggcaaacgctacatagaacttttcaggtcaacggctgccgaagtgcagcaggtgttgaacagattctccagcgccccactgatacccctgcctactccaccaattattcccgtgctgcctcagcagttcgtcccaccaaccaacgtgcgcgattgcatccgcctccgcggactcccatacgccgctactatcgaagacatcttagatttcttgggagaatttgctactgatattcgtactcatggcgtccatatggtcctgaatcaccagggtcgcccttcaggagatgctttcatccagatgaaaagcgccgacagggcttttatggcagcacaaaagtgccataagaagaacatgaaagatcgttatgttgaagtctttcaatgctctgccgaagagatgaacttcgtcctcatgggcggtacactgaacaggaatggtctttccccacctccttgcaagctgccctgtttgtccccaccctcctatacattccctgctccggcagcagtgattcctaccgaggccgctatctatcagcctagcgttatcctcaacccacgagccttgcaaccctcgaccgcctactatcctgctggcactcagctgttcatgaactatacagcgtattaccccagccccccagggagcccaaactctctgggctactttcccaccgcggcaaacctttctggcgttcccccacagccaggcaccgttgtcagaatgcagggcctggcatataacactggggtcaaggagatccttaacttttttcaagggtaccagtatgccaccgaagatggattaattcataccaacgaccaggctaggacgctgcccaaagagtgggtctgcatctag

SEQ ID NO: 222123 - DNA, 1827 bp, synthetic construct
  misc_feature 1..1827: note = Description of Artificial Sequence: Synthetic coding sequence
  source 1..1827: mol_type = other DNA
atgacggcttcacccgattatctggtcgtcctcttcggcataacagccggagcgactggagctaaactgggatcagatgaaaaagaactaatactgttattctggaaggtggtggatctggccaacaagaaggtgggtcagctacacgaggtcctcgtgcggccagaccaactggaactgacggaggactgtaaggaagaaacgaaaattgacgtcgaatcactgagcagcgctagtcagctggaccaggcactcagacagtttaaccagtcggtcagtaatgagttgaatatcggggtgggaacatctttctgcctgtgcaccgacggacagctccatgttaggcagattctgcatcctgaagcatcaaaaaaaaatgtgctgctgcccgagtgcttttattcttttttcgacctgaggaaagagtttaagaagtgctgtcccggtagcccagatatagataagcttgacgttgcaaccatgacagagtacctaaatttcgaaaagtctagtagcgtgtcgcggtacggggcatcccaagtcgaagatatgggtaacattatcctcgctatgatctctgagccatataaccatcggttcagcgaccctgagagggtgaattataagttcgagagcggtacatgctcgaaaatggagctaatcgacgataataccgttgtgcgcgctcggggattaccatggcagtcctccgatcaagacatcgcgcgattttttaaagggctcaacatcgcaaaggggggtgcagccttatgcctcaacgcacagggcagacgtaacggcgaggcactggtgagatttgtttctgaagagcatcgggacttagcgctgcaaagacataagcatcacatgggcaccagatatatagaagtgtacaaagccacaggagaggatttccttaagattgccggtgggactagcaacgaggtggcccagtttttgtccaaagagaaccaagtgatcgttagaatgcggggactgcccttcactgctaccgcggaggaagtcgttgcattcttcggccaacactgccctattacaggcggaaaggagggaatcctttttgtgacataccccgacggacggcctactggcgatgccttcgtgttatttgcctgcgaagagtacgctcaaaatgcgttgcggaaacacaaggacctgcttggaaagcggtatattgaactcttccgtagtaccgccgcagaggttcagcaggtgctaaatcggtttagctcggcgccactgatcccgctccccaccccacccataattccagtgctgccgcagcagtttgtgccccctaccaatgtgagggactgcatccggctccggggactgccttacgccgctaccattgaggatatcctggacttcctcggggagttcgccacggacatcaggacccacggtgtacatatggtgctgaatcaccaggggcgtccgagcggcgacgccttcatccagatgaaaagcgctgaccgggctttcatggccgcacagaagtgtcacaagaagaacatgaaagaccgctatgttgaagtcttccagtgcagtgccgaggagatgaacttcgtgctgatgggcggtaccttaaacagaaatggcctgtctcctcctccatgcaaactcccttgcctgtccccgccatcatatacatttcccgctccggcagcagtgattcccactgaggccgctatctaccagccatccgtgatcttgaaccccagagcactccagccatctaccgcctactaccccgcaggcacgcagctgtttatgaattatacggcttactatccctccgtgtag

SEQ ID NO: 222124 - DNA, 2154 bp, synthetic construct
  misc_feature 1..2154: note = Description of Artificial Sequence: Synthetic coding sequence
  source 1..2154: mol_type = other DNA
atgacacccccaccgcctcccccaccacctcccggaccggatcccgctgccgacccagcggctgatccctgcccatggcccggatccttggtggttctgttcggcgcaactgcgggtgctctgggcagggacctcggaagcgatgagacagatctgatcctgctggtgtggcaggtggttgagcccaggtcccgccaggttggaacattacataagtcacttgtgagggctgaagccgctgctctgtctacccagtgcagggaagcctcagggctttccgctgattctctagcacgggctgagcccctggataaagttctgcagcaattttctcagttagtaaacggcgatgttgcacttctgggcggtggcccttatatgctttgtaccgatggtcaacaactgctccgacaggttttacatcccgaagcctcccgcaaaaacctcgtgctgcccgacatgttcttctctttctatgatttgagaagagagttccacatgcagcacccatctacatgtccggctcgcgacctaacagtagcaacaatggcccagggcctgggcctggagactgatgcaactgaagatgacttcggtgtttgggaagtcaagaccatggtggcagtgattctgcacctattgaaagaaccttccagtcagctcttcagtaagcccgaagttatcaagcagaaatacgagacaggcccatgcagcaaagcggacgtggtcgattcggagaccgtcgtgcgtgccagaggtttgccctggcagagcagtgaccaggatgtggccaggttttttaaaggcctgaatgtggcgagaggcggagtcgcgctgtgtctaaacgctcagggccgacgaaatggcgaggcactaattcgattcgtcgactcagagcaacgggacttggccttgcagaggcacaagcatcacatgggagtgagatatatagaagtgtataaggccaccggagaagagttcgtgaagatagccggaggaacttcgcttgaagtggctaggtttctttctcgcgaagaccaagtcattttgcgattgcggggtctccccttttcggccggacccacggatgtgctagggttcctgggtccagaatgccctgtcaccgggggaacagagggactcctgttcgtgagacatcctgacggacggccaaccggtgatgctttcgccctgttcgcctgcgaagagctggctcaggccgcactgaggagacacaagggtatgctggggaagagatacattgagcttttcagatcaacggccgcagaggtgcagcaggtgcttaataggtacgcctctgggccacttctgcccaccctgaccgcaccgctactgcctatccccttccccctagccccaggcacaggaagagattgcgtgcggctgcggggactgccttacacggcgaccatcgaggacattctgtctttcctgggagaggctgccgctgatattaggcctcatggtgtgcatatggttttgaaccagcaaggcaggccttccggcgatgctttcatccagatgaccagcgctgagcgcgcactggcggcagctcagaggtgccacaagaaagtgatgaaggaacgatatgtcgaggtggtgccttgttctacagaggaaatgagtcgagtgcttatggggggtaccctgggcagatcagggatgtctccccctccttgcaaattgccttgcctgtctccaccaacctatactacatttcaggccacaccaactcttatcccaacagaaacagctgccctctatccatctagcgctctgctgccagcagcaagggtgccagctgcaccgacgccggtagcgtactatccgggtcctgcaacccagctctatctcaactatactgcctattatccttctcccccagtctcacctaccacagtcgggtatctaaccactcccacagctgcgttggccagtgcccctacctctgtgctgtcacaaagcggagccttggttcgtatgcaaggtgttccttatacggccggaatgaaggaccttctctcagtgttccaagcatatcagctgcccgcagacgactacacctccctcatgccagtcggagatccgccaaggaccgttctgcaggcacccaaagaatgggtatgcctgtag

SEQ ID NO: 222125 - DNA, 924 bp, synthetic construct
  misc_feature 1..924: note = Description of Artificial Sequence: Synthetic coding sequence
  source 1..924: mol_type = other DNA
atgaataccaggaatagggtggtcaatagtgggctaggcgcttcacctgctagcagacccaccagggatcctcaggaccccagcgggaggcagggcgaactctcgccagtcgaggatcaacgggaaggcttagaagccgctccgaagggcccatcaagggaatctgttgttcacgccggacagaggcggacgtctgcctacactcttatagcccctaatatcaaccgtcgtaatgaaatccagcggattgcagagcaagagctggctaatctggagaaatggaaggaacagaaccgagctaagcccgtgcatttagtgcccagacgtttgggtggctcacagtctgagaccgaggtgcgccaaaagcagcagctacagctgatgcagtcaaagtacaagcaaaagcttaagagggaagagtccgtcagaattaaaaaggaggctgaagaggctgagctgcaaaaaatgaaagctattcaacgtgagaaatcgaacaaactggaagagaagaagaggctgcaagaaaatttacgacgcgaagcctttagggagcatcaacagtacaagactgccgagtttctgagcaaactcaacacagagtctcccgacaggtctgcctgccaaagcgcagtctgtggcccacaaagttcaacctgggccagatcatgggcatatcgcgatagcctaaaggccgaggagaatagaaagcttcaaaagatgaaggatgagcagcaccagaaatcagagttgctggagttgaaaagacagcagcaggaacaggaacgcgctaagatccaccagacagagcacagacgagtaaacaatgcttttcttgatcgtttacagggtaagagtcagcccggtggcctggagcagtcaggcggatgttggaatatgaacagcggaaactcctggggtatctag

SEQ ID NO: 222126 - DNA, 1233 bp, synthetic construct
  misc_feature 1..1233: note = Description of Artificial Sequence: Synthetic coding sequence
  source 1..1233: mol_type = other DNA
atgaatacccgtaaccgagtggtcaacagtggtctgggggcatccccggcatctcgccctacccgcgatccacaggacccctcgggtcgccagggtgagcttagcccagtggaggatcaaagggaagggctcgaagcagcccctaagggcccaagccgagagtccgtcgtgcacgctgggcagcggagaacctctgcttatacccttatcgcacccaacattaacagacgcaatgagatacagagaatcgctgagcaggagctggccaatctagagaagtggaaagaacagaatcgagcaaagccagtgcacctggtgccgagacgcctgggaggcagccagagcgagactgaagttagacagaagcaacagctccagctaatgcagtctaagtacaaacagaagctgaagagggaggagtctgtcagaattaagaaggaagccgaagaggccgagctgcaaaagatgaaggccatccagagagagaaaagtaataagttggaggaaaaaaaacggttgcaggaaaaccttaggcgggaagcctttagagaacaccagcaatataagaccgccgagttcctcagcaaactcaataccgaaagtcccgatagatctgcctgccagagcgccgtgtgcggcccacagtcttctacatggaagcttccaatactgcctcgggatcatagctgggctagatcttgggcctatcgtgactctcttaaagccgaagagaacaggaagctgcagaaaatgaaggacgaacagcaccagaaaagcgaattgctggagctcaagcgccagcagcaggaacaagagcgcgctaagattcaccaaactgagcacagacgcgtgaataatgcatttttagaccgcctgcagggtaagagccagcctgggggtttggaacagtctggagggtgttggaacatgaacagtggcaattcgtggggatcgctcctggtgttctccagacacctgcgggtgtatgagaagatactgacccccatatggcctagctcgaccgacctagaaaaaccacacgagatgctctttctgaatgtcattctgttttctctgactgttttcacgctcatcagcacagcccatactcttgatagagccgttcgctcagactggttgctgttagtgctaatatacgcatgcttagaggagctaattcctgaacttatttttaatctgtactgccaaggtaacgccacgttattcttctag

SEQ ID NO: 222127 - DNA, 1368 bp, synthetic construct
  misc_feature 1..1368: note = Description of Artificial Sequence: Synthetic coding sequence
  source 1..1368: mol_type = other DNA
atgtggctggagattctcctcacttcagtgctaggtttcgccatctattggtttatctctcgtgataaggaggagacactgcctctagaggacggctggtggggcccaggcacacgctccgctgccagagaagacgattccatccgcccttttaaggtggagacttctgacgaagagattcacgacctccaccaaagaatcgacaaattccgtttcacacctcccctagaggacagctgtttccattatggcttcaactcaaattatctcaagaaagtcattagctactggaggaacgagttcgattggaaaaagcaagttgaaatcctgaatagatatccacactttaagacaaaaatcgaagggctggatatacacttcattcatgtcaaaccaccacagttgccggcaggacatactcccaagcccctactaatggttcatgggtggccagggagtttttatgagttctataagatcatacctctcttaaccgaccctaagaatcacggactgtccgatgagcatgtgttcgaggttatatgcccctccattcccggatacggtttttcagaggcttctagcaagaaaggattcaactccgttgccaccgcaaggattttctacaagctcatgctgaggctaggattccaagagttttacattcagggaggagactgggggtcactgatctgcaccaacatggcccagctggtcccaagccatgtgaaagggctccacttaaacatggccctggtgctgtccaacttcagcaccttaactttgctcttggggcagcggtttgggcgattcctgggcctcaccgagcgagatgtggagctgctgtatcctgtcaaagagaaagttttctacagcctcatgcgcgagtctggctacatgcacatccagtgtaccaagccagatactgtgggatctgctttaaatgactcacccgtgggcctggctgcctatattttggagaaattctccacatggactaatactgagttccgctacttggaggacggaggattggagaggaaatttagcctagatgacctgctgacaaatgtgatgctctactggaccacaggaactatcatctcttcccagaggttttataaagagaacctcggtcagggatggatgacccagaagcacgagagaatgaaagtgtacgtgccaactggcttctccgccttcccctttgagctactgcacaccccagagaagtgggttcgattcaaatatccaaagcttatttcctactcctacatggtaagaggcggacattttgctgcatttgaggagccagagttgcttgcccaggacatccgtaagtttttaagcgttctggaaaggcagtag

SEQ ID NO: 222128 - DNA, 1368 bp, synthetic construct
  misc_feature 1..1368: note = Description of Artificial Sequence: Synthetic coding sequence
  source 1..1368: mol_type = other DNA
atgtggctcgaaattttacttacctcggtcctgggctttgccatttattggtttatcagtcgtgacaaggaggaaacactgcccttagaggatgggtggtgggggcctggcacacgaagtgctgcccgagaagatgacagcattcgccctttcaaagtcgaaacttccgatgaagagatccatgaccttcatcagcgaattgacaagttccggttcacacctcctctggaggatagctgcttccattacggctttaacagtaattatttgaagaaggttataagctactggcgcaacgaattcgattggaaaaaacaggtcgaaatcctcaacaggtatccccatttcaagaccaaaatagaaggattagatatccactttattcatgtgaagccccctcaactacccgcagggcatacgcctaagccattgctgatggtccacggctggccagggagcttctacgagttctacaaaattataccactgcttacggacccaaaaaatcacggcctttcagacgaacacgtcttcgaagtgatttgcccgtcaatacccggatacggctttagcgaggcctcatccaagaagggctttaacagcgtcgccaccgcaagaattttttataaattaatgctgcgcctggggtttcaggagttttatatccagggcggtgattggggttccctgatctgcaccaacatggcacagctcgtcccctcacacgttaaaggcctgcatctcaacatggcactggtgctctcaaactttagcacactgactctcttgctcggtcagcggtttggacgattcctagggctgactgagagggacgttgagctgttgtatcctgtgaaggagaaggttttctattctctcatgagggaatccgggtatatgcacatccagtgcactaagcccgataccgtggggtctgctctgaatgactccccggtggggctagcagcgtacattctcgaaaaattttctacttggaccaacacagaatttaggtatttggaggacgggggacttgagcggaagttcagcttggacgaccttctaaccaatgtgatgctttactggacaacaggtactatcatatcctctcaacggttctacaaggagaatttaggccaggggtggatgacccagaaacatgagcgcatgaaagtgtacgtgccaacgggtttcagcgcattcccctttgagctgctgcacacccccgagaaatgggtcagatttaagtacccaaagttaatctcatacagttacatggtgagaggtggccactttgcggcatttgaagagcctgagctactcgctcaggacatcaggaagttcttgtccgtactggaacgacagtag

SEQ ID NO: 222129 - DNA, 486 bp, synthetic construct
  misc_feature 1..486: note = Description of Artificial Sequence: Synthetic coding sequence
  source 1..486: mol_type = other DNA
atgtggctggagatcctgttgacctccgtcttaggcttcgctatttattggttcatctcacgggacaaggaagaaacacttcccctggaagatggttggtggggcccagggacccgctctgcagcgcgagaagacgactcaatcagaccttttaaggtggaaacatccgatgaagagatccatgatctgcatcagagaattgacaagttcagatttacacctcctcttgaggactcatgcttccactacggctttaatagtaattatcttaagaaggtgatcagctactggaggaacgaattcgattggaagaagcaggtcgagattctgaaccgttacccacatttcaaaacgaagatcgaggggctggacatacattttatccacgtaaagcctccccagctgcctgctggtcatacccccaaacccttactgatggtgcacggatggccaggaagcttttacgaattctataaaattatctag

SEQ ID NO: 222130 - DNA, 411 bp, synthetic construct
  misc_feature 1..411: note = Description of Artificial Sequence: Synthetic coding sequence
  source 1..411: mol_type = other DNA
atgtggctcgagatcttactgacgagtgtgctcggcttcgctatctattggttcatttcccgggacaaggaggagacgctgccactcgaggatgggtggtggggtccagggaccagatccgcagctagggaggacgacagcattagaccttttaaggtcgagacaagcgacgaggagatccacgacctccatcagcggatagacaaatttagatttactccacccctggaggattcttgcttccattatgggtttaatagcaattatttgaagaaggtgatatcctattggagaaatgaattcgactggaaaaagcaggtcgagatcctcaataggtacccacactttaaaaccaagatagaagggctggacatccacttcattcacgtaaaacctccacagctgccgtag

SEQ ID NO: 222131 - DNA, 1509 bp, synthetic construct
  misc_feature 1..1509: note = Description of Artificial Sequence: Synthetic coding sequence
  source 1..1509: mol_type = other DNA
atgaagggcgagataacgctgtcccaatggatccctctgatggaagagaattgccggaagtgcagtgagactgccaaagtgtgcctcccgaagaatttctcaatcaaggagatatttgacaaggcaattagcgcgaggaaaatcaaccggccaatgctgcaggctgccctaatgcttcgaaagaagggctttaccacagccattttgaccaacacatggttggatgacagggctgagcgtgacgggttagcccagcttatgtgcgagctcaaaatgcactttgattttctgattgagagctgccaggtgggaatggtgaagcctgagccacaaatctacaaattcctgttggacacccttaaggcttcaccctcagaagttgtttttctcgacgacattggcgctaatctcaaacctgcaagggacctcggaatggtgactattctcgtgcaggacaccgacacagcactcaaggagttggaaaaggtcacaggaatccagctcctgaatactcccgcaccactccccacatcgtgtaacccgtcagacatgtcccatggctacgtcacagttaagccaagagttagattgcacttcgtcgagctgggctctggcccagccgtgtgcttatgtcacggctttccagagtcatggtactcctggcggtatcagattccagccttagctcaagctggttacagagtgctcgctatggatatgaaagggtatggagagtcatcagctccacccgagattgaagagtattgtatggaagtgctatgtaaagagatggtgacattccttgacaagttgggattgtctcaggcagtgttcatcgggcatgattggggaggcatgttggtatggtatatggctcttttttacccagaaagggtgcgtgcagtggcttctttgaatacccctttcatcccagcgaaccccaatatgagtccgctggagtcaattaaggctaaccctgtgttcgattatcagctgtacttccaggaaccaggagtggccgaggccgagctagaacagaatctgtcgcgtacatttaagagcctttttcgggctagcgacgagtccgtactgagtatgcacaaggtgtgtgaggcgggaggtttattcgtcaactcaccggaggaaccgtctctgtcccgcatggtaaccgaggaagagattcaattttatgtccaacagtttaaaaagtcaggcttcagaggaccattgaactggtacagaaacatggagaggaattggaagtgggcctgtaaaagcctagggcgtaaaatcctgataccagctctgatggtcacagccgagaaagactttgtgctggtgcctcagatgagccaacatatggaagactggattccccacctgaagagaggccatatcgaagattgtggccattggacccagatggataaaccgacagaagtgaatcagattctcataaaatggctggacagcgacgccaggaacccccctgtggtgagcaaaatgtag

SEQ ID NO: 222132 - DNA, 1470 bp, synthetic construct
  misc_feature 1..1470: note = Description of Artificial Sequence: Synthetic coding sequence
  source 1..1470: mol_type = other DNA
atggaagaaaattgccggaaatgcagtgaaaccgccaaggtgtgcctccctaaaaatttctccatcaaagagatctttgataaggcgatttctgcaagaaaaattaaccggcctatgctgcaggcggcactcatgctcaggaagaagggcttcactacggcaattctaacgaacacctggctggacgacagagctgagagggatggtctggcccagttgatgtgtgagctaaagatgcatttcgatttcctaatcgaaagctgccaagtgggcatggtgaaaccagaacctcagatctacaagttcctgctggatacgttaaaagcctcacccagcgaagtggtgttcctagatgacatcggggctaacctgaaaccagcccgagacctgggcatggtcaccatcctggtccaagacaccgataccgcattaaaggagctcgaaaaggtgaccggcatccagctactcaacacccccgctccactgccaacaagctgcaacccaagcgacatgtcccatggctatgtgacggtcaagccgagagttaggctgcacttcgtcgagctaggctccgggccagccgtttgcctgtgccacggatttccggagagctggtattcctggcgttaccagattcctgccctggctcaggctggctatcgcgtgctggcgatggatatgaagggatacggcgaatctagcgcacccccagaaatcgaggaatattgtatggaagtgctctgtaaagagatggtgactttcctcgataagctaggcctctctcaagccgtgtttattggacatgactggggaggaatgttggtgtggtacatggccctgttttatccagaaagggttcgagccgttgcatcattgaatacacccttcatccctgccaacccaaacatgagcccattggagtcaatcaaagccaacccagtgtttgattatcagttgtacttccaagagccaggtgtagcagaggctgagctagaacagaacttgagtagaaccttcaagtctcttttcagagccagcgatgaaagtgttctcagtatgcacaaagtctgcgaagccggtggtcttttcgtcaactcaccggaggagccctcactgtcccggatggtgacagaagaagagattcagttctatgttcaacagttcaaaaaatccggcttccgtggacccctcaattggtaccggaatatggaaagaaactggaagtgggcatgcaagtcattaggacgcaaaatcctcattcccgctctgatggtgacagctgaaaaagacttcgtcctggtgccacagatgtctcagcatatggaggattggatcccacacttgaagcgtggccatatcgaggactgcggacattggacacagatggataaacctactgaagtcaatcagattctgattaagtggctggattcagatgctcgaaatccccctgtggtttcgaagatgtag

SEQ ID NO: 222133 - DNA, 1509 bp, synthetic construct
  misc_feature 1..1509: note = Description of Artificial Sequence: Synthetic coding sequence
  source 1..1509: mol_type = other DNA
atgacactaagagcagcagtattcgacctggatggagttctcgctttacctgccgtgttcggcgtcctggggcgaacagaagaagccctggccctgccaagaggattgcttaacgacgcctttcagaaaggaggacccgaaggtgctactactcgcctgatgaaaggggaaatcaccctgagccaatggattcctctgatggaagagaactgtaggaagtgctctgaaaccgccaaggtttgcctgccgaagaacttctctattaaggaaatctttgataaggccatatccgcaaggaaaattaataggccgatgctgcaggctgccctgatgctgagaaagaaagcgttttgttccgggttcaccaccgctatactgacgaacacctggcttgacgatagagctgaaagggacggtcttgcccagttaatgtgcgagctgaagatgcacttcgatttcctcatcgagtcctgccaggtgggtatggttaagcctgaacctcagatctataagtttctcctggacaccctaaaggcctcgcccagcgaggtggtgttcttggatgatataggcgcaaatcttaaaccagccagagatctcggaatggtgaccatcttggtgcaagacaccgatacagcattaaaggaacttgagaaggtaaccggcatacagttgctcaatacgcccgcacccctgccaactagctgcaacccctcagatatgtcgcatggctacgtgactgtgaagccccgagtcagactgcactttgtcgagctgggaagcggacccgctgtatgcctgtgccatggatttcccgagtcatggtactcatggcgctatcagattccggcacttgcccaggccggttatagggtactcgccatggacatgaagggctacggtgaaagctcagcccctccagaaattgaagaatattgcatggaggttctctgtaaagagagtataaaggcgaatcctgtgttcgactatcaactgtacttccaggagcccggagtggcggaggccgaactcgaacagaatttgtcacgcacctttaagtccttgttccgggcttcagatgagtcggtgctgtcaatgcataaagtgtgtgaggcgggtggcctcttcgtcaatagcccagaagagccatccctaagtcgaatggtgacagaggaagagatccaattttatgtgcagcagtttaagaagagcgggttccggggtcccctcaattggtatcggaatatggaacggaactggaaatgggcttgcaaaagtctggggcgaaaaattctgattccagcactaatggtaacagccgagaaggactttgtgctggtgcctcaaatgagtcagcatatggaggactggataccacatttaaagagagggcatattgaggattgcggccactggacccaaatggataagccgacagaggtgaaccaaatcctgatcaagtggttggacagtgacgcaagaaaccccccagtggtcagtaaaatgtag

SEQ ID NO: 222134 - DNA, 1668 bp, synthetic construct
  misc_feature 1..1668: note = Description of Artificial Sequence: Synthetic coding sequence
  source 1..1668: mol_type = other DNA
atgaccctgcgcgcagccgtgttcgatttggacggggtgctggcgctccccgctgtgtttggtgtgttaggtcgcacagaggaagctttagcgctgcctcggggtcttctcaacgatgcctttcagaagggcggtcctgagggtgcaactactaggttaatgaagggggaaattacattaagtcaatggattccactcatggaggaaaattgtcgaaagtgcagtgagaccgctaaggtgtgtcttccaaaaaacttttctatcaaggagatcttcgacaaagccatttcagcacggaaaattaacaggccaatgttgcaggccgctctgatgctgcgaaagaagggatttacgacagctatccttactaacacatggctggacgacagagccgagagggacgggttggcgcaattgatgtgcgaactgaaaatgcactttgactttttgatcgagtcttgccaggtgggaatggtaaagccggaacctcagatatataaatttttactggatactctcaaggccagtcccagcgaggtggtgtttctggatgatatcggcgctaacctgaaacccgctagggacctcgggatggtgacaatactggtgcaggatacggacaccgccctgaaggagctggagaaggtcactggcatacaattattgaacacaccagcccctttaccaacatcctgtaacccttccgatatgtcccacgggtatgtgaccgtcaagccacgagtccgtctgcattttgtggagcttggatctggtcccgcagtgtgcctttgccacggattcccagaaagctggtatagttggaggtatcagattcccgcacttgcacaagctggatatagggtgcttgccatggatatgaaagggtacggggagtcctccgcaccaccggagattgaggaatattgcatggaggtactctgtaaagagatggtgacctttctggataaactcggcctgtcacaagccgtcttcattggccacgactggggtggcatgcttgtttggtatatggccctgttttaccccgaacgcgtgagggcagtggcaagtttgaatacacctttcattccggcaaatcctaacatgagccctctggagtctattaaggccaatcctgtcttcgattaccaactctactttcaggagcccggtgtcgctgaggctgagctggagcagaatttatcaagaaccttcaagtccttattccgggcttccgatgagtcagtgctgtccatgcacaaagtttgtgaagcaggaggactcttcgtcaattcgcctgaggagccgagtcttagccgcatggtgacggaagaagagattcagttctacgtgcaacagttcaagaagagtggctttcgcggtcccttaaattggtaccgcaatatggagcggaattggaagtgggcctgcaagagcctcggcaggaagatcctgatcccagctctgatggtcaccgccgaaaaggacttcgtactggtcccacagatgtcacagcacatggaagattggattcctcacctgaagaggggccacattgaggactgtgggcactggactcagatggacaaaccaacggaggtgaatcagatccttatcaagtggctagatagtgatgctcgcaatcctcccgttgtcagcaagatgtag

SEQ ID NO: 222135 - DNA, 1653 bp, synthetic construct
  misc_feature 1..1653: note = Description of Artificial Sequence: Synthetic coding sequence
  source 1..1653: mol_type = other DNA
atgtcaaccagcagtttgcgtcgtcagatgaaaaacattgtgcacaactacagcgaggcagagattaaagtgcgggaggctactagcaacgacccctgggggccttctagttcgttgatgagtgagatcgccgacctgacatacaatgtagtggccttttccgagatcatgagtatgatatggaaacgcttaaatgatcatggaaagaactggcgacacgtttataaagccatgactctgatggagtatttgataaagaccgggtccgagcgcgtgtctcagcagtgcaaggaaaatatgtacgcggttcagaccctgaaagacttccagtatgtggaccgtgacgggaaagaccaaggcgtgaacgtgcgagagaaagccaaacagctggtggcactactgagggatgaggaccggctccgcgaggagagagcccacgccctcaaaacaaaagaaaagctggcacagaccgctaccgcttcctcagcagccgtggggagcggccctccccctgaagcagaacaggcttggccacagtcttccggcgaagaggaattacaactgcagttggcacttgccatgtctaaagaggaggccgatcaggaagaacgtatccggaggggtgatgacctcaggcttcagatggctatcgaggaaagcaagcgagagactggcggaaaagaggagagctcgctgatggatctggccgatgtgtttactgctcctgcaccagcgcctacaacagacccatggggcggacccgctcctatggctgctgctgtgcccacagctgctcccacttcggatccctggggagggcctcctgtccccccagcggcagatccctggggcggacctgccccaaccccagccagcggcgatccctggcgccctgcagccccagcaggtccatctgtggatccctgggggggtacacccgctcctgccgctggtgaaggccctactcccgatccatggggctctagtgacgggggtgtgcctgtcagtggacccagtgcgtcagacccctggacccccgcaccagctttctccgacccctggggaggaagccctgcaaagccatccaccaatggaacaaccgcagggggattcgacacggaaccagacgagttctcagacttcgatcgacttcggaccgcccttccgacatctggatcttcagctggggaactggaactgcttgccggagaggtcccggcacgttctccaggggcattcgacatgagtggcgtccgcggatcattggctgaggcagtagggtccccaccccctgcagctacccctaccccaacacccccaaccagaaagacacctgagtcatttctgggcccaaatgccgctcttgtcgatctggatagcctggtcagcagaccaggacctacacccccaggagccaaggcgagtaaccctttcctaccaggtggcggtccagcaaccgggccttcagtcaccaatccttttcagcctgcaccacccgctaccctgacgctgaatcaactccgtctctcccccgtccctccagttcctggcgctcctccaacttacatctcccctctcggcggaggtcccggattgcccccaatgatgccacccggtccacctgcccctaatacaaatcccttcctgctgtag

SEQ ID NO: 222136 - DNA, 1731 bp, synthetic construct
  misc_feature 1..1731: note = Description of Artificial Sequence: Synthetic coding sequence
  source 1..1731: mol_type = other DNA
atgagcacctctagtcttcggaggcagatgaaaaatatcgtgcacaactacagcgaggctgagatcaaggttagagaagctacctccaacgatccatggggcccttcctcctcgttaatgagcgaaatcgcagatctgacctacaacgtagtcgccttctccgaaatcatgagcatgatctggaaacggctgaacgaccacgggaaaaactggcgacacgtgtacaaggcgatgaccttgatggagtatctgattaaaaccggaagtgagagggtctctcagcagtgcaaggagaacatgtatgcggttcaaacattaaaagactttcagtatgtggaccgggatggaaaggatcagggtgtgaacgtccgggagaaagctaaacagctggtcgccttgttacgtgatgaggacaggcttagagaggaacgcgcacacgctctgaagactaaggaaaagctcgctcagaccgccacagcatcatccgctgccgttgggagcggtccaccacctgaggcagagcaggcctggccacagagctccggtgaagaggagctgcaactgcagctggctctcgccatgtccaaagaggaggccgaccagcctccctcatgcggacctgaggacgacgcgcagctccagctggccttatccctgtcaagagaagagcacgataaggaggagcggatccgccgaggagatgatctgaggctccagatggccatcgaagagagcaagagagaaacaggcggaaaggaggaatccagtctcatggacctggctgacgtgtttaccgcccctgcccctgcgccaaccaccgatccatgggggggacccgcacccatggcagccgcagtacctaccgccgcacccacatccgacccttggggcggacccccagttccacctgctgctgacccatggggaggtcctgccccaacacccgcttcaggagacccatggcgcccagcagcgccagctggcccttctgtcgatccgtggggtggtacaccggctcccgctgccggtgaaggcccaacgccagacccatggggatctagtgacggcggtgtgccagtctctgggccttcggcctctgacccttggactcccgcaccagctttttcagatccgtggggtgggtcgccagctaaacccagcaccaacggaacaaccgccgctggaggattcgacactgagccagatgagttctctgatttcgatagattgcggactgccctgcctacatccggtagcagcgctggagagctcgagctgctggctggcgaggtaccagctaggtcgcccggagcctttgatatgtccggggtgagaggaagtctggccgaagccgtcggcagcccacctcctgccgctacacccaccccaactcctcctacgcggaagacccccgaatccttcctggggccaaatgcggcactggttgaccttgactcccttgtgtcaaggccgggacctacaccgccaggagccaaagccagcaatccgttcttgccaggcggaggccctgccaccggcccaagcgttactaaccctttccaaccagccccacctgctacactgactttgaatcagctgcgtctctctcctgtccctccggtgcccggagcaccacctacgtacatctctccactcgggggtggtcctggacttccccctatgatgcccccagggccacctgctcccaacacaaatccttttctcctttag

SEQ ID NO: 222137 - DNA, 1989 bp, synthetic construct
  misc_feature 1..1989: note = Description of Artificial Sequence: Synthetic coding sequence
  source 1..1989: mol_type = other DNA
atgggtgatcaaagctggctctggaatcaggccgctcctggtgtgcggagtcctgtgtttgcctgcagcgtagaaaagggcaatgtgcctcttgtgttaagcgagcacctggcccacagtcgagacccaggatccggtgctgtgagattccttatcagcccagaaccttgggctagtgctattctaggtaccagtggactgctagcaagtccagtccttcctgcagctctggatgctgtcacgtgtcagcaccttccccaaccctcgagtggcagcagaccaatatcccctcggattggagcactctgtcctctcctgctgcagccaggcaccatgagcacctccagcctgcggcgacagatgaagaatattgtgcacaattatagtgaggcagaaataaaagtgcgagaagccacgagcaatgacccctggggaccatcctcaagtctgatgtctgagatcgctgacctgacatataacgttgtggcttttagcgagatcatgtctatgatctggaaacgcctgaatgatcatggcaaaaactggcgtcatgtgtacaaagcaatgaccctcatggagtacctgatcaaaacggggagcgagagagtgagtcagcagtgcaaagaaaacatgtatgctgtgcaaacactcaaggactttcaatacgtggatcgcgatggaaaagaccagggagttaacgtcagggagaaagctaaacagcttgtggctcttcttagggacgaagatagactgagggaggaacgggctcacgctctcaaaaccaaggaaaagcttgcccagacagccaccgctagttctgcagccgtgggcagcggtcctcctccagaggctgaacaggcctggccccaatccagtggagaggaagaattgcagctgcagctcgccctcgccatgagtaaggaggaggcggaccaggaggagcgaatccgacggggagatgacctacgactacagatggccatcgaagagtccaaaagggaaactggaggtaaagaagagagttccctcatggacctggccgacgtgttcacagctcccgcacccgctcctaccacagatccatggggcggtcccgctcccatggctgccgcagtgccaaccgcagcccctactagcgacccatggggaggaccccctgtgcctccagctgccgacccttggggcggtcctgccccaacaccggctagcggtgatccttggagacctgcagcccctgcaggcccaagcgtagatccgtggggcggaacgcccgctccggctgctggggaaggtccaactccggacccatgggggtcatctgatggaggggtaccagttagtggtcccagcgcaagtgacccctggactcccgcaccagccttctcagatccctgggggggatccccagccaaaccttcaaccaatggaactactgccgctgggggattcgatacagaacctgacgagttcagcgacttcgacagactgcggacagcccttcccacttcaggaagctccgccggagagctcgaactgctggctggcgaggttcctgccagatctcccggagcattcgacatgtcgggtgtgcgcggttcgctggcagaggcggtcggttccccaccgcctgctgctactccaactccaaccccgcctactagaaagacaccagagtcctttctgggccctaatgcagccctggtggacctggactccctggtgagtcggccaggtccgaccccaccaggtgccaaagctagtaatcctttccttccaggcggtggccctgctacagggcctagtgtgaccaacccattccaacccgcaccccctgccaccctgacactcaaccaactgcgcctttctcctgtacctcccgtgcctggagcaccgccaacttacatcagcccactgggcggaggtcccggactgcctcctatgatgccgcctggacctcccgcacccaataccaacccttttctgctgtag

SEQ ID NO: 222138 - DNA, 1611 bp, synthetic construct
  misc_feature 1..1611: note = Description of Artificial Sequence: Synthetic coding sequence
  source 1..1611: mol_type = other DNA
atgagcgaaattgccgacctcacgtacaacgtggttgcgttcagcgaaataatgtcgatgatttggaagaggctgaatgatcacggtaagaactggcggcatgtctataaggccatgacacttatggagtacctaattaaaactggttctgaaagagtgtcacaacagtgtaaggaaaatatgtacgctgtccagaccctcaaagatttccaatatgttgatagagatggtaaggatcagggggttaatgtccgtgaaaaagccaaacaactggtagccttgcttagagatgaggacagattacgtgaagaacgagcccatgcgctgaaaactaaagagaaacttgcgcaaaccgccaccgcttccagcgctgctgtgggctctggacctcctcctgaagccgagcaggcatggcctcaaagttctggcgaggaggagctgcaactccaattggctctggcgatgtcaaaagaagaggctgatcaacccccatcgtgcggacctgaagacgacgcgcaattgcagttggctctgtccctctcccgcgaggagcatgataaggaggaacgtatcagacgcggtgatgatctccgccttcagatggctattgaagaaagcaaaagggaaactggtggcaaagaggaaagcagcttgatggatcttgcggacgttttcactgccccagctcccgctcccaccaccgatccttggggaggtcccgcacctatggcagctgccgtgcctactgctgctccaacaagcgatccttgggggggaccccctgtgcccccagcagctgacccctggggcggaccagcacctactcccgcttccggagacccttggcggccagcagctcctgccggaccttctgtggatccctggggcggtactccggctcccgcagcgggagagggtccgaccccggacccatggggctcgagtgatggtggcgtccccgtgtcaggcccatccgccagcgacccttggacccctgcgccagccttttctgacccatggggcggttcgccagcgaagcctagcactaacgggactacagctggcggatttgacaccgagccggacgagttttcggacttcgacagactgaggacggcactgccaacctccggtagttctgccggagagctcgagctcctggctggagaggtccccgcacgtagccctggcgcattcgacatgtcaggagtgcggggaagtctcgccgaggccgttggctcccctcctcccgctgctactccaacacccacccccccaacgcgaaagacacccgagtccttcttgggaccaaacgctgctctagttgaccttgatagcctggtgagccggccaggtccgactccccctggggctaaggcttcgaatccgttcctccccggaggagggcctgctacaggtccttcagtgaccaacccgttccagccagctcccccagctactctgacactaaatcagctgcgcctttccccagtgccacctgtccccggagcccctcctacctatatctctcctctaggaggaggaccaggactgcctcccatgatgccgccagggccaccggcacctaataccaatccctttctactctag

SEQ ID NO: 222139 - DNA, 1926 bp, synthetic construct
  misc_feature 1..1926: note = Description of Artificial Sequence: Synthetic coding sequence
  source 1..1926: mol_type = other DNA
atgacaaccagttcaattaggaggcagatgaaaaatatcgtgaacaactacagcgaagccgagattaaggtgagagaggctaccagcaatgacccttggggacccagcagctccttgatgacagagatcgccgacctgacctataatgtagtagcattttccgagatcatgtctatggtttggaagcgacttaatgaccacggtaagaactggcgccatgtgtacaaagccctgacactgctcgactatttgatcaagactggctccgaaagggtggcccaacagtgccgggaaaatatctttgccattcaaactttgaaagacttccaatacattgaccgggacggcaaggaccagggaatcaacgtaagggagaagtctaagcaattggttgctttactgaaagacgaggaaagactcaaggccgagcgcgcacaggcattgaagaccaaagaacgaatggcccaagtcgctactgggatggggtctaatcaaatcacctttggcaggggaagtagccaaccgaacctgagcacgagtcactccgaacaggaatatgggaaagctggaggctctcccgcttcgtaccacgggagcccagaagctagcctgtgtccccagcatcgcaccggtgcacctctcggacagtccgaggagttgcagccactgagccagagacatcccttcttaccacatttgggtttggccagtagacctaatggggactggagtcagccatgcctaacttgcgatagggcagcgcgtgccacaagtcccagggtatctagcgaactggagcaggcccgaccccagacgtcaggggaagaagaactccaacttcagctggcccttgctatgtctcgggaagttgcagaacaagaggagcggctcaggcggggagacgaccttcgactccagatggcccttgaggagtctcggcgagacacggtgaaaatcccaaagaaaaaagagcatggatctttgcctcaacagaccactctcctcgacctgatggacgccctcccaagttccgggccagccgctcagaaggctgagccctgggggccttctgcaagcaccaatcaaacaaacccatggggtggccctgctgccccagccagcacttccgacccttggccatcattcgggacgaagccagccgcttccatagacccctggggggttcctactggggcaacagttcaatctgttccgaagaatagtgatccgtgggccgcttcacagcaacctgcttcctcagcgggaaaaagggcatctgacgcctggggcgctgtgtcgacaacgaaaccagtgagtgtcagcggatcctttgagctgttcagtaacctcaacgggacaatcaaggatgatttctccgagttcgataatctgaggacatctaagaaaactgccgagtcagtaacttctttaccgtctcagaataatgggaccacgagtcctgacccgttcgagtcacagcccttaacggtggctagtagtaagccctcctctgctcgaaaaacacccgaaagtttcctcggtcccaacgctgccctggtcaatttggattccttagtgacccggccagcacccccagcacagtcactgaatcctttcctagccccaggagcaccagccactagtgcacctgtcaacccctttcaggtgaaccagccccagcccctcacattgaaccagctaagaggttctcctgttctggggacatccacatcctttggacctggccctggcgtagaaagcatggcggttgccagcatgacaagtgccgcaccgcaaccggctcttggcgctaccggaagctcattgaccccgttgggccctgccatgatgaatatggtagggtccgtaggcattcccccttcagctgcccaggcaaccggaaccaccaaccctttcttactttag

SEQ ID NO: 222140 - DNA, 1755 bp, synthetic construct
  misc_feature 1..1755: note = Description of Artificial Sequence: Synthetic coding sequence
  source 1..1755: mol_type = other DNA
atgacaacctcttctattcggagacagatgaaaaatatcgtgaacaactacagtgaggccgagatcaaggtgagagaggccacctccaacgatccatgggggccatcctcatctttgatgaccgaaattgccgatcttacatataatgtcgtcgcattttcagagataatgtccatggtgtggaagcggttaaatgatcatggcaagaactggcgccacgtctataaggccctcactctgttggattacttgatcaagacagggagcgaacgagtggcccagcagtgtagggaaaatattttcgccatacagactctgaaggacttccagtacatcgatagggatggcaaagatcaaggaatcaacgtgcgcgaaaagagcaaacagcttgttgctttgttaaaggacgaagagagactgaaggccgagagggcacaggccctgaagaccaaggagaggatggcgcaagtggcaaccggcatgggatcaaaccagattacgtttggacgaggatcaagtcaacctaatttaagcacttcacactccgagcaagaatacgggaaagccggtggcagtccagcatcgtatcacggctccacttcgcctcgggtatcgagcgagctggaacaggcaagacctcaaacaagcggagaggaggaactgcagctccaattggctttggctatgtcacgtgaggtggcagagcaggaggagaggctgagacggggagatgatttgcgccttcaaatggccctagaagagtcaaggagggataccgttaaaatcccaaaaaagaaggagcacggttccctcccccaacaaacaaccctactggacttaatggacgccctgccctccagtgggccagctgcacaaaaggccgaaccctgggggccttccgccagtacaaaccaaactaatccctggggcggaccagccgcacctgcctccacctccgacccctggccctcatttggcactaaaccagcagcatccattgacccctggggggtgcccaccggggctaccgtccaatcagtgcctaagaatagcgatccctgggccgcatcgcagcaaccagccagctcagccggaaaacgcgcaagcgatgcctggggagctgtgtctaccacaaaaccagtgtccgtcagcgggtcatttgagctattcagcaatcttaacggcaccataaaggatgattttagcgagttcgataacctgcgcacaagcaagaagactgctgagtcagttactagtctgccaagtcagaataatgggaccactagtccagatccctttgaaagccagcctctgaccgtggcgtcttctaagccgtcaagcgccagaaaaactcccgaaagtttcctaggcccaaacgccgcactcgtgaacctggacagcttggtgacaaggcctgcacctcccgcacagtcgctaaatccctttttggctcccggagcaccagccacgagtgcgccagtgaatccttttcaggtcaatcagccccagccgttaacccttaatcagctgcgcggaagcccagtcctgggcacttctaccagcttcgggccaggaccaggagtcgaaagcatggctgtcgccagcatgaccagcgctgcaccccagccagctctgggcgctaccggctcctccctgactccactgggacccgcaatgatgaacatggttggatcagtcggtataccgccttcggccgctcaggctactgggactacaaacccattccttttgtag

SEQ ID NO: 222141 - DNA, 1071 bp, synthetic construct
  misc_feature 1..1071: note = Description of Artificial Sequence: Synthetic coding sequence
  source 1..1071: mol_type = other DNA
atgagccgggaagtcgctgagcaggaagagcgcctcagacgtggcgacgatctgaggttgcaaatggcactggaagaaagcaggcgagacacagtcaaaatccccaaaaagaaggagcatggctcccttccccagcaaaccacactgctcgacctgatggacgctctgcctagctctggaccggcagcacagaaagctgagccatgggggccttctgcttctacgaaccaaacaaatccctgggggggaccagccgctcctgctagcacctcagatccgtggccatcatttggaaccaagccagcagcatccatcgacccatggggtgtgccaaccggtgctactgtgcagtccgtccccaaaaactccgacccgtgggccgcatcacagcagccagcctcgtccgccggtaagagagcgtcggatgcctggggggctgtctcaacgacaaagcccgtgagcgtatcgggaagcttcgagctattttcgaatctgaacggcacaattaaggacgacttttctgaattcgataacctccgtacttcaaagaagacggccgaaagcgtgacctctctgccttcccagaacaacgggacaacaagcccagatcccttcgagtcgcagcctttgacagtggcatcaagtaaaccaagctctgcccgaaagaccccagagagcttcttgggtccaaacgcagctctggtaaatctggattccctggtcacccgtcctgctccacccgctcagtcactgaatccatttcttgcacctggagccccagctacatctgctccggtcaacccttttcaggtcaaccagcctcagcctctgactttaaatcagttacggggatccccagtgctcggcaccagcacctcctttggacccggaccaggagtggagtccatggccgtcgctagcatgacaagtgccgctcctcagcctgccctgggggctacggggtctagcctcacccctttagggcctgcgatgatgaacatggtgggttcagtgggtattccaccttctgctgcccaggccactggcactactaatcctttcttattatag

SEQ ID NO: 222142 - DNA, 1755 bp, synthetic construct
  misc_feature 1..1755: note = Description of Artificial Sequence: Synthetic coding sequence
  source 1..1755: mol_type = other DNA
atgaccaccagcagtatcagaagacagatgaagaacattgtcaacaattatagcgaagctgaaatcaaagtgagggaagcaacttccaacgatccatggggaccctcttccagcttaatgactgaaatcgctgatctgacatataacgttgtggcctttagcgagatcatgtccatggtctggaagcggttaaacgaccacggcaagaactggagacacgtgtataaggccttgaccctactggactatttgatcaaaacaggatcagagagggttgcgcaacagtgtcgagaaaacatcttcgcgattcagactctgaaggacttccagtatatcgaccgagatggaaaagaccaaggaatcaatgttcgcgaaaagtcaaagcagctcgtcgcactgctgaaagatgaagaaaggttaaaggccgaacgtgcccaggcccttaagaccaaggaacggatggcacaggtggccaccggcatgggaagcaaccagataacattcggcaggggaagtagccagcctaacttgagcactagccatagtgagcaggaatacgggaaggcaggagggtcacctgcctcatatcacggctcaacaagcccgcgagttagcagcgagctggagcaggcccgtcctcagacttcaggggaggaggagcttcagttgcaactggctctggctatgagccgcgaggtggcagagcaggaggagcggctgcgtcgcggagatgatctgcgactgcagatggcactggaagaaagtcgaagagatacagtgaagatacctaagaaaaaggaacacgggtctttacctcaacagactacgctgctggacctaatggatgcattaccaagctcggggcctgcggctcagaaggctgagccttggggaccttccgccagtaccaaccaaacgaacccctggggtggacctgcagcaccagcatccacttccgacccttggccttccttcggtacaaagcccgcagcctccatcgatccatggggagtgccaacgggcgctaccgtgcaaagcgtgccaaagaactctgacccgtgggccgcttcccagcagccagcaagctctgccggaaagagggcctccgatgcttggggcgcagtgtctactactaagccagtgtccgtttccgggagctttgaattgttcagcaacctgaacggaacaatcaaggacgactttagtgaatttgataacttgcgcacttccaaaaaaacagccgaatcagtgaccagcttaccgtctcaaaacaacggcaccacaagccctgatccgttcgaatctcagcccctgacggtggctagcagcaagccatctagcgctcgaaaaacccctgagagcttcctcggcccaaacgctgccctggttaacctagattcactggtgactagacctgcgcctcccgctcagagcctcaatcccttcctcgcccctggcgctcctgcaacctccgccccagttaatcctttccaagtaaatcaaccccaacctctgactctgaaccagcttcgcggttcccccgttctcggaacttctacctctttcggccctggcccaggggtcgagagcatggccgtcgccagcatgacatcggccgcaccgcagccggcactaggcgcaactggcagttcccttacaccattaggccctgccatgatgaacatggtcggcagcgtggggattcctcctagcgcagcccaagccacaggtacgacgaatcctttcctcctatag

SEQ ID NO: 222143 - DNA, 1455 bp, synthetic construct
  misc_feature 1..1455: note = Description of Artificial Sequence: Synthetic coding sequence
  source 1..1455: mol_type = other DNA
atgaccactagcagtatacgccgacagatgaaaaatattgtgaataactattcagaggcggagattaaggtgcgggaggcaaccagcaacgatccctgggggccttcgtcctctctcatgaccgaaattgcagaccttacgtataacgtggtggcattctccgagattatgagtatggtctggaagcggctgaatgatcacgggaaaaattggaggcacgtctacaaggctttgacgctactggattatctgattaaaacaggaagcgaacgagttgcgcaacagtgccgggaaaatatttttgccatacagacactcaaggattttcagtatatcgatagggatggaaaggatcaagggattaacgtcagagagaagagcaaacaattggttgcattactcaaggatgaggagaggttgaaggcagaacgggcacaggcactcaagactaaggaaagaatggcccaggtggcgacagggatgggctctaatcaaatcaccttcggaaggggtagtagccaacccaatctttccactagtcactctgaacaggagtacggaaaagccggaggcagccccgcttcctatcatgggagcccagaggccagcctctgtccgcagcaccgcacaggggcaccactgggacaaagcgaggaacttcagccgctgagtcagcggcaccctttccttcctcatttgggattggcgtctcgcccaaatggagattggtcccaaccctgcttgacttgcgatagagctgcgagggcgacctccccacgtgtttctagcgagcttgagcaggctcgtccgcagacgagcggggaagaggaattacagcttcaactggcactagccatgagtcgtgaagtcgctgaacaggaagagagacttcgccgtggagatgatctgcgcctgcagatggccctggaagagtccaggcgtgacactgtaaaaatccctaagaaaaaggagcatggatctctgccacagcagaccaccctgctcgacctcatggatgcattgccgtcttccggacccgcagctcagaaggcagagccatggggcccatcagccagcactaatcagacaaacccatgggggggtcccgctgcgccagccagcacatccgacccttggcctagctttggaaccaaacccgcagcctcaatcgacccatggggcgtccccaccggtgcaaccgtccagtctgtgccaaaaaactcagatccttgggcggcaagccaacagcctgctagctccgcaggcaagcgggcaagcgatgcctggggcgctgtctctacaacaaaacctgtttctgtcagcggcagctttgaactgttcagtaacctgaacggtacgattaaggatgacttcagcgaatttgacaacctgcgtacttctaaaaagacaggaatgcagggactgacgggactcctgttcaccatggaaatttag

SEQ ID NO: 222144 - DNA, 1500 bp, synthetic construct
  misc_feature 1..1500: note = Description of Artificial Sequence: Synthetic coding sequence
  source 1..1500: mol_type = other DNA
atgacgactagcagcataaggaggcagatgaagaatatcgtgaacaactactccgaggctgaaattaaagtcagggaggccacatcgaatgatccctgggggcctagttcttctcttatgactgaaatagctgatctgacatacaacgtagtggctttctctgagattatgtccatggtgtggaagcgcctgaatgaccacggaaaaaactggaggcatgtctacaaagcactgactctgctggattatctgatcaaaacaggttctgaacgcgttgcccaacagtgcagagagaacatctttgcaatccagacactgaaagattttcagtacatagacagggatggtaaggaccaggggatcaatgtgcgggagaaatccaagcagctcgtggccttgctcaaggacgaggagcggctcaaggctgaaagagcacaggccctgaaaaccaaagaacgcatggcccaagtggctacgggcatgggaagtaatcaaattacttttggaaggggctcttctcaacctaacctctctacatctcactctgaacaggagtatggaaaagctgggggatcaccggcaagttaccatggatccaccagccctcgggtttcctcagagttagagcaagcgaggcctcaaacgtctggagaagaagagctgcagttgcagctcgctctcgccatgtcacgcgaggtagcggagcaggaagagcgactgcggaggggggacgatctgcgcttgcagatggccctggaggagtctaggcgagataccgtgaagattcccaagaagaaagagcacggcagcctgcctcaacagactacactgctcgacctgatggacgccctgccgtccagtggaccagcagcacaaaaggctgagccatggggcccaagtgcttctaccaatcagacaaacccttggggtggtcccgcagcccctgcatcaactagtgatccatggccttccttcggcaccaagcctgccgctagcatcgatccatggggtgttcctaccggcgctacagtgcagtctgtccctaagaatagtgacccctgggctgctagtcaacaacctgcatcaagtgccggtaagcgcgctagtgacgcctggggcgcagtaagcactaccaagcccgtgagtgtatcaggttcctttgagttgtttagcaacttaaacggaactattaaggatgattttagcgagtttgataatctgaggacctccaaaaagactgccgaatcggtgacttccctgcccagtcagaataatggcaccaccagtcctgacccgttcgaatcccagccgctgacggtggccagcagtaaaccatcgagcgcaaggaagactcccgagtccttcctgggtccgaacgccgctctggtcaatctggatagtctggttacacgcccagcgccacccgctcaaagtctcaatccgtttctcgccccaggaatgcagggcttgactgggctgctgtttactatggaaatatag

SEQ ID NO: 222145 - DNA, 1899 bp, synthetic construct
  misc_feature 1..1899: note = Description of Artificial Sequence: Synthetic coding sequence
  source 1..1899: mol_type = other DNA
atgacaacatcagctctccgaagacaagtgaagaacatcgtccacaactattctgaggccgaaatcaaggtaagagaagctaccagcaatgacccttgggggccaccgagcagtttgatgtcagaaatcgccgatctgaccttcaatactgtggcctttacggaagtcatgggcatgctgtggcgccgactcaatgatagcggcaagaattggcgccatgtctacaaggctttaactctccttgattacctccttaagacggggtcagagcgggtggcccaccagtgccgggaaaacttgtacaccatccagactttgaaagattttcagtacatcgacagagacgggaaagatcagggcgttaacgtgcgggagaaagttaagcaggtaatggcattactcaaggatgaagagcgattaaggcaggagcgcactcacgctctgaaaaccaaggagcgaatggccttggaaggtattggaatcggctcgggtcaactcggcttttcacgccgttacggggaggattattcgcgaagtcgaggcagtcccagctcttacaacagcagttcctccagtcctcggtatacctcagatctcgagcaggccaggccccagacgagcggtgaggaggaattgcagctccagttggcgctggcgatgtccagagaggaagcagagaagccagtgccaccagctagtcacagagacgaggaccttcagcttcaattggcgttgaggctaagcaggcaagaacacgaaaaggaggtgcgttcttggcaaggagatggctctcctatggctaatggtgcaggagcggtggtgcaccaccaacgtgatcgagagcctgagcgcgaagaacggaaagaggaggaaaagttgaaaacttcccagtctagtattctggatctggctgacattttcgtgcccgctctggccccaccttcaacacattgtagcgccgacccgtgggatattcctggctttaggccgaacactgaagccagcgggtccagctggggaccttctgccgacccctggtcccccatcccttcagggacagttcttagtcgcagtcagccgtgggacctgaccccaatgctgtcaagctccgaaccctggggcagaacgcccgttttgccagccggaccccctacaacagacccctgggcccttaattccccccatcataaactgccctctaccggtgccgacccatggggtgcttcgctcgagacgagcgacacccctggaggagctagcacatttgatcccttcgctaaaccaccggagtccaccgaaactaaggaggggttggaacaggctttgccatccggcaaaccatcgtctccagtcgaattagacctgtttggcgacccatctccatcttctaaacaaaatggcacaaaagagccggatgcattagacttggggattctgggcgaggcactaacccaaccctccaaagaggccagggcctgtagaactccagagagctttttaggacctagcgcctcctcactggtgaacctcgatagcctagtgaaggcccctcaggtggccaaaactaggaaccctttcctgactgggttgagcgcgccatctcccaccaatccatttggcgcaggcgagccaggaaggccaaccttgaaccagatgcgcaccggatctcccgctctgggcctggccggtggccctgtcggagcacccctggggagtatgacatattcggcctccttaccactcccactcagctcggttcccgcagggctaaccctccctgcttctgttagcgtgtttcctcaggcaggtgcgtttgccccacaacctctgcttcccacaccatcatcagccggaccacggcctcctcctcctcaaaccggaaccaaccctttcttgtag

SEQ ID NO: 222146 - DNA, 957 bp, synthetic construct
  misc_feature 1..957: note = Description of Artificial Sequence: Synthetic coding sequence
  source 1..957: mol_type = other DNA
atgacaacatccgccctgaggagacaggtgaagaacatcgtacataactactcagaggccgaaatcaaggtcagagaggctacctctaatgatccatggggaccccctagctcgctaatgagtgagatagctgatcttacattcaacaccgtggcctttaccgaggttatgggcatgctgtggaggagactaaacgacagcggcaagaactggcgccatgtatataaggcactgacattgctggactatctactgaaaaccggctctgagagggtggcccaccagtgtcgggagaacttgtatacgatccagacattaaaggatttccagtacattgatcgcgacggaaaggatcaaggtgtgaacgtccgcgagaaagtgaaacaggtcatggccttgctcaaagacgaggaaaggcttcggcaggagcgcacccatgcccttaagacaaaggaacgaatggccctggaaggcatcggtatcggctcgggccagctgggattttcgagaagatatggagaggactacagccggtctcgcggatccccttcatcttacaattcaagcagctccagtcctcggtatacgagcgatcttgagcaagcacggcctcagacatctggagaagaagagctgcagctgcagttggccttagccatgagcagagaggaggcagagaagcccgtaccccctgcatcacaccgtgatgaggacctccagctgcagttagccttacgccttagcaggcaggagcacgagaaggaagtacgaagctggcagggcgacggctctccaatggctaacggagcaggggcagtggtacaccaccagagagaccgcgaacctgaacgcgaagagcggaaggaagaggaaaagctaaagacttcccaggcaccccctacctcagaacctagactgcccctgccatctaccgtgctgcacccaggtctgggctag

SEQ ID NO: 222147 - DNA, 1725 bp, synthetic construct
  misc_feature 1..1725: note = Description of Artificial Sequence: Synthetic coding sequence
  source 1..1725: mol_type = other DNA
atggcattagaaacactcccaagactgtgtcggccagctgccgctcaggtggggggtagtcctcagagactgttaggcctcggcctggggccaagagagcccgctctcgaacctcacgtcgaacctaaggatgccgcagcacttctgacaaggcagcctatcttacaggattgtgacctggccaccgttgccctgtccccccctccgcctgccggtgccagggcgacacatctgcaagtgtctagtcatgacgacctgcggacacccgctcccggtgaggaacaccgggctcaactactgcggggacgaaaccaagtagccttcaccgaagtaatgggcatgttgtggaggagactgaacgactcgggcaagaattggagacacgtgtataaagccttgaccctgttggactacctgctcaagaccggctccgagagggtggcccaccagtgtagggagaacctctacactattcaaaccctcaaggactttcagtacatcgatagagatggtaaggaccaaggggtgaatgtaagagagaaagtgaaacaggtcatggcattactcaaggacgaagaaaggttgcggcaggaacgcacacacgccctcaaaactaaggaaagaatggccctggaggggatcggtataggcagcgggcagttgggtttcagccggagatatggagaggattacagccgctctcggggtagcccctcttcttataattctagtagcagctctccgaggtatacaagcgatctggaacaagcccgtccgcagacttcgggcgaagaggagcttcagttgcagttggcactggcaatgtctcgcgaagaagcggaaaaggaggtgcgtagttggcagggggatggatcaccgatggccaatggagctggagctgttgtgcaccatcagcgcgatcgggagcctgaacgtgaggagagaaaggaagaggagaagctgaaaacgtctcagagtagcatcctcgacctggctgacatttttgttccggctctagcccctcccagcactcattgttctgccgacccttgggatatccctggttttcgtccgaatacagaggcctctggcagctcttgggggccatctgcagatccgtggagtcctatcccctcagggacggtgctgagccgctctcaaccatgggatttaacccccatgctgtcttcctccgaaccatggggccgaacccctgtcctccctgccggaccaccaacgactgacccatgggccctcaatagcccacatcacaagctgccctccactggagctgacccgtggggggcaagtctcgaaactagtgacactccaggcggagccagtacattcgatccattcgctaagccaccggaatccacggagacgaaagagggacttgaacaggccctgccctcgggcaagccttcttccccagtggaactcgacttattcggggacccatcgcccagttctaaacaaaatgggacaaaagaacctgacgcactggatctcgggatcctgggcgaggccctgacacagccctccaaggaagccagggcctgtcgcacaccagaatccttccttggtccctctgcctcttcattagttaatcttgatagcctcgtgaaagccccacaagtcgccaagaccaggaacccttttctgacaggcctgtccgctccgcctagactgcggacacgcggttgggccggacgcaggtgctag

SEQ ID NO: 222148 - DNA, 507 bp, synthetic construct
  misc_feature 1..507: note = Description of Artificial Sequence: Synthetic coding sequence
  source 1..507: mol_type = other DNA
atgaccacaagtgcactgaggaggcaggtcaaaaacatcgttcataactatagcgaagctgaaatcaaggtgcgcgaggcgacctctaatgatccctgggggcctccaagcagcttgatgagtgaaattgcagacctgactttcaataccgtcgcctttaccgaggtaatgggcatgctgtggcggagattaaacgattcaggaaaaaactggaggcacgtgtataaagctctcactttactggattatttacttaagactggcagcgagcgggtcgcccaccagtgcagagaaaacctgtataccattcagactctgaaggacttccagtatattgacagagatggtaaagatcagggagtcaacgtgcgggagaaggtcaagcaggttatggctttattgaaagacgaggagcgccttaggcaagagcgcactcacgccctgaaaaccaaggagagaatggccctagagggcatcggcattggctctggccagctcggcttttag

SEQ ID NO: 222149 - DNA, 36 bp, synthetic construct
  misc_feature 1..36: note = Description of Artificial Sequence: Synthetic coding sequence
  source 1..36: mol_type = other DNA
atgactacgagcgcattgagacggcaggttaagtag

SEQ ID NO: 222150 - DNA, 411 bp, synthetic construct
  misc_feature 1..411: note = Description of Artificial Sequence: Synthetic coding sequence
  source 1..411: mol_type = other DNA
atgacgacttcagcactgagacgccaggttaagaatatagtccacaactattctgaagccgaaatcaaagtacgggaagcaacctctaacgacccttggggaccaccatctagcttgatgtctgagattgcagacctgacctttaatacagtcgcttttaccgaggtcatgggcatgctgtggcggaggcttaacgattctgggaagaactggagacacgtttacaaagcccttaccctactagactaccttctcaagactggttcggagcgagtcgcccatcagtgtcgggaaaacttgtacaccatccagacacttaaggacttccagtacattgacagggatggcaaagaccagggcgtcaacgtgcgagaaaaagtgaagcaggtcatggcgctattgaaggactag

SEQ ID NO: 222151 - DNA, 156 bp, synthetic construct
  misc_feature 1..156: note = Description of Artificial Sequence: Synthetic coding sequence
  source 1..156: mol_type = other DNA
atgactacatcggccttgcgcaggcaggtcaaaaacattgtccacaactacagtgaggctgagatcaaggtcagggaagctacaagcaacgatccttggggcccaccttcctcattaatgagtgaaattgctgacttgacctttaatacagtctag

SEQ ID NO: 222152 - DNA, 327 bp, synthetic construct
  misc_feature 1..327: note = Description of Artificial Sequence: Synthetic coding sequence
  source 1..327: mol_type = other DNA
atgacaacttctgcccttcgccgacaggtcaagaacattgtgcacaattactctgaagccgaaattaaggtgcgcgaagccacttccaatgacccctggggccctccttctagccttatgtctgagattgctgacctaactttcaacacagtggctttcaccgaagttatgggtatgctctggcggaggctgaatgactctggcaagaattggcgtcatgtctataaggcccttacactgcttgactacctcttgaagaccggaagtgaacgtgttgcacatcagtgccgggaaaacctctatacaatacagaccttgaaagattag

SEQ ID NO: 222153 - DNA, 1983 bp, synthetic construct
  misc_feature 1..1983: note = Description of Artificial Sequence: Synthetic coding sequence
  source 1..1983: mol_type = other DNA
atggctctggaaaccctgcctcggctgtgcagaccagctgcggcacaagtcggcggaagtccacaacgactgctcggtcttgggctggggcctcgtgagcctgcccttgagcctcatgtcgagccaaaggacgctgccgctttgttaacacgccagcccatactgcaggactgcgaccttgcgactgtggccttatctcctccaccccctgccggagctagagctactcatctgcaggtgagttctcacgacgaccttaggactcctgctcctggagaagagcacagggcacaattattaaggggacggaatcaggtcgccttcacagaggtcatgggaatgttgtggcgtcggttgaacgactcaggcaagaattggcggcacgtatataaggcattgacactcctggactatctcctcaaaacaggcagcgagcgcgtggcgcaccaatgtagagagaatctctataccattcagacgctcaaagactttcagtacatcgatagggatggaaaagaccagggagtgaatgtgagagagaaggtgaagcaggtgatggctctcctgaaggatgaggaacgcctcaggcaggagagaactcacgctctgaaaactaaagaaagaatggccctcgaaggcatagggatcggtagtggccaattagggttctcacggagatatggcgaggattactcccgttcccgcggatccccctctagctataattcaagctcttcatccccccgatataccagcgacctggagcaagccagaccacagacatccggtgaggaagagctccagctgcagctggccctcgcgatgagtcgggaagaggcagagaaggaggtgcgcagctggcaaggagacgggtccccaatggccaatggcgctggtgccgtcgtacatcatcagagagatcgggagcctgaacgcgaggagcggaaagaagaggagaagctgaagacatcccagtcaagcatcctggatctcgctgatatttttgttccagccttagcccctccttccacacactgcagtgcagacccctgggatatccccggatttaggccaaataccgaggctagcgggtcaagttggggcccttcagcagacccatggagcccaatacctagtgggactgtgctgtcccgcagccagccttgggacctcacgccaatgctctccagtagtgagccatggggaagaacccctgtgttgcctgccggacctcctactacggatccatgggccttgaactcgccgcaccacaagttgccatctactggagctgatccttggggcgctagcttagaaacaagtgatacacccggaggcgctagcaccttcgacccttttgcgaagcctcccgagtctacggagaccaaagaagggctagagcaggccctgcccagtgggaagccctcatcacctgtggagctggacctctttggtgacccaagcccttccagcaaacagaacggcaccaaagaaccagatgcactcgatctgggcatcttaggggaggcgttaacacaaccttctaaggaggccagagcgtgccgcacccccgaaagtttcttaggcccatccgctagctcccttgttaacctggattccttagtaaaggcgccacaggtggccaaaacccgcaatcctttcctcaccggactgtcagctccttcccccaccaaccccttcggagccggagaaccgggacggcctaccctcaaccagatgcggaccggctcccccgcacttggcctcgccggaggccctgtgggcgcacctctgggctccatgacctactcagcgagtcttcctctcccgctgagttctgtgcccgcaggacttacgctcccagcaagtgtgtcggtgtttccacaggccggagctttcgcccctcagccactactgcctacaccctcaagcgcaggtccccgacccccaccgccacagacgggaacgaacccattcctgtag

SEQ ID NO: 222154 - DNA, 753 bp, synthetic construct
  misc_feature 1..753: note = Description of Artificial Sequence: Synthetic coding sequence
  source 1..753: mol_type = other DNA
atgggaatgctgtggagacggttgaatgactccggcaagaattggagacacgtatataaagctctgaccctgctggactatctgctgaagacaggctccgaaagagttgctcaccagtgtcgggaaaacctttatactatacaaaccctgaaagacttccaatatatcgatagggacggaaaggaccagggagtgaatgttagagagaaggtaaaacaggtgatggccctgctgaaggatgaggagaggttgaggcaagagagaacacatgcacttaaaaccaaggaaagaatggccctggaggggatcggcatcggcagcgggcagctgggattcagccgcagatacggagaagattattctcgcagccgaggctctccctccagctataattcatcgtctagctccccgagatacacaagcgatctggagcaggctaggcctcaaactagcggagaggaggagctccaactacagttagcccttgctatgtcgcgcgaagaagccgagaaagaagtgcggtcttggcagggagacggttccccgatggcaaatggggctggcgcagttgtccatcaccaacgtgaccgggaacctgagcgagaggaacgcaaagaggaagagaagcttaagacctctcaggtcctgggacgaacccagcggcctgtggacccccctggcggacttctacagaccccaggcctgcgcagcccacaagagccaagctgcccagaagcctctcccggaatctag

SEQ ID NO: 222155 - DNA, 429 bp, synthetic construct
  misc_feature 1..429: note = Description of Artificial Sequence: Synthetic coding sequence
  source 1..429: mol_type = other DNA
atgagcctgttgccggtcccatataccgaagccgcttccctgtccaccggatctacggtcacaataaagggcagacccctagcatgttttctgaacgagccatacctacaggtggatttccacacagagatgaaggaggaatcagatattgtgttccacttccaggtttgttttggcaggagagtggtgatgaactcaagggagtatggcgcttggaagcagcaggtagagagcaagaacatgcctttccaagatggccaagagttcgagctatccattagtgttctgccagacaaatatcaggtcatggtaaacggccagagtagctacacatttgaccataggatcaagcctgaggcagtaaaaatggtccaagtgtggcgcgatatctcactgaccaagttcaatgtgtcctatctcaagcggtag

SEQ ID NO: 222156 - DNA, 828 bp, synthetic construct
  misc_feature 1..828: note = Description of Artificial Sequence: Synthetic coding sequence
  source 1..828: mol_type = other DNA
atgaatatgactcaggctagagtgctggtcgccgcagtggttggcctcgttgcagttctactatacgcctcgatccataaaatcgaggaggggcatctggccgtttattatcggggaggagcactgcttacgagcccctcaggccctgggtaccatatcatgttgccctttatcacgaccttcaggtctgtccaaacaaccctccagacggacgaggttaaaaacgttccatgcggtacttcggggggtgtcatgatctatatcgacaggatcgaggtggtgaacatgttagctccatacgctgtgttcgacatcgtccgaaattatacagctgactatgataagactttgatctttaacaagattcatcacgaactgaaccagttctgttcagcacacactctgcaggaagtctatatagagctgtttgatcagatcgacgagaatctgaaacaggcactgcagaaggacctgaatttaatggcgccagggctgacaattcaggcagtgagggttacaaagcctaaaatacctgaggccatccggagaaatttcgaattgatggaggccgagaagactaagctcctcattgctgctcaaaagcagaaggttgtggagaaggaagcagaaactgaacgcaagaaggccgttatcgaggcggaaaaaatcgcccaggtggcaaaaattaggtttcagcagaaagtgatggagaaggagaccgagaagaggatttcggaaattgaggacgcggcttttttagctcgtgaaaaagcaaaagccgatgcagaatactacgctgctcataagtacgccacctccaataagtag

SEQ ID NO: 222157 - DNA, 699 bp, synthetic construct
  misc_feature 1..699: note = Description of Artificial Sequence: Synthetic coding sequence
  source 1..699: mol_type = other DNA
atgatctatatcgatcgcatcgaggtggtgaacatgcttgcaccgtacgcagtcttcgacatcgttagaaactacaccgccgattacgacaagacgctgatttttaataagattcaccatgaacttaaccagttctgcagcgctcatacgctgcaagaggtctacatcgagttgtttgaccagatcgacgagaacctcaaacaggcactgcagaaagacctgaacctaatggcaccagggctgacgatacaggccgtgagggttactaagcccaaaatccccgaggctatccgacggaacttcgagctgatggaggccgagaagaccaagctacttatcgctgctcagaaacagaaagtggtggagaaggaagcggagacagagagaaaaaaggctgtcattgaagcggagaagattgctcaagtggcgaaaattaggtttcagcagaaggtgatggaaaaggagaccgagaaaagaatcagcgagattgaggatgccgcttttctggcaagagaaaaagccaaagctgacgcagagtactacgccgctcacaaatacgccacttctaacaagcacaaattgacgccagagtatttggaactgaaaaagtaccaggctatcgcttcaaactctaaaatctacttcggctcaaatatccccaatatgttctctatttccagatgcggacccagaggatag

SEQ ID NO: 222158 - DNA, 1047 bp, synthetic construct
  misc_feature 1..1047: note = Description of Artificial Sequence: Synthetic coding sequence
  source 1..1047: mol_type = other DNA
atgaacatgacccaggccagggtgctcgttgccgcagtggtcggtctcgtggccgtactgctgtacgcctccatccataagatagaggaaggtcatctagcagtatactaccggggaggagccctgctaacctctccctcagggccaggctatcatattatgctcccatttataacaactttcagatcagtccagactacactgcagacagatgaggtcaaaaatgtaccttgtggcacttccggcggtgttatgatttacattgaccggatcgaagttgtgaatatgttagctccttacgcagtgttcgacatcgtgagaaattacaccgcagattacgataagaccctgattttcaacaagatacatcacgagctgaatcaattctgttcagcgcacacactccaggaggtgtacatcgagctctttgatcagatcgacgaaaatcttaagcaggcattacaaaaggacctgaatctgatggctcctgggctcaccattcaggctgtgcgggttacaaaaccaaagatccctgaggctatcaggcgtaatttcgagctgatggaagcggagaagacgaaattgctgattgcagcgcagaagcagaaagtggtcgaaaaagaggcagagaccgaacgcaagaaggctgtgattgaagctgagaaaatcgctcaggtggccaagatccgtttccagcagaaggttatggagaaagagacagaaaagagaatttctgaaattgaagatgctgccttcttagcccgagagaaggctaaggcggatgcagagtattacgcagcccacaagtacgccacgtccaacaaacataaactgactccagagtatcttgagctaaaaaaataccaggccatcgctagtaactccaaaatttatttcgggagcaatatccccaacatgttcgtggactcttcttgcgcactgaaatattccgatatcagaacaggccgagagagcagtctgccatcaaaggaggccttggaaccaagtggcgagaatgtcattcagaataaagaatcaaccggatag

SEQ ID NO: 222159 - DNA, 1047 bp, synthetic construct
  misc_feature 1..1047: note = Description of Artificial Sequence: Synthetic coding sequence
  source 1..1047: mol_type = other DNA
atgaacatgacccaggcaagggtactggtggcggcagtcgtgggcctggttgctgtgctgctctatgcaagtattcacaagatagaagaaggacatctggcagtttactatcgcggaggcgcacttctcacaagtccctccggacctgggtaccacatcatgctacccttcatcactacttttcgcagcgttcagacaacacttcagacagatgaagtgaaaaatgttccctgtggtacctccggaggggtgatgatctatattgatagaatcgaagtcgtcaatatgctggctccatacgcagtattcgatatagtgagaaactacaccgcggattacgataaaactctcattttcaataagatccatcatgagcttaatcaattttgcagcgcccataccttacaagaggtatacatcgagttgttcgatcaaatagacgagaacttgaaacaagccctgcagaaagaccttaacttgatggcgccaggtctgacaattcaggccgtacgagtcactaagccaaagatccccgaagcaattaggcgaaactttgagctgatggaggccgagaaaacgaaactgttaattgcggcacaaaagcagaaagtcgtcgagaaggaagcagagacggagcgaaagaaagccgtaatagaggccgaaaagatcgcgcaggtggcgaagattagattccagcagaaggttatggagaaggaaacagagaagagaatctccgagattgaagacgccgcatttcttgccagggaaaaagctaaggcggatgctgagtactacgccgcacacaagtacgctacgtctaataaacacaaactgactcctgagtacctggagctgaagaaataccaggccattgcttcaaactctaagatctacttcggctctaacattccaaatatgttcgtggactcttcctgcgccctaaagtactcagacatacgaaccggtcgcgaaagtagtcttcctagcaaagaggccttggaaccgagcggcgagaatgtgatccaaaataaggaaagtaccgggtag

SEQ ID NO: 222160 - DNA, 1020 bp, synthetic construct
  misc_feature 1..1020: note = Description of Artificial Sequence: Synthetic coding sequence
  source 1..1020: mol_type = other DNA
atggctcaactgggtgctgtagtcgctgttgccagctcgtttttttgcgcctccctctttagtgcagtgcacaaaatcgaagaaggacatattggtgtttactatagggggggagcactgctgacatcgaccagcggcccaggctttcaccttatgttgccgtttatcacgagttacaaatctgtgcaaacaaccctccagaccgacgaggtgaaaaatgtgccttgtggcacatccggcggagtaatgatctattttgataggatcgaagtcgtcaattttctcgtgccaaatgccgtgtacgatatagttaagaactataccgcagactatgataaagctttgatcttcaacaagatacaccacgaacttaatcagttctgttccgttcacaccctccaagaagtctatatcgagctcttcgaccagatagatgaaaatctcaaactggcgttacagcaggacctgaccagcatggccccaggactggtgatacaggcagtgcgagtgacaaaacctaacatccctgaggccatccgccgaaactacgagctcatggaatctgaaaagactaaattactcatcgcagctcagaaacagaaggtggtggagaaagaagctgaaacagagagaaagaaagcacttattgaggcggagaaggtggcacaagtggccgaaataacatatggacaaaaagtgatggagaaggagaccgaaaaaaaaatcagtgaaatcgaggacgctgcatttctggctagagagaaggcaaaagccgatgctgaatgttataccgctatgaagatcgcagaggctaataaactgaaactgactcccgagtaccttcagttgatgaaatacaaggctatcgcctcgaatagtaagatctacttcggaaaggatatccctaacatgttcatggatagcgctggttcagtttctaaacagtttgagggcctggcagataagctctctttcgggcttgaagatgaacccctggagaccgctaccaaggagaattag

SEQ ID NO: 222161 - DNA, 459 bp, synthetic construct
  misc_feature 1..459: note = Description of Artificial Sequence: Synthetic coding sequence
  source 1..459: mol_type = other DNA
atggcccagctcggagctgtggtggccgtcgctagttctttcttctgcgcgtcactgtttagcgcagtgcacaagattgaagagggccacattggcgtctattacagaggaggcgcactgctcacctcaactagtggtcctggcttccacctgatgcttccatttattacatcttacaagtctgtccagactacgctacagacagacgaagtcaagaacgtcccctgcgggaccagtgggggtgtcatgatctacttcgaccgcatagaagtggtgaattttctggtgccaaacgccgtttacgatatcgtcaagaattacacagcagattacgataaagccctgatttttaacaagattcatcatgagctgaatcagttctgctccgtgcacaccttacaggaagtttacattgaactgtttggcctggagaacgacttttctcaagagagctcttag

SEQ ID NO: 222162 - DNA, 1020 bp, synthetic construct
  misc_feature 1..1020: note = Description of Artificial Sequence: Synthetic coding sequence
  source 1..1020: mol_type = other DNA
atggcccagctgggcgctgtcgtcgcggtcgctagctctttcttctgtgcctccctattctctgccgttcataaaatcgaagaagggcacattggagtatattaccgcggtggggctctcctgaccagcacgagtggccctggtttccatcttatgttgcctttcatcacaagctacaaaagcgtacagacaaccctccagacagacgaagtgaaaaatgttccatgtggaacgagtggtggtgtgatgatctactttgacagaatagaagttgtcaattttctcgttccgaacgctgtgtacgatattgttaagaattatactgccgattacgataaggctcttattttcaacaaaattcaccacgaactgaatcagttttgctcagtccatacgctccaagaggtctacatagagctgtttgatcagattgatgaaaatttgaaacttgccctccagcaagacctcacaagcatggctccaggtctggtgatccaggccgtccgcgttaccaaacctaacatccccgaggcaatcaggcggaactacgaacttatggaaagtgagaagaccaaactccttattgcggcacagaagcaaaaggtggtggagaaagaagctgagacggagcgcaaaaaggctcttattgaggcagagaaggtcgcccaggtggcagagatcacttacggtcagaaagttatggagaaggagactgagaagaagatctcagagattgaggacgccgctttcttggccagggagaaggctaaggcagacgctgagtgttatacagcaatgaagatagcagaagccaacaagcttaagcttacgccagagtacctgcagctgatgaaatataaggccatcgccagtaattcaaaaatctatttcggaaaagacataccaaacatgtttatggattccgctgggtccgtctctaagcagttcgaggggttggcagacaagctgagttttggcttggaggacgagccgctcgagacggcaaccaaggaaaactag

SEQ ID NO: 222163 - DNA, 621 bp, synthetic construct
  misc_feature 1..621: note = Description of Artificial Sequence: Synthetic coding sequence
  source 1..621: mol_type = other DNA
atggcccagttgggcgcagtggttgccgtggcaagctccttcttttgcgcctctctgttttcagccgtgcacaaaatcgaggagggccacattggggtttactatcgcggaggggcactcctcacctctacaagcggccctgggtttcacttgatgctgccctttatcacaagttataagagtgttcagacaaccctgcaaacggacgaggtgaaaaacgtgccctgtggaactagcggcggtgttatgatctatttcgatagaattgaagttgtgaactttctagttcccaatgcagtgtatgatattgtgaagaactacacagctgattatgataaagccctgatctttaataagattcaccatgaactgaatcagttttgctccgttcacactttgcaggaggtctacattgagcttttcggcaagaaagtctcacccgaacatgccgtgcttaaacagggtagctggaaccccgcaagtctgcactgcttgaagcctggctgtctgcagggcgtcatggtgacttatgggcaggaaatgctgaagaatcttgtgctgaggtcctggagccagcggtctagctggcggatgcttattgcgatgcagcaggatccatag

SEQ ID NO: 222164 - DNA, 459 bp, synthetic construct
  misc_feature 1..459: note = Description of Artificial Sequence: Synthetic coding sequence
  source 1..459: mol_type = other DNA
atggcccagctgggcgctgtggtcgctgtcgcctcgtcctttttctgtgctagtctgttttccgccgtccacaaaatcgaggaggggcacatcggggtgtactaccggggaggcgcattgttaacaagcacttctgggccagggttccacctgatgcttcctttcatcactagctataagtccgtgcagacaaccctgcaaaccgatgaagtgaaaaacgtaccttgcggtacttctgggggagtcatgatctattttgacaggatagaagtcgtcaacttcctagtgccgaacgcagtttatgacatagttaagaactatacagcggattacgataaggcccttattttcaataaaattcaccacgaattgaaccagttctgctctgtccacacacttcaggaagtctacatcgaactgtttggccttgagaatgacttttcacaggagtcttcatag

SEQ ID NO: 222165 - DNA, 4239 bp, synthetic construct
  misc_feature 1..4239: note = Description of Artificial Sequence: Synthetic coding sequence
  source 1..4239: mol_type = other DNA
atgacgaccaagcgctctctgtttgttcgcttggtgccatgcagatgcctgcggggtgaggaggagactgtgacaacccttgattactcacactgctcattagaacaggtccccaaggagatttttacatttgaaaaaactctggaggagctgtacctggacgcaaatcagattgaggaattgcctaaacagttgtttaattgtcagtctctccacaagctgtcactacccgacaatgacctcaccacactccctgcttctatcgccaatttaatcaatcttagagagttggacgtgagtaaaaacggaattcaggaatttccagagaacattaagaactgcaaagttctgaccatcgtagaggcatctgtgaaccccattagtaaactaccagatggtttcagccagttgctgaacttgactcagctctatctgaacgacgcattcctggaattcctgccggctaacttcggacgtctgaccaagttgcaaattctcgagctcagggaaaaccaactcaagatgctgcccaaaaccatgaacagattgacccaactggagcgtctggatcttggctcgaatgaattcaccgaggtgccagaggtccttgagcaattatcggggttgaaggagttctggatggatgccaaccgtctgacctttatcccaggatttatcggctcccttaagcaattgacatacctggatgttagcaagaacaacatagagatggtggaggaagggatttcaacctgcgagaacctacaggatctgctgctgagctctaactcattacagcagttgcccgaaacaataggttctctcaagaatattacaacgctgaagattgacgaaaaccagctgatgtatctgcctgatagcatcgggggactcatttcggtagaagagttggattgctcattcaatgaagttgaagcgcttccatcctctattggccagttgaccaacctacgaacgttcgccgcagaccataactacttgcagcaactacccccagagattggatcctggaaaaatataacagtccttttcctgcacagcaataaactagaaacacttccagaagagatgggcgatatgcagaagctgaaggtaatcaatctctccgacaatcgactgaagaatcttccgttcagttttaccaaactacagcagctgaccgctatgtggttgagtgacaaccagagcaaaccattaatcccactgcagaaggaaacagatagcgaaactcagaagatggtcttgaccaattacatgtttcctcagcagccccgaacagaggacgtgatgtttataagcgacaacgaaagttttaatccgtccctgtgggaggaacaacgtaagcaacgcgcacaggtcgcttttgagtgcgacgaggacaaagacgaacgtgaggcgccacctagggaagggaacctgaaaaggtacccaaccccctacccagatgagctcaagaatatggttaagacggtccagacgattgtgcaccggctgaaggacgaagagactaatgaagactctggccgagacctcaagccgcacgaggatcagcaggatatcaacaaggacgttggtgtaaagacttccgaaagcaccacaaccgtcaagagcaaagtcgacgagagggagaaatatatgatcggaaactcagtgcaaaagatctctgaacccgaagcggagattagccctggatcactccccgtgaccgccaatatgaaagcctctgagaacctgaaacacatcgtgaatcacgacgacgtctttgaagagtcagaggagttgagctctgatgaagagatgaaaatggccgaaatgagacccccattgatcgaaacttccatcaaccagccaaaggtggtggccctgtcgaataacaagaaagacgatactaaggagacggacagcctgtccgacgaggtcacccataacagcaatcaaaacaattcaaattgtagctcgcccagccgaatgtcagattccgtttcactgaatacggattccagccaggataccagcctgtgtagcccggttaaacagactcacatcgatatcaatagcaaaatccggcaggaggacgagaactttaattccctgctgcaaaacggagacattctgaattcatccacagaagagaaatttaaagcccatgacaagaaggactttaatctcccagagtatgacctcaacgttgaagaacggctggtgttaattgagaagtcagtggacagtaccgctactgccgatgatacccacaagcttgaccacatcaacatgaaccttaacaagctcatcacaaacgacacgttccaaccagagatcatggagcgatcaaaaacccaggatattgtgctgggaacaagctttctctccatcaactctaaagaggaaactgaacacctagagaatggaaacaaataccccaatctggagagcgtgaacaaggtgaatgggcattccgaagagaccagccagagtccaaataggaccgaaccccacgacagtgattgctctgttgatttggggatttcgaagagcacagaagacctgtcgccccagaagtcagggccagtaggttccgttgtcaaatctcactccataacaaatatggagatcggaggtctcaaaatatatgacatcctctccgacaacggccctcagcaaccatcaaccacagtgaaaattacttctgctgtcgacgggaaaaacatcgtgagaagcaaaagtgctacccttctttatgaccagcccctgcaggtgttcaccgggtcctcctcaagctctgacctaatatcaggaactaaagcaatcttcaaatttgacagcaaccacaaccccgaagaaccaaatattattcggggacctacgagtgggccacaaagcgccccacagatatatggaccaccgcaatataacatacagtatagctcaagcgctgcagttaaggatactctgtggcactcgaaacaaaacccccagattgatcacgccagttttcctccccagctgttgcccaggagcgaatccactgagaatcagtcttacgccaagcactctgcgaatatgaacttttctaaccacaacaatgtgcgggctaatacagcgtaccaccttcaccagagactgggccctgcacgccacggagaaatgtgggcgatctcgcccaatgatcggttaatcccagccgtaacgcggtccacaattcaacgccagagctccgtgagctccactgccagcgtgaatctgggagatccgggttctactcggagggcgcagattccggagggggactacctttcctatcgggagttccattcagcagggcgaacgccgcctatgatgcccggttcacagagacctctgagcgcgaggacgtattccattgacggcccaaatgcttcacgcccacagtccgcaagaccttccatcaatgagattcctgaacggactatgagcgtgtccgactttaactattcccgtacgtcgccttctaagcgcccaaatgctagggttggcagtgaacattctcttttggatccacctggcaagagcaaagtccccagggattggagagagcaagtgttacgtcacatcgaagctaagaagctcgagaagaaacacccacagacgtcgtctagcggcgatccctgccaggacggtatttttatctccggccaacagaactattcttctgcaaccctgagccacaaagatgtgcctcccgactcactcatgaaaatgcctcttagcaacggacagatgggccagccattgaggccccaggctaactacagtcaaattcatcatcctcctcaagcttcagtggccaggcatcccagccgggagcagttgatcgactacttaatgttgaaggtggcacatcaacctccgtatacacagccccattgttctccacgtcagggccatgagctggcaaagcaggagattcgcgtgcgggttgagaaagatcccgaattaggcttttccattagtgggggagttggcggtcggggaaacccgttccgcccagacgacgatggcatctttgtgacaagagtacagccagagggaccagccagcaagcttttgcagcctggtgacaagattatccaggcgaatgggtactccttcatcaacattgaacacggccaggccgtgtcgctgctcaagactttccagaacaccgtggagctgattattgtgcgggaggtgagctcctag

SEQ ID NO: 222166 - DNA, 3909 bp, synthetic construct
  misc_feature 1..3909: note = Description of Artificial Sequence: Synthetic coding sequence
  source 1..3909: mol_type = other DNA
atgacaacaaaaagatccctctttgtccgacttgtaccctgcagatgcctgaggggggaggaagaaacagtgacaactctcgattactctcactgcagtctggaacaagtgccaaaggaaatcttcaccttcgagaaaacacttgaggaactatacctggacgctaatcagattgaggaactgccaaaacagctgtttaactgtcagagcctccataagctgagcctgccggacaatgaccttacaacgctcccagccagcattgccaacctgatcaacttgagagaactcgacgtgagcaagaatggaatccaagagttcccagagaatattaagaactgcaaggtgcttactattgtggaggcctcggtaaacccaatcagtaaactgcccgacggattcagccagttactgaacctaacccagctttatctgaacgatgcttttcttgagttcttgcctgccaacttcggacgcctgacgaagttacaaatcttggagctgagggaaaaccagttaaagatgctcccgaaaaccatgaataggctgacccaactggagcgcctggacctgggctcaaacgaatttacagaagtgcccgaagtcctcgagcaattgtccgggctgaaagaattctggatggacgcaaatcggcttacattcatccccggttttattggctctcttaaacagctgacttacttagacgtgtccaagaacaatattgagatggtggaggagggaatcagcacgtgcgagaacctgcaggatttgctgctttctagcaacagtcttcaacagcttccagagaccataggttccttaaagaatatcacaacgcttaaaatcgatgaaaaccagctgatgtacctacccgactctatcgggggactcataagcgtggaggagctggactgttcctttaacgaggttgaggcgctgccaagcagcattgggcagctcacaaatctgagaacattcgctgctgatcacaactaccttcagcagctccccccagaaattggatcatggaagaacattactgttctgtttctccatagtaataagcttgaaaccttacccgaggagatgggggacatgcagaagctgaaggtgattaatctgagtgacaataggctgaagaacctgcctttcagtttcaccaagctgcagcagttaacagctatgtggttgtccgataatcagtctaaaccactgattccattacagaaggaaaccgatagtgagacccagaaaatggtattgaccaattatatgttcccgcagcagccaaggaccgaggatgtcatgtttatttcagataatgagtcattcaatcccagcctgtgggaagaacagcgcaagcagagagctcaggtagcgtttgagtgcgacgaggataaagatgagagggaagcaccccctagggaaggcaacctcaaacgatatcctactccctacccagatgagctcaagaacatggtgaaaacggtgcaaaccatcgtgcatcggctaaaagacgaagaaacaaacgaagacagtgggcgtgatctgaaacctcacgaggaccaacaggatatcaacaaggacgtgggcgttaagactagcgaatctaccactacagtgaaaagcaaagttgacgagcgtgaaaaatatatgattgggaacagcgtacagaaaatctcagaaccagaggcagagatatcacctggcagcctacccgtgaccgcgaatatgaaagcgagcgaaaatctgaagcacattgtcaaccacgacgatgtgttcgaagaaagtgaggagctgtcctcagatgaggagatgaagatggccgaaatgcggccaccccttatcgagacaagcatcaatcagccaaaagtcgtggcgctcagcaataataagaaagatgacacaaaggaaactgatagcttatctgacgaggtcactcacaattctaaccaaaacaattccaattgctcttcaccgagcaggatgtctgatagcgtatcacttaatacagactcgtcacaagatacttccctgtgtagccctgttaaacaaacccacattgacattaacagcaagatcagacaggaggacgaaaacttcaatagcctcctccaaaacggagacatactcaattcatccacagaagagaagttcaaggcgcacgataagaaagacttcaacttgccagagtatgatcttaacgtggaggagagacttgttctgattgagaagagcgtggacagcacggccaccgcggacgatacacataagttggaccacatcaatatgaatctcaacaagctcattacgaatgacactttccagcccgaaatcatggagaggagtaagacccaggatattgttctgggcaccagtttcctcagcatcaattcaaaagaggagaccgaacatttagagaacggcaataaataccccaatcttgaaagcgtgaacaaagtgaacggccacagtgaagagacttcccagtcacctaataggaccgaaccccatgatagcgattgctctgtagacctgggcattagcaagagtactgaagacttatccccccaaaagtctggacccgtgggttccgtcgtcaagtctcactccatcactaacatggaaattggaggattgaagatctacgacatcttgtctgacaacggaccacagcagccttccaccacagtcaagatcacatccgcagtggatggtaagaacattgtgcgatcaaagtctgctaccctcctctacgatcagcctttgcaggtctttacagggtcttcttcctcctctgatttgatctctggtactaaagcgatttttaagttcgacagcaaccacaaccctgaagaaccaaatatcattagaggtcccacaagtggaccacagagcgccccacagatctatggaccccctcagtataatattcagtattcatccagcgcagccgtaaaagatacattgtggcactctaaacagaatccgcagattgatcacgcctcgttccctccgcagttgctgccacggtcagaatcgacagagaatcagagctatgccaaacacagcgcaaacatgaacttttccaatcataacaacgttcgcgctaacacggcatatcacttgcaccagaggctcgggccagcacgccatggtgagatgtgggccattagtcccaacgaccggctgatcccagcagttacacggagcaccattcagaggcaatcctctgtatcatctactgccagtgtgaatctcggggatccaggcagcacgaggcgcgctcagattcccgagggcgattacttatcttatagggagtttcattctgctggtcggactccccctatgatgcctggctcccagagaccacttagtgccaggacctacagtatagacggacctaacgcaagcagaccacagtctgctcgcccaagcattaacgagatccccgaacgcacaatgtctgtgagcgactttaattactctcgtacaagtccttccaaacgacctaacgcacgggtgggctccgaacacagtctcttggaccctccgggtaagtcaaaggtacctagggactggagggagcaggtgctgaggcacattgaagccaagaaactcgagaagatcagggttagagtcgaaaaggatcctgaattaggctttagtattagcggaggggtcggtggccgtggaaatccgttcaggcccgacgacgacggaattttcgtgacgagggtgcagccagaagggccagctagcaagctgctacagcccggtgacaaaataatccaagctaacggttattctttcatcaacattgagcacggacaggcggttagcctgctcaagacctttcagaacactgttgagttaatcatcgtccgcgaggtgagcagctag

SEQ ID NO: 222167 - DNA, 4023 bp, synthetic construct
  misc_feature 1..4023: note = Description of Artificial Sequence: Synthetic coding sequence
  source 1..4023: mol_type = other DNA
atgaccactaaacggtcacttttcgtgaggctggtcccctgtcggtgtttacggggagaggaggagacagtcaccactctagactattcacattgctctctggaacaggtacccaaggagatttttacctttgagaaaaccctggaggaactctatctagacgctaaccaaatagaggaactcccaaagcagctcttcaattgccaaagcttgcataaactgagtctcccagacaacgacttgacaactctgcctgcatccatcgccaacctcattaatcttagagagcttgacgttagcaagaatgggatccaggaattccctgagaatattaagaattgcaaagtactcaccatcgtcgaggcctctgtcaatccgatctcaaagcttcccgacggctttagccaactgttaaatctgactcagctatatctaaacgatgcattcctcgaattcttgcctgcgaatttcggtcgcctgactaagttgcagattctggagctaagggaaaaccagttgaagatgctccccaaaacaatgaaccggctaacacagttagagaggttggacttagggtccaacgagtttaccgaggtcccggaagtgttggaacaactatccggactaaaggagttttggatggatgctaacaggctaacttttatccccggatttatcggttcgcttaaacaactgacttacctggacgtgtccaaaaataacattgaaatggtcgaagaaggaatctccacttgcgaaaatctgcaggatttactactgtcatccaatagcctccagcagcttcctgagacaattggctccctgaaaaacattaccaccctgaaaattgacgagaatcaattaatgtacctgcccgattcaatagggggactaatctctgttgaagaactggattgctcctttaatgaggtagaggccctaccctcatctatcggtcagcttaccaatcttcgtacatttgctgcggaccacaactacctgcagcagctacctcccgaaataggcagctggaagaacatcaccgtgctgtttcttcactcgaataaactcgaaactctacccgaggagatgggagacatgcagaagctgaaggtaataaacttgtctgataataggcttaaaaacctgcccttttccttcacaaaattacagcagctgaccgccatgtggctctctgacaaccagagcaagcccctcatcccgttacagaaggaaacagactccgaaactcaaaagatggtattaaccaattacatgtttccccaacagccgaggacggaagacgttatgtttatctccgataatgagtcctttaacccatctctctgggaggaacagaggaaacaacgcgctcaggtggcatttgagtgcgacgaggacaaagacgagcgcgaggcccctccacgagaggggaacttgaagcgttaccccaccccttatccagacgagctgaagaacatggtcaagacggtccagactatcgtccacaggcttaaggatgaagagacgaatgaggactcgggcagagacttgaagccccacgaagatcaacaggacattaacaaggatgtgggagtcaagacctccgagtccacaaccaccgtcaagtcaaaggtagatgaacgagaaaagtacatgatcggaaactcagtgcagaagattagcgaaccagaagctgagatttcacccggtagcctgcctgtaacggctaatatgaaggcttcagagaacctgaagcacatcgtcaatcatgatgatgtgttcgaggagtcggaagagttatcctctgatgaagagatgaagatggcggagatgaggccacctctcattgagacctcgattaaccagccgaaagtggtcgccctgtcaaataacaaaaaagatgataccaaggaaaccgattcactgagcgacgaggtgactcataattccaatcagaataattcaaactgctctagccccagccgcatgagcgactcagtgtcactcaacactgattcctcacaggatacttctttgtgcagcccagtgaaacagacacacattgacattaactccaaaatcaggcaggaagatgagaactttaatagcctgctccagaatggcgacatcctgaactcttccacagaagagaagtttaaagcccatgacaagaaggacttcaaccttcctgaatacgacctcaatgttgaagagcggctggtgctgatcgaaaaatctgtggattccaccgccaccgccgacgacacccacaagctggaccacataaatatgaatctaaataagcttatcacgaatgatacatttcagccagagattatggagaggagcaagacgcaggatatagtgcttgggacctcatttctgagtataaatagcaaagaagagaccgaacacctggagaatggaaacaagtacccgaacttggagagcgtaaataaggtcaatggccattctgaggaaactagccagagtcccaataggaccgagcctcacgattcggattgctcagtggatttaggcattagcaagtctacggaagatttatccccccagaagtccggccctgtaggctcggtggtaaagtcgcacagcatcacgaacatggagatagggggattgaaaatctatgacattctgagtgataatgggccacagcaaccatcgactactgtgaagattaccagcgccgtcgatggcaaaaatatcgtgaggtcgaagagtgcgacactgttatatgaccagcctctgcaggtttttacagggagtagttcctctagcgacttaatttccgggacgaaggcaatctttaagtttgattccaaccataaccccgaggagcccaacataatcaggggcccaacaagtggaccacagtccgctccgcagatatacggaccccctcagtacaacattcagtactctagctcagccgctgttaaagacacactgtggcattccaagcagaatcctcagatcgatcacgcctcattccctcctcaactgctgcccaggagcgaatctactgagaaccagagctatgcaaaacacagtgcaaacatgaatttctcgaatcacaacaacgtgcgggctaacaccgcttaccacctgcaccagcgcttaggaccggctagacatggagaaatgtgggccatctcccccaacgaccgcctaattccagccgtaacccgcagtaccattcaacggcaaagctcagttagcagtactgccagtgttaacctgggagatcctgggtcgacccgtcgtgctcaaatccctgagggcgactatctgtcttatagagagttccactccgcagggaggaccccacctatgatgcccggatcgcagcgaccgctcagcgccaggacttactccattgacggccctaacgcctccaggccccaaagtgccagaccatcaatcaacgaaatacctgagcgtaccatgagtgtctccgatttcaactattctagaacctctccttcaaagagacccaacgccagagtgggatccgagcatagtttgctcgaccctccaggtaagtccaaagttccgagggattggagggaacaagtcctgagacacatcgaagccaagaagcttgaaaagatgccactgagcaatggccaaatgggtcagcccctccggcctcaggcgaattacagccaaatccaccatccaccacaggcgtcagtcgctcgccatcctagtcgcgagcagttgatcgactacttgatgttaaaagttgcacatcagcccccttatacccaaccacactgttcccctagacaaggacatgagctggccaaacaagaaggcatctttgtgactcgcgtgcagcccgagggcccagcatctaagctactccagcctggggataagattatccaggccaacggatacagttttatcaatatagagcatggccaagccgtaagcctgctgaagaccttccaaaatacagtcgaactcatcatcgtaagagaagtcagttcgtag

SEQ ID NO: 222168 - DNA, 4041 bp, synthetic construct
  misc_feature 1..4041: note = Description of Artificial Sequence: Synthetic coding sequence
  source 1..4041: mol_type = other DNA
atgacgacaaaacggagcctgttcgtcagactggtcccctgtcgctgcttacggggagaagaagaaaccgtcaccaccctcgactatagccactgctcactggagcaagtgccgaaggagatattcacttttgagaagactttggaagagctttacctcgacgcaaaccagatcgaggaactacctaaacagctgtttaattgtcaaagtctgcataagctgtccctgcctgacaatgatctaaccactctacccgcaagcatcgccaacttgatcaacttgcgagagctcgacgttagcaagaacggtattcaggagtttcctgagaatattaagaattgtaaagtccttacaatagtcgaggcatctgttaaccccatatctaagctacccgacggctttagccaactgctgaacctgacccagttataccttaacgacgcattcttggagttcctccccgctaactttggccgtctgaccaaacttcaaattctcgagttgagggaaaatcaattaaagatgctccccaagacaatgaacagactcacccagttggagagactcgacctaggttccaacgaattcacagaggtgccagaagtcctcgagcaactttcagggctcaaagaattttggatggacgccaatagattgacttttataccaggcttcataggcagtcttaagcagctgacctacttggacgtgtccaaaaacaatatcgaaatggtggaggagggcatttcgacctgtgagaacctgcaggaccttctgctgtcttcaaattcactgcagcagcttcccgagactatcggctccttgaaaaacatcactacattgaaaattgatgaaaatcagctcatgtatctgcccgacagcattggtgggctgatttccgtggaggagctagattgttcatttaacgaggtagaggcattgccatcgtccatagggcagctgactaatctccgaacattcgccgcagatcacaattacctccagcagctgcctcccgaaatcggcagctggaagaacattaccgtgctctttttgcacagcaacaagctggagacgttgccggaggagatgggagatatgcaaaagttgaaggtgatcaacctgtcagacaatcgccttaagaacctgcccttttcattcacgaagttacagcagctcacggccatgtggttgtccgataaccagagcaaacccttgatccccctgcagaaagaaacggactccgaaacccagaagatggttctaacaaattacatgttcccacaacagccacggacagaagacgtgatgttcatcagtgataatgagtccttcaacccatctctgtgggaggaacagagaaaacaacgggcacaggtggcctttgagtgtgacgaggataaagatgagcgggaggcaccaccacgagaggggaaccttaagcggtaccccaccccttacccagatgagctcaaaaatatggtaaagaccgtccaaacgatcgtccacaggctaaaggacgaggagacgaatgaagactctggtagggacctgaaaccccatgaggatcaacaggacatcaataaagacgtgggtgtaaagaccagtgaatccactacgacagtgaagtccaaggtcgatgagcgagagaagtatatgatcggcaattctgtccagaaaatcagcgagcccgaagctgaaatttcacccggatcattgccagttactgccaacatgaaagcatcagagaacctcaaacacattgtgaatcatgacgacgtgttcgaagaaagcgaagagctctcctcagatgaagagatgaagatggcggagatgcgcccacccttaatagagacatcgatcaaccagccgaaggtggtggccctgagcaacaataaaaaggacgacacaaaagagaccgattcactaagcgacgaggttacacataattctaaccagaacaactccaattgttcttccccctcacgaatgagtgatagtgtcagtttgaacactgacagctctcaggatactagcctctgctcacccgtaaagcagactcatatagacatcaactcaaagatccgacaggaagacgaaaatttcaacagcctgttacagaatggcgatattctgaacagtagcactgaggagaagttcaaggcacatgacaagaaagactttaacctccccgagtacgacctgaatgttgaggagcggctggttctgatagaaaaaagcgtggattccactgctacagccgatgatacccacaaactggatcatattaatatgaacctgaataagctcatcaccaatgacacattccagcccgaaataatggagaggtcaaaaacacaggatatagttttggggacgagttttctcagcatcaactcaaaggaggagaccgagcacctggaaaatggtaacaagtatcccaatttagagagcgtcaacaaagtgaacgggcactctgaagagacctcccagagtcctaatcggactgagcctcatgactctgactgttcagtggacctgggcattagtaaatccacagaagacctgagtcctcagaagtcaggaccagtgggtagcgtcgttaaatcccatagcattaccaatatggagatagggggactcaaaatttacgacatacttagcgataacgggcctcagcagccgagtaccacagtgaaaataacaagcgccgtggatggtaagaacattgtcagaagcaagtcggcaaccctcttatatgatcagcctctgcaggtcttcacagggagcagttcttctagtgacctgatcagcggaaccaaggccatcttcaagtttgactccaaccacaatccagaggaacccaacatcatacgcggacccacttcaggaccacaaagcgccccacagatttacgggccaccccagtacaacatacagtactcatcatcagcagctgtaaaagacactctgtggcactccaagcagaatcctcagatcgaccacgcgtctttccctccgcagctgctgccgagaagcgagtccactgagaatcaatcttacgctaagcactcggctaacatgaacttctcaaatcataataatgtgcgagctaatacagcataccatctgcatcagaggctgggtcctgcacggcatggcgagatgtgggctatcagccccaatgacagactgattcctgcagtgactcggagcaccattcaaaggcagtcatccgtatcatcaacagcatccgttaatctgggagacccgggttcaaccaggcgggctcagatccctgaaggtgactatctctcatacagagagttccactcggccggacggactccaccaatgatgcctggctcccaacgtcccctatctgctaggacctactccatcgacggtcctaacgctagccgaccacagtccgcccgaccaagcatcaatgaaatcccggagaggacaatgagcgtttctgatttcaactactccaggacctcaccctctaagcgcccaaacgcaagggtcggcagcgagcactccctgctggacccgcctgggaagagtaaagtcccacgggattggcgcgaacaagtgttacggcatattgaagctaagaaactggagaagatgcctctgtctaatggccagatgggacaacccctgcgccctcaggctaattacagtcagattcatcaccctcctcaggcctctgtcgcccgtcacccaagcagggagcagcttatcgactacctcatgcttaaggtggctcaccaaccaccttatacccaaccacactgtagtccgcgacagggacacgaactggcaaagcaagagattagagtgcgagtggaaaaggaccctgagctcgggttctcgatctccggaggcgttggtggcaggggcaacccatttcggcctgacgatgacgctaatggatactcctttatcaatattgagcacgggcaagccgtctctcttttgaagaccttccaaaacacagtggagttgatcatcgtcagggaggtctcctcatag

SEQ ID NO: 222169 - DNA, 4083 bp, synthetic construct
  misc_feature 1..4083: note = Description of Artificial Sequence: Synthetic coding sequence
  source 1..4083: mol_type = other DNA
atgacgactaagcggtcactttttgttaggctggtgccttgccgctgtctaaggggggaagaggaaaccgtgacaactttagactattctcattgctctctggaacaagtgccaaaggaaatcttcacgtttgagaaaacccttgaggagttatacctcgatgctaatcagatcgaggaattgcccaagcagctgtttaactgccagtctctccacaaattaagcctccccgataatgaccttacaaccctaccagcttccatcgcgaacctgattaacttaagggaactggacgtgtccaaaaatggcattcaggagtttccagagaatatcaagaactgcaaagtcctgaccatcgtggaggcctctgttaacccaatcagcaaactgcctgacgggtttagccaattactgaatctaacgcagctatacctaaacgacgccttcctggaattcctgccagcaaactttggcaggcttacaaagctgcaaattttggagctgagagagaaccaactgaagatgctgcccaaaacgatgaaccgtctgacacagttagagaggctggacttagggagcaatgagtttactgaggtgccagaggtgcttgaacaattgtccgggctcaaagagttctggatggatgctaataggttgacctttatcccgggattcattggtagcttgaaacagctcacttacttagatgtgtcgaaaaataacatcgagatggtggaggagggcatcagcacctgcgagaatcttcaggacctgctgttgagcagtaattctcttcagcagttgcctgagactattggctcactcaagaatatcacaaccctgaagatcgatgagaaccagctgatgtatctgcctgactccattggaggcctgatctccgttgaggaactcgactgcagtttcaacgaggtggaggcattgccatcttcaatcggccagctgactaatctcaggaccttcgcagcagaccataactacctgcagcaactgccccctgagattggcagctggaaaaatatcactgtgctgtttcttcactctaacaaactggaaaccttacctgaggaaatgggggacatgcagaagctcaaggtgatcaatctctctgataatcgcctaaagaatctgccattttctttcactaagttgcagcagttaactgccatgtggctcagtgacaaccagagtaagccgttgatccctctgcagaaagaaacagactcggagacccagaaaatggtgctgacaaactacatgtttccacaacagccccgtacagaggatgttatgtttatttctgataatgaatccttcaaccccagcctctgggaggagcagcggaagcagagggcccaggttgcctttgaatgcgatgaggacaaggatgagcgtgaggcaccacctagggagggcaatctcaagcgataccctacaccgtatcccgacgaactgaaaaacatggtaaagactgttcagaccattgtgcaccgactgaaggacgaggaaactaacgaggattccggtcgagacctcaagcctcacgaggaccagcaggacatcaacaaagacgtcggtgttaagaccagtgagtctacaacaacagtcaagtcaaaggtggatgagagggaaaagtacatgattggcaactccgtgcagaaaatctccgagcccgaagccgagatctccccaggatctctgccagtgaccgcgaacatgaaagcctcggagaacctgaagcacattgtgaaccacgacgatgtgttcgaagagtcggaggagttgtcttctgacgaggaaatgaaaatggctgagatgcgtccccctttaattgaaacctccataaatcaaccgaaagtcgtggcactaagcaacaataagaaggatgacacaaaggagacagactctctgtcagatgaagtcacccataattctaatcagaataattcaaattgtagctcccccagccgaatgtctgactctgtgtctctcaacactgattcgtctcaggatacttcgttatgctcacctgtcaagcagacacatatcgacatcaattcaaagattcgccaggaggatgagaactttaattccctgctccaaaacggcgatatcctcaatagcagcacggaagaaaaatttaaggcccatgacaagaaggacttcaatcttccggaatatgacctgaatgttgaggaaagactagtgctgatcgagaaatccgtggacagtactgcaaccgcggatgacactcacaagctggatcacataaacatgaacctcaacaagctcattacgaacgatacttttcaacccgagatcatggagcgaagtaagactcaagacatagtacttggcactagtttcctaagcataaattcaaaggaggaaactgaacatctcgagaatggcaacaaataccccaacttagagtccgtgaataaggttaatggacactcagaagagactagccagtcaccaaaccgaaccgagccacacgatagcgattgcagcgtggacctcggaatctccaagagtacggaagacctgagtccccagaagtctggacctgtcggctccgtggtgaaatcccacagcataactaatatggagatagggggactgaagatttatgatattttgagcgacaatggcccacagcaaccctcgactacagtgaagatcacatccgcagttgacggtaagaacattgtgcgtagcaagtcagccacactgctttacgaccagccattgcaggtgttcactggctcctcaagctcttccgacctcatatccgggacaaaggcaatcttcaagtttgactccaaccacaatccagaggagcctaatataatacgcggaccaacttcaggtccccagtctgcccctcagatttatggccctccacaatacaacattcagtatagtagctccgccgcagtcaaggataccctttggcattccaaacagaaccctcagatcgaccatgcctccttccccccacagctgctgccccgaagtgaatccacggaaaatcagagctatgcgaagcacagtgctaatatgaactttagtaaccataacaacgtacgcgctaacacagcttaccatctgcatcaacggctgggtccagctcgccacggcgaaatgtgggcgatttcccccaacgataggctgattccggcagttacaaggtccaccatacaaagacaatcctccgttagctctaccgctagcgtgaacttaggcgaccctgggagtacacggcgtgcacaaattcctgaaggcgactatctctcatatcgtgagttccactccgctggcagaactccacccatgatgccaggttcccagcggccactaagtgcccgaacatacagcatcgatgggcctaatgcttctaggcctcagagcgccagaccctctatcaacgagataccagaacggactatgtctgttagtgatttcaactactctcggacctcaccttcaaagcgacctaacgctagagtgggctctgagcattccctgctcgatccgccagggaaaagtaaagtccctcgggactggcgagaacaggtgttgcgacatatagaggcgaagaagctggagaaaatgccgctctcaaacggccagatggggcagcctctgagaccacaggcaagcgtcgctcgacacccttcccgggagcagttgatcgattatttgatgcttaaggtggcgcaccagccaccatacactcagccccactgcagcccccgtcagggccacgaactagccaaacaggagatcagggtgagagttgagaaagatccggagctgggcttcagcatcagtggcggagtgggcggtagagggaatcctttccgtccggatgatgacggcatattcgtcaccagagtgcagcccgagggaccggctagcaaattactccaacctggtgataaaataattcaggccaacgggtatagttttatcaacatcgagcacggccaggcagtcagccttctcaagaccttccagaatactgtggaacttatcattgtccgagaggtgagcagctag

SEQ ID NO: 222170 - DNA, 4116 bp, synthetic construct
  misc_feature 1..4116: note = Description of Artificial Sequence: Synthetic coding sequence
  source 1..4116: mol_type = other DNA
atgactaccaaacgctcactgtttgtccgtctagtcccttgtagatgtctgcggggagaggaggagaccgtgacgacacttgattacagtcattgcagcctggaacaggtcccaaaggaaatcttcactttcgagaaaactttggaagagctctatttggatgcaaaccagattgaagaattaccaaagcaactttttaactgtcaatcgttgcataagttaagcttgccggacaatgatctgactacgctgcctgcttctatagctaatctgattaacttgagagaactagacgttagcaaaaacggcatccaggaattccctgaaaatatcaagaattgtaaagtgttaaccattgtggaggccagtgtgaacccaatcagtaagctgcccgatggtttttcgcagttgttaaacctgactcagctgtatctgaacgacgccttcctggagtttctgccagccaacttcggcaggttaaccaaactccaaattttagaactacgggaaaaccagttaaaaatgctgcccaaaacaatgaaccggttgacccaactggagagactggacctgggcagcaatgagttcactgaggtgcctgaggttttggagcagctttctggattgaaagagttttggatggacgccaaccgtctgacattcatccccggattcatcggctctctgaaacagcttacatatcttgatgtgtcaaaaaacaacatagagatggttgaagaggggataagtacctgcgaaaatcttcaggacttgttgcttagctctaacagcctgcagcagcttcctgagactattggatcactgaaaaatattactaccctaaagattgacgaaaaccaactcatgtatttgccagattccattggagggttgatatccgtggaagagctggactgctcctttaacgaggtggaagccctcccctccagcattggtcagcttaccaatcttaggacatttgccgctgatcacaattacctccagcagcttcccccagagatcgggtcttggaaaaacatcactgtgctgttcctccactcgaacaaattggagaccctgcccgaagagatgggggatatgcaaaagctgaaagtgatcaacttgtccgacaataggctgaagaacctgccattcagcttcaccaagcttcagcagctcacagctatgtggctaagcgataaccagagcaagcccctcattccactccagaaggaaactgacagtgagacgcagaaaatggtattgactaattacatgttcccacagcagccacggaccgaggatgtcatgttcatttccgacaatgaatctttcaatcctagtctatgggaggaacagaggaaacagagggcacaagtggcatttgagtgcgatgaagataaagatgagcgtgaagcaccacctagagaagggaacttgaagcggtaccccacgccgtatccggatgagttgaaaaacatggttaagactgtgcagaccatcgttcaccgcctcaaggatgaagagacgaacgaggactctgggagagatctcaaaccccatgaagaccagcaggacataaataaggacgtcggggtgaaaacctccgaatccaccacgacggtgaaaagtaaagtggatgagagggagaagtacatgatcggaaacagcgtccagaaaatttccgaaccggaggcagagatatctcccggatcccttccagtgacagccaatatgaaagcctccgagaatctgaaacatattgtcaaccacgacgacgtcttcgaagagtcagaggagctgagctcggatgaggagatgaagatggccgagatgaggccccctttaatcgagacctctatcaaccagccaaaggtggtcgctctgtcaaataacaagaaggacgacaccaaggaaacagacagcctctccgatgaggttacgcataatagcaatcagaacaattccaactgttccagccctagccggatgagtgactctgtgtcgctgaatactgacagctcacaggatacttccttgtgttcaccggttaaacagacgcacatcgatataaattctaagattagacaggaggatgaaaactttaatagtctgctgcagaatggggatatcttaaacagcagcaccgaagagaagtttaaagcacacgataagaaggacttcaacctcccggagtacgacctgaatgtggaggaacgtttggtattaatagagaaaagtgtcgactccactgcaacggcggacgacactcataaactggaccacataaatatgaatctcaacaaactcataaccaatgatactttccaacccgagattatggaacggtccaaaactcaagacatcgtgctggggacatcttttttaagcataaattctaaagaggaaaccgagcatctggagaacgggaacaaataccctaacttggaatccgtgaataaggtaaacggacacagtgaggaaaccagccaatcgcccaataggaccgagcctcatgattcagactgcagtgttgaccttgggatctctaagagtaccgaggatctaagtccacagaagtcaggccctgttggaagtgttgtgaaatcccactccataactaatatggaaatcggaggccttaaaatttatgacatcctgagcgacaatggaccccagcagccatccacaacagtcaaaattacgagcgcagtggacggcaaaaatattgttcgcagtaagagcgctactctcttgtatgaccaacctcttcaggtcttcacgggaagctcctccagtagcgacctgattagtggcacaaaagcgatttttaagtttgattcaaatcacaatcccgaggaacctaatatcattcgcggtcctaccagcggtcctcagtcggctccacaaatctacgggccacctcaatacaatatccagtactcttcttccgccgcagtcaaggatactctttggcacagtaagcagaatcctcaaatcgatcacgcaagctttcccccacagctactcccccgttccgagagcacagaaaatcagtcctacgccaagcatagtgctaacatgaatttttccaaccataataacgtcagagccaacacagcgtaccacttacatcaacgccttggccctgcccgacacggcgagatgtgggctatcagtccaaatgatcggttgattccggcagtgacacgctcaaccattcagcgccagagtagcgtgagttccaccgcatccgtgaatctaggggatccagggtcgacgcgcagagcccagatccccgagggagattacttgtcataccgggaattccacagcgctggaaggacaccaccaatgatgcctggatcccagcggcctctctcagctcgcacctatagtattgatgggccaaacgctagtaggccacagtccgctcgtccatctattaacgaaattcccgagcgcaccatgtctgtgagtgactttaactattctagaacatctcccagcaaacgtcccaacgctagggttggatcagaacacagcttgctcgaccccccaggcaaatctaaagtccccagggattggagagagcaggtcctgagacacattgaagctaaaaagttggagaaaatgcccttatcgaatgggcagatgggtcagcccttacgtccacaagccaattattcacaaattcatcatcctccacaggcaagtgtcgcaagacaccctagcagggaacagttgattgattatctgatgctgaaggtcgcccatcagcccccatatacccagccgcactgctcgcccagacagggacatgaacttgcaaagcaggaaattcgagtgcgggtcgaaaaggacccagaactgggcttctcaatctcaggcggagtgggcggtcggggaaatccgtttagacccgatgatgatggcatcttcgttaccagggtccagcctgagggcccagcatccaaactgctgcagccaggcgacaaaatcatccaggccaatggttactcttttattaatatcgagcatggtcaggctgtgagtctgctgaagacgtttcagaacacagttgagctgatcatcgtgcgagaggtatcaagttag

SEQ ID NO: 222171 - DNA, 3909 bp, synthetic construct
  misc_feature 1..3909: note = Description of Artificial Sequence: Synthetic coding sequence
  source 1..3909: mol_type = other DNA
atgacaactaaacgatcactttttgttagactggtcccctgccgctgtcttcgaggcgaggaagaaaccgtgacaactttggactactctcactgttccttagaacaagtgcccaaagagatcttcaccttcgagaagacccttgaggaactgtatctggatgcaaaccaaatcgaagaacttcctaagcaactctttaactgtcagtctcttcataagttgtcgctgcccgacaacgaccttacaaccctaccagcttctatagccaacctgatcaacttgagagaactggacgtgagcaagaacgggatccaagagttccccgaaaacatcaaaaactgtaaggtgctcacgatcgttgaagcctctgtcaacccaatttctaagttgccggatgggttcagtcagctgcttaatctcactcagctatacttgaatgacgcatttcttgagttccttcccgcaaatttcggcaggttgacaaaacttcagattttggagcttcgcgaaaaccagttgaaaatgctcccgaaaacaatgaacaggttgactcagctcgaacgcttggaccttgggtccaatgaattcacggaagtacccgaggtcctagaacaattgagcgggctgaaagagttctggatggacgccaaccgtttgactttcatccctggcttcatcgggtcccttaagcaactcacgtacctggatgtctctaagaataacatcgagatggtggaagaaggtatctccacctgtgagaacctgcaggatctgttactctcctccaattctcttcagcagctgcccgagaccattggctcactgaaaaacattaccacactgaaaatcgacgaaaaccaactgatgtatttacccgacagcatcggcggactcatttcggttgaggagttggattgctcgtttaacgaggttgaggcactgccatctagcattggccagctcacaaatctcaggactttcgccgctgatcacaactatttgcagcaattgccaccagagataggctcatggaagaacatcaccgtccttttcttacactccaacaaattggagaccctgccagaagaaatgggtgacatgcagaagctgaaagtcatcaatctgagtgataaccggctgaaaaaccttccattctctttcacaaagctgcagcaactcacagctatgtggctctccgacaatcaatccaagcctctgatcccacttcagaaagaaaccgactctgagacccagaagatggttttgactaactatatgttccctcagcagcccagaacagaggatgtaatgtttattagtgataatgaaagcttcaacccctccctttgggaggagcaacgcaagcaaagagctcaagtggcctttgaatgtgacgaggacaaagacgagcgggaggcaccgccacgggagggcaatttaaagcggtaccctacaccataccctgacgagcttaaaaacatggtcaagacggtgcagacaattgtgcaccgattgaaggacgaagaaactaacgaagattcagggagagacctgaagcctcatgaggatcaacaagacattaacaaagatgtaggcgtgaaaacatctgaatcaaccaccacagtgaaatcaaaagtagacgagcgcgagaagtacatgatcggtaatagcgtgcagaagatctccgagcccgaagccgagatcagccccggatccttgcctgtgaccgctaacatgaaggccagcgagaacctgaagcatatcgttaatcatgacgatgtcttcgaggagtccgaagagcttagttccgacgaggaaatgaagatggcagaaatgcgcccacctctgatcgagacaagcattaaccaacctaaagtcgtagcacttagcaacaataaaaaggatgacaccaaggagaccgattccctgtcagacgaggttacccacaacagcaatcagaataactctaactgctcatctccaagtcgaatgtccgacagtgtgtccctgaataccgattccagccaggatacctcactctgctctcccgtcaagcagactcacatagatatcaattccaaaattcgccaggaggatgagaattttaatagcctgttgcagaatggggacatccttaactcctccacagaggagaaattcaaagcccatgataagaaggatttcaatcttccagaatatgatcttaacgtggaagagcggcttgtgctgattgaaaagtcagtggatagtactgcgaccgcggatgatactcacaagctggatcacatcaatatgaatctgaacaaattgatcaccaacgacacattccagcctgagattatggagcgcagcaagacccaggacattgttctcgggaccagcttcctgtccataaattcaaaggaagaaaccgaacatcttgagaacggaaacaaatatccgaacctggagtccgtgaacaaggtgaatgggcatagtgaggagacaagccaatctcccaacagaacagagcctcatgactcggactgtagcgtcgatttaggtatttcaaaatccacggaagacctcagcccgcagaagagcgggcctgtggggagtgtagtgaaaagtcacagtatcacaaatatggaaatcggcggattgaagatctacgatattcttagcgacaacggtccacaacagccatctaccaccgtgaagattacatccgccgtggatggcaagaacattgtgcgtagtaaaagtgccaccctactgtacgaccagcccctacaggtttttactggttctagctcctcgagtgacctgatttctggaaccaaagccatattcaagttcgatagcaatcacaacccagaagaacctaacatcatcagaggcccaaccagtggccctcagtccgccccacaaatatatggtcctccccagtacaatattcaatactcttcttccgctgctgtgaaagataccctttggcactctaaacaaaatcctcagatcgatcacgcgtccttccctcctcaactgctcccacgctctgagtccactgagaaccaatcttacgccaagcattccgccaacatgaatttcagtaatcataataatgtccgggctaacacagcttatcacctgcaccagcgcctcggtccggctaggcatggggaaatgtgggcgatatcacccaatgataggcttatcccggcagttacaagatccacgatacagcgccagagctctgtctcgagcaccgcttcggtaaatcttggcgaccctgggtccacccgcagagcgcagataccagagggggactacctgtcttaccgggagttccattccgcgggaagaacacctcccatgatgcctggcagccaacgacctttgagcgcgcgtacctacagcatcgacggacctaatgccagccggcctcaaagtgctagaccttcaattaacgagattcctgaaagaacaatgtcagttagtgactttaattatagtaggaccagccccagcaagagacccaacgcaagggtcggtagcgagcattcactgctagacccccctggcaaaagcaaggtacctcgggattggcgggaacaggtccttaggcacatcgaagctaagaagctggaaaagattagagttagagtcgaaaaagacccggaacttggtttttccatctcaggcggtgttggtggccgtgggaatccctttcgcccagatgatgacgggatcttcgttacccgtgttcagcccgagggacctgcaagtaaactgctgcagcctggggacaaaataatccaggcaaacgggtactcgttcatcaatattgagcacggacaagcggtgtccctgctcaagactttccagaacacagtggagctcatcatcgtgagagaagtttccagctag

SEQ ID NO: 222172 - DNA, 4260 bp, synthetic construct
  misc_feature 1..4260: note = Description of Artificial Sequence: Synthetic coding sequence
  source 1..4260: mol_type = other DNA
atgacaacaaagcgatcgttgttcgtgaggcttgttccatgtcggtgtctgcgaggagaagaagaaaccgtcacaactctcgactacagccactgttccctggagcaggtgcccaaggaaatctttacattcgagaagaccctggaggagctatatttggatgccaaccagatcgaagaacttccaaaacagctgtttaattgtcagagcctgcacaaattatcacttccggacaacgatttgactacattgccggcaagcatcgccaatctgattaacctgagagagctggacgtttccaagaatgggatccaggaatttccagagaatataaagaactgtaaggttctgactatagtcgaggcttctgttaatcccatctcaaaactcccagacgggttcagccagctgcttaatctgacgcagctgtatctgaatgatgcatttctcgaatttctgcctgccaatttcggtagactgactaagcttcagattctggagctcagggaaaaccagctgaagatgctgccaaaaactatgaacaggcttacccagttggagaggctagatctgggaagtaatgagtttacagaagttcctgaggtcttggagcagcttagtggcttgaaagagttctggatggatgcaaatcgccttacatttataccaggttttatcggctcactgaaacaactgacttatttagacgtcagcaagaataatatcgagatggtcgaggagggaatttctacatgcgagaacctccaagacctgcttttatcttccaactcccttcagcagctcccggaaaccatcgggtccctgaagaacattacgacactgaaaattgacgagaatcagcttatgtatctcccggacagtatcgggggactgatttctgtcgaagagctggattgcagcttcaacgaagttgaagccctcccttctagtattggacaactcacaaatctcagaaccttcgctgctgaccataactatctgcagcagttgccgccagagatcggtagctggaagaatatcacagtcctgtttctccactctaacaagctcgaaacattacccgaagaaatgggagacatgcagaaactaaaagttatcaacctgtcagacaaccgcctgaaaaacctgccctttagcttcaccaaactccagcaactgaccgcaatgtggctaagtgacaaccaaagcaaacctcttatccccctgcagaaggaaaccgactccgaaacacagaaaatggtgttaacaaattacatgtttccccagcagcctcgaaccgaagacgttatgttcatatcagataatgagagctttaacccttctttgtgggaagaacagcggaagcagcgagcacaggtggcattcgagtgtgacgaagacaaggacgagcgcgaagccccaccgagggaaggaaacctaaaacgatacccaactccttaccccgatgagctaaaaaatatggtgaagacagtgcaaaccatcgttcacaggcttaaggatgaggaaactaatgaagactccggaagagacctgaaaccccatgaggaccagcaggacatcaacaaggatgtcggcgttaagacttcagagagcaccaccactgtaaagtcaaaagttgatgaacgcgagaaatatatgattggcaattccgtccagaaaatcagtgagcctgaagcggaaatctcccctggcagtctcccagtcactgctaatatgaaggcttccgaaaatctaaagcatattgtaaaccatgacgatgtgtttgaggagtctgaggaactaagcagcgatgaggaaatgaagatggcggaaatgcgcccacctctgatcgagacttcaattaatcagcctaaggtcgtagccttatccaacaataagaaagatgacacaaaggagacagactctctgtccgatgaggtgacccacaacagtaaccaaaataactcgaactgctcatcacccagccggatgagcgatagcgtctccttgaatacagattcaagtcaggatactagcctttgtagccctgttaagcaaacccatatcgacattaacagcaaaatcaggcaggaagacgagaattttaactctttactccaaaatggtgacatattaaatagcagtactgaagagaagtttaaggcccatgacaaaaaagacttcaaccttccagaatacgatctcaatgtcgaagagcgcctggtccttatcgagaaatccgttgatagcacagctaccgccgacgacacgcacaagttggaccacattaatatgaacctcaataaacttataacgaacgatactttccaacccgaaatcatggaaaggagcaaaacacaggacatagtgctgggcacttctttcctgagcattaacagtaaagaggagaccgagcacctagagaatggcaataaataccccaaccttgagtcagtcaataaggtgaacggacattctgaagaaacatctcaaagcccaaataggacagaaccgcacgatagcgactgtagtgtggatttgggcatcagtaaatcaaccgaggatttgtcaccccagaaaagcggccctgtgggcagcgttgttaagtcccattccatcacaaacatggagatcggaggcttaaagatctatgacatcctgtctgataacgggcctcaacaaccatccacgactgtgaagatcacctctgccgtggacgggaagaacattgtgaggagcaaatcggcaaccctgttgtacgatcagccactgcaagtattcactggatcctcttcttcgagtgatctaatttccgggaccaaagccattttcaagtttgacagtaatcacaatcccgaagaacccaacatcataagagggcctaccagcggaccccagtccgctccccaaatctacggaccccctcagtacaatattcagtactcttcttcagctgccgtgaaagacacattgtggcatagtaaacagaatccccagattgaccacgcatcgtttccaccacagcttctcccacggtctgagtccacagaaaatcaatcttacgcaaagcacagcgctaatatgaatttcagcaaccacaacaacgtgcgggcaaatactgcttatcaccttcatcagcggttgggccctgcccgacacggtgagatgtgggcgatatcccctaacgataggctgattcctgccgtcactagatcaacgattcagcggcagtctagtgtttcatctactgcctctgtgaatttaggtgacccagggagcacacgcagggcccagattcctgagggagattatctgtcctacagagagttccatagtgccggtagaacaccccctatgatgcctggatcacagcgcccactgtcggcaaggacctattcaatcgacgggcctaatgcttcccgtccccagtccgctcggccatcaataaatgagatcccggagcgcaccatgagcgtgtctgattttaactactctcgcacaagcccttccaagcgacccaacgctcgggtgggttcagagcatagtctcctagacccgccaggcaagagtaaggtgcctagggactggcgcgagcaagtgcttcgccacattgaggctaaaaagcttgagaagtcaatgctgagtagatcgttcaacagtaattttaccacagtgtcgagcttccactgcggctcaagccgagatctgcatggcagtcaagggtcactggctctgtcagtggccgacaggcggggatccggcggacatatatttaggatgccactgtcaaatggacaaatgggacaaccactgcgccctcaggcgaactattcacagatccaccatccgccacaggccagcgtagcaaggcatccaagcagggagcagctgattgattatctgatgctgaaggttgcccaccagccgccatacacccagccacattgcagtcctaggcaaggtcacgagctggccaaacaagagatccgggtcagggttgagaaggaccctgaactggggttctctattagcgggggagtgggcggtagaggaaacccttttcgtcctgacgatgatggcatcttcgtgaccagagtacagccagaaggtcccgctagtaagctgcttcagccgggagataaaattattcaggcgaacggctacagctttatcaatatcgaacatgggcaagcagtgtccctgcttaagacattccagaacaccgtggagctgataatagtccgagaggtcagtagttag

SEQ ID NO: 222173 - DNA, 1158 bp, synthetic construct
  misc_feature 1..1158: note = Description of Artificial Sequence: Synthetic coding sequence
  source 1..1158: mol_type = other DNA
atgaaggaggaagagggattcccggaggatgaggccacggaatcggaaaccctatcccttgtgaaggagctagacgccttccctaaggttcctgaatcctatgtcgaaacttctgcatcagggggtaccgtgtccctgatagcatttaccaccatggcattgcttacaattatggaattctcagtgtatcaagacacctggatgaaatacgaatatgaggtcgacaaggactttagtagcaagctgcgaataaacatagacatcacagtggcgatgaaatgccagtacgtgggcgcagacgtgttggatctcgctgagaccatggtggcctctgccgatgggctcgtgtatgagccaacagtgttcgatttgagtccacagcaaaaagagtggcagagaatgctgcagctgatccagtctcgcttgcaggaagaacacagcctgcaggatgtgatcttcaaaagtgcgttcaagtcaacctctacagcactgcctcccagagaggacgactctagccagtcccctaacgcttgccggattcatgggcatctatatgtcaacaaggttgccggaaacttccacataaccgtgggcaaggcaatacctcacccccgaggacatgcacatttagccgctctagtgaaccacgagtcatacaacttcagtcacagaattgaccacctgtcctttggcgaacttgtgcctgcgataattaaccccctggatggaaccgaaaagattgctatcgaccataaccagatgttccagtactttattactgtcgttcccaccaaactgcacacctataagatctcagccgacacccatcaattttctgtcactgaacgagagcgcattatcaatcatgcggcagggagtcacggggtaagcggcattttcatgaagtacgacttgtcatccctgatggtcacggtcaccgaggaacacatgcctttttggcagttcttcgtgcgactgtgcggaatcgtgggtggcattttcagcactaccgggatgctgcacggcatcggaaaattcatcgtagagatcatctgctgtcggttccgactgggaagttacaaaccagttaatagcgtgccctttgaggacggtcatacagacaaccatctgcccttacttgaaaacaatacccactag

SEQ ID NO: 222174 - DNA, 1134 bp, synthetic construct
  misc_feature 1..1134: note = Description of Artificial Sequence: Synthetic coding sequence
  source 1..1134: mol_type = other DNA
atgaggagactgaaccggaaaaagactctcagcctcgtgaaggaacttgatgctttccctaaggtgccggagagctatgtcgaaacgagtgcgtccggcggaacagtgtcccttatcgcgttcactacaatggcactcttaaccatcatggaattctcagtgtaccaggacacctggatgaaatacgaatatgaggtggacaaggacttctctagcaaactgaggattaacatcgatatcacagtcgcaatgaaatgccaatatgtgggcgctgatgtgctggacctcgccgagacaatggtagcaagcgccgatgggttggtctatgaaccaacggtgtttgatctttccccccagcagaaagagtggcagcggatgctgcaattgattcagagtcgactgcaggaagagcattctcttcaggacgtgatcttcaagtccgcttttaagagcacttccactgccctgccccctagagaggacgacagcagtcagagccctaatgcgtgcaggatacacggccatctatatgtcaacaaggtggctgggaactttcacatcaccgtgggtaaagcaatcccccaccctcgcggacacgctcatcttgcagcactggtcaatcatgagtcatataacttttctcacagaatcgatcacctgagtttcggagagctcgttcccgcaatcataaatccacttgatgggacggagaaaatagccattgaccataatcagatgttccagtacttcattaccgtggtgcctacaaagctgcatacctacaagatctctgcggatactcatcagttcagtgtgactgagcgcgagcgaatcatcaatcacgctgccggtagtcatggagtatcaggtatcttcatgaagtatgatctttcctccctgatggtgacagtcactgaggagcacatgcctttctggcaatttttcgtcaggctttgtgggatagttgggggaatctttagcaccactggaatgctccatggtattggcaagttcatcgtcgagataatttgttgcagattccgactgggtagttacaaaccagtgaatagtgtcccctttgaggacggacataccgacaatcaccttcccttacttgaaaacaatacacactag

SEQ ID NO: 222175 - DNA, 663 bp, synthetic construct
  misc_feature 1..663: note = Description of Artificial Sequence: Synthetic coding sequence
  source 1..663: mol_type = other DNA
atgcggcgactgaatcggaagaagacactgtccctggtgaaagagctggatgctttcccaaaggtacctgagtcttatgttgagacctcagccagcggaggcaccgtaagccttatagccttcaccaccatggccctgctgacaatcatggagttctccgtgtaccaggatacatggatgaaatatgagtatgaggttgataaagactttagtagcaagctgcgtatcaatattgacattacagtcgccatgaagtgtcagtacgtcggcgctgacgttttagacttagccgaaacgatggtagccagtgccgacggactggtatatgaacctactgttttcgatctatctccacagcagaaagaatggcagcggatgctgcaactaatacaatctaggctgcaggaggaacactcgctgcaggacgtgatctttaagagtgcattcaagtcaacttcgactgccctgcccccacgtgaagacgactctagccagagtccaaacgcgtgcagaatccacggccacttatatgtgaacaaagtcgccggaaacttccatattacagtgggaaaggccattccacaccctcggggacatgcccatctggccgctttagtaaatcatgagtcttacaatttctcccatcgtatagaccacctgtag

SEQ ID NO: 222176 - DNA, 216 bp, synthetic construct
  misc_feature 1..216: note = Description of Artificial Sequence: Synthetic coding sequence
  source 1..216: mol_type = other DNA
atgcgccgactgaataggaagaagacactgagcttggtgaaggaactcgatgccttccccaaggtgcctgagtcttacgtcgagaccagcgctagcgggggaactgtgtctctgatagcttttaccaccatggcactgctgacaatcatggaattctcagtgtatcaggacacttggatgaaatacgaatatgaggtggataaggatttcagctag

SEQ ID NO: 222177 - DNA, 528 bp, synthetic construct
  misc_feature 1..528: note = Description of Artificial Sequence: Synthetic coding sequence
  source 1..528: mol_type = other DNA
atgagaaggctcaatcggaagaaaactctcagtctggttaaggaactggatgcatttcccaaggttcctgagagctatgtcgagacatccgcttccggcggaactgtgagccttatcgccttcactaccatggctcttctgaccattatggaattttccgtgtaccaggatacctggatgaagtacgagtacgaggtagataaggatttctcctctaagctacgcattaatatcgacatcacagtggccatgaagtgccaatatgtcggggctgatgtgctagacctagccgagaccatggtggctagcgccgatggtttggtgtacgagcccacagtgttcgatctgtcaccccagcagaaagagtggcaaaggatgttgcagctgatccaaagccgcctccaagaagaacactctctgcaagatgtcatcttcaaatccgcttttaaatccacctcgactgccttaccaccgagggaagatgactcatctcagtcccccaacgcctgccgcatacacggccattag

SEQ ID NO: 222178 - DNA, 1158 bp, synthetic construct
  misc_feature 1..1158: note = Description of Artificial Sequence: Synthetic coding sequence
  source 1..1158: mol_type = other DNA
atgccagagtacaagggcaggactgttcttgtgagggacgcacaggaaggttcggtgacgttacagatcctcgatgtgagactcgaggaccaggggtcctatcgctgtctgatccaggtgggcaatctgagtaaagaggacacagtgatcctgcaggtggcagcaccttctgtggggagtttgagcccctctgcagttgcgcttgctgtgattctgccggttttagtgctgctcataatggtctgcctgtgcctcatttggaaacaacgtcgggctaaggagaagctgctatacgaacacgtaacagaggtggataacctgcttagcgaccatgctaaagaaaagggcaagctacacaaagctgtcaaaaagttgcgcagcgagttgaagttgaaacgggctgctgcgaacagtggttggagacgggctcggttgcacttcgtcgcagtgacacttgaccccgacaccgcccaccctaaactcatcctgagcgaggaccagcgttgtgttcgactgggggacaggagacagcctgtgcccgataatccccagcgttttgattttgttgtttctatcctgggcagtgagtactttacgacaggttgccactattgggaggtgtatgtgggcgacaaaacaaagtggattctaggggtttgctccgaaagtgtgtcccgtaaaggcaaagtgacagctagcccggctaacggacactggctcttacggcagagccgcggaaatgaatatgaagcgctgacatcaccacagacttcttttagactcaaagaaccacctaggtgcgtgggcattttccttgattatgaggccggagtgatatctttttacaatgtgaccaacaagagtcacatctttacctttacacataatttttctggaccgctgcgccctttcttcgagccctgtttgcatgacggtgggaaaaacaccgctcctttggtaatctgtagcgagttgcacaagagcgaggagtccatcgtcccaaggcccgagggcaaggggcatgccaacggggatgtttccttgaaagtgaactctagcttactgccaccgaaggcccctgaactgaaggatattatccttagcctcccaccggacttggggccagccctgcaggaacttaaggcaccatctttctag

SEQ ID NO: 222179 - DNA, 1428 bp, synthetic construct
  misc_feature 1..1428: note = Description of Artificial Sequence: Synthetic coding sequence
  source 1..1428: mol_type = other DNA
atggagatggccagcagtgccggaagctggctgtcaggttgtctgattcctctagtgtttttgcgtctgagtgtgcacgtatcagggcacgctggggatgccggtaagtttcacgttgcactgcttggaggtaccgctgagcttctgtgccccctgtctctatggccaggtaccgtccccaaggaggtgagatggctacgctctcccttcccccagcgatctcaagccgtgcacatcttccgagacggcaaggaccaagacgaagacttgatgcctgaatacaaaggcaggaccgtactcgtgcgcgacgcacaggagggttctgtgactctgcagattctggatgtcaggttggaggatcagggatcatacagatgcctcatccaggttgggaacctgtcaaaagaagacactgttatcctgcaggtggctgccccttcggtaggctctctgtctccttccgccgtggcactggccgtgatcctccccgttcttgtgctgctcattatggtctgtctctgtttgatctggaagcagcgtagagctaaggaaaagctgctatacgagcatgtgaccgaggtcgataaccttctctccgaccacgcaaaggagaagggcaaactgcacaaggcagtcaagaagctgagatcggaactcaaattgaaacgagctgctgctaattcgggctggcgaagagcaaggctgcatttcgtggctgtgacactggaccccgataccgctcatccgaagctcatactcagtgaagaccaaagatgcgtcaggctgggagaccggaggcagcccgtacccgacaatccacagcgcttcgactttgttgtctctatactgggctctgagtacttcaccactggctgccattactgggaggtttatgtaggtgacaaaacaaaatggatcctgggagtgtgctctgagtccgtgtcacgcaaggggaaggtgaccgccagtcccgctaacggccactggcttctccgtcagagtcgaggaaatgagtatgaagccctcacatcaccccaaaccagctttcgactgaaggaaccaccacggtgtgtgggcattttccttgattatgaggcaggcgttatttccttttacaacgtaactaacaagtcccatatattcacatttacacacaatttttcaggccctcttaggccatttttcgagccatgtcttcacgatgggggtaagaacaccgctcccctggtgatctgcagcgaactacacaagtctgaggagagcatagttcccaggcctgagggaaagggacacgcaaacggagacgtttcgctcaaggtcaactcatcccttttacctcccaaagcacccgaactgaaagacatcatccttagtctgcctcccgatctgggcccagcattacaggagctcaaagcaccctccttttag

SEQ ID NO: 222180 - DNA, 1428 bp, synthetic construct
  misc_feature 1..1428: note = Description of Artificial Sequence: Synthetic coding sequence
  source 1..1428: mol_type = other DNA
atggaaatggcatcctcggcgggttcatggctgtccgggtgcctgatccctctggtatttctgcggctgtctgtgcatgtgtccggccacgcgggagatgcgggaaagttccatgtagcgctgcttgggggtaccgctgaactgctctgcccactgtcactgtggccagggacggtgcccaaggaggtgagatggttgcgaagtcccttcccacaacgcagtcaggcagttcatatctttagagacgggaaggatcaggatgaggacctcatgcccgaatataagggccgaactgtcctggtacgggacgcccaggagggctcggtgacactgcagatcctggatgtgagactggaagaccagggctcttacaggtgtcttatccaagtagggaacctcagtaaagaggacactgttatactgcaggtggcagcgcctagtgtcggatcacttagccctagcgctgtcgccttggccgtgatcctgccagtgctggtgctgctgattatggtctgcctgtgcctgatctggaaacagcgtagggccaaggaaaaattactgtatgagcacgtgactgaggtggataacctcctcagcgaccatgctaaggagaagggtaagctgcataaagccgtaaaaaaactcaggtctgagctaaaactaaaaagagctgcagccaattcgggctggcgccgtgcacgtctgcacttcgtggcagtgaccctggacccggataccgcacaccctaaactcattttatcagaagatcaaagatgtgtgcgcctgggagaccgtcgccaaccagttcctgacaatcctcaacgctttgacttcgttgtttccatcctcggcagcgagtattttacaacaggatgccattattgggaagtatacgtgggcgacaagaccaagtggatcttgggtgtctgcagcgagtcagtgtctcggaagggaaaagttaccgctagtcctgccaatggacactggctactgcgccagtcccgcggtaatgaatacgaagcccttaccagtccacagacaagtttccgccttaaagagccccctcgatgcgttggaatcttcctcgattacgaggccggagtgattagcttctataacgttaccaataagagtcacatcttcaccttcactcacaacttttccgggccactgcggcctttttttgagccctgcctgcacgacgggggaaaaaacacggcaccgttagtcatctgttctgagctgcataaaagtgaggagtcaatcgtgcctagaccagagggcaagggccatgccaacggggatgtctctcttaaggtgaatagcagtctgctaccgcctaaagcccctgaactgaaagatattattctatcgctgccaccagatctggggccagctctccaagagctcaaggcccctagcttctag

SEQ ID NO: 222181 - DNA, 2595 bp, synthetic construct
  misc_feature 1..2595: note = Description of Artificial Sequence: Synthetic coding sequence
  source 1..2595: mol_type = other DNA
atgacaaccgaaaagtctctggttactgaggccgaaaatagccagcatcagcagaaagaagagggcgaggaggctatcaatagcggccagcaagagccgcagcaggaagagtcttgtcagaccgcagccgaaggcgacaactggtgcgagcagaagctgaaagcaagcaacggggacacgcctactcatgaagacttaactaagaacaaggagcggacctcggagtcccggggtttgtccaggttattctctagtttcctcaagaggcccaaatcccaggtgagcgaggaggagggaaaagaggtggaatccgataaggagaagggtgaaggcggacagaaggagattgaattcggtaccagtctggatgaggaaattatcctgaaagccccaattgccgctcctgaaccagaactgaaaactgacccaagtttggatctgcacagtctgagcagcgctgaaactcagcccgctcaggaagagttacgggaagacccagatttcgagattaaggagggagaggggctcgaggaatgcagcaaaatcgaggtgaaggaagaaagcccacagagcaaggcagagactgaactcaaggcatcacagaagcccattagaaagcaccgtaacatgcactgtaaggtcagcctccttgacgatacagtatacgagtgtgtggtagagaagcacgccaaaggccaggacctgcttaagcgagtctgcgagcacctgaacctgctagaagaggactacttcgggctggccatctgggacaatgcgacatcaaagacgtggctggacagcgccaaagagatcaagaaacaggtaagaggagtgccatggaatttcactttcaatgtcaaattttacccaccagacccggcacagctgacggaggatattactagatattatctgtgcctgcagctccggcaggacattgtcgcgggacggctgccctgttcatttgccactctcgcattgctggggagttatacgatccagtctgagctgggtgattatgacccagaactccatggggtcgattatgtttccgactttaaactggcgccaaatcagacaaaagaactcgaagagaaggtgatggaactgcataagtcgtacagatcgatgacacccgcacaggcagatctggaattcctcgagaatgctaagaagctttctatgtacggagtggatctgcacaaagcaaaagacctcgaaggagtggacattatcctcggtgtgtgtagttctggcttacttgtgtataaagacaagctccggatcaatcgcttcccatggcccaaagtactcaagatttcgtacaagcgttctagcttttttatcaagatcaggcctggtgaacaggagcagtacgagtcaactattggattcaagctaccgtcataccgcgcagcaaaaaagctatggaaggtttgtgtggagcatcatactttctttaggctgacttctactgatacaatccctaaatcaaaatttctggcattggggtccaagtttcgatacagcgggcgtacccaggcccagacacggcaggcttctgccctcattgatcgccctgctccccatttcgaacgaactgcgagtaagcgtgcttcccgaagcttagatggcgctgctgctgtcgattctgccgatcggagtccccgtcccacctccgctcccgcaatcacacagggccaagtggctgaagggggagttctcgatgcctccgccaaaaagacagtcgtgccaaaggcacagaaagagaccgtcaaggcagaggtaaaaaaggaggacgagcctcctgagcaggcagagcccgagcctactgaggcatggaaggtggagaagacacacattgaggtcactgtcccaacaagtaacggcgaccagactcagaaacttgcagaaaagacagaggacttgatccggatgcgaaaaaagaaacgagagcgcctcgatggggagaatatctatatccggcacagcaacctaatgttagaggacctcgacaaatcacaggaagagatcaaaaagcaccatgctagtatcagtgagctaaagaaaaactttatggagtcagtccccgagccgagaccttcagaatgggacaaacgactctctactcactcccccttccgtacgctcaacataaacggccagatcccgaccggggaagggccaccactcgtgaagactcaaactgtgacaataagcgacaacgccaatgcagtcaagtcggagattccgaccaaagacgtgccaatcgtgcacacagagactaaaacaatcacctacgaagcggctcagaccgatgataacagcggcgacctagatcccggagtgttgctgacagcgcagacaattacatccgagactccgagttccacgaccacaacccagatcaccaagaccgtcaaggggggtattagcgagacacggattgagaagcgcattgtcattaccggcgacgccgacattgatcacgatcaggttctggttcaggccatcaaggaggccaaggaacaacatcccgatatgtccgtcaccaaagtcgtggtccaccaggaaaccgagatcgccgatgagtag

SEQ ID NO: 222182 - DNA, 2328 bp, synthetic construct
  misc_feature 1..2328: note = Description of Artificial Sequence: Synthetic coding sequence
  source 1..2328: mol_type = other DNA
atgaccaccgaaaagtcacttgtgactgaggcagagaactcccagcaccagcagaaggaagagggtgaggaggcaattaatagtggacagcaggagcctcaacaggaagaaagctgtcagactgcagccgagggtgacaactggtgcgagcagaagctcaaagcttccaatggggatacacccactcatgaggatctgacaaagaataaggagagaacaagtgagtcccgaggactttcccgtcttttcagttctttcctcaaaagaccaaagtcgcaggtttctgaggaggaggggaaggaggttgaaagcgataaggaaaaaggggagggcggacaaaaagagattgaattcggaacctctttggacgaggaaatcattctgaaagcaccaattgccgcaccggaacccgaactgaagaccgatccctccctggaccttcacagtcttagcagtgcagagacacagccagctcaagaagagctgcgagaagatccagattttgagataaaagagggcgaaggtctcgaggaatgctccaagatagaggtgaaagaagaaagtccccagagcaaggccgagaccgaactgaaagcttcacagaagcctattagaaaacataggaatatgcactgcaaggtctcattgctggacgacaccgtgtatgagtgcgtggtggaaacctggctggacagcgcgaaggagatcaaaaagcaagtacgcggagtgccctggaactttacattcaatgtgaagttttaccccccagaccctgcccagctgacggaggacataaccaggtattatctttgcctgcagttaagacaggacatcgtggccggacgcttgccgtgtagtttcgctacactggccctgctaggctcctataccatccaaagcgaactaggcgattacgaccctgaactccatggagtggactacgtcagcgattttaagctcgctccgaatcagaccaaggaattagaggaaaaagttatggagcttcataagtcttatcgctccatgactcctgctcaggccgatttagagtttcttgagaatgcaaaaaagctgagcatgtatggggtcgatcttcataaggccaaggatctggaaggcgttgacatcatactaggggtctgtagctccggcctgcttgtgtacaaagacaagctgagaattaatagattcccatggcccaaagttttaaaaatctcttataaacgctcctcttttttcattaaaattcggccaggcgagcaggagcagtacgagtcgactataggcttcaaactgcctagctatagggcggcaaagaagctgtggaaggtctgcgtggaacaccacaccttcttccggctcacatccacagacaccatcccaaagtcgaagttcctggctctaggcagtaagttcagatatagcggtaggactcaggctcaaactagacaagcaagtgcactcatagatcgcccagccccacatttcgagagaacagcttcaaagcgcgcaagccgatctctggatggtgcagccgctgttgatagcgctgaccggtccccgagaccaacaagcgcaccagcaatcacccagggccaggtggccgaagggggagtactggatgcttcggcaaagaagacagtggtccccaaggcccagaaagagaccgtcaaagccgaggtcaagaaggaagatgagccaccggaacaagcggaaccggaacctacagaggcctggaaggatctcgataagtcccaggaagagatcaagaaacaccacgccagcataagtgagcttaagaagaatttcatggagagcgtccctgagcctagaccgtcagaatgggacaaaagactgagtactcactcacccttccgaacgctcaatatcaacgggcagattccaaccggggagggcccacccttagttaagacacagaccgtgaccattagcgataatgccaacgctgtcaagtccgagattcctaccaaagatgttccaatcgtccataccgagaccaagacgattacctacgaggccgcacagaccgacgacaattcgggcgatcttgatccaggggtgttgttgacagctcagactataacctccgagactccatccagtactacgactacacagatcacgaagacagtgaaaggcggtatcagtgaaaccagaattgagaaaaggatagtgattacgggagatgccgatatcgaccatgaccaggtcctggtgcaggccatcaaggaagcgaaagagcagcaccctgacatgtctgtaactaaggttgtagtgcatcaagagaccgagatcgctgacgaatag

SEQ ID NO: 222183 - DNA, 1926 bp, synthetic construct
  misc_feature 1..1926: note = Description of Artificial Sequence: Synthetic coding sequence
  source 1..1926: mol_type = other DNA
atgcactgcaaggtcagcctcttagacgatacagtctacgagtgcgtcgtagaaaaacatgccaaaggtcaggatctgctcaaacgggtgtgcgaacaccttaacttgctcgaagaagactattttggactggcaatatgggacaatgctacatccaagacatggctggacagcgccaaggaaatcaagaagcaggtacggggtgttccttggaacttcacctttaacgtgaaattctatccgcctgatcctgcccagttgactgaagacatcactcgctactacctctgcctgcagttgcgtcaggatatcgtggccggtaggcttccctgttcctttgccaccctcgcgctcctgggctcttataccatccagagcgagcttggggactacgatccagagctccatggggtcgattacgtgagcgacttcaagctggcccctaaccagaccaaggagctggaggagaaggtgatggaacttcacaaatcctacaggtctatgaccccagcccaggcagatttagaattcctggagaatgcgaagaaattgtctatgtacggggtggatttacataaagcaaaagatctggaaggtgtggatattatcctcggtgtctgcagctctggactgctggtctacaaggacaaactccgtatcaaccgttttccatggccaaaagtgctcaagatctcctataagcgcagctccttttttattaaaattcgtccaggagagcaggaacagtacgagagtaccatcggctttaaactgccctcttaccgagctgcgaagaaactgtggaaagtctgcgtcgagcaccatacctttttccggctcacaagcaccgacactatccccaagtccaagttcctagccctgggatcaaaatttcgctacagcggtcggacacaggctcagacgcgccaggcgtcggccctgattgatcgcccagccccacattttgaaagaacagcgagcaagcgggcttctcgcagcttggatggggctgccgctgtagactccgccgacaggagccctaggcctacttctgcacccgcaattacccagggccaggtcgctgagggcggagtgctcgacgcctcagcaaagaagaccgttgtcccaaaagcacaaaaagagacggttaaggccgaagtcaagaaggaagacgagccgcctgagcaggcggagccagagcctactgaggcgtggaaagtggagaaaacccatatcgaggtgacggtcccgacctccaatggcgaccaaacccagaagaagagagagcgcttagacggggagaacatctatatcagacactctaatcttatgctcgaagatcttgacaaatctcaggaggaaattaaaaagcaccatgcctctatatccgaactcaaaaagaattttatggaatctgtccctgaacccagaccgtccgagtgggacaagaggttgtctacacattccccatttcgcaccctgaatatcaatggccagatccccactggcgagggacctccgctagtgaaaacccagactgttacaatttccgataatgcaaatgccgtaaaaagcgagatcccgactaaggatgtccctatcgtacatacagaaaccaagaccatcacgtacgaagccgcacagacagacgataattccggggatttggatccaggagtgctgctgaccgcccagaccatcacgtctgagacgccttcttccaccacaactacccagatcactaagactgtgaaaggcggaatctccgagacaagaatcgagaaacgcatcgtcatcactggtgatgccgatatcgatcacgaccaggttctggtgcaggctatcaaggaggcaaaggagcagcatcctgatatgagcgtcaccaaagttgtcgtccaccaagaaactgagattgctgacgagtag

SEQ ID NO: 222184 - DNA, 2496 bp, synthetic construct
  misc_feature 1..2496: note = Description of Artificial Sequence: Synthetic coding sequence
  source 1..2496: mol_type = other DNA
atgacaacagagaaatctctagtcactgaagccgaaaacagtcagcatcagcagaaagaggaaggcgaagaagccattaacagcggtcagcaagaacctcagcaggaagagagctgccagacagctgccgaaggtgataactggtgtgagcagaagctgaaagcttcaaacggtgatacgcccacacatgaagatctaaccaaaaacaaggagagaacaagcgagagccgcggactctctcgcctcttcagttcttttctgaagaggcccaaatcccaggtttctgaagaggaggggaaagaagttgaaagcgacaaggagaaaggggaagggggtcagaaagagatcgaatttggcacaagtctcgacgaagaaatcattttgaaggctccaatcgctgccccagagccggagctaaagactgaccctagcttagacctccactcgctttcctccgccgagacccagccggcacaagaagaactacgcgaagaccccgatttcgaaattaaagagggtgagggactcgaagagtgcagcaagattgaagtaaaggaggaatccccccaaagcaaagcagagactgaacttaaggcatctcagaagcccatccgcaaacatcgcaacatgcattgtaaggtttccctgctggacgataccgtgtacgaatgtgtggtggaaaagcatgcgaagggacaggatcttctgaaacgggtgtgtgaacacttaaacctgctggaggaagattatttcggcctggccatttgggacaacgccaccagcaaaacgtggctcgattctgccaaagagattaaaaagcaggtacgcggagtgccttggaacttcacctttaatgtgaagttttacccgcctgaccctgcccagctgaccgaggatataacccgttattatctttgtttgcagctgaggcaggatattgtggccggaaggcttccctgcagtttcgccacgttagcacttctcggatcttacactatccagtctgaattgggagattacgacccagagcttcacggagtcgactacgtgtcagattttaaacttgccccaaaccagacgaaggaactggaagaaaaggtgatggagttgcacaagtcctatcgcagcatgacacccgctcaagcagatctggaatttctcgagaatgctaaaaagttatctatgtacggtgtcgatctgcacaaagccaaggatctggaaggagtggacattatcttgggcgtgtgtagcagtggtctgctcgtctataaagataaactgcgcattaatcggttcccttggcccaaggtcctaaaaatcagttacaaacgcagttcattctttatcaaaatacggccaggcgagcaagagcagtatgagagcaccatagggtttaaactgccctcctatagagctgccaaaaaactgtggaaggtctgcgtagagcaccacacgttcttccgactgacctccaccgacaccatcccgaaatccaagtttctggcgctcgggagcaagttccgatattccggacggacacaggctcagactaggcaggcttcggccttgatcgataggccagctcctcacttcgagaggaccgcaagtaaaagagctagtcgctcacttgatggggctgcggctgttgactcagcagatcgctctccgagaccaacaagtgcacccgcaatcactcagggtcaggtggccgaaggaggcgtcctggacgcatcagcaaaaaaaaccgttgtgcctaaggctcagaaagaaaccgtcaaagcagaagtcaaaaaggaggatgagcctcccgagcaagctgagcccgagccgacggaagcctggaagaagaagcgcgaaaggctagatggcgagaacatctatatccgccatagcaacctgatgctcgaagacctcgataaatcacaggaggaaattaagaagcaccatgcttcaatttcagagctgaagaaaaacttcatggaaagtgttccggagccccgaccatctgagtgggacaaacgcctatctactcattcgcctttccgcactctcaacatcaacggccagatccctactggcgagggtcctcctttggtaaaaactcagaccgttacaatctctgacaatgccaacgctgtgaagagcgaaattcccacaaaggatgtgccaatcgtgcacaccgaaacaaagacgatcacatatgaagccgcacagaccgacgacaactcaggggaccttgaccctggcgtgctgctcacggctcagaccataacatccgagaccccctccagtaccacaaccacacagattacaaagactgttaaaggcggtataagtgagactagaattgagaaacgcatcgtgattactggcgatgccgatatagatcacgaccaggtgcttgtccaagcgatcaaggaggcaaaagaacagcatcctgacatgagcgtgactaaggtagtggtgcaccaggaaaccgaaatcgctgatgagtag

SEQ ID NO: 222185 - DNA, 2484 bp, synthetic construct
  misc_feature 1..2484: note = Description of Artificial Sequence: Synthetic coding sequence
  source 1..2484: mol_type = other DNA
agggccagagcggctcggtctcaaaatgccgtgggaccggtgcccgcagctccttcacctgagaaaagcctggtaactgaagctgaaaactcccagcaccagcagaaagaggagggggaggaggccatcaactcggggcagcaggaaccgcagcaggaagagagttgtcagacggccgctgaaggtgacaattggtgcgagcagaagctgaaggcatctaatggggatacacccacccatgaggatctcaccaaaaacaaggagagaacctctgagagtcggggattgagtcggctgttttcatcctttttgaagcggccaaagtcacaggtgagcgaggaggaaggcaaagaagtagagagcgacaaagagaagggagaagggggtcagaaggaaatagaattcggcacctctctggacgaggaaattatcttgaaagctccaatagctgcaccagaacccgaactgaagaccgaccccagcctcgacttgcactcattgtcaagcgctgagactcagcccgctcaggaagaattgcgggaggacccagacttcgagatcaaggaaggcgagggcctagaggaatgtagcaagatagaagtgaaagaggagtcgcctcagagcaaggctgagaccgaattgaaagctagccagaaaccgattaggaaacacagaaacatgcattgtaaggtgagcctgctagatgataccgtgtacgaatgcgtcgtggaaaaacatgccaaggggcaggatctgctgaagagagtctgcgagcatctcaacctactggaggaggactacttcgggcttgcaatctgggataacgcaacatccaagacctggctggactccgctaaggaaatcaagaaacaggtccgcggtgtgccttggaacttcacattcaacgtaaagttctatcccccagaccccgctcagttgaccgaagacatcacacgatactatctctgtttgcagctgagacaggacattgtcgcgggtcgccttccatgcagcttcgctacactggcactcctgggctcctacacaattcagagcgaactgggcgactacgaccctgaactgcacggtgtagactacgttagcgacttcaaacttgcccctaaccaaacgaaggagcttgaagagaaggtgatggaacttcataagagctatcgatccatgactcctgcgcaagctgatctcgagttcctagagaacgccaagaagctgtctatgtatggcgtcgacctgcacaaagctaaagacttagaaggcgttgacattattctgggagtttgttcatcaggcctcttggtctacaaagataaactaagaattaaccggttcccttggccgaaagtcctcaagatctcttataaaagaagcagttttttcattaagatcaggcccggtgagcaggagcagtatgagtcaactattgggttcaaactgccttcatatcgtgcagccaaaaaactgtggaaagtctgcgtcgaacatcatacattttttcggttgactagcactgacaccatcccaaagtccaaattcctagctttaggctcaaaatttcggtactctgggcgaacccaagcccagacacggcaggcctctgccctgatcgaccgccctgctcctcactttgaaaggacagcaagtaagcgagcttccagatcactggatggcgctgctgcagtggattctgccgacaggtcccctcgccctacatccgctcccgcaattacccaaggacaggtggctgagggtggggtgctggatgcgagcgccaagaaaaccgtggttcccaaggcacagaaggagacggtcaaagctgaagtgaagaaagaggacgagccccctgaacaagcagaaccagaaccaaccgaagcgtggaaggatttggacaagagtcaggaagaaattaaaaagcaccatgcttcaatctccgaactgaaaaaaaacttcatggaatcagtgccagaaccccgtcccagcgagtgggacaaacggctttccactcacagtcctttcaggaccctgaacataaacggacagattccaacgggagaagggccacctctggtgaagactcagactgtaaccatttcagataacgcaaatgccgtcaaaagtgagatcccaacaaaagacgttccgatcgtgcacacagaaactaagaccattacttacgaggcagcacagaccgatgacaactcaggggacttggatcctggggtgctgctgacagcccagacaatcacttcggagaccccctcttccaccactaccactcagattacaaagacagtcaagggcggaatttctgagacaagaatcgaaaagcgcatagtgatcactggtgacgcagatatcgatcatgaccaggttctagtgcaggccatcaaggaggccaaggaacagcatcccgatatgagcgttaccaaggttgtagtacaccaggaaaccgagatagccgacgaatag

SEQ ID NO: 222186 - DNA, 2163 bp, synthetic construct
  misc_feature 1..2163: note = Description of Artificial Sequence: Synthetic coding sequence
  source 1..2163: mol_type = other DNA
atgacgacagaaaagtccctggtgaccgaggccgagaatagccagcatcagcaaaaagaggaaggcgaagaggcaataaatagcggacagcaggagcctcaacaagaggagtcatgccaaactgccgctgagggggataactggtgtgaacaaaagctaaaggctagtaatggagatacccctacacacgaggacctgaccaaaaacaaagagaggaccagtgaatccagggggctctccaggctcttttccagtttcctgaaaaggccaaagagccaagtttcagaggaagagggtaaagaggtagaaagcgataaggagaagggagaaggagggcagaaagagattgaattcggcactagcctggatgaggagattatcttgaaagcacccatcgccgctcccgaaccagaattaaagactgaccccagtttggatcttcactcactgagctcagccgaaacccagcctgcacaggaagagttgcgagaagaccccgacttcgagataaaggaaggggaggggcttgaagaatgttctaaaatcgaggtgaaagaggagtcgcctcagtctaaagctgaaaccgagctaaaagcaagccagaagcctatacggaaacatcggaacatgcattgtaaagtgtccttacttgacgatacagtttacgagtgtgtggtggagaaacatgccaaaggccaggacctgctcaaaagggtctgcgagcacctcaaccttcttgaggaggactactttgggctcgcaatatgggacaacgccacaagcaagacttggttggattcagcaaaagagataaagaagcaagtaagaggagtcccttggaattttacttttaatgtgaagttttaccctcccgaccccgctcagttgacggaggacataacgcgctattatctgtgtttgcagctgcgtcaggatattgttgcaggtcgattaccatgcagcttcgccacgctggccctcctgggctcctataccatccagtccgagctcggagactacgaccctgagctacatggagtggattacgtgagtgactttaagctggcccctaatcagacaaaggaactcgaggaaaaggtcatggaattacacaaatcttaccgttccatgacacccgcacaggcagaccttgagtttttggagaacgccaagaaactatccatgtacggcgtggatctccataaggctaaagatctggaaggtgtggacattatcttgggggtgtgctcaagcggacttctggtgtacaaggataagctgcgcattaatcggttcccatggcccaaggtgctgaaaatatcttacaagaggtcaagtttttttatcaaaataagaccaggcgagcaggaacagtatgagtcaacaatcgggtttaagttgccgtcctaccgggctgccaagaaactctggaaggtttgtgtagagcatcacaccttcttccgtctcacatctacggacaccatacccaagtcaaagttcctggcactagggtctaagtttcgctattccggacggacccaagctcagacgcgtcaggccagcgccttgattgatagacctgctcctcacttcgaaaggactgcaagcaagcgtgcatctaggtctctagacggagccgctgcggtcgactcggccgaccggtcaccccgtcccacctccgctcctgccatcactcaaggacaagtcgctgagggcggagtgttggatgcctcagcaaagaagactgtggtgcctaaagcccagaaggagactgtgaaggccgaagtgaaaaaagaggacgaaccccctgagcaggcagagcccgaacccacagaggcctggaaggtcgagaaaacccacatcgaggtgacagtgcctactagtaatggagatcagactcagaaaaagagggagcggttggacggtgaaaatatttacatacgtcattctaacctgatgctggaagatctggacaaatcccaagaagaaatcaagaaacatcacgcctcgatcagcgaactgaagaaaaatttcatggaatctgtgcctgaaccaagacccagtgagtgggataaacgtctaagcacacactcccccttcaggacgttaaatattaacggccagatacccacaggggagggggtctccaccctctctacctag

SEQ ID NO: 222187 - DNA, 2595 bp, synthetic construct
  misc_feature 1..2595: note = Description of Artificial Sequence: Synthetic coding sequence
  source 1..2595: mol_type = other DNA
atgaccaccgagaaaagtttggtgacagaagcggagaactcccagcatcagcagaaagaagaaggcgaggaggctattaactcagggcagcaggaaccacagcaggaagagtcctgtcagactgctgcagaaggagacaattggtgtgagcagaagcttaaagcctcaaatggtgatactcccacacatgaggacctcactaagaacaaagaacgaacatctgaatcacgtgggctctcccgtcttttttcatcttttttgaaacgaccaaaatcccaagtcagcgaagaggagggaaaagaggtagagtcggacaaggaaaaaggcgaaggaggccagaaggaaatcgaattcggcacctcccttgacgaggagataatcctgaaggcccctatagccgctcccgagccagaattgaaaaccgatccaagcctagaccttcactcgctgagttctgcggagactcagcctgctcaggaagaattgcgcgaggacccagattttgagatcaaggaaggtgagggactggaagagtgttctaagattgaggtgaaagaggagagcccacagagcaaggccgagacagagcttaaagccagtcagaaaccaatcaggaagcatagaaatatgcattgcaaggtatctctgttagacgacacggtgtatgaatgtgtggtggagaagcatgctaagggacaagacctgcttaaacgagtgtgcgagcatcttaatctgctcgaggaggattatttcgggctggccatctgggacaacgccacaagcaaaacatggctggactccgctaaagaaatcaagaagcaggtgcgaggcgtcccttggaatttcacttttaacgtcaaattttaccccccagaccccgcacagctgacagaagatatcaccaggtactacctgtgtctccaactccggcaggacattgttgccggacgtctgccttgcagcttcgctactcttgctctactcggaagctatacaattcagtcagagctcggcgactacgatcccgagctgcacggcgttgattatgtatctgactttaaactggcacctaaccagactaaagaacttgaggagaaagtcatggagcttcataagagctatcgcagcatgacacctgctcaggctgacctggagttcctcgaaaatgccaagaaacttagcatgtatggtgtcgatcttcataaagctaaagatctggagggcgtggacatcatactgggtgtgtgtagcagtggcctgctcgtttacaaagataaactgaggattaaccggttcccctggccaaaggtgctgaaaatttcttataagcgcagctcctttttcataaaaatccgtccaggggaacaagaacagtatgagagcactattgggtttaagctgcccagctatcgcgctgcaaagaagctgtggaaagtgtgcgtggagcaccatacatttttccgcctcacgtccactgacaccatcccaaagagtaagtttctcgcacttggatccaagtttagatactccggtcgcacccaggcccagacccgacaagcaagcgcactaatcgaccgccctgcaccccacttcgagagaaccgcatcaaagcgggcttcccgctcactcgatggggcagccgcagtcgactccgccgatagaagcccaagacccacctccgccccagctatcacacaagggcaagtggcagagggcggtgtactcgacgcctccgcaaaaaagacggtagtgcccaaagcacaaaaagagactgtcaaagctgaggtaaagaaggaggacgaacccccagagcaggcggagcccgaacctaccgaggcatggaaggtcgagaagacccatattgaagtgacagttccaacctcaaacggggaccaaacacagaagctagccgagaagactgaggatctgattagaatgcggaaaaaaaaacgcgaacgcctagatggtgagaatatctacatccgtcatagtaatttgatgttagaggatctggacaagtcccaggaagaaatcaaaaaacaccatgcatccatctcagagctcaagaaaaacttcatggaatccgtgcccgaacccagacctagcgagtgggacaaacgcttgtccacacactccccgtttcgcacactcaatattaatggccagatcccaacgggggaaggcccacccctcgtgaaaactcagacagtgacaatctcagataacgccaatgccgtcaagtccgaaattcctacgaaggacgtacccatagtacacacagagacaaaaaccatcacatacgaggccgctcagacagacgacaacagtggtgacttagacccgggagtactcctgacagctcagactataaccagtgaaaccccgagcagcacaacgaccacccagatcaccaagaccgtgaagggtggcattagtgaaactagaatagagaagaggatcgtcattacaggtgacgctgacatcgatcatgaccaggtattggtgcaggctataaaagaggcaaaggaacaacaccccgatatgtccgtgacgaaggtggtggtgcaccaggaaacagagattgctgatgagtag

SEQ ID NO: 222188 - DNA, 1767 bp, synthetic construct
  misc_feature 1..1767: note = Description of Artificial Sequence: Synthetic coding sequence
  source 1..1767: mol_type = other DNA
atgcattgtaaggtttctctgctcgacgacaccgtatatgagtgtgtggtggaaaagcatgccaaaggtcaagacctgctgaaacgtgtttgcgagcacctgaatctgttagaggaggactactttggattggcaatttgggacaacgcaactagcaagacctggctggatagcgctaaggagatcaaaaagcaggtccgcggtgtgccttggaatttcaccttcaacgtgaagttttacccccctgatcctgcccagctgacagaagatatcacccgctactacctgtgcctgcagcttcgccaggacatcgtggctgggaggttgccatgttcttttgccacattggccctgcttggcagctatacaattcagtcagaactcggagactatgaccctgagttacatggggtagattacgtgtctgatttcaagcttgccccaaaccaaaccaaagagctggaagaaaaagtcatggagctgcacaagtcctacagaagcatgaccccagcccaagccgatttagaatttctggaaaatgccaagaaactgagcatgtacggggtcgacttgcacaaagcaaaagacctggagggcgttgacattattctcggcgtctgtagctccggcctcctggtgtataaggataagcttcggattaaccggttcccttggcccaaggtgctcaaaatttcttacaaaagaagcagttttttcataaagatacgcccaggtgaacaagagcagtacgagtctacaatcgggttcaagttacctagctatcgcgctgctaaaaaactgtggaaggtctgtgtagagcatcacacgttctttagactcacctcaactgacaccattccgaagagtaaatttcttgctcttggctctaagtttcgctactccggccgaacccaggcccaaacacggcaggccagcgcgttaattgatcggccagcgccacatttcgagaggactgcctccaaacgagcttcccgctccctggacggtgctgccgcagtagatagcgcggaccgatcccccaggccaacttccgctcccgcaatcacccaggggcaagtcgccgaggggggagtgctggacgccagcgcaaaaaagaccgtggtccctaaagcccaaaaagagaccgttaaggccgaggtaaagaaggaggacgagccaccagaacaagcagagcccgagcctacagaagcatggaaaaagaaacgggagcgcctggacggcgaaaatatttatatcaggcattccaacttgatgctggaggacctcgataagtcccaggaagaaattaaaaagcatcacgctagtatcagcgaactgaaaaagaacttcatggagagtgtcccggaaccacggccttccgagtgggacaagagattgtctacacactcaccgttcagaacactcaacatcaatggacagatccccacaggggagggaccgcctcttgtaaaaacgcaaacagtcactataagtgacaacgctaatgcggttaaatcagagattccaaccaaggacgtgcccattgtccacactgagaccaagactataacctacgaagccgctcagactgtgaaaggcggtattagtgaaactagaatcgagaagagaatagtaatcaccggagacgccgacatcgatcacgatcaagttttggtccaggccatcaaggaagccaaggagcagcatccagacatgtctgtgactaaagtggtcgtccatcaggaaacggagatagccgatgaatag

SEQ ID NO: 222189 - DNA, 2115 bp, synthetic construct
  misc_feature 1..2115: note = Description of Artificial Sequence: Synthetic coding sequence
  source 1..2115: mol_type = other DNA
atgaccaccgagaaatcgcttgtgacagaggctgagaattcccagcaccagcagaaagaggaaggagaagaggcgatcaactccggccagcaggaaccacaacaggaggagtcttgtcaaacagccgcagaaggtgacaattggtgtgagcagaaactgaaggcgagcaatggggacaccccaacacacgaagatctcacaaagaacaaagagagaacctccgagtcacggggattgtcccgactgttcagcagttttctgaagaggcccaaatcacaggtaagcgaagaggaaggcaaggaggtggagtccgataaagagaaaggcgaagggggacagaaagaaatagagtttggtaccagtcttgatgaggagattattctgaaggctcctattgccgctccggaacctgagctgaaaacagaccctagcctcgatctgcatagtctttccagtgccgagacccagacttggctggatagcgccaaagagattaaaaaacaggtgcgcggagtcccttggaacttcacatttaacgtgaagttttatcctcctgatcctgcacagctcacggaagacataactaggtattatctgtgtctgcagctgcgccaagacatagtagccggtcgccttccctgtagcttcgcaacactggccctcctgggatcctatactattcagagtgagttaggtgattacgaccctgagctgcatggggtcgactacgtgagcgactttaagttagcacccaaccagacaaaagagctggaagaaaaggtgatggaactccataagagttatcgttcaatgacccctgcccaggccgacctggaattcctggagaacgcaaaaaagttgagtatgtacggcgtggacctccacaaagcaaaggacttagagggagttgacattattctgggggtctgttcttctgggctgctggtgtataaagacaagttgagaattaacaggtttccatggcctaaggtcctgaaaatttcttataagcgcagttccttcttcattaagatccgccctggtgaacaggagcagtacgagtctaccattgggttcaaactccctagttatagggcagcaaagaaattgtggaaagtttgcgtggaacatcatacattttttagactgacttccaccgatacaatacctaagtcaaagttcctagctcttggatccaagtttcgttacagtggcagaactcaagctcagacgaggcaagcctcagccctcattgataggcccgctcctcacttcgagaggactgcctcgaagagggcaagcaggtctctggacggcgctgccgcagttgattccgccgaccgctcccccaggccgacgagcgcaccggctatcactcagggacaggtcgcagaaggtggcgtactcgatgcctcggcaaaaaagactgtcgtccccaaagcccagaaggaaaccgtcaaagctgaggtaaaaaaagaggatgagcctcctgagcaggccgaacccgaaccaactgaagcctggaaggacctcgataaaagccaggaagagattaagaagcaccacgcaagcattagcgaactgaagaagaatttcatggagtctgttccagagcccaggccctctgagtgggataaaagactttccacccattcaccgtttagaacacttaacattaatggacaaattccaacaggtgagggaccacctttggttaagacccaaacagtaacaatcagcgacaacgccaatgctgtgaagagcgagattcctactaaggatgtcccaatcgttcatacagaaacaaagactattacctatgaggccgcacaaacagacgacaattcgggagacttggacccgggagtgttgttgacagcccaaacgatcactagcgagactccttcatcaacaaccacgacccagatcacgaagactgtgaaagggggtatttccgagactcgtatcgagaaacgtattgtcattacaggagacgcagacattgaccacgatcaggtgctggttcaagccataaaggaggcaaaggagcagcatcctgatatgagtgtgacaaaagtggtggtccaccaggagaccgagatcgccgacgagtag

SEQ ID NO: 222190 - DNA, 2304 bp, synthetic construct
  misc_feature 1..2304: note = Description of Artificial Sequence: Synthetic coding sequence
  source 1..2304: mol_type = other DNA
atgaccaccgagaaatcactagtgaccgaagccgagaactctcaacaccagcaaaaggaagagggggaagaagcaatcaatagcggccaacaagaacctcagcaggaggagagctgtcagaccgctgccgagggagacaattggtgcgaacagaaattgaaggcaagtaacggggatacacccacccatgaggacctcacaaaaaacaaagagaggacaagtgagtcaagaggactgtcccgcctgtttagctccttcctgaaaaggcctaagtcccaggtgagcgaggaagagggcaaagaagtagaatcggacaaggagaaaggcgaagggggtcaaaaagagatcgaatttgggacaagtttggatgaagaaatcatcctgaaggccccaatagcagcacccgaacctgagctaaaaactgacccaagcctggacctccactctctcagcagcgcggaaacccagccagcccaggaggaactgcgggaggatcctgatttcgagatcaaggaaggtgagggcctggaagaatgtagcaagattgaagtgaaggaagaatcaccacagagcaaagccgagactgaactgaaagcatctcagaaacccatcagaaaacatcgcaatatgcactgcaaggtctcacttctcgacgacaccgtatatgaatgtgtagtggaaaaacatgctaagggacaagacctactcaaaagagtgtgcgaacatctaaatctcttggaagaggactacttcggcctggctatctgggacaacgcaacaagtaagacctggctggatagcgccaaagaaataaagaagcaggtgcgcggtgttccttggaattttacttttaacgtcaagttctacccaccagaccccgctcagctaaccgaggacataacgagatactacctgtgcctgcagctgcgccaagatattgtggcaggaaggttgccatgcagttttgccaccctcgctctcttgggcagctacaccatacaatctgaacttggtgactatgatccagaactgcatggagtggactatgtcagtgatttcaagctggcccctaaccagacgaaggaactagaagagaaagttatggagttgcacaagagctacagaagcatgacccccgcacaggcagatctggagttcttagagaatgccaaaaagctgtctatgtatggcgtcgatctgcacaaagccaaggatctcgaaggcgttgatattattttgggtgtgtgcagctccggtctgttggtgtataaggataaactccgcatcaatagatttccatggccgaaggtattgaagatcagctataaacggagttctttttttattaagatccggcctggcgagcaagagcaatacgaatcaaccatcggcttcaagctcccttcctaccgagctgctaaaaagctgtggaaggtgtgtgtcgaacaccacactttctttagacttacttcgactgatacgattcccaagtctaaatttctggctctcggatccaagttccgctactcaggcagaacgcaggcccagaccaggcaggccagtgctcttattgatcgtccagcaccacactttgagaggaccgccagcaagagggcttccaggagcctagatggagccgctgctgtagattccgcagatcggtctcccagacctacttcggctcccgcaattacccagggacaagtggccgaaggaggcgtcttggatgcatctgcgaagaagaccgtcgtgcctaaagctcagaaggagacggtcaaagcggaagtgaaaaaagaggatgaaccgcctgagcaggccgagcctgagcctaccgaggcgtggaaggacctggacaaatcccaggaggaaattaagaagcaccacgcctctatatcggagcttaagaagaactttatggagagcgttccagaaccgagaccatccgaatgggacaaacgcttgagcactcacagtccctttaggaccctgaatataaatgggcagattccaaccggggaaggcacggatgacaattcaggggatctggatcctggggtcttgctcaccgcccagacaataaccagcgagaccccttcttccacaacaacaactcagattactaaaacagtcaaaggcggaatttctgaaacccgcatcgaaaagcgcattgtgatcaccggcgatgccgacatcgaccatgaccaggtgttggtgcaggccataaaggaagccaaagagcagcaccccgatatgagcgtaacaaaggtcgttgtgcaccaggagactgagatcgccgatgagtag

SEQ ID NO: 222191 - DNA, 2145 bp, synthetic construct
  misc_feature 1..2145: note = Description of Artificial Sequence: Synthetic coding sequence
  source 1..2145: mol_type = other DNA
atgactactgagaaatccctcgtgacggaagcagagaacagccagcaccagcagaaagaggagggggaagaagcaattaattccggacagcaggaacctcagcaggaagagagttgccagactgccgctgaaggggacaactggtgtgagcagaagctgaaggcctccaatggagacacccctactcatgaggatctgacaaagaataaagaaaggacctctgagtcaagggggttgagtaggcttttctcctcatttttaaagaggccaaaatctcaggtatcggaagaagaggggaaggaagtggagagcgacaaggagaagggcgaaggcggtcagaaggagattgagtttgggacaagcctggacgaggagattattttgaaggctccgatcgccgctccagaaccggaactgaagactgatccaagtctcgatctacactctttgtccagtgctgaaacccaaccggctcaggaggaactgagggaagaccccgattttgagatcaaggagggggaaggactagaagagtgtagtaagatagaagtgaaggaggaaagccctcagtccaaagccgaaactgagctgaaagccagccagaagcccattcgaaagcacaggaacatgcactgtaaggtgtcactgctggacgacactgtgtatgagtgcgtggttgaaaagcacgccaaaggccaagacctcttaaaacgagtttgtgagcacctgaacttattggaagaggattacttcgggctggccatttgggacaatgcaacatcaaagacctggctcgatagtgccaaagagattaagaagcaggtcagaggcgtcccatggaatttcactttcaacgtcaagttttacccgccagaccccgcacagttgaccgaggacattactaggtattacctctgtctacaactgcgacaggacatagttgccggacgtctcccttgctcatttgcaactctggcgctactaggcagctacacaatccagtccgagcttggggattatgaccccgagctgcacggagtggattatgtgtcagatttcaaactcgccccaaatcaaactaaggagcttgaagagaaagtgatggagttgcacaagagttataggtctatgacacctgctcaggcagacttggaatttctggagaatgcgaagaaactctcaatgtatggcgtggatttacacaaagctaaggacttggagggagtggatataatcctgggagtctgttcaagtgggctcctggtgtataaggataaattgcgtattaaccgattcccatggcctaaggtacttaagatttcttataaacgcagttcatttttcattaagatacggccaggcgagcaagagcagtatgagtctacaatcggtttcaaactgccaagctatagggctgccaagaagctgtggaaggtgtgtgtcgagcatcacaccttcttccgcctcacttctacagacacaattccaaaatccaagtttctggctttggggtccaaatttaggtacagcggacggacccaggctcagacgcggcaggctagcgcacttattgaccgcccagccccacacttcgagaggacagcgtcgaagagagcctctaggtcattagacggcgcagctgcagtcgacagcgccgatcgatcacctaggccaactagtgctccagctatcacacaggggcaggtggcagagggtggcgttctggatgcctccgcgaagaagaccgtggttcccaaggcacagaaggagacggtgaaagcggaagtcaaaaaagaggatgaaccgcctgagcaagcagaacccgaaccaaccgaagcatggaaggtggaaaagacacacatagaggtgaccgtccctacctccaatggcgaccagacgcagaagaagagagagagactggacggtgagaatatctacataagacattccaatctcatgctcgaagatttggacaaatcccaggaagagatcaagaagcaccatgcctctatctcagaacttaagaagaacttcatggaatcagttccagaacctcgccctagcgagtgggacaaacggctgtcaacccacagtccattccggacactaaatattaacgggcagattccaaccggtgaaggatag

SEQ ID NO: 222192 - DNA, 2061 bp, synthetic construct
  misc_feature 1..2061: note = Description of Artificial Sequence: Synthetic coding sequence
  source 1..2061: mol_type = other DNA
atgggctgcttttgcgccgttcccgaggagttttattgcgaagtactgcttctcgacgagagtaagttaacacttaccactcagcagcagggaatcaagaagtcaacaaagggttccgtggtgctggatcacgtcttccatcacgttaacctggtagagatcgactacttcgggttgagatactgcgatcggtcacaccagacctactggctagatcctgcgaaaacgttagcggagcacaaagagttgattaacactggcccaccctacactctctacttcggcattaaattctacgcagaagacccttgcaaactcaaggaagaaatcaccaggtatcaattttttcttcaggtgaagcaggatgtgctacaaggtcgcttaccgtgccctgttaatacggctgcgcagctaggcgcttacgccattcagagcgagctgggcgattacgacccttataaacacacagcgggttatgtaagtgaatatagatttgttccagatcagaaagaggagctggaggaagccatcgagcgcattcacaagactctgatgggacaaatcccatcagaggcggaactgaactacttacgaaccgctaagagcctcgaaatgtatggcgtagacctacaccctgtgtatggagaaaataagtcagagtatttcctcggactgaccccagtcggggtggtcgtttacaaaaataaaaagcaggtgggcaagtacttctggccaagaatcacaaaagtgcactttaaagagacccagtttgagctgagagtgttaggcaaggactgcaatgagactagcttcttttttgaggctaggtccaagactgcttgcaagcacttgtggaagtgctcagtcgagcaccatactttttttcggatgcccgaaaacgagagcaattccctcagccggaagctttcgaaatttggctccattcgctataaacaccgctacagtggtcggacagctctacaaatgagtcgggatctctcaattcaattgccaaggcctgaccagaacgtgacacggagccggagcaaaacctaccccaaacgaattgctcaaacccagcccgcagagtcaaactccatctcacgcattacagctaacatggaaaacggcgaaaacgaaggtaccattaagattatcgcgccttccccagtgaaatcatttaagaaggcgaaaaacgagaactctccggacacacagcgtagtaaatctcacgctccttgggaggaaaacgggccacaatctggcctgtacaactcacctagtgataggaccaagagtccgaagttcccgtacacccgcaggaggaatccctcctgcggcagcgacaacgatagtgttcagccggtgcggcgtaggaaagcccacaattccggggaagattccgaccttaagcagaggcggcgatctcgctccagatgcaacacatccagcgggagcgagagcgagaactcaaacagagagtatcggaaaaaacggaaccgcattcgtcaggaaaacgacatggtggactcagcccctcagtgggaagccgtgctgagaagacaaaaggaaaaaaaccaagctgacccaaataatagacgctcccgccatcgctcacgcagccggtctcctgatattcaggcaaaggaggaactctggaaacatattcagaaggagctcgtcgatccctctggtttgtcggaggagcaactgaaggagataccctatactaagatcgagactcagggcgatcctattaggattcgacatagccacagccccaggtcttaccgccaatataggcggtcacagtgttctgatggtgaacgtagtgtgctctcagaggttaactcaaagactgacctcgtaccccctcttcctgttaccaggtcgtctgacgcgcaggggtccggagacgcaaccgttcaccagcgcaggaatgggagcaaagattccctaatggaagaaaaacctcagacttctactaataatctggccggtaaacatacggccaaaactattaaaaccattcaggcgtcaagactgaaaactgaaacatag

SEQ ID NO: 222193 - DNA, 1836 bp, synthetic construct
  misc_feature 1..1836: note = Description of Artificial Sequence: Synthetic coding sequence
  source 1..1836: mol_type = other DNA
atggatttcaagaaatcaaagctgacattggtggtggtcgaggatgacgaccaggggcgagagcaggaacatacttttgtgtttagactggacagcgcgcgtacctgcaagcatctctggaagtgcgcagtggaacaccacgccttttttcgcctgcgaaccccgggaaatagcaagtcaaacaggagtgatttcattcgcctaggctctaggttcaggttctctggacggactgaataccaggcgacacatgggtcccgcctcaggaggacttccaccttcgagcgcaagccctccaaaaggtatccctcgaggagacactccacttttaaagctagcaaccccgtcatcgccgctcaactgtgttccaaaacgaatcccgaggttcataactatcagccccagtatcatccgaacattcatccgagccagccaaggtggcacccccactcgccgaatgtgtcctatccgttgcccagccctgtccttagttctagtgatcgcctccctttcggaatagaggagaatggcggtaccccttttctaaccgccgcaagtggaagacaccatcaccagcaccagcaccaacaccagcaccaacaccacagcaactactcactgagcctgactctggagaataaggaagggccacttcggagcccgaacagctcctctaagtccctcactaagctgtcccccggaacccctgccctgttcagcgaggctgcagctcacttgaaaaagctggaattggaaactgtaaaagcagctggtccatggcctcccctgcacattaatattaataaggctgaagaaaagaaggtgtccgaaaagacacttcaaacacctttgctgccctcaccagtagcagatcacgtgaagtgtaatatattgaaagcacagctcgagaatgcgtcaagagtaaatatccaagggggaaaggaggagagcccttttgtcaacatcaacaagaagagcagcttacaagacgcgagcgttagatcacctattcccatacgtgtggaaacagctcagcctgcggtcgaaaaacctgaaatcaaacccccacgggtgcgtaagttgaccagacaatactccttcgatgaagatgacctgccacccgatcttgcggaagctgtgggtgtgactacttcaacaacaaccaacaccacgacagcggctactcaggtcagcgtgccactcccaagtcctaaagtccaaaacgtatcaagtcctcataagtccgaggggaaggggcttctgtccccgggagcaaagtcgccctccgatagaggcggagcgtttacattagaacccggagacctgcttatggatttcacagaggccactccactggctgaacccgctagtaatccgcactgcgcacactccagatgcagccctcccttgtcacttcccatgaaagaagagacaaccggagtttgcatgtatcccccaataaaaacaagacttatcaaaacattcccagtcgacacaatgaatccctttcccgacactttcacaacagggcctcaatttaccgccgacttcagagatagtaaactccagtgttgccctggcccaacaagtccactgatccctgccgcaacactgcgaccgctgaccgagactgtgcacagtgccgaccaccttcatcacccggagacatgctttagcggaagccagtgtcgcgatacccctgctggcaccggtgagcgcgaggatgatgaaaagacggtagatgacaggaccgtcaagtttagcccctgtcacctggaggacggaatggtaccgtccgtgcggctgctgtcctctggattcgtctgttccctgtag

SEQ ID NO: 222194 - DNA, 1323 bp, synthetic construct
  misc_feature 1..1323: note = Description of Artificial Sequence: Synthetic coding sequence
  source 1..1323: mol_type = other DNA
atgaaattcttgcttatcaaggatgccccagggaaaaagaaacggaagaacctgatgctgagtttcaaaagaaagcatgcgaaggggcaggaccttttcgaccagattgtgtaccatctggatctcgtggagaccgattactttggcttgcaattcctagactctgcccaggttgcgcactggctcgaccacgcaaagccgattaagaagcagatgaagatcgggcctgcctacgccttgcatttcagagtcaagtactattcgagcgagccaaacaatttacgcgaggaattcacccggtatctgtttgttcttcagttaaggcatgatattctgtctggtaagctgaagtgtccttatgagactgcagtggagctggcggcactgtgtctccaggcagaactgggcgaatgcgagctacccgagcatactccagaattggtgtccgaatttaggttcatcccgaaccagacagaggccatggaattcgacattttccagcggtggaaggagtgtagagggaagagcccagcccaggccgagttgtcttacctgaataaggccaaatggctggaaatgtatggcgtcgatatgcacgtcgtccgaggtagagatggatgtgaatattccctgggcctgacccctaccggcatccttatctttgagggcgctaataaaatcggccttttcttctggccaaaaattactaaaatggactttaagaagtccaagctgaccttggtggtcgtagaggatgacgaccagggcagagaacaagaacatacgttcgtgttccgcctagattctgcacggacatgcaagcacttatggaagtgtgccgtggaacatcacgcgttttttcgactacgcacacccggaaactcaaagagtaacagaagcgatttcatccgcttaggaagccgctttcggttcagcggtcgaactgaatatcaggccacacacggcagccggttgcgacggacctcaaccttcgagcggaagccctctaagcgataccctagtagaaggcactcaaccttcaaggctagcaatccagttatcgcagcgcagctgtgcagcaaaacaaacccggaagtgcacaattaccagccccagtaccaccctaacatccatcctagtcagccacgttggcacccccacagcccaaacgtcaggccctcttttcaggatgatagaagccactggaaagcaagcgccagtggagatgacagccatttcgattatgttcacgatcagaatcagaaaaatcttgggggtatgcagtcaatgatgtatagagacaagctcatgaccgctctgtag

SEQ ID NO: 222195 - DNA, 1557 bp, synthetic construct
  misc_feature 1..1557: note = Description of Artificial Sequence: Synthetic coding sequence
  source 1..1557: mol_type = other DNA
atgctgcgtttcctgaggcgcaccttcgggaggcggtctatgcaacggtacgctagaggcgctgcaggtagaggagctgctggcttaggtgacgaaagggatggcggtccacgcggtggtccagctgcagccgcaagttctagcgccctgcccgcagcaccaggcggaagcgtgttccccgcaggcggtgggccactccttaccgggggtgccgctgttcacatttcagcagccggagcggcaaaagctacattatactgtcgggtttttttgctcgatggcaccgaagtctctgtggacctcccaaagcatgctaaaggacaggacttgttcgatcagatcgtctaccatttggaccttgtggaaacggactactttggactccagttcctggactctgcacaagtagcccattggctggatcatgccaaaccaattaagaagcagatgaaaatcgggcctgcatacgctctccacttcagggtcaaatattattcaagcgagcccaataacctgcgggaggaattcactcggtacctgttcgtgctccaattgaggcatgacatcctttcaggtaagctcaaatgcccctatgaaactgcggtagaattagccgcactgtgcctgcaggcagagttaggcgagtgtgaactgcctgaacacacccctgaacttgtttccgaattccgtttcataccgaatcagacggaagctatggaatttgatatcttccagcgctggaaagaatgcagagggaaatctcctgcgcaggctgagctcagttatctcaacaaggccaagtggctggagatgtatggggtggacatgcatgtagtgagagggagagatggatgcgagtacagcttggggctcacccctaccggtatcctaatatttgagggggctaacaaaattggactgtttttttggccaaagataactaaaatggatttcaagaagtccaagctcactctggtggtggtggaagatgacgaccagggaagagaacaggaacacaccttcgtgtttagactggattctgctagaacgtgtaaacatttatggaagtgcgccgtggaacatcacgcttttttcagactcagaacccctggaaactcaaaaagcaatagatcggactttatacgccttgggtctcgatttaggttttccggccgtacagaataccaggccacccacggttcccggttgagacgaaccagtactttcgaaaggaaaccatctaagcggtatccctcacgcagacactccacttttaaagcgagtaacccagtcatcgccgctcaattgtgttcaaaaaccaatcccgaagtgcacaattatcagccccagtatcatcccaacatacaccccagccagcccagatggcaccctcattctccgaatgtgcgccctagtttccaggatgacaggtctcattggaaagcatcagcctccggcgacgactcgcatttcgactacgtacacgatcagaatcagaagaaccttgggggaatgcagtcaatgatgtacagagataaactcatgactgccttgtag

SEQ ID NO: 222196 - DNA, 2703 bp, synthetic construct
  misc_feature 1..2703: note = Description of Artificial Sequence: Synthetic coding sequence
  source 1..2703: mol_type = other DNA
atgttgaggttcctccgcaggaccttcggtaggcgctcaatgcagaggtatgcaagaggtgctgcgggacgcggtgctgccggtctgggcgacgagcgggacggaggccctcggggaggacccgctgcggcagcatcctccagtgccttaccagcggcacccggaggatcagtgttccccgctggaggtggaccactcctgacaggtggcgctgcagtccacattagcgcagctggggctgcgaaggcaaccctctattgtcgcgtttttctgctcgatgggacagaggtctctgttgacctgcccaaacacgccaaaggccaggatttgtttgatcagatcgtctaccacttagatctggtggagaccgactattttggcttgcagttcctggatagtgcccaggtggctcactggctggatcacgctaaacctattaagaagcagatgaagatcggacctgcctatgcactgcatttcagagttaaatattactctagcgagcccaacaatctgcgagaggagttcacacgttaccttttcgtgctgcagctaagacacgacatcctctcagggaagctcaaatgtccctatgaaactgcggttgagttggccgcactgtgtctacaggctgagctcggcgaatgtgaactccccgaacatactccagaactggtatctgaatttcgatttatcccaaatcagaccgaagccatggagtttgatatattccaacggtggaaagagtgtcgcggaaagagccccgctcaggcggagctctcctatttgaacaaggctaagtggcttgagatgtatggcgttgacatgcacgtcgtgcggggtagggatggttgtgagtactccttggggctcacaccaacaggaattctgatttttgagggggcaaataagatagggctgtttttctggcccaaaatcacaaagatggacttcaaaaagagtaaactgactctagtcgtggtggaagacgacgaccagggaagagaacaagagcacaccttcgtctttcgcttagactctgcccgaacgtgcaagcacctctggaaatgtgctgttgaacatcatgccttcttccgtctgagaactccaggtaactccaaatcaaatagatccgatttcatcaggttgggttctagatttaggttctccggtcgcaccgagtaccaagctacacacggctctagactccggagaacaagcacattcgagagaaagccgtccaaaagatacccaagcagacgccacagcactttcaaggcctccaacccggtgatcgctgcccagctgtgtagcaagacaaatccagaagttcacaactatcaacctcaataccacccaaacatccaccccagccagcctcggtggcatccccactcgcctaacgtgagttatccccttccttctcccgttttgtcgagctctgacaggctgccatttggcatagaagagaacggagggactccgtttctgacggctgcgtctgggagacaccaccatcagcatcagcaccagcatcagcatcaacatcactctaattacagcttaagtctaaccttggagaacaaggagggacctttgagaagcccgaatagtagctctaaatccctcaccaagctgagtccgggtactcccgcactcttctcagaagccgcagcccacctgaaaaaacttgaattggaaaccgtcaaggctgctgggccatggccccctctgcacataaatattaacaaggccgaggagaagaaggtttcagagaaaacactgcagacacccctgttgcctagcccggtcgctgatcacgtaaaatgcaacatactgaaggcacagctcgagaatgcttctcgggtcaatatccaaggcggaaaggaagagagcccttttgtgaatatcaacaagaagtcctccctgcaggacgcatccgtccgatcccctatacccatacgcgtggaaacggcacagcctgcagtggaaaaaccagagatcaaacccccacgagtaaggaagctgaccaggcagtattcattcgatgaggacgacttaccgccagaccttgctgaagcagttggggttacaacatcaacaactacaaacaccacaaccgcagccacacaggtgagcgtccctctcccatctcccaaggttcagaatgtgtcctccccacataagtctgaggggaagggccttctgagccccggagctaagtctcccagcgatcgaggcggagcatttaccctagagccgggtgacctcctcatggatttcaccgaagccacccctcttgcagagcccgcatccaatccccattgcgcacattctcgatgctcaccaccgctgagcctcccaatgaaggaggagacgaccggagtgtgtatgtatccccctatcaaaaccaggctgatcaagacgtttcccgtggatacaatgaatccgttccccgatacgttcaccacaggaccccagtttacggcggacttcagagattccaaattgcagtgctgccccggtcctacgtcccctttaatacctgccgcaacactgagacccctcacagagacagtgagtaccgtccagaccatctacaccactaggaaacctgtaagcttggccgcaagtgccgagacactcaggcaggaactcgagagagagaagatgatgaaaaggctccttatgaccgaattgtag

SEQ ID NO: 222197 - DNA, 2202 bp, synthetic construct
  misc_feature 1..2202: note = Description of Artificial Sequence: Synthetic coding sequence
  source 1..2202: mol_type = other DNA
atgttgtccttcttccggcgtacactcggacggcgatccatgaggaaacacgcagaaaaggagcgcctcagagaagcccagagggccgctacccatatcccagccgcaggggactcaaaaagtattattacctgccgcgtgagcttgctcgatggtacagatgtttctgttgatttgcctaaaaaggctaaagggcaggaattattcgatcagattatgtaccatttggatctaatcgaatcagactattttgggctgaggtttatggactccgcccaggtggcacactggctggacgggaccaagtccatcaaaaagcaggtgaaaataggcagtccctattgccttcacctccgggtgaagttctacagcagcgagccaaacaacctgagagaggagctgacccgttacctatttgtgctccagctgaaacaggacatccttagcgggaaattggactgccctttcgataccgccgtgcagttagccgcatacaacttacaggccgagcttggagactacgatctcgcggaacattccccagagctggtctcggaattccgctttgtgcctattcagaccgaagaaatggaactcgctatctttgagaaatggaaagaataccggggtcagaccccagcccaggcagaaaccaactatctaaacaaggctaagtggctagagatgtacggagtagatatgcatgttgtaaaggcgcgtgatggcaatgactactccctaggtctaaccccgactggggtgcttgtcttcgagggcgatactaaaattggcctgtttttttggccaaagatcactcgattagacttcaaaaagaacaagttgacactggtggtcgtagaggacgacgatcagggaaaggaacaagaacataccttcgtgtttagacttgaccatcctaaggcctgtaagcacctgtggaaatgtgccgtggagcatcatgcgttcttccggctcagggggccagtacagaagtcaagccatagaagcggatttatcagactcggatcgcggttccgatatagcggaaagacagaataccagacgacaaagacaaataaggctcggagatccaccagctttgagaggaggccaagtaagaggtacagcagacgtacgcttcagatgaaggcgtgcgccaccaagcctgaggagctttctgtgcacaataacgtctccacccagtcaaatgggagccaacaggcatggggaatgcggtctgctcttcccgtatcccctagcatttcatccgccccagtgcccgtggagatcgagaacctgccccaaagccctggtaccgatcagcacgacagaaagtgtattccactgaatatcgacctgctgaactcacccgacctgctcgaagctaccatcggcgacgtgatcggggcatctgacaccatggagacatctcaggcccttaacgacgtcaatgtggcgactaggctgcctggcctaggtgaacctgaggtcgagtatgagacactaaaagatacctccgagaaattgaaacagctggaaatggaaaacagcccactgctcagtcccagatctaatattgacgtcaatatcaactctcaagaggaggtcgtcaaacttacagaaaaatgtctcaataatgtgatcgaatctccgggattgaatgttatgagggtcccacccgactttaaaagcaacattttgaaggcccaggtagaagccgtccataaggtgaccaaggaggattcactactcagccacaagaacgcaaacgttcaagacgccgctaccaattccgcagttctcaatgaaaataatgttcctctgcccaaggaatcactggagacactcatgcttatcaccccagctgactctggaagtgttctcaaggaggccaccgatgagctggatgcccttctggcatcccttactgagaatctgatcgaccatactgtagctccccaggtaagctctacttcgatgattactcctcgatggatcgtgccgcagtccggtgccatgtctaatgggttggctgggtgtgaaatgttattaaccggcaaggagggccatgggaataaggacggcatttccttgatcagccctccggcacctttcctcgtggacgctgtgaccagtagcggccctattctggccgaagaggccgttctaaagcagaaatgcctcctgactaccgaactctag

SEQ ID NO: 222198 - DNA, 1518 bp, synthetic construct
  misc_feature 1..1518: note = Description of Artificial Sequence: Synthetic coding sequence
  source 1..1518: mol_type = other DNA
atgctttccttctttagaagaactctaggtcgcagaagtatgcgcaagcatgctgagaaggagcggctgcgcgaagcccagagggccgctacgcacattccggcagcaggcgactccaagtcgatcataacgtgtcgcgtctcccttctggacggaactgacgtaagcgtcgacctacctaaaaaggctaagggtcaagagctgtttgatcagataatgtaccatcttgacctgatcgaatccgattacttcggcctcagattcatggattccgctcaggttgctcactggctcgatgggacaaaatcaatcaaaaagcaggtaaaaatcggaagtccatactgcctacatttaagagtcaaattctactcgagcgaaccgaacaacctacgtgaagagctaaccagatatctatttgttctgcaactcaagcaagacatcttaagcgggaagctagattgtcctttcgatacggctgtccagctcgccgcttataacctccaggctgagctgggcgattatgatttagcagagcacagccccgagctggtgtctgagttcaggtttgtccctattcagaccgaagaaatggagctggcaatctttgagaaatggaaagaataccgcggtcagacccccgcacaggctgaaaccaattacttgaataaggcgaaatggctggagatgtatggggtcgacatgcacgttgtaaaagcgagggacggcaacgattattcactggggcttacccctaccggtgtgctggtgttcgagggtgatactaagatcggcctgtttttctggccaaagatcacaaggctggatttcaagaagaataagttgacactcgttgtcgttgaggatgacgaccagggaaaggagcaggagcacaccttcgtgtttcggctagatcaccccaaagcatgtaagcatctgtggaagtgcgctgtggagcaccacgcgttttttcgcctgcggggacccgtgcagaaatcaagccaccgctcaggattcattagattgggatcccgctttaggtacagcggtaagactgagtaccagactaccaaaacaaataaggcaagaagatctacaagttttgagcgtcgaccatctaagcgatactcccgaagaacgctgcagatgaaggcttgtgctacgaagccagaggagctgtctgtgcacaataacgtttccacacagtcaaatggttcccagcaggcctggggcatgagatccgccttgccagtctccccatcgatctcaagcgcccctgtccccgttgaaatcgagaacctaccccagtccccaggaacggatcagcacgacaggaaatggctgtccgctgcttctgattgctgtcagcgtgggggaaaccagtggaatacacgggcactgcctcccccacagacagcgcaccgcaattacaccgactttgtgcatgaacataatgtgaaaaacgccggaatccgacatgatgtgcatttcccaggtcatacagccatgacagaaatctag

SEQ ID NO: 222199 - DNA, 1518 bp, synthetic construct
  misc_feature 1..1518: note = Description of Artificial Sequence: Synthetic coding sequence
  source 1..1518: mol_type = other DNA
atgctctcctttttccgtcgcacactcgggcgacggtcaatgagaaagcacgcagaaaaggagagactgagagaggcccaacgcgcagcaacacacataccagccgcaggcgactcaaagtcaattattacatgccgcgtgtccctcttagatgggacagatgtgagcgtggacctgccaaagaaggccaagggccaggagcttttcgaccagatcatgtaccacctcgatctgatagagtctgattactttggcctacgctttatggactctgctcaagtggcgcactggcttgacggtacaaaatccattaaaaagcaggttaaaatcgggtccccctattgccttcacctgagagttaagttttatagtagtgaaccgaataacttgcgtgaggagttaacgagatacctgttcgtgcttcagctcaagcaggatattttgagtgggaaactagattgtccatttgacaccgccgtgcaactcgccgcatataatttgcaggctgagctgggagactatgaccttgcagagcattcgccggaactggtgagcgagttcaggttcgttcccatccagactgaggaaatggagctggcaatatttgagaagtggaaagagtaccggggtcagacccccgctcaggccgagaccaactatctgaacaaggccaagtggctggagatgtatggcgtcgacatgcacgttgttaaagctcgtgacgggaatgattattctctggggctcacacctaccggtgtgttggtatttgaaggagatacaaagattgggttattcttctggccaaaaatcactcgtttggacttcaaaaagaacaaactcactttggtggtggtggaggatgacgaccaggggaaggagcaggagcacacctttgtgttccgcctcgaccaccctaaggcctgcaaacacctttggaagtgtgccgttgagcaccatgctttttttcgcctgcggggtccagttcaaaaatcatcccacagatccggctttattcgactcggctctcggttccggtactccggcaaaacggagtatcagaccaccaaaaccaacaaggcccgtcgctctaccagtttcgaaagacgcccttctaaacgttacagccggagaaccctgcagatgaaggcttgcgctaccaagccggaagaactgagcgtacacaataatgtgagcacccaatctaatggtagccagcaagcgtggggcatgcgctcggctttgccagtcagcccttctataagctccgcaccagtccctgttgaaattgaaaacctccctcagtcgcccggaaccgaccagcacgaccgcaaatggctgtctgcagcaagcgattgctgtcaaaggggcggtaatcagtggaacacacgcgcactgcctccaccccaaacggcccacaggaactacacagattttgtccacgaacataacgtaaagaacgctggcatcaggcacgacgtgcattttcccggtcacaccgccatgaccgaaatttag

SEQ ID NO: 222200 - DNA, 2064 bp, synthetic construct
  misc_feature 1..2064: note = Description of Artificial Sequence: Synthetic coding sequence
  source 1..2064: mol_type = other DNA
atgctgagtttcttcagacggactctgggcaggcgaagcatgagaaagcacgctgaaaaggaaagactgcgggaagcacaaagggctgcgactcacatcccagccgcaggcgactctaagtctatcatcacctgtagagtttctttgctcgacggcacagacgtaagtgtggacctgcccaagaaggcaaaggggcaggagctgttcgaccagataatgtaccatttagacttgatcgagagtgattatttcggactgcgctttatggatagtgcccaggtcgcccactggctcgacgggacgaagagtattaagaagcaggtcaaaatcggttcaccgtactgtctgcatctgcgcgtgaagttctatagtagtgagcctaacaatctccgagaagagctaacaagatacctatttgtgctccagctgaagcaggatatattgtctgggaagctggattgtccatttgacaccgccgtccagctcgctgcgtacaatctgcaggccgaactgggggattacgatctggcagaacacagtcctgagctcgtgtcagaatttaggttcgtgcctatccaaacggaagagatggagctcgctatatttgaaaaatggaaggagtatcgtggacagacccctgcacaggccgagactaattatctgaacaaagctaagtggctagagatgtacggagtggatatgcacgtggtgaaggcccgtgacggcaatgactatagtctcggattaacaccgactggagtactggtattcgaaggcgataccaagatcgggcttttcttctggccaaagataacaagactagactttaagaagaacaagttaaccttggttgtcgtcgaagatgatgaccaggggaaagaacaggagcacacgtttgtgtttagacttgaccacccaaaagcttgcaaacatctgtggaagtgtgccgtcgaacaccacgcttttttcagacttcgagggccagtgcaaaagagttcacacaggtcaggatttatccgtctgggctcccggttcaggtactctggaaagacagagtaccaaactactaagacaaacaaagccagaaggagtactagctttgaacggaggccaagcaagcggtactccaggcggacgcttcagatgaaggcctgcgcaacaaagccagaggagttgtccgtgcacaataatgtctcaacccagagcaatgggagccagcaggcgtggggcatgaggtctgctctccccgtatccccctcaatctcaagtgcaccagtgcccgtcgaaatagagaacctgccacagagtccagggacagatcagcacgatagaaagtgtattcccctgaacattgatctgctgaactctcccgacctgctggaggcaacaattggcgatgtcatcggcgcttctgacaccatggagacaagccaggctttgaatgacgtaaacgtagcaactcgcctgcctggtcttggtgaacctgaagtggagtatgagacgctgaaggacacaagcgaaaaactgaagcagttggagatggagaactcaccattgctgagtccgaggtcaaacatcgatgtcaacataaacagtcaggaggaggtggtaaagcttactgaaaaatgtttaaataacgtcattgagtcccccggacttaatgtgatgagagttccacctgattttaagtccaatatactaaaagcgcaggtagaggccgtgcataaagttaccaaggaggacagtctgctatcacataaaaatgcaaatgtccaggacgccgctaccaattcggccgtgttgaacgaaaataatgtccccctgcctaaggagtcactggaaaccctgatgctgatcaccccagcagattctggttctgtgctcaaagaggcgaccgatgagctcgacgctctccttgccagtctgactgagaatttgattgaccacaccgtggctcctcaagtgagcagtacctctatgattaccccgagatggattgttcctctctggagccatttcggaaggcgttcctgccccgaggctgaggtttttacagatcactag

SEQ ID NO: 222201 - DNA, 2199 bp, synthetic construct
  misc_feature 1..2199: note = Description of Artificial Sequence: Synthetic coding sequence
  source 1..2199: mol_type = other DNA
atgctgtcattctttcggagaaccttgggcaggcgcagtatgcgcaagcatgccgagaaggaaagactccgagaggcccagagggcagccacgcatatccctgccgcaggggattctaaatccatcattacttgccgtgtgagcttgctcgacggcactgacgtgtcggtggatcttcccaaaaaagccaagggacaggagttattcgatcaaataatgtatcacctggacctgattgagagcgactattttgggctgagattcatggacagcgcacaagttgcacattggctggatggtaccaaaagcattaagaaacaggtgaaaattggttccccttactgcctgcaccttagagtgaagttttactcttccgagccaaacaacctgcgtgaagaattgacccggtaccttttcgttctgcagcttaaacaagatatcctctcggggaaattagactgcccctttgatacagcggtgcagctggctgcgtacaatttacaggccgaacttggagactacgacctggctgaacatagtccggagttggtgtctgaattccgttttgtgcccattcagaccgaagagatggagctggccattttcgagaagtggaaagagtaccggggtcagactcccgcacaagccgagactaactatttgaacaaggccaagtggcttgaaatgtatggcgtggatatgcacgtcgtaaaggccagagatggaaatgactactccctggggctgacgccaaccggggttttggtgttcgagggggacactaagataggactattcttttggcccaagatcacgcggctagacttcaagaagaacaagctgacgttggtggtagtcgaagatgatgatcaagggaaagagcaggaacacacctttgttttcagactggatcaccccaaggcttgtaaacatttgtggaagtgcgccgtggagcaccatgccttcttccggcttcgcggtcccgttcagaagtcttctcatcgcagcggttttatcaggctggggtctaggttccgctactcagggaagactgaataccagacaaccaagaccaacaaagccaggcggagtacaagcttcgagaggcgcccatcaaaacgatactcgcggagaaccctacagatgaaagcctgcgccaccaagccagaggagctttcagtgcataacaacgtgagtacgcagagcaacggatcccagcaagcttggggaatgagatcagcgctgccagtctctcccagtatctcaagcgctcctgtacctgtggagattgaaaatttgccgcagtctcccggaaccgaccaacacgatcggaaatgtatacctctaaatattgatttgcttaactctccagacctgctcgaagccacaatcggagacgtgataggagcatcggataccatggaaactagtcaggcccttaacgatgtcaatgtcgcgacgcgcctgcctggcctcggggagccagaagttgagtacgaaaccctgaaagatacgagcgagaaacttaaacagctcgaaatggagaactcaccacttctgagtccacgatccaacatcgacgtgaatattaatagccaagaggaggtcgtgaaattgacagagaagtgcctgaacaatgtgatagagtcccccggacttaacgtgatgagagttccacctgactttaagtcaaacattctgaaagctcaggtggaggctgtgcacaaggtgacgaaggaggattctctgttatcgcacaagaacgctaacgtgcaggatgcagcgaccaacagtgcggtacttaatgaaaacaacgtgcctctacccaaagaatccctagagacactcatgctgatcacacccgctgacagcggcagcgtgctcaaagaagccaccgatgaactggatgctctgctggctagcttgacagagaacctgatcgaccacactgtcgcgcctcaggtctcttctacaagtatgattacgcctcgctggatcgttccttcaggcgctatgagtaacggtttagcagggtgcgagatgctgcttacaggaaaggagggtcacgggaataaggatggcatctctctgatcagtcccccagcgccattcctcgtggacgccgtgacgtccagcggcccaatcttggctgaggaggcagtactgaagcaaaagtgtctgctgactaccgagctttag

SEQ ID NO: 222202 - DNA, 2340 bp, synthetic construct
  misc_feature 1..2340: note = Description of Artificial Sequence: Synthetic coding sequence
  source 1..2340: mol_type = other DNA
atggaggagaaagactactcagaggcagacggactttcagagaggactacgccaagcaaggcacagaagtctccccagaaaatagccaagaaatacaaatcagctatctgtagggtgaccctgctggacgcctcagaatacgagtgcgaagtggaaaagcacggccgaggacaggtcttgtttgatctagtgtgtgaacatctaaacttattagaaaaggattacttcggtctgacattttgcgatgctgacagtcagaaaaattggcttgatcctagcaaagaaatcaagaaacagattaggagtagtccttggaacttcgcctttactgtcaaattctacccgccagacccagcccagctcacagaggatataactcgctattacttatgtctgcagcttcgcgcagatattattacagggcgattaccatgttccttcgttacccatgccctgttaggcagctacgccgtacaagccgagctcggcgactatgacgctgaggaacacgtggggaattatgtgtctgagctgcgcttcgcgcctaatcagacacgagaactcgaagagcgcattatggagctgcacaagacttacagaggtatgacacctggcgaggctgaaatccattttcttgaaaacgcaaaaaaattgtccatgtacggcgttgatctgcaccacgccaaggatagcgagggaatcgatattatgctgggcgtctgtgctaacggactgttgatctaccgggacagattgcgcatcaatagatttgcctggcccaaaatccttaaaatctcttacaaacggagtaatttctatatcaagattcgacctggtgagtatgaacagttcgagagcaccataggcttcaaactaccaaaccaccggtctgccaaaagactgtggaaagtttgcattgagcaccatacttttttccgtctcgtaagtccagagcccccacctaagggtttcctggtgatggggtcaaagtttcgttactctggtaggacccaagcacagacccgccaggcctctgccttaatcgaccgaccagcaccattttttgaacggtcaagttccaagcgatacaccatgtctcgatctctggacggtgccgaatttagccggcctgcatccgtttcagagaaccatgatgctggccctgacggtgacaagcgggacgaagacggagagagtggcggacagcgctccgaggccgaggaaggagaggtgcggactccgaccaagatcaaggaactgaaattccttgacaagccagaggacgtgctactgaaacaccaggcatctatcaacgagctgaagagaaccctaaaggagcccaatagtaaactcatccaccgcgatagagactgggaacgcgagagaaggctcccttcctcaccggcaagcccatcacccaaaggaactcccgaaaaagccaacgagagagctgggctgcgagaaggctccgaggagaaagtgaaaccacctagaccgagagcgccagagtccgatactggcgacgaagaccaggaccaagagcgtgacacagtgttcctgaaggacaaccacctggccattgagaggaagtgctcctcgattacggttagcagcacaagtagcttggaagccgaagtcgactttacagtgatcggagattaccacggctccgcgtttgaggatttcagccgaagtctccccgaactggacagggataagtcagacagcgacacggaaggacttttgtttagccgagacttgaacaaaggggctccctctcaggacgatgagtccggaggaatcgaggactcccccgacagaggggcatgctctacccccgatatgccccagttcgaaccagtcaaaacggaaactatgactgtttcctccctggctatccgcaaaaagatcgaacccgaggccgtcttacagacacgcgtgtccgccatggacaatacgcaagagaatagcctcaagtcagggaaaggcgctgctgcaatgattcctggacctcagaccgtggccacagagatacggtccctgtccccaatcatcggaaaggacgtcctgacatctacctacggcgcaacagccgaaaccctgtcgacgtcaacaacgactcacgttacaaagacggtgaaaggagggttctcagaaacccggatcgagaaaagaattataatcaccggagacgaggacgttgatcaggatcaggcgctggcacttgccatcaaggaagccaaactgcagcacccggacatgctcgtcactaaagcggtggtttaccgggaaactgatccctccccagaagaacgggacaaaaaaccacaggagtcctag

SEQ ID NO: 222203 - DNA, 2646 bp, synthetic construct
  misc_feature 1..2646: note = Description of Artificial Sequence: Synthetic coding sequence
  source 1..2646: mol_type = other DNA
atgacgaccgagacaggtcctgactcggaggtgaaaaaggcacaggaggaagcccctcagcagcccgaggccgcagccgcagtgactactcccgtaactcctgccggacacggacaccccgaagctaactcaaacgaaaaacatccgtcccagcaagacacccggccagccgagcagtctctggacatggaagagaaggactacagcgaggccgacggcttgagcgagaggacaaccccaagtaaagcccagaaatccccacagaagattgccaaaaagtataaaagtgccatctgtagggtgactttgctggacgcgagcgaatacgagtgtgaggtagagaaacacggtagaggtcaggttctctttgacttggtctgcgaacacctgaatttactagaaaaggattatttcggtctgaccttctgtgacgcggacagccagaaaaattggctggacccatctaaggaaatcaaaaagcaaattagatcgtctccctggaatttcgcttttactgtgaaattctacccaccagatcccgcacagctgacagaagacattactcggtactacctgtgcctgcagctcagggccgacatcatcaccgggagactgccctgttcttttgtgacccacgccttattaggctcatatgccgtgcaggctgagctgggggattatgacgcggaggagcatgtaggaaactacgtttccgagctcagatttgctccaaaccagacacgggagctggaggaaaggataatggagttacacaaaacctatcgtggcatgactcccggtgaggccgagatacacttcctggagaatgcaaagaagctcagtatgtacggcgttgacctgcaccacgccaaggatagcgaaggaattgatatcatgctgggagtctgtgcaaatgggttattaatatacagagatagactcaggatcaaccggttcgcgtggccgaaaatattaaaaataagttataaacgttctaacttctatatcaaaatccgtcctggcgagtatgaacagttcgagagtactatcgggtttaagcttcccaatcatcggtccgccaagagattgtggaaggtatgtatcgagcatcacaccttcttccggttagtttcccccgaaccccctcctaagggttttctggtcatgggctccaagttccggtactccggccgtacccaggctcagactcgacaagcctccgccctcatcgatcggccagcccctttcttcgagcgttctagttccaagagatacacaatgagcaggagcctggatggggctgagttctcacgtccagcatctgtctctgaaaatcacgatgccggtcccgacggcgacaagcgcgacgaggacggagaatcgggcggacagagatcagaggccgaagaaggagaggtacgtacacccactaagatcaaagaacttaagccggagcaagagactacacctagacataaacaagaattcctcgataaacccgaggatgttctcctcaagcaccaggctagcataaacgaacttaagaggacactcaaagaacctaactctaagctcatccatagggaccgcgactgggagagggaacggaggctgccctcctctccggctagtccctccccaaagggcacaccagagaaggcgaacgaacgcgctgggctgcgggaaggctcagaagagaaggttaagccgccaagaccgagagcccctgagtccgacactggtgacgaggaccaggaccaagagcgcgacacagtattcctcaaagacaaccacctcgccattgaacggaaatgtagctcaattactgtctcgtcaacgtcttccttggaagcagaagtggattttacagtgataggcgactaccacgggtctgcattcgaggactttagtaggagtctgccagaactggatagagataagagcgatagtgacactgaggggctgttattttcacgcgatctaaacaagggcgcaccttcacaggacgatgaatctggaggcatcgaagactcacctgatagaggcgcttgcagtactcccgacatgccacaattcgaaccggtgaagactgagacgatgaccgtttcttccttagccatacgcaaaaagattgaaccagaggcagtgctgcagacccgggtgtctgccatggataatacacaacaggtggatggatccgcgtccgttggtcgtgaatttattgcaacaaccccaagcataactaccgaaaccatctcaaccaccatggagaacagtttgaagtctggtaaaggcgcagcagctatgatccccggacctcaaacggtggctacagagatccgcagcctgtccccaatcatcgggaaggacgtgctaacctcaacctacggcgctaccgctgaaactctgagcacgtccaccacgacccacgtgacgaaaaccgtcaagggagggttctcggagacgcggatcgaaaaacggataattatcaccggtgacgaggacgtggaccaagaccaagctctcgcgctcgccatcaaagaagcaaagcttcagcacccagatatgctggttaccaaggccgtggtatatagagagactgaccccagtcctgaggagagagacaaaaagccgcaggaatcgtag

SEQ ID NO: 222204 - DNA, 2877 bp, synthetic construct
  misc_feature 1..2877: note = Description of Artificial Sequence: Synthetic coding sequence
  source 1..2877: mol_type = other DNA
atgagtcgctccctcgatggcgctgaattcagccgcccagccagcgtgagcgaaaaccatgacgccggtcctgacggggataagcgggatgaggacggggagagcggcggacagagaagtgaggccgaagagggtgaggtccgcaccccgacaaagataaaagagctgaagcccgaacaggaaactactcctagacataagcaggaatttctggacaagcccgaggacgtgcttctgaagcatcaggcatcaatcaacgaactcaagcggacactgaaggaaccaaacagcaaactgattcatcgggaccgagattgggagagggaaagacgtttgccaagtagccctgcctcaccaagccccaaggggacacctgaaaaggccaacgagtcccaaaggacacaggacattagccagcgagacctcgttcccgaacctggcgcagcagcaggactagaggtgtttacacaaaagtcactggccgcaagccccgagggcagtgaacactgggtcttcattgagagggagtacaccaggcctgaggagctcggcctcttgaaagtgactacaatgcagcaggaggagagacaggctggattagctggaattctcgccaatgggaggctaagcaaagtggatgtgctagtagacaaatttaaggtggaggttgccaccgaagaaatggtcggaaaccgaagagcaaatactcaacaacagggaaaaatgatcgcaagccccgaagatttcgaatccgtgggagaggagggaccctggatcagagaatcccccggaggcgcagcgcttgccagcggtagaactttggcagagaaattgctggagggctccgagctaagagccgatacccgggaggccaccattagaaacaggtgcatgagcgatggtcagccagagggtcaaacggagttacggaagggactggaggagccacatacctgcgggaggccaaccgcgcctgggacacgcccagcagaggtagatgttttgtctcccgcttctgacaagggagggctgcagagctttctccttgacccggctcacgccgaggctcgtgctgagttaagcaacgagactgatacctcattcgctgaaaggagtttctatctgaattatgaggagaaagattcagaagaccaggtcctgcctcctccgttggaggagcgcaagggcaggctggatgcacccccaggcggagagcctcggcctactctcaactctcttgacctccgggtgtcagctgcagccagcagccggtccaaagatgaggctcacatgacctcccctaaggaaggagccggaactcccaaaaaccacggaggtcccggagacctaaaaggttctccggcaggccagacatttgctgagggctgggaggatgcgcaatggggggttgaaggcgagttcccgcatttgactgcatctgcggcaagggaggaggggacccccgtgagcggtgatttactaggcaaggcggaggagtctcccaccgaagagctgaagaagcacccgcctcatcgtggccagggagtacatcctgacccacaggcatgcgctcttcctagagcgatacctcttaatgtccggaaaccagtgaagcccgaccgcggaaatttccctcccaaagagcgaggcgtggtccccactcagaaaggtggtgccgaactcaaggacagggaagccagtgcctttctgcacatggaagtgatcattccacttccagcatcccctgggcatagtgaggatctggctgcgcttgaggaggcctccccaagccccacatcacacgggtctggcgagccaagtgagctccgcgaaccgttcttgcgtcatgttcacttatctaaggcttccccggagcccaaggaccaggtcggcttcgtcgtgagcccagcaaccggtggggaacggcgacctccaccaatcacatccaggaagccccgagttgtccctgaagaggccgaaggtcgtatcccccttggctttggcttcccatctggaaagcgtcgcgagatgacaagcttccaagccggagatcaagagggatctctggaagatatttcaaaaacatctgtcgcaaacaagattaggattttcgaaactcacggcgcagaaaccagacgtatgagcgagggtgaggctcgctctctacccaacgacgtgagcagcgaggcacctgttggtcaggccgaacagcagcgcagcacactgtccgacctgggctttgcacagctgcagccccctggcgatttcgcctctcctaaggccacgcacagcacagtcatcccactggcgacccgccatttcagggaggacacttccgcatcgtaccaggaagcccacacagaattagagcctgtgagtcccaacagcggatgcgaaacaaccctggcagaggcaaccggaaccggcaataagtctggcgatgcagttcgggaagaaaagagaagcactaatctggctgccaatacacctgggaaaggtggtaggctgcggttcgcaagcccttctggccctcagagggctggactccgagaagggtctgaggaaaaggttaaaccccctcggcctcgagcccctgagtccgataccggtgacgaagatcaagatcaggaaagagatactgtgttcttgaaagacaaccacctcgctatcgagagaaagtgttcctccataacagtgtcttctacatccagccttgaggccgaggtggatttcacagtgatcggcgactaccacggatctgccttcgaggacttctcgcggtcactgcctgaactggacagagacaagtctgactccgacactgagggcctgcttttttcacgggatctgaacaagggcgctccttcacaggattag

SEQ ID NO: 222205 - DNA, 2643 bp, synthetic construct
  misc_feature 1..2643: note = Description of Artificial Sequence: Synthetic coding sequence
  source 1..2643: mol_type = other DNA
atgaccacagagacaggccctgactccgaggtcaagaaagcccaagaggaagccccacagcaaccagaagcagccgctgccgtgacgacaccagtgacgcccgctggccacgggcacccggaggcaaatagcaacgagaagcacccatctcagcaagatacacgacctgccgagcagtccctggacatggaggaaaaagattattccgaagccgatggactgagtgaaagaacaaccccaagcaaggcccagaagagcccacagaagattgccaaaaaatacaagtcagcaatctgccgcgttactctactcgatgcatcggagtacgagtgcgaggtggaaaaacacggacggggtcaggtgttgttcgacttggtgtgcgaacatctgaacctgttggagaaggactatttcggcctgacattttgtgacgcagattcccaaaagaattggttggatcccagcaaagagatcaaaaagcagatcagatcaagtccctggaatttcgcattcactgttaagttttacccaccagacccagcccagctgaccgaagacatcacacgctactacttgtgtctgcagctgagggcagacatcatcaccggacgcctaccttgcagctttgtgacccatgctttgctcggctcctatgccgtccaggctgaacttggcgattatgatgcagaagagcacgttggcaattacgtttctgaactccggttcgctcctaatcagacacgggaactggaagagcgcattatggaacttcataagacctaccggggaatgacacctggcgaggccgagattcattttctggaaaacgcaaaaaaacttagcatgtatggtgtggacctgcaccacgcaaaagacagcgaaggcatagatattatgctgggagtgtgcgccaatgggctgttaatttaccgagatagacttaggatcaacaggtttgcatggcccaaaatcctgaagatctcttataagaggagcaacttctatatcaaaataaggccgggagagtatgaacagtttgagtccactatagggttcaaactccctaatcaccggagtgctaagcggctgtggaaagtatgcatcgaacaccacaccttttttcggttagtatctccagagccccctccgaagggattcttggtgatgggatccaaatttagatattccgggcgtacacaagcacagacccggcaggcgtccgctctcattgaccgaccagctccgttctttgaaaggtccagctctaagaggtataccatgtcccgttccctagacggagccgaattttccagacccgcaagtgtctctgagaaccacgatgccggacctgacggagacaagagggacgaagacggtgaaagcggaggccaaaggtcggaggccgaggaaggggaggtgaggaccccaacaaaaattaaggagctgaagcctgagcaggaaactacaccgcgtcataagcaggagttcctcgataagcctgaggatgtcctgctcaaacaccaggcctctataaatgaattgaagaggaccctgaaggagcccaacagtaagctgatacatcgggaccgcgactgggagagggaacggcgactgccctccagtcccgcatccccctcccccaaaggcacccctgagaaggccaatgagagagccggacttcgcgagggcagtgaggaaaaggtgaaacccccacgtccaagagctcccgaaagcgacaccggcgacgaggatcaggatcaggagcgtgacactgtgttcctcaaagacaaccacctggccatcgaacgaaagtgttccagcatcactgtctcgagcacctcatcacttgaagcagaagtggattttaccgtgattggcgactatcacggctctgctttcgaggactttagcagatccctgcctgaattggatcgcgataaatcggactcggacacagaaggtctcctgttcagtcgcgacctcaacaaaggggcaccgagtcaggacgacgaaagtggaggcatcgaggattctccggataggggggcatgttctacacctgacatgccacaattcgaaccggtaaagactgaaacgatgaccgtctcgtctctcgccatccggaagaagatagagcctgaggccgtgctgcagactcgggttagcgcaatggacaatactcaggtggacggcagtgcctccgtgggacgggagttcatcgccaccaccccgtccatcaccaccgagactatttcaacaacgatggagaacagccttaagtccggcaaaggggctgccgcaatgattccgggtccacaaacggtggccaccgagattaggagtctttctcccatcatcggaaaagacgttctgaccagcacttacggcgcaaccgccgagacgctgagcacaagcaccacgactcacgtaaccaagactgttaagggcggattcagcgagacacgcatcgagaagcgaatcatcatcacaggcgacgaagatgttgatcaggaccaggccctggctcttgctattaaggaggctaaacttcaacatccagacatgttggtcaccaaagcagtagtctatcgcgagaccgacccaagcccggaggagcgggataaaaaaccccaggagagctag

SEQ ID NO: 222206 - DNA, 600 bp, synthetic construct
  misc_feature 1..600: note = Description of Artificial Sequence: Synthetic coding sequence
  source 1..600: mol_type = other DNA
atggaggagaaggactactccgaagccgatgggctgagcgagaggaccacgccaagcaaggcccaaaagagccctcaaaaaattgcgaaaaagtacaagtcggcaatctgccgagtgacgctactggatgcatctgagtacgaatgtgaagtagagaaacatggacgtggacaggtcctatttgacctagtctgtgaacatttgaacctgctcgaaaaggactattttggtctcactttttgcgacgccgactcccagaaaaactggctggatccttctaaggaaattaagaagcagattcggtcttctccatggaatttcgcattcacagtaaagttttacccccctgatccagctcagttgaccgaggatattacccgttactacctgtgccttcaattgcgagccgatataatcacaggcagactgccctgtagtttcgtcacccatgccctgttgggctcctatgccgtgcaggcagagctgggggactacgatgccgaggagcacgtggggaactacgtcagcgaattaaggtttgcacccaatcagacacgggagcttgaggagcgaataatggagctccataagacatattag

SEQ ID NO: 222207 - DNA, 2106 bp, synthetic construct
  misc_feature 1..2106: note = Description of Artificial Sequence: Synthetic coding sequence
  source 1..2106: mol_type = other DNA
atggtttttttaggaagaattaacgaggtggagcctgccaagggactcgcggaatccctggcaccaactgagaggtccgttaagtcgctcgacatggaggaaaaggattactccgaggccgacggactttccgaacggacaactcctagcaaagcccaaaaatctcctcaaaagattgccaagaaatacaaatcagctatctgtagagtaactctcctggatgcaagtgagtatgaatgtgaagtggagaagcacggtcggggacaggtgctgtttgatctggtttgcgaacacttaaacctgttagaaaaggactacttcggattaacattctgtgatgcggactcccagaagaattggctggatccctccaaagaaattaaaaagcagatccgctctagtccatggaacttcgctttcacagtaaagttttaccctccagatccagcccagttgactgaggatatcacacgctactacttgtgcctgcagctgcgcgctgacattattaccggcagactcccttgtagcttcgtgacccacgccctgctcggcagctatgccgtccaagcagaactaggcgactatgatgcggaggagcacgtgggaaattatgtgtctgaactcagattcgcccctaaccagacccgcgagctggaagaacgcattatggagctgcataaaacctaccggggtatgacccctggagaagcagagattcatttccttgagaatgctaagaagctgtccatgtatggtgtcgacctccaccacgccaaagatagtgagggaatcgacatcatgttgggggtgtgcgctaacgggctcctcatttatcgggaccgactgcggataaatcgattcgcttggcctaaaatcttgaaaatctcctataagcggagtaacttctacatcaagattaggccgggtgagtatgagcagttcgagtctactatcggcttcaagctgcccaaccacagatccgcgaagaggttatggaaagtgtgcatcgaacatcacacgttttttaggctggtatcccccgaacccccaccaaagggttttcttgtgatgggcagcaagtttaggtatagcggtcgaacccaagcccagacgcgccaggcctccgctctgattgaccgacccgcaccttttttcgaacgctcctcctcaaagaggtatacaatgagccgtagcctagacggggctgaattttcacgccctgccagtgtgagtgagaaccacgacgcaggccctgatggggacaagcgggacgaggacggcgaatccggcggacagcgttccgaggctgaggagggcgaggtccggaccccaaccaagatcaaggaactgaaatttttggacaagccggaggacgtgctgcttaaacaccaagctagtattaatgaactcaagcgcaccctgaaggagcccaacagtaaacttattcatcgggaccgtgactgggaacgtgagaggcggctaccatccagcccagcctccccatctccaaaaggcacccccgaaaaggctaacgagcctgtcaaaactgaaactatgaccgtatcctctctggcaattcggaagaaaatagaaccagaggcggtactacagactagggttagcgcaatggacaacactcaacaggtggacggcagcgcaagcgttgggcgagaatttatcgcaactaccccgagtatcacgacagagaccatctctactaccatggaaaattcactgaaatccgggaagggagccgctgcaatgatccccggaccacagaccgtcgctactgaaatacgctcgctgtcccctatcatcggtaaagacgtgttgacaagcacttatggtgccacggctgaaacattgtctaccagcaccaccacccacgtaaccaagacagttaaggggggattcagcgaaacccgtattgaaaagaggatcatcatcacaggggacgaggatgtagaccaggaccaggctctggctctggctatcaaagaagccaagctgcagcatccggatatgctcgttaccaaggctgtggtctaccgggagaccgacccatctcctgaagagcgggataaaaaacctcaggagtcgtag

SEQ ID NO: 222208 - DNA, 2319 bp, synthetic construct
  misc_feature 1..2319: note = Description of Artificial Sequence: Synthetic coding sequence
  source 1..2319: mol_type = other DNA
atggaggagaaggactattctgaggctgatggtttatccgaaagaactaccccctccaaagcacagaaatcaccgcaaaagatcgccaagaagtataagtcagccatatgtcgcgtgacgctgcttgatgctagtgagtatgaatgtgaagtggagaattggttggacccgtctaaggagatcaaaaaacagatccggtcgtcaccgtggaacttcgccttcacagtgaagttctacccaccagacccagcacagctcaccgaggatatcacacggtactatctgtgtttgcagttacgggctgacatcattacggggaggctgccttgttcctttgtaacacatgccctgctaggcagctacgctgtccaagcggaactgggagactatgatgccgaggaacatgtggggaactatgtgagcgaactgcggttcgctcccaaccagaccagagaactggaagagcgcattatggagttacacaagacgtaccgcggaatgacccccggagaggctgagattcatttcctagaaaatgcaaaaaaactgtccatgtatggggttgatttacatcacgctaaggattcggagggaattgatatcatgctgggagtttgtgccaacggcttgctaatttatcgggatagactgaggatcaaccgattcgcttggcccaagattctcaaaatctcttacaagagatcgaacttttacatcaaaataagaccaggcgaatatgagcaattcgaatccactatcgggttcaagttacctaaccacaggagcgctaaacgcctttggaaggtgtgtatcgagcatcatactttttttagacttgtcagcccggaacctcccccaaaaggctttctcgtgatggggagcaagtttcgctactctggcagaactcaggcacaaacgagacaggcatctgccctaatcgaccggccagccccattctttgagagaagctctagcaagagatatacaatgtcccggtccttggacggggcagaattttcccgacccgcttccgtgtcagagaaccacgacgctgggcctgacggtgacaagcgagatgaggacggcgaaagtggtgggcagagatcggaggccgaagagggcgaggtgcgaactcccacaaagataaaagagttgaagttcctggacaagcccgaggacgtgctgctgaagcaccaggccagcatcaatgagttgaaacggactctgaaagagccaaattccaagctaatccaccgtgatagagactgggaacgcgaacgcagactgccgagcagtcccgcttcacccagccccaagggcacgccagagaaggccaacgagagggccggtttgagggagggctcagaggagaaagtcaaacctcccagacccagggcaccagagtccgacaccggtgacgaggaccaggatcaagagcgcgacacagtgttcttaaaggataaccacttggctatcgagaggaaatgtagcagcattactgtcagttccacatcatccctcgaggctgaagtggacttcaccgttattggagactaccacgggtcggcatttgaggacttttccaggtctctcccggagctggaccgggacaaaagcgatagtgacacggaggggctgctatttagccgggatctcaacaagggcgctcccagccaagacgacgaatctggtgggatagaggacagcccagatcgcggtgcgtgttccacccctgatatgccacagttcgaacccgtgaaaacagaaacaatgactgtttctagtcttgcaatccggaagaagatcgaacccgaggccgtgctgcaaacaagagtgtccgctatggataatacacagcaggtagatggaagtgcatcagtgggacgagaattcatagcgactacgccttcaatcacaaccgagacaataagcaccactatggagaatagcctcaagagcggaaagggcgctgccgcaatgataccaggtccacagaccgttgcgaccgagatccggtcgttgagccctatcattggaaaggacgtactgacctccacgtacggtgctactgccgagacgctgagtactagtactaccacacatgttactaaaaccgtaaagggaggtttctcagagacaagaatagaaaagaggattattatcaccggagatgaggatgtcgaccaggatcaagctctcgccttggctattaaagaggcaaagctgcaacatcccgacatgctggtcacaaaggccgtcgtctatcgcgagacagacccgtctcccgaggaacgagacaagaaaccgcaggagagttag

SEQ ID NO: 222209 - DNA, 2319 bp, synthetic construct
  misc_feature 1..2319: note = Description of Artificial Sequence: Synthetic coding sequence
  source 1..2319: mol_type = other DNA
atggaagagaaggattatagcgaagctgacggcctgagtgagcggaccacccccagcaaggcccaaaaaagcccacaaaaaattgctaagaagtacaaaagcgccatttgtcgcgtgaccctccttgacgctagcgaatacgaatgcgaggtcgagaattggcttgacccctctaaggagattaaaaagcagatacgcagctctccttggaactttgccttcaccgttaaattctacccacccgatccagcccagctaacagaggacatcactcgatattatttgtgccttcagttgagagcagatattattactggcaggttgccttgtagttttgtcacccacgccttgctcggcagttatgccgtgcaggcggagctcggcgactatgacgccgaggagcatgtcggtaattacgtttccgagttgcggttcgcgccaaatcagacgagggagttggaagaacgcatcatggagctacataaaacataccgcggaatgacaccgggtgaggccgagattcattttctggaaaatgccaaaaaactgagtatgtacggcgtggatctccatcatgcaaaagactccgaaggcatcgatattatgctaggcgtctgcgccaacggtcttctcatttaccgcgacagactacgcattaatagattcgcttggcccaagatcttaaagatctcctacaagcggagtaacttctacattaagattaggcccggagaatacgaacagtttgagagtacaatcggatttaaactcccaaatcatagatccgccaaaaggctctggaaagtgtgcatcgaacatcatacctttttcaggctcgtaagccccgagccaccccctaaagggttcctcgtgatgggcagcaagttccggtacagtggtagaacacaggcccagactcgccaggcttcggcactcattgataggccagcaccctttttcgagaggagcagctctaaaagatataccatgtcacgatccctggacggcgcagagttttcccgcccagcctccgtatctgaaaaccacgatgccggacccgatggggataagcgcgacgaagatggagagagcggcggacaaagatcagaagctgaggaaggtgaagtgagaactcccactaagatcaaggaactcaaattcctggataagccggaggatgttcttttaaaacatcaggcctccatcaacgaacttaagaggactctaaaggaaccaaactctaaactgatccatcgggatcgcgattgggaacgcgaaagaaggctccctagctcacccgcatctccttcgcctaaaggtactcccgagaaagcaaacgaacgggcaggacttcgagaaggcagcgaggagaaggtgaaacctccccgaccacgcgctccagaatccgatacgggtgacgaagatcaggaccaggaacgagacactgtgtttttaaaggataatcacttggcaatcgagcgaaagtgttctagtattactgtcagctcaacatcaagtcttgaggcggaggtcgactttacagtcataggcgactaccacgggtctgctttcgaggacttctccagatccttgcccgagctagatcgtgacaaaagcgactcggataccgaaggcctcttattctcaagggaccttaacaaaggggctccttctcaggatgatgagtccgggggtattgaagactctcctgaccgcggagcatgttctacaccagatatgccacaattcgagcccgtgaagaccgagacgatgacagtcagctctcttgccattaggaaaaagatcgagccggaagccgtgctccagacaagggtctctgctatggataacacacaacaggtggacggttccgctagcgtcgggcgagaatttatagctacgactccctctataacaaccgagactatctccaccaccatggaaaattccctcaaaagcggcaagggcgctgccgctatgatcccaggtccccagacggtggccactgaaattaggagcctctccccgattatcggaaaggatgtgctgacttctacttatggcgctacagccgaaactctgtctaccagcacaacaacacacgtgactaaaacagtgaagggagggttcagcgagacaagaatagaaaaaagaatcatcatcacaggggatgaagatgtcgatcaggatcaggccctagctttggcaataaaggaggctaagctgcagcacccggatatgctcgtgactaaagcagtggtgtacagagagactgacccatccccggaggagcgtgataaaaaaccccaggagagctag

SEQ ID NO: 222210 - DNA, 600 bp, synthetic construct
  misc_feature 1..600: note = Description of Artificial Sequence: Synthetic coding sequence
  source 1..600: mol_type = other DNA
atggaggagaaggactacagtgaggccgatggactctccgagcggaccacaccctccaaagcccagaaatctccccagaagatagctaagaaatataaatctgcaatttgtcgcgtcactctgctcgatgcatctgaatacgaatgtgaagtcgagaagcatggacgcggacaggttctgtttgaccttgtttgtgagcacctgaacctgctggagaaagactatttcggactgaccttttgcgacgcagatagccagaaaaactggttagatccgtccaaagagattaagaaacagataagatcctctccatggaatttcgcatttaccgtcaagttctacccccctgatcccgctcagctgacagaggacatcactcggtattacctttgtcttcaattgcgggctgatatcatcacggggcgactgccttgttcgttcgttactcacgcactgctgggcagttacgccgtgcaggccgagttgggcgactacgacgccgaagaacacgtcggaaattacgtgtccgagttgagattcgctccgaatcagaccagggagctagaggagcgcatcatggagttgcataagacatactag

SEQ ID NO: 222211 - DNA, 2385 bp, synthetic construct
  misc_feature 1..2385: note = Description of Artificial Sequence: Synthetic coding sequence
  source 1..2385: mol_type = other DNA
atgactaccgaaaccggccctgacagtgaagtgaaaaaggcgcaggaggaagccccacaacagcctgaggcggctgctgccgtgaccaccccagttacaccagccggtcacggacatcctgaggcaaattccaacgagaaacatccctctcagcaggacacccgccctgcagaacagagcttggacatggaggagaaagattacagtgaggcagacggcttgtcagagaggaccacgccctctaaagctcaaaagagccctcagaagatcgccaagaaatataagtcagccatctgcagggtgacgctccttgacgcaagcgaatacgagtgcgaggtcgaaaagcacggcaggggtcaagtgctgttcgatctggtttgcgaacatctgaaccttctcgagaaagactattttggtctgaccttttgtgacgccgattcacagaagaattggctggatccaagtaaagaaatcaagaagcagatacggagctctccatggaacttcgccttcactgtcaaattctacccacctgatccagctcaactaaccgaagacatcaccagatattatctatgcctacagctgcgggctgatatcataacgggccgtcttccttgtagcttcgtgacgcacgcacttctcggttcctacgcagtccaggccgagttgggtgactatgacgccgaggaacacgtggggaactacgtgagcgagttgcgtttcgcacctaatcagaccagggagctggaggagagaattatggagctgcacaaaacctaccggggaatgacaccaggcgaggcagagattcacttccttgaaaatgccaagaaactgagcatgtacggggttgaccttcaccacgccaaggactctgagggcatcgacattatgcttggagtttgcgccaacggactactcatttatcgtgatcgcctgaggatcaaccgatttgcttggccaaaaatcctaaagatatcctacaaacgatcaaatttctatattaagattcggccaggcgaatacgagcagttcgagtccacaatcggatttaaattgccaaatcatcggtctgctaaaagattgtggaaagtgtgcatcgagcaccacacttttttcagacttgtcagcccggagccacctcccaaggggtttttggtgatgggcagcaaatttcgatattcagggcgtacccaggcccagacgcgacaggcttcggctctaatcgatcgcccagctccatttttcgagagatcttcctccaaacgctacaccatgagccggtcccttgatggcgctgaattctctcgcccagccagcgtcagtgagaaccacgacgctgggcctgatggcgacaaacgtgacgaagatggggaaagcggagggcagcgaagtgaggcggaagaaggcgaggttagaacccccaccaagattaaggagctcaagccagaacaagaaacaactccacgtcacaaacaggagttcctggataagcctgaggacgtgctgcttaagcaccaggcttccattaacgagctgaaacggacattaaaggagccaaacagtaagttgatccaccgtgaccgcgattgggaaagggagagaaggctgccatctagtcccgcttcgcccagtcctaaaggtacacccgagaaggctaatgagcgggcaggactccgcgaaggcagtgaagaaaaagttaagcccccaaggccgcgagccccagaatcggacacaggcgatgaggaccaagatcaggagcgcgatactgtatttttgaaggataaccacctggcaattgagcgcaagtgctccagcatcacagtatcaagtacatccagcctggaggccgaggtagactttaccgtcatcggagattaccatggatctgcattcgaggatttttcccgctcactcccagagctggatcgcgacaagtctgatagtgacactgagggtctgctgttttcacgcgaccttaataaaggtgccccttcccaggacgacgagtctgggggaatagaagacagcccggacaggggcgcttgttcaacccccgatatgcctcagttcgagcccgtcaagacggagacaatgacggtttcatccttggcgattagaaagaagatcgagccggaggctgtgttgcagacacgcgtaagcgctatggacaacacccaggagaactcactcaagagcgggaagggtgctgcggcaatgattcccggtccccagaccgttgccacagagatcaggagtctcagccccagtgccgaccatcgcgagcgctgtccccatcaacatctccggaggcactgtgggaacccactcaacttacaccaccatccctgtcaccaaaactgtgagagaagggtgttttag

SEQ ID NO: 222212 - DNA, 507 bp, synthetic construct
  misc_feature 1..507: note = Description of Artificial Sequence: Synthetic coding sequence
  source 1..507: mol_type = other DNA
atgaccacggagactgggcctgactctgaggtcaaaaaagctcaggaagaggctccacaacagcccgaggctgccgcagcagttacgacgcccgtgacaccagcagggcatggccatcctgaagccaactccaacgaaaagcacccaagtcaacaggacaccaggccagcagaacagagcctcgacatggaagaaaaggattactcagaagcggacggactctccgaacgcaccaccccttccaaggctcaaaagtctccccagaaaatcgcaaaaaaatacaagagcgcaatttgtagagtcactcttcttgatgcctccgaatacgagtgcgaagtcgagaagcacggcaggggccaagtgctatttgatttggtgtgtgaacaccttaaccttttagagaaagattactttggacttactttctgcgacgccgactcccagaagaactggctggatccaagcaaagaaatcaaaaagcaaatccgctctagcccgtggaactag

SEQ ID NO: 222213 - DNA, 180 bp, synthetic construct
  misc_feature 1..180: note = Description of Artificial Sequence: Synthetic coding sequence
  source 1..180: mol_type = other DNA
atgaccactgagacgggccctgactcagaagttaagaaagcgcaagaggaagccccacagcaaccggaggctgcagctgctgtcaccacgcccgtgactcctgctggccatggacaccccgaagccaactctaacgaaaaacatcccagccagcaggatacaaggccagccgaacagtag

SEQ ID NO: 222214 - DNA, 774 bp, synthetic construct
  misc_feature 1..774: note = Description of Artificial Sequence: Synthetic coding sequence
  source 1..774: mol_type = other DNA
atggaagagaaagattatagcgaagccgatgggctatccgagaggacaacgccgtcaaaagcccaaaaatctcctcaaaagattgctaagaaatacaagtccgcaatctgccgggttacgctcctcgatgcgtccgaatatgaatgcgaagttgaaaagcatgggaggggtcaagtgctcttcgatcttgtgtgcgagcatcttaacctgctcgagaaagactacttcggccttacattctgcgatgccgattcccagaagaattggttggacccgtccaaggagataaaaaaacagatccgcagcagcccttggaactttgctttcacggtgaaattttacccccctgatccagcccagctcactgaggatattaccagatactacctgtgtctccagctcagggctgatatcattacgggacgcctgccctgttcatttgtgactcacgccctgcttggctcctatgctgtgcaagctgagttgggcgattacgacgcagaggagcatgtaggcaactacgtgagtgagctccggtttgcccctaaccagacaagagagctagaggagaggatcatggaattacacaagacatatcggggaatgactcctggagaggccgagattcattttctggaaaacgctaaaaagctgagtatgtatggtgtggacctgcaccacgccaaagacagcgagggaatagacattatgcttggtgtgtgcgccaatggcttactgatctatcgcgaccgactgcgaatcaatcggttttag

SEQ ID NO: 222215 - DNA, 114 bp, synthetic construct
  misc_feature 1..114: note = Description of Artificial Sequence: Synthetic coding sequence
  source 1..114: mol_type = other DNA
atggaagaaaaagactattccgaagctgacggtctctcagaacgcacaacaccctcaaaggctcagaaaagtcctcaaaaaatagcaaagaaatataaaagcgcgatctgctag

SEQ ID NO: 222216 - DNA, 360 bp, synthetic construct
  misc_feature 1..360: note = Description of Artificial Sequence: Synthetic coding sequence
  source 1..360: mol_type = other DNA
taatcggtgggacgcgaattcatcgccactaccccttctattactacagaaactattagcaccaccatgatcataggaaaggatgtgcttactagtacttacggggctactgcagagaccctatctacatctaccacaacccacgtcacgaagacagttaagggcggattttcagagactcgaatcgaaaagcgcatcatcatcactggagacgaggacgtcgatcaggatcaagccctcgcattggccatcaaagaagcaaaactgcagcacccagacatgctggtgacaaaagccgtggtttacagagaaaccgatcctagccctgaggagagagacaagaaacctcaagaatcctag

SEQ ID NO: 222217 - DNA, 2340 bp, synthetic construct
  misc_feature 1..2340: note = Description of Artificial Sequence: Synthetic coding sequence
  source 1..2340: mol_type = other DNA
atggaggagaaagactattctgaagcagacgggcttagcgagagaacgactccgtcaaaggctcagaaatccccgcagaaaattgccaagaagtataagtcagccatttgcagagtgaccctgctggacgcttcagaatacgaatgtgaggtcgagaagcacggcagagggcaggtgctcttcgacctggtttgtgagcacttaaatctcctcgaaaaggactactttgggctgacattctgcgacgccgactcgcagaaaaactggttggatcctagcaaggagatcaagaagcagattcggtcaagtccctggaactttgcttttaccgttaagttttaccctcctgatccagctcagctgacagaagatatcacacgatactatctgtgcctgcagcttcgggctgatattattacaggcaggctcccttgttcgtttgtcacacacgcactactcgggtcctatgctgtgcaagccgaattaggtgattatgatgcagaggagcatgtaggtaactacgtatcagaactgaggtttgcccctaaccagacccgggaactagaggaaagaatcatggagctgcacaagacctaccgtggaatgactccaggtgaggccgagatccatttcctggaaaatgctaagaagctcagtatgtacggggtcgacctccatcacgccaaggattccgagggcattgatatcatgctaggcgtgtgtgccaatggactgctgatttatagggacagactacgtatcaaccgcttcgcctggccaaagattcttaaaatttcttacaagaggagcaatttttatatcaaaatcagacctggggaatatgagcagttcgagtctactatagggttcaaactccccaaccacagaagcgccaagagattgtggaaggtgtgcatcgaacatcatacattctttcggctggtgagccccgaacctcctccaaaaggctttcttgttatgggatcaaaattccgatattccggaagaacacaagcgcagactaggcaggcatccgccctgatagatagacctgcccctttttttgagaggtcctcttccaagcgctatactatgtcccggtccctggatggagcagagttctcacgtccagccagcgtgagcgagaatcatgatgctggccctgacggcgacaaaagagatgaggatggggaatcaggagggcagaggtcggaagcggaggagggagaggtgcgtacccccacgaagatcaaggaacttaaatttctggataagcctgaggacgtcctgctaaaacaccaggcaagcatcaacgagctgaaaagaactctcaaagaacccaactccaaactcatacatagagaccgggattgggaacgagagagaaggctcccatcctcaccagcatctccatcgccgaaaggaacacctgaaaaagcaaacgaaagggccggtctgcgggagggaagtgaagagaaagttaagccgccaaggcccagggcacctgagagcgacacgggggacgaggatcaggatcaggaacgcgatacagtctttctgaaggataatcacttagcaattgagaggaaatgtagttcgatcacggtctcatcaacatcttctctggaggctgaggtagatttcaccgtgattggagattatcatggatctgctttcgaggatttctcacgctcactgcctgaattggaccgcgataaaagtgacagtgatacggaagggctgctgttcagtcgcgatctgaacaagggggctccatctcaagacgatgaaagcgggggtattgaagattcacccgatagaggggcatgcagcactcctgacatgcctcagttcgagccagttaagaccgagaccatgaccgtgtctagtcttgcaatccgcaagaagattgaacctgaggctgttctgcagacgagggtgtctgctatggataacacccaggagaattctctcaaaagtggaaagggggctgctgccatgatcccgggtccccagacagtggcgacggaaattaggtcgttatcaccaatcatcggaaaagacgtgctgacttccacctacggtgctacagccgagaccctctcgaccagtaccacaactcacgttacgaaaactgtgaagggaggtttttccgagacacggattgaaaagcgcattattattaccggggatgaggatgttgaccaggaccaagcactcgctctcgctattaaggaggccaagctccaacacccagacatgttggtcacaaaggctgttgtatatagagagacggatccatctcctgaagagcgggacaaaaagcctcaggagagttag

SEQ ID NO: 222218 - DNA, 345 bp, synthetic construct
  misc_feature 1..345: note = Description of Artificial Sequence: Synthetic coding sequence
  source 1..345: mol_type = other DNA
atgacaacagagacagggccagactcagaggtcaagaaagctcaagaggaggctccgcagcagcctgaagccgctgctgccgttactactcccgtgacacccgcaggacacgggcaccccgaggctaacagcaatgaaaaacatccttcccaacaggatacccggcctgccgaacagtctcttgacatggaggagaaggattactcagaagccgacggcctaagcgagcggacaaccccaagtaaggcacagaagtcccctcagaagatcgcgaaaaaatataagtctgcgatctgtagagttacgctcttagatgcatccgaatatgagtgtgaagttgagtag

SEQ ID NO: 222219 - DNA, 567 bp, synthetic construct
  misc_feature 1..567: note = Description of Artificial Sequence: Synthetic coding sequence
  source 1..567: mol_type = other DNA
atgaccacagagaccggaccagactcggaagtaaaaaaagcacaggaggaggcacctcagcagcccgaggcagcagctgcagtcacaacaccagtgacgccagcgggtcacggccatcccgaggcgaactcaaacgagaaacatccaagtcagcaagacactagacccgctgagcaatctctggatatggaggaaaaagattatagcgaggctgatggcctctccgagcggactactcccagcaaagcgcagaagagtccccagaagatagctaagaagtacaagtcggccatctgcagagtgacattgcttgacgcaagcgagtatgaatgcgaggtggaaaaacatggaaggggccaggtgctgttcgacctcgtgtgtgagcacctgaatcttctggaaaaggactatttcggccttacattttgcgatgccgactcacagaagaattggctggacccttcaaaagagattaagaagcagataagatctagcccatggaatttcgcgttcaccgtgaagttttacccgccagaccctgctcaactcaccgaagacatcacatag

SEQ ID NO: 222220 - DNA, 705 bp, synthetic construct
  misc_feature 1..705: note = Description of Artificial Sequence: Synthetic coding sequence
  source 1..705: mol_type = other DNA
atggagtccacacctgaaccgaggcccaatgagtgggagaaacggcgaattacacccttgagtctccagactcagggtcgtaaaggcgaccatctgttcaaggacattctgtctgttaaggagaagtatctgatgcctactatctggaccgtcgaagaaaaggctcaagagactgacaagacgagagcacctgaatctgaaggcccatgcaccggtgcgcgagatgctgtgaaaagttctcacgagactttgaacattgtggaggaaaagaaaagggccgaagtaggaaaggacgaacgcgtcatcacagaggagatgaacggaaaggagatctctccaggtagtggccctggtgagatccgcaaggtcgagcccgtcactcaaaaggacagcacgagtctgtcatcggagtcgtctagtagtagttccgagtctgaggaggaagacgtcggagaatacagaccccaccatcgcgtgacggagggcaccattcgagaggaacaggaatacgaagaggaggttgaagaggaacctcgacctgcagcgaaagttgttgagagagaagaggcagtgccagaagcctcaccagtgacccaggcgggtgcttctgtcattactgtcgaaactgtgatccaggagaacgtcggcgcacaaaagatccccggagagaagtccgtccacgagggggcactgaagcaggattag

SEQ ID NO: 222221 - DNA, 3018 bp, synthetic construct
  misc_feature 1..3018: note = Description of Artificial Sequence: Synthetic coding sequence
  source 1..3018: mol_type = other DNA
atgactactgaggtcggaagcgtgtctgaagtgaagaaggacagctcacagttgggcacagacgccactaaagaaaagcctaaggaagtggcagaaaaccaacagaatcagtcctctgatcccgaagaggagaaagggagccaaccaccccctgccgctgagtctcagagcagcctgcggagacagaaaagggaaaaggaaaccagcgaaagcagaggcatctcgagatttatacccccatggctcaagaaacaaaaatcatataccctggttgtggctaaggacggtggcgataagaaggagcctactcaggccgtggtggaggagcaagtgctggacaaggaagaacccctccccgaagagcagcgtcaggcgaagggcgacgctgaagagatggcccagaaaaagcaggagattaaggtggaggtgaaggaagagaagccaagcgtgtcaaaggaggagaaaccctccgtttcaaaggtggagatgcagccaaccgagctagttagtaaagaacgggaggagaaggtgaaggaaacgcaggaagataagctggaaggcggagctgcgaaacgagagaccaaagaagtgcagaccaacgaattaaaagccgagaaggcatctcagaaggttacgaagaagaccaaaaccgttcaatgcaaggtgactctgctggatggcacagaatattcttgtgatctggaaaaacacgccaaagggcaggtcctcttcgacaaagtctgcgagcacttaaacttgttggagaaagattatttcggcctattgttccaggagtcccctgaacagaaaaactggctcgaccccgcaaaggagataaaaaggcagctgcgaaatttgccatggctcttcacattcaacgtgaagttctatcctcctgatccttctcagttgactgaggacattacacgctactttctctgcctgcagctccgacaggatattgccagtggtcgcctgccatgctcattcgtgacacatgcccttctcggttcctacactctgcaggctgagctgggcgactatgatcccgaggagcatggtagcattgatttatctgaattccagtttgctccaacccagaccaaggaactggaagagaaagtggccgagctccataaaacacaccggggactgtcaccagcccaggccgactcgcagttcctcgagaacgccaaacggttgagcatgtacggagtagatctgcaccatgctaaggacagcgaaggagtggacattaaactgggtgtgtgtgcgaatgggctcctcatctataaggatcgcttgaggatcaatcgcttcgcctggcccaagatactcaagatctcctacaagaggagcaacttttacattaaagtacgccctgctgagctggagcaattcgaaagcacaatcggatttaaattacctaaccatagagccgctaaaagactgtggaaggtttgcgtagagcaccatacattctatcgattggtaagtccagagcagccaccaaaggctaagtttttgactttgggctccaaattccgctactctgggcgtacccaggctcagacccgacaggcgagcacgctgattgataggcccgcaccacattttgaacgcaccagcagtaaacgtgtctccagatcgctcgacggggctccaataggagttatggatcaatcattgatgaaggattttcccggtgctgccggagaaatctcagcctatggaccaggattagtctccattgctgttgtgcaggacggcgacggaaggcgggaggtcaggagtcccaccaaggcccctcacctccagctcattgaaggaaaaaaaaatagcctcagagtcgagggcgataacatctatgtgcgccatagcaacctcatgctggaagagctggataaagctcaggaggacatcctcaagcaccaggcctctataagtgaactgaagcggaattttatggagagcacgcccgagccgagaccgaacgagtgggaaaaaaggcgaattacacccctctccttgcagacacagggcagctcgcatgagaccctgaacatagtagaagagaaaaagagggcagaagtgggcaaggacgaaagggtcatcacagaggaaatgaacggaaaggaaatttcacctggcagcggcccaggtgagatccgcaaagttgagcctgtcacacaaaaggactctacatcactgtcttctgagagttcctcatcttcttctgagtcagaggaggaggatgtgggagagtacaggccacaccaccgcgtgaccgaagggaccatccgagaggagcaggaatatgaggaagaagtggaagaagagccccgtcccgcagctaaagttgtagagagggaagaggccgtcccagaggcttcaccagtgacccaagccggagcctccgtcattacagtggagaccgtgatccaggaaaacgtgggcgctcaaaaaattccaggcgagaagtccgttcacgagggagctctgaagcaggacatgggcgaggaggcagaggaggagcctcagaaggttaatggcgaagtgagtcacgtggacattgatgtccttccacagattatctgctgctcggagccacccgtcgtaaaaactgaaatggtcaccataagtgacgcctcacagcgtactgagattagtacgaaggaggtccccatcgtacagacagagaccaagacaattacctatgagtcacctcagattgacgggggagcaggcggtgattctggcacactcttaaccgctcaaacaattactagtgaatccgtgagcactacaacaaccacacacatcacaaagactgttaaaggaggaatatcagaaacgcgcattgagaaaagaatcgtgattactggggacggagacatcgatcatgatcaggcccttgcccaggccatccgggaggccagagagcagcatcccgatatgtcagttacaagagttgtcgtacacaaggaaactgaactggcagaggagggcgaggattag

SEQ ID NO: 222222 - DNA, 3018 bp, synthetic construct
  misc_feature 1..3018: note = Description of Artificial Sequence: Synthetic coding sequence
  source 1..3018: mol_type = other DNA
atgaccaccgaagttggaagcgtgagtgaagtcaagaaggatagttcacagctcggcactgatgctaccaaggaaaaaccaaaagaagtggccgagaatcagcagaaccagtcgagcgatcccgaggaagagaagggaagtcagccacctccggctgctgagtcgcagagctcgctgcggaggcaaaaaagggagaaggagacctccgagtctcgtggaatctcccggtttatcccgccatggctgaagaagcaaaagtcatacacactggtggtagcaaaggatggtggcgacaagaaagagcccactcaagcagtagtcgaggagcaggtcctggataaggaggaacccctgcctgaagagcagaggcaggccaaaggagatgccgaggaaatggcacaaaaaaagcaggagattaaggtggaagttaaggaagagaaaccgagcgtgtccaaggaggagaagcctagcgtatcgaaagtggagatgcaaccgacggagcttgtgtctaaggagagggaagaaaaggtcaaagagacacaggaagacaagctggagggcggagccgctaagcgtgagaccaaggaagtgcagactaatgaactgaaagccgagaaggcgtcacaaaaggtgactaaaaagaccaagactgtccagtgcaaagtcacgttactggacggtactgagtattcttgcgacctcgagaaacacgcaaaaggacaggtgctattcgacaaagtgtgtgaacaccttaacctgcttgaaaaggactattttgggcttctgttccaagagtcacctgaacagaagaactggcttgatccagccaaagaaatcaagcggcagctccgtaatctaccatggttgttcacctttaacgtaaagttctatccccctgacccaagccaactcaccgaggatatcacacgctactttctgtgtttgcaactccgacaggatatcgcctctggccgtctcccttgcagtttcgttacacacgctctcctcggctcctacacccttcaggccgagttgggtgattatgatccagaggagcatgggtcaattgacctgtccgagttccagtttgccccaactcagaccaaggaactcgaagagaaggtggctgagttgcataaaactcaccgcggactgtcccccgctcaggccgacagccaattcctggaaaacgcaaaacggctaagcatgtatggggttgacctccaccacgccaaagactcagagggcgtggacatcaaactaggggtatgcgctaacgggctgctgatatataaggacaggttgcgtattaaccgctttgcttggccaaagatcctgaagatcagttataagcgatccaacttctacattaaggttcgtccagctgaactcgaacaattcgaaagcacgatcggatttaagctcccaaaccatagggctgccaagaggctatggaaggtgtgcgttgagcatcataccttttaccgcctagtgtctccggaacaaccccctaaggccaaattcctgacattgggctctaaattcaggtactccggtagaactcaggctcagactaggcaagccagtaccttaatagacagacccgcaccacattttgagagaaccagctcaaaaagggtttccaggagcttagatggcgctcccatcggcgtgatggatcagagtctaatgaaagactttccaggggcagccggagagatctctgcttatggacccggactggtcagtatagccgtcgtccaggacggggacgggcgtagagaggtaagatctcctactaaggccccacacctccagctgatcgaaggtaaaaagaatagtctccgtgtagaaggtgacaatatctacgtcagacattccaaccttatgcttgaggagctggataaggcccaagaggatatcctcaaacaccaggcaagcatttcagaactgaagcgaaacttcatggaaagcactccagaacccagaccaaatgagtgggagaagcgtcgtatcacccccctgtccctgcagacccaggggagcagtcatgagacactcaatatagtcgaagagaagaagcgggctgaggtggggaaggatgaacgggtgatcaccgaggagatgaatggcaaagagatcagccctggctctggtcccggagaaatccggaaagtagaacctgtgacgcagaaggattctacctccctcagttcagagtcttcttcttcgtcaagtgagtcagaggaggaagacgtgggagagtatcgccctcaccacagggttacagagggcactattagggaggagcaggaatatgaagaggaagtcgaggaagagcccagacctgctgccaaggtggtggagcgcgaagaggccgttcccgaggctagcccagtcacacaggccggagctagtgtgattacagtggagacggtaatccaggagaacgtaggggctcaaaaaataccgggagagaagtctgtacacgaaggggctctaaaacaggacatgggcgaggaagccgaggaggagccacagaaggtcaatggagaagtgtctcacgtggacatcgatgtgctcccacagataatctgttgcagtgagccgcctgttgtgaaaacagaaatggtaaccatctccgatgcatctcagcggactgagatcagtacaaaagaagtaccaatcgtgcaaactgaaactaaaacaattacgtatgaatccccacagattgatgggggagccggtggtgactctggcaccctgctgaccgcacagaccattacatctgaatcagtgtccaccaccaccaccactcacattacaaagactgtaaagggcggaatcagtgagacccgcattgagaagcgaatcgtgattaccggtgacggcgacatcgatcatgaccaggctctggctcaagcaattcgtgaggcacgagaacagcatccagacatgtccgtgacacgggtggtggtgcataaagaaacagagttggccgaggaaggagaggattag

SEQ ID NO: 222223 - DNA, 2022 bp, synthetic construct
  misc_feature 1..2022: note = Description of Artificial Sequence: Synthetic coding sequence
  source 1..2022: mol_type = other DNA
atgactaccgaagtgggtagcgtctcagaagtgaagaaagactcctcccaactggggacggatgccaccaaggagaagcccaaagaggtggcggagaatcagcaaaatcagagttcggacccagaagaggagaaaggctcccagcccccacccgcagctgagagccagagttctcttcgcaggcaaaaaagagaaaaggaaactagtgagagtagaggaattagtagatttattccgccttggctgaaaaaacaaaaatcctatactctggtggtagccaaagacggtggagacaaaaaagagcccacccaggccgtcgtcgaagaacaagtccttgataaggaggagccccttcctgaggagcagcgtcaagcaaagggagacgccgaggaaatggcacagaaaaagcaagagattaaggttgaagtgaaggaggaaaagccctctgtgagcaaagaggagaaaccaagtgtgagcaaggtggagatgcagccaacagaattggtctccaaggagagggaggagaaggtgaaggaaacacaggaagataagctcgaaggcggagctgcaaaaagggagactaaagaggttcaaaccaacgaactcaaagccgagaaagcgagccagaaagtaacgaaaaagacaaagaccgtgcaatgtaaggtcacccttcttgatgggactgagtattcttgtgatctggagaagcacgctaagggccaggtcttgttcgataaagtttgtgaacacctgaatctcctggagaaggactactttggactcttgttccaagaatctcccgagcagaaaaactggctggaccctgcaaaagagatcaaacgacagctccgaaacctgccctggctgtttactttcaacgtgaagttttaccctccagatcctagccagctcacagaagatatcactcggtacttcctgtgcctgcaacttaggcaggatattgccagtggccgacttccatgttccttcgtgacacatgctctcctcggcagctacacactccaggcggaacttggggactacgatccagaggaacacggatccattgatctctcagagttccaatttgcacccacacagacgaaagaacttgaggagaaagtggctgaactccacaaaacacatcgcggactgagccccgcacaggccgactcccagttccttgagaacgctaaacgtctcagtatgtatggagtcgatttacaccacgcgaaggactcagaaggggtggacataaaacttggcgtgtgcgcaaatggcctgttaatctacaaagacaggctgcgcattaaccgatttgcatggccaaagatcctaaagatctcctacaaacgatctaatttttatatcaaagttcggcctgccgaacttgaacagtttgagagcacaattggttttaagttacccaaccaccgagctgctaaaagactgtggaaagtgtgcgtcgagcatcacaccttttacagactggtgagtcccgaacagcccccaaaggcgaaatttttgacactggggagcaaattccggtacagtggacgcactcaggcacagacaaggcaagcgagcactcttatcgatcgtcccgcacctcacttcgaacggacatcttccaagagagtgtctagaagcttggacggagcaccaataggggtgatggatcaatctcttatgaaagactttcccggagcagctggggagatcagtgcctatggacccggtttagtcagcatcgctgtagtgcaggacggggacggcaggcgggaagtgagaagccccactaaggccccacaccttcagctaatcgaaggaaaaactgtcaagggtggcataagtgaaaccaggattgagaagaggattgttatcaccggcgacggtgacattgatcatgatcaggccctggcacaggctataagggaagcccgagaacagcaccctgacatgtcagtgactcgagtagtggtgcacaaagagacagagctggcagaggaaggggaggattag

SEQ ID NO: 222224 - DNA, 1902 bp, synthetic construct
  misc_feature 1..1902: note = Description of Artificial Sequence: Synthetic coding sequence
  source 1..1902: mol_type = other DNA
atgaccacagaagttggcagtgtatccgaggtgaaaaaagacagcagtcagctaggtaccgacgcaaccaaggaaaaaccaaaggaggtggccgagaaccagcagaaccagagtagtgacccagaggaagaaaagggtagccaacctccgccagccgctgagagtcaatcttccctacgtagacagaagcgagaaaaggaaacatccgaatctcgaggcattagccgatttatacctccctggctcaagaagcagaaatcatataccctggtagtcgcaaaggatggcggtgataaaaaagaacctacacaggctgtggtggaggagcaagtgctggataaagaggaaccactcccagaggaacagcgccaagccaagggcgatgcagaagaaatggctcagaagaagcaggagataaaggtggaggttaaggaggagaagcctagcgtttccaaagaagagaagccctccgtgtccaaggtggagatgcagcctacagagcttgtctccaaagagagggaagagaaagttaaggaaacccaggaagacaaactggaaggcggagcagcgaagcgagaaacaaaggaagtacagactaacgagttgaaagcggaaaaagccagccagaaagtaaccaaaaaaaccaaaaccgtccagtgtaaagtaacgttacttgacggtaccgaatatagctgtgacctcgaaaaacatgctaaaggacaggtgctattcgataaagtttgtgagcacctgaatctcttagaaaaagattatttcggcctgctgtttcaagaaagcccggaacagaaaaactggctggatccagccaaggaaatcaaacgccaacttagaaatctgccgtggttattcacctttaacgtcaagttttacccgccagacccatcgcagctcacagaagacataacgaggtattttctctgcttgcagttgcggcaagacattgcatctgggcgtctgccatgtagctttgtgactcacgccctcttgggaagttacactcttcaggctgagctgggggactacgacccggaagagcacggctccatagatctgagcgagtttcagttcgctccgacacagactaaggagttggaggagaaggtcgccgagctccataagacccatagaggtctctcccctgcccaggccgacagtcaattcctagagaatgcaaaacgcctgtctatgtatggtgtcgatttacaccacgctaaagactccgagggggtcgacattaagttgggcgtctgcgctaacggtctgctgatctacaaggaccggcttaggattaacagatttgcttggcctaagatcctgaaaatatcttacaagaggagcaatttttacataaaggtgaggccagcagaactggagcaattcgagagcactattgggttcaaactgccaaatcatcgcgctgccaaacgcttatggaaagtgtgcgttgagcaccatacattctatcgactggtttcaccagaacagccccctaaggctaaatttttgaccctcggctccaagttccgctacagtggtcggacacaagcacagacaagacaggcatccacccttattgaccgcccagcccctcacttcgaacgcacctcctcaaaaagggtgtcccggtctctggatggggcacccattggcgttatggaccagagcctcatgaaggacttccctggcgctgccggtgagatttccgcatacggccctgggctggtttccattgccgtcgtgcaggatggcgacggcaggagggaggtgagatcccccaccaaggcccctcatctgcaacttatcgaaggaaagtcgtcccatgagacactgaacattgttgaagagaagagcggacagagactgggcaagacgaaagaatag

SEQ ID NO: 222225 - DNA, 2244 bp, synthetic construct
  misc_feature 1..2244: note = Description of Artificial Sequence: Synthetic coding sequence
  source 1..2244: mol_type = other DNA
atgactactgaggtgggctccgtgtccgaggtgaaaaaggattccagccagctgggtaccgatgccaccaaggagaagcccaaagaagtggctgaaaatcagcagaaccagtcctccgatcctgaggaggaaaaaggaagtcagccgcctccagctgccgagtctcaatccagccttcgaagacagaagcgggagaaggaaacttcagagtccagaggaattagcaggtttatccccccatggttgaagaagcagaaatcctatacgctggtcgtggccaaagacggcggtgacaaaaaagaaccaacccaggcagtggtggaggagcaggtcctggataaggaggaaccgctccccgaagaacagagacaggccaaaggtgacgccgaggagatggcacagaagaagcaggaaatcaaagtggaagttaaagaggagaaacccagcgtctctaaggaggagaaaccatccgtgtctaaagtggaaatgcaacccacagaactcgtgagtaaggaacgggaggagaaggtcaaagagacacaggaagataagctggagggcggtgccgctaaaagagagaccaaggaggtgcaaactaatgagttaaaggccgagaaggctagccagaaagtgacaaaaaagactaagactgttcagtgcaaagtaacgttgctcgacggcacagagtattcctgtgacctagagaagcatgccaaggggcaagtgttatttgacaaggtatgcgagcatctcaacttacttgaaaaggattactttggcctcctttttcaagagagcccagagcagaagaactggctcgatccagccaaggagatcaagagacagctcagaaatctgccgtggctgttcaccttcaacgtgaaattttacccccctgacccctctcagctcaccgaagacattacacgatacttcctgtgtctccaactgcgccaagacatcgcttcaggccgtctcccctgttcctttgtcacccatgcattgcttggctcgtacaccctccaggccgagcttggcgactacgaccccgaagagcacggatcaattgacctgtcagagttccaattcgcaccaacccaaaccaaggagctggaagagaaagtcgcggagcttcacaagacccaccgcggactgagccccgctcaggccgattcacagttcctcgaaaatgctaagcgcctctcgatgtacggtgtcgacctgcatcacgcgaaggatagcgagggtgtagacattaagttgggtgtctgcgctaatggcttgctgatctacaaagaccgcctgcgcattaaccggtttgcctggccgaaaattctgaaaatctcttataagcgcagcaacttctacatcaaagtcaggccagcggagctggagcaattcgagagtacgataggtttcaaactcccaaaccaccgagccgcaaagcgtctgtggaaggtctgtgtagagcaccacaccttctatcgcttagtctctcctgaacagcctcccaaagcgaagtttctcacgctcggcagtaaatttcgatattctggcaggacccaggcccagaccaggcaagcctcgaccctcattgataggccagcaccacacttcgaaagaacttcttctaagagggtcagcaggtcattggacggcgctcctattggagtgatggatcagtctcttatgaaagattttccgggagccgcaggcgaaattagcgcttatggccctggtcttgtaagtatagcagttgtgcaggatggggacggaagaagggaggtcaggagcccaaccaaagcgccacatctgcagctgattgagggtaagccacccgtcgtaaaaactgaaatggtgacaatttcggatgccagccaacgcaccgaaatatctactaaagaggtcccgatagtgcagacagagaccaagaccatcacatatgagtcaccgcaaatagacggcggagctggtggtgacagtggaactctgctcaccgcacagactataaccagcgagtcggtctccacaacgacaacgacccatatcacaaaaaccgtgaaagggggtataagtgaaacccggattgaaaaacgaatcgtgattaccggggacggagacatcgaccatgaccaagctctggctcaggccattcgagaggcccgagaacagcacccagacatgtcagtgacccgggtggtggtccacaaggagactgaactggcagaagaaggggaggattag

SEQ ID NO: 222226 - DNA, 1143 bp, synthetic construct
  misc_feature 1..1143: note = Description of Artificial Sequence: Synthetic coding sequence
  source 1..1143: mol_type = other DNA
taactggggagtaaatttaggtatagcggcaggactcaggctcagactcgccaggccagtaccctgatcgatagaccggctccccacttcgaaagaacaagttctaaacgcgtatctaggagtctcgatggagcacccatcggtgtgatggatcagtctttaatgaaagattttccgggagctgcaggagaaatctcagcctatggcccaggcttggtaagcatcgccgttgttcaggacggggacgggaggcgtgaggtccggtcacccactaaagctcctcacctgcagttaattgagggaaaaaagaattcccttagagttgagggagataatatatacgtgcgacacagcaacttgatgctcgaagagctggacaaggctcaagaggatatcctcaaacaccaggcatccatatcggagctcaaaaggaacttcatggagtctacccccgagcccagacccaacgagtgggagaaacggaggatcacaccattatccttacagactcagggtagaaagggcgaccacctgtttaaggatatcctctcggtaaaagaaaaatacctgatgcccaccatttggaccgtagaagaaaaggcccaggagacagacaagacccgagcccctgagagtgagggaccatgtaccggtgcacgggacgcggtaaagagcagccatgagaccttgaacattgtggaggagaagaagcgcgctgaggtgggcaaggatgaacgggtaattacagaagaaatgaacggcaaggagatttcaccaggatcggggccaggggaaatcaggaaagtggagcccgtgacacagaaagactctacttctctgtcaagtgagagttctagcagtagcagtgaatcagaggaagaagatgtaggggagtatcgtccccaccacagagtgacagagggcaccatcagagaggaacaagaatacgaagaagaagttgaagaggagcctagacctgccgcaaaggtggtcgagagagaagaagctgtgccggaggcgagcccagttacacaggcgggtgccagcgtgatcaccgtggagaccgtaatccaggagaacgtgggggctcaaaaaatcccaggagagaaatcggtgcacgaaggggctctgaagcaggactag

SEQ ID NO: 222227 - DNA, 1152 bp, synthetic construct
  misc_feature 1..1152: note = Description of Artificial Sequence: Synthetic coding sequence
  source 1..1152: mol_type = other DNA
atggaagaggaagaaactcagcttgaagaggaattggacaaagctcaggaggacatcctgaaacaccaggcctctatctctgagctgaaaaggaatttcatggaatcgacgccggaaccaaggccaaacgagtgggaaaaaagaaggatcactccactttccctccagacccagggatcaagccacgagacactgaacatcgtggaagaaaaaaaaagagctgaggtcgggaaggacgaacgggttattactgaggagatgaatgggaaagagatttccccaggcagcgggccaggagaaatacgtaaggtcgaaccagtgacccaaaaagactccaccagtttgagcagcgaaagcagtagctcttcttctgagagtgaagaagaggatgtgggtgaatatagaccccaccacagggtcacagagggaaccatccgagaggagcaggagtatgaagaggaagttgaggaagaaccaaggcctgctgctaaagtggtggaacgcgaggaagcggtccccgaagcctcaccagttacccaggcaggggcttccgttatcaccgtcgaaacagtcatccaggaaaacgttggggcacagaagatccccggagagaagagcgtgcatgaaggtgctttaaaacaagatatgggtgaggaggcagaagaagaaccacagaaggtgaacggagaagtgtctcatgtggacatcgacgttctgccacagatcatctgctgctccgaacccccagtggtgaagacagagatggttactatctcggacgcctctcagcggaccgagatctctaccaaagaggtcccaattgtccaaacagaaacaaagacaatcacatatgaaagtccgcagatcgacggcggagcaggaggggatagcgggacgctgctcacagcccagacaatcacctctgagtccgtgtccacaaccacaactacccacattacaaaaacagtaaagggtggaatctccgagacgaggatcgaaaagaggatagttattactggcgatggggacattgatcacgaccaggctcttgcacaggcaattcgcgaggccagagagcagcacccggatatgtccgtgaccagagtggtagtgcacaaggagacagagttggccgaggaaggcgaggattag

SEQ ID NO: 222228 - DNA, 2022 bp, synthetic construct
  misc_feature 1..2022: note = Description of Artificial Sequence: Synthetic coding sequence
  source 1..2022: mol_type = other DNA
atgaccacggaagtcggctccgtctcggaggtcaagaaagacagctcacaactcggcaccgatgcaaccaaggagaagccaaaagaagttgccgagaaccagcagaaccagtcttcagaccctgaagaagagaagggttcacagcccccacctgccgcagagagccagtcttctcttaggaggcagaagcgtgagaaagaaacatcagagagccgcggaatctcaagatttatcccaccttggctaaagaaacagaaatcctacaccttggtggtagctaaggacggtggtgacaagaaggagcctacccaggctgtcgtagaggaacaggtcctggacaaagaggaaccattgcccgaagaacagaggcaggctaagggagatgcagaagaaatggctcagaaaaaacaggagatcaaagttgaggttaaggaggaaaaacctagcgtaagtaaggaagaaaagccctccgtcagcaaggtggagatgcagcctacagaacttgttagcaaagagcgggaggaaaaagtaaaggaaacccaagaggataaacttgaagggggagcggcaaaacgcgagactaaagaagtacagactaatgagctgaaagcagagaaagcctcacagaaggtgacgaagaagaccaagaccgtccaatgtaaggtgacgctgctcgatgggaccgagtactcctgcgacttggaaaagcacgccaaagggcaggttctgttcgataaggtgtgcgagcatctgaatctcctggagaaagactatttcggcttactttttcaggagtctcctgagcagaaaaactggctcgatcccgcaaaagagattaaacgccaactgcgtaatctgccctggctgttcacattcaatgtgaagttctatcctcccgatccaagccaactgacagaagatattactcggtactttctctgcctccagctcagacaagatattgccagcggacggctgccatgttctttcgtcacccacgctctcctcggctcttatacacttcaggctgagctaggtgactacgatccagaggagcacggctccatcgatctgtccgaattccagtttgccccaacccagacaaaggaactggaagagaaagtggctgagctgcataagacccacagaggcttaagccccgcacaggccgatagccaattcctagaaaatgcaaagcggctctcaatgtacggtgttgatctacaccatgccaaggatagtgagggggtcgatataaaattgggggtgtgtgcaaacggcctgctgatctataaggaccgcctgagaatcaatcgcttcgcgtggccaaaaatccttaaaattagttacaaacggtcgaacttctatatcaaagttcgcccagcggagttggagcaatttgagtccacaatcggatttaaattgcccaatcatagggctgcgaagcgcctttggaaggtctgcgtggaacaccataccttttaccggcttgtgagcccggagcaacctcccaaagctaaattcttgacactggggtccaagttccgctatagtggcaggacacaggcgcagaccaggcaggccagcaccttgattgatcggcctgctccacactttgaaaggacttctagcaaacgggtgtcaagaagccttgacggggcacccattggcgttatggatcaaagtctgatgaaagactttcctggggctgccggagagatcagcgcctacggtcccggactcgttagcatagcagtggttcaggacggggacgggcgacgtgaagtcagatccccaactaaagcccctcacctgcaactgattgaaggcaagaccgttaaagggggaatatcagaaactaggatagagaaacgcatcgtgatcactggagatggggatattgatcacgaccaggctctggcacaagcaatcagagaagccagggagcagcaccccgatatgtccgttactcgggtagtggtccataaagagacagagttagcggaggaaggcgaggattag

SEQ ID NO: 222229 - DNA, 462 bp, synthetic construct
  misc_feature 1..462: note = Description of Artificial Sequence: Synthetic coding sequence
  source 1..462: mol_type = other DNA
atgactacagaggtcggaagtgtgtccgaagtcaaaaaggatagctcccagctcggaacagacgcaaccaaggagaaacctaaggaggtcgcggagaaccaacagaaccagtcctccgatcccgaagaggagaagggcagtcaaccccctccggcagctgagtctcagtcttctttaaggagacagaagcgagaaaaagagacgtctgagagccgtgggatctcgcgatttatcccaccctggcttaaaaaacagaaatcttatacacttgtggtcgccaaagacggcggagacaagaaggaacccacccaggcagtggttgaggagcaggtattggacaaggaagagcccctgcccgaggagcagaggcaagccaagggagacgcggaagagatggctcaaaaaaagcaggaaattaaagtcgaggtcaaagaggagaagccctccgttagcaaagagtag

SEQ ID NO: 222230 - DNA, 2244 bp, synthetic construct
  misc_feature 1..2244: note = Description of Artificial Sequence: Synthetic coding sequence
  source 1..2244: mol_type = other DNA
atgaccactgaggttggtagtgtttcagaggtgaaaaaagattccagccagctgggaacagacgccacaaaagaaaagcctaaagaggttgcagaaaaccaacagaaccagagcagtgacccagaagaggaaaaaggaagccagccgccacccgctgccgagagccagtcttccctacgacggcagaagagggagaaagaaacctccgaatctagagggattagcagatttatccctccctggctcaagaagcagaaaagttacacactcgtcgtcgcaaaagatggtggcgataaaaaggaacccactcaggctgtagtggaagagcaggttctggataaggaggagcccctgcccgaagaacagagacaagctaaaggtgatgccgaagagatggcccagaagaagcaggagatcaaggtagaggtgaaggaggagaagcccagcgtaagcaaggaggaaaagccatctgtttcaaaggttgaaatgcagccaaccgagttggtgagcaaagaaagagaggaaaaggtgaaagagacccaagaagacaaactcgagggaggtgctgccaagagggagaccaaggaagttcagaccaatgagctcaaggcagaaaaagcctcgcaaaaggtgacaaagaagacaaagaccgtgcagtgtaaagtgaccctcttagatggtaccgagtattcctgcgatttagagaagcacgccaaaggccaagtactgttcgacaaagtttgcgaacatctgaacctgttagaaaaagactattttggcctgctgttccaagaaagccccgaacagaaaaactggttagaccccgctaaggaaatcaaacgacagctgaggaatttgccttggctcttcacgttcaacgttaagttctatcctcctgatccaagccagcttacggaagatatcactcggtactttttgtgtctgcagctccgccaggatatcgcgtccggaagactgccatgcagttttgtgacccacgctctgttaggaagctacacgctgcaggccgagctgggggattatgaccccgaggaacacgggtctatcgatctatccgaatttcaatttgcccctacacaaaccaaagagctcgaggagaaagtggcggaacttcacaaaacccacagaggtttaagtcccgcacaggccgactcacagtttcttgaaaacgcaaagcggctctccatgtacggtgttgatctgcaccatgctaaggacagtgagggggtcgacatcaaactgggagtgtgtgccaatggcctgttaatatataaggaccgcctcagaattaaccggttcgcttggccgaagatcctgaaaatatcttacaaaagaagcaacttttacattaaggttcgccctgccgagctcgagcagttcgaatctaccatcgggtttaaactccccaatcacagagctgccaagaggctgtggaaagtgtgtgtggagcaccataccttctatcgcctcgtgagtcctgagcagccaccaaaggctaaattcttgacattagggtctaaatttcgatattctggccgaacccaggcgcaaacgagacaggcctctacactaatcgaccgcccagcgcctcatttcgagcgtacctcatcaaagagagtgtcacggagccttgacggagcccctattggagttatggatcagtccctgatgaaagatttcccaggtgcagcaggcgagatttctgcatacggtcccggtttagtcagtattgctgtggtccaggatggggacggtaggcgtgaggtccgcagtcctacaaaggctcctcacctccaattgatagaggggaaaccgcctgtggtgaaaacggagatggttacgatcagcgacgcctcgcagaggaccgagatctccaccaaggaggtccctattgtgcagactgaaaccaaaaccattacgtatgagtccccacagatcgacggcggagctggaggagatagtgggactttgcttactgcgcaaaccataacctccgaatccgtctctacgacaaccactacccacattacaaaaacggtgaaaggtggcatctctgaaacgagaattgaaaagaggattgtcataaccggcgatggtgacatcgatcatgatcaggctcttgcacaggccatcagggaagcacgggagcagcaccccgatatgtcagtgacgagggttgtggtccataaagagaccgaattggctgaggaaggcgaggactag

SEQ ID NO: 222231 - DNA, 540 bp, synthetic construct
  misc_feature 1..540: note = Description of Artificial Sequence: Synthetic coding sequence
  source 1..540: mol_type = other DNA
atgacaaccgaggtaggcagcgttagcgaagtcaaaaaagacagtagtcagctgggaactgacgccaccaaggaaaagccaaaagaggtggccgaaaaccaacagaaccagtccagcgacccagaggaggaaaagggctcacaacctccacctgcggctgagtcacagtcaagtctgcggagacagaagcgggagaaagaaacgtccgaatccaggggcatctcacgcttcatcccgccttggctgaaaaagcaaaagtcctatacccttgtcgtcgctaaggacggcggagacaagaaagaaccaacacaagccgtagtggaggaacaagtgcttgacaaggaggaaccgctacccgaggagcagcgacaagctaagggggatgctgaagaaatggcccagaagaagcaggagattaaagtggaagttaaagaggagaagccctccgtatccaaagaagaaaaaccgtctgtcagcaaggtggaaatgcagcctactgaactcgtctcaaaagaacgggaagagaaggttaaagagtag

SEQ ID NO: 222232 - DNA, 2559 bp, synthetic construct
  misc_feature 1..2559: note = Description of Artificial Sequence: Synthetic coding sequence
  source 1..2559: mol_type = other DNA
atgacaactgaagtagggagcgtatcagaggtaaagaaggactcatcccagctcggaaccgatgcgacaaaagaaaagcccaaggaggttgccgagaaccaacaaaatcaatcatctgaccccgaggaggagaaaggcagtcagcccccacctgcagcagagagccagtcctctctgagacgccagaagcgtgagaaagagacatccgagagtcgcggtatctccaggtttatacctccttggttgaaaaaacagaaatcatacacgctggtcgtggcaaaggacggcggagataagaaagagcctactcaggcggtggttgaggagcaggtgctggacaaagaagagccattacctgaagaacaacgccaagcgaaaggtgacgctgaggaaatggcacaaaaaaagcaggagattaaggtcgaagtgaaggaggagaagcctagcgtgagcaaggaagaaaaacccagcgttagcaaagtggagatgcagccaaccgaactggtaagtaaggagcgcgaagagaaggtgaaggaaactcaggaagacaagttggagggtggagccgctaagcgcgagacaaaggaagttcagaccaacgaactcaaagctgagaaggcttctcagaaagtgactaaaaagacaaaaaccgtccagtgcaaagtgacactcttagacggcacagaatatagctgtgacctcgagaaacacgcaaaagggcaggttctcttcgataaggtgtgcgaacacttgaacctgctggagaaggactacttcggactcctctttcaggaatctcccgagcagaaaaactggcttgacccagccaaggagattaagagacaactgcggaatctcccctggctctttacatttaacgtgaagttctacccgccagatccaagtcagctcacggaggacatcacgagatacttcctgtgcttgcagctccggcaggacatcgcatccggaaggcttccctgtagcttcgttacccacgctctcctggggtcatacacattgcaagctgaactgggagattatgacccggaggagcatggaagtatcgacctgtcagagttccagttcgctcctacgcagaccaaggagctggaggagaaagtggcagagttgcacaaaacacaccgaggtctgagtcctgcccaggccgactctcagttcttggagaacgccaaacgcctgtctatgtacggtgttgatctacatcacgccaaggatagtgagggcgtagacatcaaactgggagtgtgcgccaacggtcttttgatttataaggaccgcctgagaattaatcgctttgcctggccaaaaatcctcaaaataagctataaaaggtcaaatttctacatcaaggtccgtccagcagaactagaacagtttgagtcaaccattggatttaaactgcctaaccatagagctgctaaaagactctggaaggtgtgtgtggagcaccacacattctaccgcctcgtctcacccgagcagcctccaaaagctaaattcctcactcttgggtcgaagttccggtactcaggcaggactcaagcccagacacggcaagcttccacactcatcgataggcctgcaccccactttgagcggacatcaagcaagcgagtatcacggagtttggacggggcacccatcggtgtgatggaccagagcttaatgaaagatttccccggagccgctggcgaaatctctgcgtatgggccaggcttggtgtccatcgccgtcgtgcaggatggcgatggaagacgggaagttaggtcaccgactaaggctccccatcttcagctgatagagggaaaaagttctcatgaaacactgaatattgtggaggaaaagaagcgggctgaggtgggtaaggatgagcgggtcattaccgaagagatgaatggaaaagagataagccctggctccgggcctggagaaataaggaaagtcgaacctgtcactcagaaagattcaacttctctcagctctgagtccagcagctccagctcagaatcagaggaagaagacgtgggggaataccggcctcatcacagggtcacagaggggacaatccgcgaggaacaagagtatgaggaggaggtcgaagaggagccccgaccggcagccaaaccccctgtggtcaaaaccgagatggtaactatttccgatgcttcccaacggaccgagatcagtactaaggaggtccccatcgtacagaccgagacgaaaacaatcacctacgaatctccccagattgatggaggcgctggaggggactcaggaaccctgctgactgctcagactatcacaagcgagagcgtgtcaaccaccacaaccacacatataactaaaaccgtgaagggcggaattagcgaaactagaatcgagaagaggatcgtgataactggggacggcgacatcgaccatgatcaggcactggcccaagccatcagagaagcccgagaacaacatcccgacatgagcgtgacacgagtggtcgtccataaagagactgaactggccgaagagggcgaggattag

SEQ ID NO: 222233 - DNA, 357 bp, synthetic construct
  misc_feature 1..357: note = Description of Artificial Sequence: Synthetic coding sequence
  source 1..357: mol_type = other DNA
atgaccactgaagtgggaagcgtatctgaagttaaaaaggattcctcacagctgggcacggacgccaccaaggaaaaacccaaggaggttgcagaaaatcagcaaaatcagagctctgatccagaagaggagaagggaagtcaacctcctcctgccgctgagagccagtcatccctgaggagacagaaaagggaaaaggagacctctgagtctcggggtatttcaagatttatacccccttggctaaagaagcaaaagtcatacacactcgtggtcgcaaaagacggcggtgacaaaaaagagccgacgcaggcagtagtggaggagcaagtgttggataaagaagaacccctttag

SEQ ID NO: 222234 - DNA, 606 bp, synthetic construct
  misc_feature 1..606: note = Description of Artificial Sequence: Synthetic coding sequence
  source 1..606: mol_type = other DNA
atggaagaggaggagacccaactggaagaaaaaaactcattaagagtcgagggcgataacatatacgtgcggcacagcaatctcatgctcgaggaactggacaaagcccaggaggacatcttgaaacatcaggcatccatttccgagcttaagaggaattttatggagagtacgcccgaaccacggcctaatgaatgggaaaagagaaggattacacctctgagccttcagacccagggcacccgcgctcccgaaagcgaagggccatgcaccggagctcgagacgcagttaaaccaccggtggtcaagactgaaatggtgacaattagtgacgcctcccagcgtaccgagatttctactaaggaagtgccaattgtccagaccgagacaaaaacgatcacatacgagagtccccagacagtgaagggtggcatttcagagacaagaatagaaaaacggatcgtcattaccggtgatggtgacatagaccatgaccaggccctagcacaggccattagagaggcaagagagcagcaccctgacatgtccgtaaccagggtagtggtgcataaggagacagagctcgccgaagagggtgaggattag

SEQ ID NO: 222235 - DNA, 384 bp, synthetic construct
  misc_feature 1..384: note = Description of Artificial Sequence: Synthetic coding sequence
  source 1..384: mol_type = other DNA
atgacgacggaggtcgggtctgtgtctgaggtaaaaaaggattcatcgcaactcggaactgacgctacaaaggagaaacctaaagaggttgccgaaaaccaacagaatcaaagctctgatccagaggaggagaaaggatcgcagcccccacccgcagcggaatcccagtcttctctccgtaggcagaagagagaaaaggagacatctgagtccagggggatctccagatttattcctccgtggctaaagaaacaaaaaagttacaccctagtagtggcgaaggatggcggagataagaaggaaccgacgcaggcggttgtcgaggagcaggtgctagataaagaggaaccattgcccgaagagcagaggcaggccaaaggatag

SEQ ID NO: 222236 - DNA, 489 bp, synthetic construct
  misc_feature 1..489: note = Description of Artificial Sequence: Synthetic coding sequence
  source 1..489: mol_type = other DNA
atgactacggaagtgggcagcgtttccgaagttaagaaggactccagccagctcggcacggacgcaacaaaggaaaagccgaaggaggtggccgagaatcagcagaaccaaagcagtgaccccgaggaagagaaggggagccagccccctccggcagctgagtctcaaagcagtctgcggcgacagaaaagagaaaaagagacaagtgaaagccgcggaatcagccgatttatccctccgtggctgaaaaaacagaagtcctacacattggtggtcgccaaggacggtggagacaaaaaggaaccaacacaggcagtcgtggaggaacaggtgctggataaggaagaacccttgccagaggaacagcgccaggcgaagggcgatgccgaagagatggctcagaagaagcaggagatcaaggtggaggtgaaggaagagaagccctccgtgtcaaaagaggaaaagccgagcgtcagcaaggtagaatag

SEQ ID NO: 222237 - DNA, 3264 bp, synthetic construct
  misc_feature 1..3264: note = Description of Artificial Sequence: Synthetic coding sequence
  source 1..3264: mol_type = other DNA
atgaccacagaatctggatccgactccgaatccaagccagaccaggaggccgaacctcaggaggctgccggagcacaggggagggctggagcacccgtgccagagccgccaaaggaagagcagcaacaggctcttgagcagttcgcagcagctgcggcacatagcacgcccgtacgccgagaggtgactgataaggagcaggagtttgcagctcgggctgccaagcaactagagtatcaacagttggaggatgataagctatcccaaaaatcatcttccagcaaactgagcagatcacctctcaagattgtgaaaaagcctaagagcatgcagtgtaaggtgattctcttggacggttcagaatatacatgtgatgtggagaagcgatctcgtggacaggtgctgtttgacaaggtgtgcgaacacctgaacttgcttgaaaaggactatttcggactgacttaccgagacgctgagaaccagaagaattggctagatcctgccaaagaaattaagaagcaggtccgcagcggtgcttggcattttagcttcaatgtgaagttctaccccccagatccagcccagctgtctgaagatattacaagatattacctttgtctgcagctgcgagacgatattgtatctgggagactgccatgctctttcgttacccttgcgctgctcggtagctacactgtacagagcgaactaggagactacgaccccgacgaatgtggcagtgactatatttccgaatttcgcttcgccccaaatcatactaaggagcttgaggacaaagtaatagaactccacaagagtcacagaggcatgacaccagctgaagcagaaatgcatttcctggagaatgccaagaaattatctatgtacggagtggatctgcatcatgcgaaggattcagaaggggttgagattatgctgggcgtgtgcgcctcaggtctgctgatctacagggacagactgagaatcaaccgcttcgcctggcccaaggttctgaagataagctacaagcggaataacttctacattaaaatccgccctggggagttcgagcagttcgagtccacaatcggcttcaagctccctaatcaccgggcagccaaaagactgtggaaggtgtgtgtcgagcaccatacattcttcagactgcttctgccggaggctcccccaaagaagtttctgaccttaggctcgaagtttcggtatagcgggagaacacaggctcagaccaggcgcgcttcagctctgatcgaccgacccgctccctattttgagagatcgagcagcaagcgctacactatgtcccgcagtctggatggggaggtcgggactgggcagtatgcgactaccaaaggtatttcccaaacaaatttaattacaaccgtcacgcctgagaaaaaggcggaggaggagcgagacgaggaagaagacaaaagacgcaagggggaagaggtgacacccattagtgctatccggcacgaaggtaaatctcctggcttaggcactgattcatgtcctctgtcaccaccgtccacgcactgcgctccgacgagcccgacagagctccgacgaagatgtaaagagaatgactgcaagttacccggatacgagccatcccgggcagaacacctccctggcgaacctgcgctggactctgatggcccaggccgtccttacctgggcgaccaggatgtggccttctcatacaggcagcagactgggaaaggtacaacacttttctcattcagcctgcagctacccgagtcatttccttcgctgctagacgacgacggttaccttagttttcccaatctgtcagaaacaaatttgcttccccaatctctgcagcactacctcccaatccggtccccctctctcgtcccatgttttctgtttatattcttttttctcctcagtgcctcgttcagcgttccctatgccctgacactctctttccccctggccctttgtttgtgctacctcgaacctaaagcagcttcactctcagccagcctagataacgatccaagcgattcgtcagaggaagaaaccgacagcgagcgcaccgataccgccgcagacggcgaaactactgcgacggagtctgaccaggaggaagacgcagaactgaaagcgcaggaattagagaaaacacaggacgacctcatgaaacatcaaactaacattagcgagttgaagcggaccttcctcgagacaagcacagacaccgcggtgaccaacgagtgggagaaacggttgtctacatcacctgtgcgcctggctgccaggcaggaagacgcaccgatgatcgagcccttggtgcccgaagagacgaagcagtccagtggggagaagttgatggacgggtctgagatcttttctttactggaatcagccaggaaacccacagaattcatcggcggagtgactagcacatctcaatcatgggtgcagaagatggaaacaaagaccgaatctagcggtatcgagaccgaacccaccgtgcatcatctcccactgtcaactgagaaagtggtgcaagagaccgtcctggtagaggagcggagagtcgttcacgccagcggtgacgccagctactcagctggagattcaggtgacgccgcagcccagccagcattcactggtattaaaggaaaagaaggatccgcgctaacagaaggagctaaagaggagggtggcgaggaggttgcaaaagccgtgctggagcaggaggagaccgcagcggcatcaagggaacgccaagaggagcaaagcgccgctatccatatatccgagaccctagagcagaaaccgcattttgagtcatctacagtaaagacggaaacaattagctttgggagtgtcagccctggcggtgtcaagctggagatcagcaccaaagaggtgccagtcgttcatactgaaaccaagaccattacctacgagtcttctcaggtagaccctgggacagacctggaaccaggcgtccttatgtccgcacagactatcacgagcgaaacaacaagtaccacaacaacaactcatatcactaagactgttaagggtgggatctctgagacccgaatagagaagcgcatcgtgataacgggagacgccgacatcgaccacgaccaggctctggcccaagccattaaagaggcaaaggaacagcaccccgatatgtctgtcaccaaggttgtggtgcacaaggagactgaaatcacacctgaagacggcgaggactag

SEQ ID NO: 222238 - DNA, 3264 bp, synthetic construct
  misc_feature 1..3264: note = Description of Artificial Sequence: Synthetic coding sequence
  source 1..3264: mol_type = other DNA
atgacaaccgaatccggaagcgactccgaatccaagccagatcaagaagctgagccccaggaggccgcaggtgcacagggtcgagccggtgcaccagtgcccgagcctcccaaggaagagcagcagcaggcgctggagcagttcgccgcagcggctgcccacagcacccccgtcaggcgcgaggtgacggacaaagaacaagagtttgccgcaagggccgcaaagcagctcgagtatcagcagttggaggatgacaagctgagtcagaagagctcatccagtaaactatcccgtagccccctgaagatcgtgaagaagcccaaatccatgcagtgcaaggtgattttgctagatggaagtgaatatacctgtgatgttgagaaaagaagccggggtcaggtcttatttgataaggtttgtgagcatttgaacctattagagaaagactacttcgggctgacctacagggacgcagagaaccaaaagaattggctggatcccgctaaagagattaaaaaacaggtgcgctcaggagcttggcacttctctttcaatgtgaagttttacccaccagaccccgctcagttaagcgaggacatcacacgatattatctatgcctgcagctaagggacgacatcgtgtcgggacgactaccctgctcattcgtgacactggctctgctaggctcatacaccgtgcagtccgagttgggtgactatgatcctgacgagtgcggctcagattatatcagcgagtttaggtttgcccctaatcacacaaaagaattggaggacaaggtgatagaacttcataagtcacacagaggaatgaccccagccgaggccgaaatgcacttcctcgagaatgccaagaaactgagcatgtatggggtcgatctccaccacgcaaaagacagcgagggcgtggagataatgttaggggtctgtgccagcggtctcttgatctatagagaccgattgagaatcaatcggtttgcctggcctaaggtcctcaagatcagctataagcggaacaacttctacatcaaaattcgccctggggagtttgaacaatttgaatccacaatcggcttcaagctgccaaatcacagagctgccaaacgactatggaaggtgtgcgtggagcaccatacgttctttaggttactcctgcctgaagccccacccaaaaagtttctgactctaggatctaagtttcgttactcgggtagaacacaagctcagaccaggcgcgcatctgctctgatagaccgaccagccccttactttgaaaggtccagctccaaacgatataccatgtccaggtcgttggatggtgaggttgggaccgggcagtatgcgaccactaagggaatatctcaaacaaatctgattaccactgtcactcctgaaaagaaggcagaagaagaacgtgatgaagaggaggacaaacggcgaaaaggcgaagaggtcacccctatctccgcaattaggcatgaaggcaagtcccctggtcttggcacagacagttgcccattatctccccctagcacacactgcgcccctacgtctccaaccgagcttcgccgtcgatgcaaagagaacgactgtaagctcccgggttacgaaccatctagggctgaacacctgcccggtgaacctgcactcgattcggatggcccagggcgaccctacctcggcgatcaggacgtagccttttcttatcgccagcagactggaaaaggcacaaccctgttctccttttcactccagctgcctgagtctttccctagcctcctcgatgacgacggctatctatccttcccgaacctgtccgaaactaacctgctgcctcagtctttgcagcattacttgcctattcgtagccccagtctcgtcccttgctttctttttatctttttcttcctactctctgcctccttctcagtcccttacgccttgactttatctttccccttagccctgtgcctgtgctatttggaacccaaggctgccagtctgagcgccagcttggacaacgacccttctgactcttctgaggaggagactgacagtgagaggacagatacagcggcagacggcgagactacagccaccgaatcagatcaggaggaagacgccgagcttaaggctcaggagcttgagaaaacccaggatgacttaatgaaacatcagactaatatttccgagcttaaacggacctttttggaaacatctacggacaccgctgttaccaacgaatgggagaagaggttgtcaaccagcccagtccgccttgcagctcggcaggaggacgccccaatgatcgagccactggtacctgaggagactaagcagagttctggagagaagctcatggatggctccgaaatcttttctttgctggagtctgcacgtaagccgactgaatttatcgggggagtcacctcgacaagtcagagttgggtccagaagatggaaacaaaaactgaatcatctggcatagagacagagcccacagtgcaccatctcccactctccaccgagaaagttgttcaggagaccgtgctcgtggaggagcgcagggtagtgcatgccagtggggatgcttcatacagcgcaggagacagcggtgacgctgccgcacaacccgctttcacaggaatcaaaggcaaggaagggagcgcactgacggagggtgccaaggaggaaggaggcgaagaggtggcaaaggctgtcttggaacaggaagagaccgcagcagctagtcgggaaaggcaggaggagcagagcgctgcgattcatatcagcgagactctcgaacagaagcctcattttgagagctccacagtgaagaccgagacaataagctttggctccgtgtcccctggcggagtgaagctggaaattagtactaaggaagtgccagttgtgcacactgaaaccaaaaccatcacgtatgagagtagccaggtcgatccgggtactgatttggaaccgggtgtgctgatgtcagcacagaccataacatccgaaacaaccagcacaaccactactacccacataacaaagaccgtgaagggcggaatttcggaaactcggatcgaaaagcgaattgtcatcactggagatgccgatatcgatcatgaccaagccttggcccaggctataaaggaggccaaagaacagcaccccgatatgagcgtgaccaaggttgtagtgcacaaggaaacagagataacccctgaggacggagaagactag

SEQ ID NO: 222239 - DNA, 2598 bp, synthetic construct
  misc_feature 1..2598: note = Description of Artificial Sequence: Synthetic coding sequence
  source 1..2598: mol_type = other DNA
atgactacagagagcggctccgatagcgagtctaaacccgaccaggaagctgagccccaggaggccgctggcgctcaggggcgagcaggcgctcctgtgccagaaccgccaaaagaggagcagcagcaagctctggagcaatttgcagccgcagctgcacactcaacacccgtgcggagggaggtcaccgataaggagcaggagttcgctgctagagccgcaaagcagctcgagtaccaacagctcgaggatgataagttaagccagaagagctccagcagcaagctctccaggtcacccttaaagattgtaaagaagccgaagtctatgcagtgcaaggtgattctactcgacggcagtgaatacacttgtgatgtggaaaagaggtctcgcggacaagttctatttgacaaagtatgtgagcatctgaatctgcttgaaaaggattacttcggtcttacatatagagacgccgagaatcagaaaaactggttagatcccgctaaagagattaagaagcaggtgcgctcaggagcctggcattttagctttaatgtcaagttttacccaccagatccggcacagttatcggaggacatcacaaggtattatctgtgcctgcagctgagggacgacatagtttccggacgcctgccatgctcattcgtgacgcttgcacttttggggtcctacacagtacagtcggaactgggggattatgatcctgatgagtgtggttcggactacatctcagaattcaggttcgctccaaaccatactaaagagttagaagataaggtgatcgagttgcacaagtcacaccgcggaatgactcctgctgaggctgagatgcacttcctggagaacgcaaaaaagctctccatgtatggagtagatcttcatcatgccaaggatagcgagggggtcgaaataatgcttggagtgtgtgcctcaggtttactcatttatagagatcgtctgaggatcaatcgattcgcatggcctaaggtgctgaaaatttcatataagcgcaacaatttctacattaaaattaggccgggagagttcgagcaatttgagtccactatcgggtttaaactgcctaatcatagggctgctaagagactgtggaaagtttgcgtcgagcaccacactttcttcaggctgcttctgccagaggccccaccaaagaaatttttgacgctcggaagcaaattccgctatagcggcagaacacaggcccagacccggcgagcatcggctcttatcgataggcccgctccgtattttgagcggagttcatctaaacgatatacaatgtcacgaagccttgatggggctagcgtaaatgaaaaccacgaaatatatatgaaggattccatgtcggccgctgaggtgggtaccggacagtatgcaaccaccaaaggcatctcccagacaaacctcatcacaaccgttaccccagaaaagaaggctgaggaagaaagagacgaagaagaggacaaacgtcggaaaggtgaagaagtaactcctatcagcgctattcgccacgagggcaaaacagacagcgaaaggacggacacggctgcagatggtgagaccacagcgaccgaggagctggagaaaactcaggacgatttgatgaagcatcagaccaacatctccgaactgaagaggaccttcctggagacctcgaccgacacagctgtgacgaacgaatgggagaaaagactctctaccagtcctgtacgtctcgcggcacggcaagaggatgctcctatgatcgagccactcgtgcccgaagagaaaatggaaaccaagacagagagctctgggattgagacggaacccaccgtccaccatctgccgctcagtaccgaaaaggttgtacaagaaacagtgctggtcgaagagcggagagtggtacatgcaagcggcgatgcttcttactctgctggagactctggtgacgctgccgcacaacccgcatttacaggaataaagggcaaagaaggcagcgccctgactgagggggctaaagaggaagggggagaagaagtggcgaaagccgtcctcgagcaggaagaaacagctgctgcctctagggagcgccaagaagaacagagtgcagccatccacatttctgagaccctggagcaaaaaccccacttcgagtcctcgactgtcaaaactgaaactatcagctttggttctgtttcacctggcggagtcaagcttgagatctcaaccaaggaggtgcccgtcgtgcacacagagacaaagacaattacctacgagagctctcaggtggacccaggcactgacctggagccaggtgttctaatgtccgcacagactattacaagcgagaccacgagcaccaccactaccacccacatcaccaagaccgtaaaaggcggaatcagcgagactcgaatcgagaagcgtatcgttatcaccggtgatgcagacattgatcacgaccaggcgctggctcaagcgattaaagaagccaaggaacagcaccccgatatgtctgtgactaaggtcgtggtgcacaaggagacagagattaccccggaggatggtgaggactag

SEQ ID NO: 222240 - DNA, 1155 bp, synthetic construct
  misc_feature 1..1155: note = Description of Artificial Sequence: Synthetic coding sequence
  source 1..1155: mol_type = other DNA
atgaagcatcagacaaatatttctgaactgaaacgaacattcttggaaacctcaaccgacacagcggttaccaatgagtgggagaagcgcctgagtaccagtccggttcggctggccgcaagacaggaagatgcgccaatgatcgaaccactggtgccagaagagaccaaggaggaaacagaaatcagcgagaaagtgatcttccttcaacagggatctgccccttttctagaaagtcagactaagcaatccagcggagagaagttgatggatgggagtgaaatctttagcctcctcgagtccgcgcgaaaaccaactgagttcatcggcggtgtaacaagtaccagccaaagttgggtgcagaagatggaaaccaagacagagtcaagtggtattgagacagagccaacagttcaccatctccctctgtcaacagaaaaagtggtgcaagaaaccgttctggtcgaggaacggagagttgtccacgcttccggtgacgcaagctattccgctggtgacagtggagatgctgctgctcagcctgctttcacaggtatcaaggggaaagaagggtcagccctgacggaaggagccaaggaggagggaggagaggaggtggctaaggccgttttggagcaagaagaaacagccgctgcctcaagagagcgccaggaggaacaatccgccgcaatccacattagtgaaacccttgaacagaaaccacacttcgagagttctacagtcaagacggaaaccatcagcttcggttctgtctcgccgggaggagtgaaactggagatttcaaccaaggaagtccctgtggtacacaccgaaacgaagaccataacatacgagagctctcaagttgacccgggaaccgacctggaaccaggcgttctgatgtccgcccagactatcaccagtgaaaccacatcaaccaccaccaccactcatatcaccaagaccgtaaaggggggtatcagcgagacacgtatcgaaaagcgcatcgtgatcactggggatgcagacattgatcatgatcaggccctcgctcaggctataaaagaagccaaggagcagcatcctgatatgagcgtcacgaaagttgtggttcataaggagactgagataacccctgaggacggcgaggactag

SEQ ID NO: 222241 - DNA, 2271 bp, synthetic construct
  misc_feature 1..2271: note = Description of Artificial Sequence: Synthetic coding sequence
  source 1..2271: mol_type = other DNA
atgcaatgcaaggtgatcctgttggatggatctgagtacacttgcgatgtggagaagagatcacgcggacaggtgctattcgataaagtgtgcgagcacctgaacttactggagaaagattatttcggtcttacatatcgcgacgctgagaaccagaaaaactggctcgatcctgcaaaggagataaaaaaacaggtgaggtcgggcgcatggcatttcagctttaatgtgaaattctacccgccagatcccgcacagctgagcgaggacatcacccgctactatctatgcttacagctgcgtgacgatattgtttctggccgactcccttgctccttcgtgacactcgccttattaggcagttatactgtgcagagtgaactgggggactacgatccggacgagtgtggcagcgattacatcagcgagtttaggttcgcccctaatcatactaaagagcttgaagacaaggtgatcgagctacacaaatcccatcggggtatgactccagccgaagctgaaatgcatttcttggagaatgccaagaaactttccatgtatggggtggacctgcaccatgccaaagattcggagggcgtggagatcatgctgggggtgtgtgccagcgggctgctgatctatcgcgacagactaaggatcaaccgatttgcatggcctaaggtccttaagatctcctacaagcggaacaacttctacattaaaatcagaccaggagaattcgaacagtttgagtccacgattggttttaaacttcccaatcaccgggcagcaaagcgcctgtggaaggtctgcgtggagcatcataccttttttcgcctgcttctgccggaggctcctcctaaaaagttcctgacactaggatccaagttccgctactcaggcaggactcaggctcagacacgccgtgcgagcgcactgatagataggcccgctccctacttcgagcggtcctcttccaagaggtacaccatgtctagaagtttggacggcgcttcggtcaacgaaaaccacgagatttatatgaaggactcaatgtcagccgcagaggtcgggaccgggcagtacgccactacaaagggtatcagtcagacaaacctcataaccacagtgactcctgagaaaaaagccgaagaagaacgcgacgaagaggaggacaagagaaggaagggtgaggaagtgactccaatttctgcaatcaggcatgagggtaagaccgattcagagagaacagataccgccgctgacggcgagacaaccgccacagaagagttggagaaaactcaggacgacctcatgaaacatcaaaccaatattagcgagctcaagcgaacatttttggaaacctctacagataccgcagttaccaacgaatgggaaaagcggctgtcaacatccccggtccgtctggctgccaggcaggaggatgcacccatgatagaaccgctggtgcccgaggagaaaatggaaaccaaaactgagtccagcggcatcgaaacagagccaacagtgcatcatctcccattatcaacagaaaaagtagtgcaagaaacagtgctggttgaagagagaagggtcgttcacgcctctggcgacgccagctattcagccggagattccggcgatgccgctgcccagcccgcattcactggcatcaaagggaaggagggcagtgcccttaccgagggcgcaaaggaagagggcggagaggaggttgcgaaggccgtgctcgagcaagaggagactgcagctgcctcccgcgaacggcaggaggaacagtccgcggcaatccacatttccgagactctggaacagaagccacacttcgaatccagcaccgtgaagaccgagacaataagcttcgggtcagtgtcccctggcggagttaagctggagatatctactaaagaagtccccgtcgttcacacagagaccaagactattacctatgagtcaagtcaggtggaccccggaactgatttggagccgggtgtgctcatgagcgcccagacaatcacatctgaaacaacatcgacaaccaccaccactcacattacaaaaactgtcaagggtggaatctctgaaacacgcattgagaaaaggatcgtaatcacgggcgacgccgacattgatcacgatcaggccctggctcaggcgattaaggaggccaaggagcaacatcctgatatgagtgtcacaaaagtcgtggtccataaagaaaccgagatcactccggaggacggtgaggactag

SEQ ID NO: 222242 - DNA, 1179 bp, synthetic construct
  misc_feature 1..1179: note = Description of Artificial Sequence: Synthetic coding sequence
  source 1..1179: mol_type = other DNA
atgaaacatcagaccaatatctcagagttgaagcgcacatttctggaaacttccaccgacaccgctgtcaccaacgaatgggaaaaacgcctctctacctctcctgtccgcttagctgccagacaggaagatgccccaatgatcgagccattggttcctgaggaaccctctgtgatcaaaaagatgcaggagggagattccgcagacagcgtcgtgacctcgagacagatcatattccagaagacagttccttccacactcgaaactaagcagtcctccggtgagaaactcatggatgggagtgagatcttttctcttttggagagcgctaggaaaccaactgaatttatagggggagtcacatcaaccagccagtcttgggtgcagaagatggagaccaagacagaatcatctggaatagaaacagagccaaccgtgcatcacctgcccctctccactgagaaagtcgtgcaggaaactgtgctggtggaagagaggcgtgtggtgcatgcttcaggggatgccagttattctgcaggggatagtggcgacgcggcagcccagcccgcatttactggcattaaagggaaagaaggaagtgcccttacggaaggcgctaaggaggagggcggagaggaagtcgcaaaggctgtcctggagcaagaagagactgccgcagcaagtcgggaaagacaggaggagcagtccgctgcaatacatatttctgaaactctggagcagaaaccccattttgaaagttctacagtgaagactgagacaattagttttggctctgtgagtcctggcggtgtgaagctggaaatctctactaaggaggtcccggtggtgcataccgagactaaaacgattacgtatgagtcgagtcaggtggatccaggaaccgaccttgaacccggtgtgcttatgagtgctcagacgatcacgtccgaaaccaccagcaccaccacgaccacacacatcaccaagaccgtcaagggtggaatctccgaaactcggattgagaaacgaattgtgattaccggggatgccgatattgatcacgaccaggccctggctcaggctataaaagaagccaaggagcagcaccctgatatgtctgtgaccaaagtggtggtgcataaggaaactgagattacacccgaagatggcgaagactag

SEQ ID NO: 222243 - DNA, 936 bp, synthetic construct
  misc_feature 1..936: note = Description of Artificial Sequence: Synthetic coding sequence
  source 1..936: mol_type = other DNA
cggtggcagcttggtggggctgctacggctgcagcaggcggagctcgcgtctggcgtcccttgcccgctagcaggagctccttcccacctccctctcctcgcctggatcctggagagttcgagggaaagtctccatgtggtggaacatgcgagcagccctatttgagtttacctttaaggtactttttttcacccagaaaagttgtgccggctggttgcgagcaggcgccaggaggcgctcctaaggaggggtttggggatagcgacagcgagtctaagccagaccaggaagcagagcctcaagaggccgctggggctcagggacgagccggtgcacctgtgccagaacctccaaaggaagagcagcaacaggctcttgagcagttcgcggcagccgcagcccattccacacccgtgcgtcgagaggtcaccgacaaagagcaggaattcgcggctcgcgctgccaagcaactggaataccagcaactcgaggatgataaactaagtcaaaagagttcctctagcaaactgtcccggtccccactgaagatcgttaagaagccaaaatccatgcagtgcaaggtaatcctactggatggctccgagtacacttgcgacgttgagaagaggtctcgcggtcaggtgctgttcgataaggtatgcgagcaccttaacctgctggagaaagattacttcggattgacatatcgggatgccgaaaaccagaaaaactggctcgacccggctaaggagatcaagaaacaagtgagaagtggagcgtggcattttagctttaacgtaaaattttatccacccgaccctgcacagttgagcgaggacatcacacggtactatctgtgtctccagctcagagatgacatcgttagtgggaggcttccatgcagcttcgtcacgctggcactgctaggcagttag

SEQ ID NO: 222244 - DNA, 2652 bp, synthetic construct
  misc_feature 1..2652: note = Description of Artificial Sequence: Synthetic coding sequence
  source 1..2652: mol_type = other DNA
atgacgaccgagtccggttctgattctgagtcaaagcctgatcaggaggccgagccccaagaagctgcaggggctcaaggcagagctggagccccagttcctgagccaccaaaggaagagcaacagcaggcactggagcaattcgccgcagcggcagcccactccactccggtacggagggaggtcaccgacaaagagcaagagtttgcggctagagctgcaaaacagctagagtaccagcagctggaagacgataaactgagccagaaaagttcatcctcaaagctgagtaggtctcctctgaaaatcgtgaaaaagcctaagtccatgcagtgtaaagtgatccttctcgacggaagcgagtatacttgtgacgttgagaagagaagcagggggcaggttctgttcgataaggtgtgcgagcatttgaacctgctggaaaaggattacttcggtttgacttaccgcgacgctgaaaatcagaagaattggcttgatcctgctaaggagataaagaaacaggtgcggtcaggcgcttggcacttttccttcaatgttaagttctacccgcctgatccggcacaactctctgaggacataacaagatattacctctgcctgcagctgcgcgacgacatcgtctccggacgattgccttgcagttttgtaacgctcgcgcttctcggaagttacaccgtacaaagcgaattgggggactacgatcctgatgagtgtggctccgattatatctcagaatttcgctttgctccaaaccacacaaaggagttagaagataaggtgatcgaacttcacaaatcccatagggggatgactccagccgaggccgagatgcacttcctggagaacgccaagaagctgagcatgtatggggtagacctgcaccacgccaaagattctgagggcgtggagatcatgcttggagtatgcgcaagtggcttgctgatatacagagaccgattgcggattaatagatttgcgtggcccaaggtgttaaagatttcatataagcgcaataacttctatattaagatcagacctggagagtttgaacaattcgaaagcactattgggttcaaacttcctaaccatagagccgcaaaacgcctctggaaggtatgcgtcgaacaccacacctttttccggttactgctgccagaggcgccaccaaagaaattcctaactctggggagcaagttccgctacagtgggaggactcaggctcaaactcgtcgagcatcggccctgatcgaccgtcccgcaccatacttcgagaggtcgtcctccaaaagatataccatgtcccggtctctggacggtgcctcggtcaacgagaatcacgaaatatatatgaaagattcaatgtccgctgctgaagttgggaccggccagtatgcaaccactaagggtatatctcagaccaacttgattacaacagtcacacccgaaaaaaaagctgaagaggagagagacgaggaagaagataagcggcgaaaaggagaagaggttaccccaatcagtgctatccggcacgagggcaagaccgatagcgaacggactgacaccgctgcagatggcgagacaaccgcaacagagtccgatcaagaggaggacgctgaactaaaggcccaggagctggaaaaaacgcaggatgatcttatgaagcaccagacaaacatctctgagttgaaacgcactttcctcgagacatccaccgataccgccgtaactaacgagtgggagaagcggctgtcaacgtctcctgttagacttgctgccaggcaagaggatgcccctatgatagagcctctcgtacctgaggaaacaaagcagtcttctggcgaaaaactgatggatggctctgagattttttccctacttgagtccgcacgcaagcccactgaatttataggtggagtgacctctacctcccagtcgtgggtgcagaaaatggaaacaaaaacagaatctagcggaattgaaactgagcccaccgtgcaccatctgccgttgtctaccgaaaaggttgtgcaggagacagtgttggtcgaagagagaagggtggtgcacgcgagcggcgacgcttcctattccgcgggtgactctggtgatgcagccgcacagcctgctttcactggcataaagggtaaagaggggagcgcactgacagagggtgccaaagaggaaggaggagaagaggtggccaaggcggtcttagagcaagaggagaccgcagcagcttcaagagagaggcaggaagaacagagtgctgccattcacatctcagagacccttgaacagaaaccacactttgaaagtagtaccgtcaagacagagaccataagcttcggaagtgtttctcctggaggcgtaaaacttgagatcagtaccaaagaagtgccagttgtccacaccgagacgaagaccataacttatgagagtagccaggtagaccctgggaccgatctggaaccaggagttctcatgagtgcccagacaataacctccgagaccacttccaccaccaccacgacccatattactaaaactgtcaaaggtgggatttcagaaacgcggatcgagaaacggatcgtaattactggcgacgcagacatcgaccacgatcaggaatag

SEQ ID NO: 222245 - DNA, 2271 bp, synthetic construct
  misc_feature 1..2271: note = Description of Artificial Sequence: Synthetic coding sequence
  source 1..2271: mol_type = other DNA
atgcaatgcaaagtgatattgttggatggctctgagtatacctgtgacgtcgagaagcgcagccgtgggcaggttctctttgataaagtgtgtgaacaccttaaccttttggagaaggattattttggtctgacgtacagagatgccgagaaccagaagaactggctggacccagcaaaagagatcaaaaaacaagtgcgtagcggagcctggcacttcagctttaatgtcaaattctatcctcccgatcctgcacagctctccgaagatatcacccggtactatctgtgcttacagctgcgggatgatatcgtttctggtcggctgccctgctccttcgtcacactggctttgttaggctcctatacagtgcaatcagaactgggggactacgatcccgatgagtgtgggtccgactacatttcagagtttcgcttcgctccgaatcacactaaggagctggaggacaaggtgattgagcttcataaaagccacaggggaatgacacccgctgaggccgagatgcatttcctcgaaaatgcaaagaaactttccatgtacggggttgacctgcaccatgccaaggattcggaaggggtagagattatgctgggagtgtgtgcctccggcctgctcatttacagagatcgtttgcgaattaatcgctttgcttggccaaaggtgcttaaaatttcttacaagagaaataacttctacatcaagataagacctggggaattcgagcagtttgaatccacaatcggctttaagctgcccaaccacagagctgccaagaggctttggaaagtgtgcgtggagcaccacacgtttttccgtctcctcctccctgaggcacccccaaaaaagttccttaccctgggttccaagtttcgctatagtggaagaacacaggctcagacccgacgggctagcgccttgattgatcgccctgctccttactttgaaagaagctcttcaaagcgttatacaatgtccagatctctggatggcgcttctgttaacgagaaccatgaaatatacatgaaagactctatgtccgcagctgaggtgggcacagggcagtacgccacaacaaagggaatttcgcaaactaatctcatcaccacagtgacccccgagaaaaaagcagaagaagagcgggacgaggaggaagacaagcggagaaaaggggaagaggttacacccatcagtgctatccgccatgaggggaaaaccgactcagaacgcactgacacggcagccgacggagagacaaccgcaaccgaagaactggaaaaaacacaagatgacctgatgaagcatcagacaaacatttctgagttgaaacggacatttctagagacttcgacggacacagctgttacgaacgagtgggagaagagactgtctacgtcccctgtgaggttagctgccaggcaggaagatgctcccatgatagagcccctggtccccgaagaaaagatggagaccaaaaccgagtcatccggtattgaaactgaaccgacagtccatcacctgccccttagtacagagaaggtggtgcaggagacagtgctcgtagaggagcgtcgggtggtccacgccagtggagatgccagctattctgctggagactctggggatgcagctgcccagccagcctttacgggaataaaaggcaaggaagggtctgcactgactgaaggagctaaggaggagggtggcgaggaggtggcgaaggctgtgctggagcaagaagagaccgccgctgcttctcgcgagaggcaggaggaacaatccgccgcaattcacatctccgagactctggagcagaagccgcattttgagtcctcaactgtaaagacagaaactattagcttcggatctgttagtcctgggggagtgaagctggaaatttctaccaaggaggtacccgtcgttcatactgaaactaaaaccattacatatgagagcagccaggtggacccgggaacggatctcgagcctggagtcttgatgtcagcccagacaattaccagcgagaccacttctaccaccaccacaactcacatcacgaagaccgtgaaagggggaattagcgaaactcgcatagagaaaaggattgtaattacgggggacgcggatatcgaccatgatcaggcccttgcccaggcaattaaggaggcgaaagagcagcatcctgacatgagcgttacaaaggtcgtcgtgcacaaagaaaccgagatcacccccgaggacggggaggactag

SEQ ID NO: 222246 - DNA, 2166 bp, synthetic construct
  misc_feature 1..2166: note = Description of Artificial Sequence: Synthetic coding sequence
  source 1..2166: mol_type = other DNA
atgggtcagggcgaaccttcccagcgaagcactggtttagccggactttacgcagctcctgcagcctcacccgtttttatcaaaggctctggcatggatgcgctcggaataaaatcttgcgatttccaagccgctcggaataatgaggagcatcacaccaaggctctctcctcacggcgtctctttgtcaggcggggtcagccctttacaatcattctctactttcgggcacctgttcgcgcatttcttcccgctctaaaaaaggtggcactaacagcacagaccggcgaacagcccagcaagattaaccgtacccaagctacattccctatatcctcactgggggaccgaaaatggtggtcagcggttgtcgaagagcgggacgcacagtcctggacaatatcagtcactacacccgctgatgccgtaattggccactacagcctcctgcttcaagtttccgggagaaagcagctcctattaggccaattcaccctgctgttcaacccttggaatagggaggacgccgtgttccttaagaatgaggcgcagcgtatggaatacctgttgaaccagaacggactaatctatttgggaactgccgactgtattcaagctgaatcttgggatttcggtcagtttgagggtgacgtaattgacctttcactccggctgctgagcaaggacaagcaggtggaaaaatggagtcaacccgtacatgtggctagggttctgggtgccttgctgcactttttgaaggagcagcgagttctgcccaccccccagactcaggccacccaggagggagccctgctgaataaaagacgaggcagcgtaccaattctgcgacagtggctgactggccgaggcagacccgtgtacgacggacaggcttgggtgctggcagccgtcgcttgcacagtattgcggtgtctggggataccggcacgggttgtcaccactttcgcttccgcacagggtaccggcggacggctgctcatcgatgagtactataacgaggaaggactgcagaacggtgagggacagaggggcaggatttggattttccaaacctcaaccgagtgctggatgacacggccagcactgccgcaagggtatgatggctggcaaattctgcatccatccgctcccaatggcggtggcgtgctgggcagctgcgatctggtaccagtgagagccgtgaaggaggggacgctgggcttaacacccgcagtatcagatctgttcgcagcaatcaatgctagctgcgtggtctggaaatgctgcgaagatggcacactggagctcactgattccaacacgaaatatgtcggaaataacatttcaacaaaaggagtaggaagcgaccggtgtgaagacattacccagaactacaaatatcctgagggatcgctgcaggaaaaagaggtactggaacgggtggagaaagagaaaatggagagagaaaaggacaacggaattcggcctcccagtttagagaccgcttctccactctacctactgctgaaggcccctagttcactcccattaagaggagatgctcagatctccgtgaccttggtgaaccacagcgaacaggaaaaggccgtgcagctggctatcggcgtccaagccgtccactataatggcgttctcgctgcaaaactgtggcgtaaaaaactgcacttgacactctctgcaaatctcgagaagatcatcaccatcgggctgttcttcagtaacttcgagcgcaatccaccagaaaacacttttctacgcctcacagccatggctactcactctgagagcaacctcagctgtttcgcccaagaggatatcgcgatatgccggcctcacctggcgataaagatgccagaaaaggccgaacaatatcaaccattgactgcctctgtgagcctgcaaaatagcctggacgcacctatggaggattgtgtgatcagcatcctgggccgaggtttgattcacagggagcgcagttatagatttcggtccgtctggccggagaatacaatgtgtgctaagtttcagtttacccctactcacgtggggctgcagcgcttgacagttgaggttgattgcaacatgtttcagaacctgaccaattacaaaagcgttacagtcgtggccccagagctttcagcttag

SEQ ID NO: 222247 - DNA, 1860 bp, synthetic construct
  misc_feature 1..1860: note = Description of Artificial Sequence: Synthetic coding sequence
  source 1..1860: mol_type = other DNA
atgggtcaggctttaggcataaagtcttgcgattttcaagctgctagaaacaatgaggagcaccacacaaaagcactgtccagccgacgccttttcgtccggcgtggccagccctttaccattatactctacttccgggcaccggtgagggcgtttcttcctgccctgaaaaaggtggcacttaccgcacaaacaggagagcaaccgtccaaaatcaatcgaacacaagcaacatttcctataagcagtcttggcgaccgtaagtggtggtccgccgtggtggaagagcgagacgcccaatcatggacaatttctgtgacaactcctgctgacgccgtgattggacactattcactcctgctgcaggtgtccggcagaaaacaactgctgctgggtcagtttacactgctgttcaacccatggaaccgggaggatgccgtgtttctgaaaaacgaagcccaacggatggagtacctgctgaaccagaatggtctgatttacttgggcactgctgactgcatccaggcggagtcctgggactttggccagttcgaaggtgacgtaattgacttgtccctgaggctcctgagtaaggataaacaggtggagaaatggtcccagccagtgcatgtggctagagttcttggggctctgcttcacttcctgaaggaacagcgcgttcttcctacgccacagactcaggcgacccaagaaggagcactcctaaacaagcgacggggtagcgtgcccattctgagacagtggcttaccgggagaggaaggcctgtttacgacggacaggcttgggtccttgcagctgtagcctgcacagtcctgaggtgtcttggaatcccagcaagggttgtaacaacattcgccagcgctcagggaactggcggacggctgttaatcgatgagtactataatgaagagggcctgcagaatggggagggtcaacggggaaggatttggaagtgttgcgaggacggaacgctcgaactgactgactccaacactaagtatgttggtaacaacatctctaccaagggcgtcggttcagatcgctgcgaggatatcactcagaattataagtaccctgaaggctcactgcaagaaaaggaagtcttggagagggtcgagaaggagaagatggaaagagaaaaggacaacgggattcgtcctcccagcctggagactgcctccccattgtatctcctgctgaaagccccttctagtctgccattaagaggcgatgcacaaatttccgtgaccttagtgaaccactctgaacaagagaaggccgtccagcttgctatcggtgtgcaagcagtacactacaacggcgtcttggccgctaagttgtggagaaagaagttgcatttaacactgagcgccaatctcgaaaagatcattactattgggctgttctttagcaattttgagcgaaacccccctgagaatactttcctgcgcctcacagccatggcaactcactcggagagtaatctgtcctgctttgctcaggaggacatagccatctgtcgaccccatctggctatcaagatgcctgaaaaagccgagcagtatcagcctcttaccgcctctgtcagtttgcagaacagtctggatgcccctatggaggattgcgtaatctccatcctagggcgaggtctgatccaccgtgagcgttcatacaggttccggagcgtgtggccagaaaacaccatgtgcgcaaaattccagtttacaccaacccacgttggtctgcaaagactgaccgtggaggtggattgtaacatgttccagaacttgacgaattacaagagcgtaactgttgtggcccctgagcttagtgcctag

SEQ ID NO: 222248 - DNA, 2076 bp, synthetic construct
  misc_feature 1..2076: note = Description of Artificial Sequence: Synthetic coding sequence
  source 1..2076: mol_type = other DNA
atgggacaggccctaggtatcaagagctgcgactttcaggctgccaggaacaatgaggagcaccacacaaaggccttgagctctcgaaggctctttgtgaggcggggtcagcctttcaccatcattctatatttccgagcacctgttcgcgcttttctccctgcgcttaagaaggtggccctcactgctcagaccggcgagcaaccttcaaagataaatcggacccaggccacttttcctatatcctccctgggcgatcgaaaatggtggagcgccgttgtcgaggaacgtgatgcccaatcctggaccatctcagtaaccaccccagccgatgcggtcatcgggcactattcactgcttttacaagtgtccggacgcaagcagctgctcctcgggcaatttaccttactgttcaacccttggaatagagaggacgccgtgttcctaaaaaacgaggcccagagaatggaatatcttcttaatcagaacggccttatctacctcggcaccgcagactgcatccaggctgaatcttgggacttcggtcagttcgaaggggatgtgatagacctgagtttaaggctcctgtctaaggataagcaggtggaaaaatggtctcagccggtccacgtagctcgggtcctgggggctcttctgcactttctcaaggagcagcgtgtcctgcccacccctcaaacacaggccacacaggaaggggcacttctgaacaaacggagaggatctgtgcccatcctgaggcaatggctgacaggtcgcggaagacctgtctacgatggccaggcctgggtgctagctgccgtcgcctgtacagtcctgaggtgtcttggaattcccgctagggtcgtgaccacctttgcaagcgctcagggcaccggtggaagactactgatcgacgagtattacaatgaggagggtttgcagaacggagagggccagcgtgggcgaatctggatatttcagactagtacggagtgctggatgaccagacccgctcttccccaaggttacgacgggtggcagattctgcacccaagtgcacctaatggtggcggagttctcggatcctgcgacctagtcccagttagagcagtaaaagaggggaccctgggactgacccccgcagtatctgacctgttcgcggctattaatgcgagctgtgttgtctggaagtgctgcgaggacggcaccctcgagctgactgactccaataccaaatatgtaggcaacaatatcagcacaaaaggcgtcgggtcggatcgctgcgaggacattacacaaaactacaaataccccgagggtagcctgcaggaaaaggaagtcctggagcgagttgagaaggaaaaaatggaacgtgaaaaggacaatggaattcgcccaccaagcttggagacagcgagtcctctgtacttgctgctgaaggctccttcgagcctgcctttacgaggggatgcgcagataagtgttacccttgttaaccactcagagcaggaaaaggccgtccagctggctataggagtgcaggctgtccactacaacggtgtgctggcagctaagttgtggaggaaaaaacttcaccttacgctgtccgctaatttggaaaaaattatcacaatcggcctctttttctcgaactttgaaagaaaccctccagaaaacacattcctaaggctgacagctatggcaactcacagcgaaagcaacctaagctgttttgcacaggaggatattgcgatatgtaggccgcacttggcgattaaaatgcctgaaaaggcagaacagtatcaacccctcacagcctccgtatctttgcagaatagcctggacgcaccaatggaggactgcgtcatcagtatcctgggcaggggactgattcatagggaacggagctaccgattccggagcgtatggcccgagaatactatgtgtgccaagttccaatttacccctacacacgttggactacagcgtctcaccgtggaggtggactgtaatatgttccaaaatttgactaactacaaaagtgtcacggtcgttgctccagaactcagcgcctag

SEQ ID NO: 222249 - DNA, 1842 bp, synthetic construct
  misc_feature 1..1842: note = Description of Artificial Sequence: Synthetic coding sequence
  source 1..1842: mol_type = other DNA
atgggtcaagcgctggggatcaagtcatgtgatttccaggcggctagaaacaatgaggagcaccacacgaaagccctgtcgtctcgtaggctctttgtccggaggggccagcccttcacgattatcctgtattttcgggcacccgtgcgcgcatttctccctgctctcaaaaaggttgccctcactgctcagaccgaagatgctgtgttcctgaagaatgaggctcagaggatggagtatctcctgaatcaaaacggcttaatctatcttggcactgctgattgtatacaggctgagtcttgggatttcggtcagttcgaaggagatgtgatcgacctgtctctgagattattatccaaggataaacaagtggaaaaatggtctcaacctgtccacgtggcgcgtgtactgggagcccttctgcatttcttaaaggagcagagggtactgccaaccccccagacccaggccacacaggaaggcgcactgctgaataagcgccgaggctcagtgcccattttgcgtcagtggctcacaggacggggtagacctgtctatgacggacaggcttgggttttagccgctgttgcctgcactgtgctgcgctgcctggggatacccgcacgggtcgttaccactttcgcttcagcccagggcacaggagggcgtctgctgatagatgagtattacaatgaggaaggcttgcagaacggggagggtcagcgcggaagaatctggatttttcaaactagcaccgaatgttggatgaccagacctgcactgccacaaggttatgatggctggcaaatcttacatcccagcgctcccaacggaggcggagtccttggatcttgtgatttggtccctgtgagagcggttaaggaaggaacgttgggtctgacgccagcagtttccgacttattcgcagctattaacgcctcctgcgtggtgtggaaatgttgcgaggacggcactttggaactgaccgattcaaatacgaaatacgtgggaaataatatcagcacgaaaggtgttggatccgacagatgcgaggatatcacccagaattataagtaccctgagggatccctccaggagaaggaggtccttgaaagagtggagaaggagaagatggagagggagaaagataacgggattcgtcctccatcactggagaccgctagtcctctgtatctgttactgaaggccccatcatctctgcccctgcggggtgacgcccagatatcagtgaccctcgtcaaccattctgagcaggagaaagccgtccagctggctataggtgttcaggctgttcactacaacggagtcttagcagcaaagctgtggaggaagaagcttcatctgacccttagtgctaacctggagaaaatcattacaatcgggttgtttttctctaactttgagagaaacccacccgagaatactttcttgaggctgaccgccatggcgactcacagtgagagcaacctgtcatgttttgctcaggaggacatagccatttgtcggcctcacctagcaattaagatgcctgagaaagcggagcagtatcagcccctcaccgcatcagtctctctgcagaatagcctggacgctcctatggaggactgcgtcattagtatcttggggagaggcttaatccatagggagagatcttataggtttcgctccgtttggccggagaacactatgtgcgccaaatttcaattcactcctacgcatgttggcctgcaaaggctcaccgtcgaggtggattgtaatatgtttcaaaacctgaccaattataaatccgtaaccgtggtcgcccctgaactgagtgcctag

SEQ ID NO: 222250 - DNA, 1218 bp, synthetic construct
  misc_feature 1..1218: note = Description of Artificial Sequence: Synthetic coding sequence
  source 1..1218: mol_type = other DNA
atggaaagactacagaaacaacccctgacatccccgggatccgtctctccatcgcgtgacagttcagtgccagggagtccctcaagcattgtggcaaagatggacaatcaggtcctggggtacaaagatttggccgctattcctaaggacaaagcaattctagacattgaaagacctgacctgatgatatatgagccacattttacttacagccttctggagcacgtcgaactgccacggagtagggaacgctcgctaagtcccaagagcacgagtcctcctccatcaccggaagtttgggccgacagccggagcccagggattattagtcaggcctccgccccaaggaccaccggtacacccagaactagcctacctcactttcaccacccagaaaccagccgccctgatagcaatatctataagaagccgccaatatataagcagcgcgaatccgtggggggttccccccaaacgaagcacctgattgaggacttgattattgagagctctaaatttcccgctgcacagccgcctgaccccaatcagccagccaagatagagaccgactattggccatgtcctccctccttggctgtggtggagactgaatggagaaagcggaaggcctcgagacggggtgccgaagaggaggaagaagaggaggatgacgactccggggaagaaatgaaagcactgcgtgaaaggcagcgggaagagttgagcaaggtgacttcaaaccttggaaagatgatcctcaaggaggaaatggaaaaaagcctgccaatccgcaggaagacccggtctttgcctgataggacacccttccacacctctctgcaccaaggaacgtcaaaatcatctagcctgccagcttacggaaggaccactctgtcaagacttcagtctacggaattttcaccgagcggatccgaaacagggtcacccggactgcaaaatggtgaagggcagagagggaggatggaccggggaaatagtctcccatgcgtcttggagcaaaagatttatccatacgaaatgctagtggtaacaaacaaaggcaggacaaagctgcctcctggcgtggacagaatgagactggagagacacttgagcgccgaggatttctcgcgggtgtttgccatgagccccgaggagtttggtaagctcgcactatggaagaggaatgaactcaaaaaaaaggcctctctcttttag

SEQ ID NO: 222251 - DNA, 1218 bp, synthetic construct
  misc_feature 1..1218: note = Description of Artificial Sequence: Synthetic coding sequence
  source 1..1218: mol_type = other DNA
atggagcggctgcagaagcaacccctgacctcaccaggatcggtgagtccttctcgagattctagcgtacccggatccccttcaagcatcgtagccaaaatggataatcaggtgctggggtacaaggacctggctgccataccaaaggataaagctattctcgatattgagaggcccgatctgatgatttatgaacctcactttacctactcactattggagcatgttgagctgcccaggtcacgggagcgatccctgtctccaaaatcaacatctccccctcccagccccgaagtgtgggctgacagtcgcagccccggtattataagtcaggccagcgcccctcgtactactggaacaccaaggacttctctgccccacttccatcaccccgagacatcccggcctgactctaatatatataaaaaaccgcctatctacaaacagagggagagtgtcggaggttccccccaaaccaagcatctgatcgaagatctcattattgaatcttcaaagttccccgctgcacagcctcccgatccgaatcagcccgctaaaattgagacagactattggccctgtccgccttcgctggcagtggtggaaaccgagtggagaaagcgaaaagcttctaggcgaggggctgaggaggaagaggaagaagaggacgacgattctggggaagagatgaaggctttacgggagaggcaacgcgaggaactaagcaaagtgacctctaacctgggcaagatgatcctgaaggaagagatggaaaagtccttgcccattagacgaaaaacccggagccttccagataggaccccgttccacaccagcctgcaccaggggacatccaaatcgtcctctctccctgcttacggcagaactactctatctcgcctacagtccacggagttctcccccagtggatccgagacaggctcgcctggtctgcagaatggtgagggacagcgcggacgcatggataggggaaattctttgccttgtgtgttggagcaaaagatttacccgtatgagatgctggtagttaccaacaagggcaggaccaaactgccgcctggtgtagataggatgcgcctggaaaggcacctgtctgccgaggacttttccagggtgtttgccatgagtccagaggaatttggtaagttagccttgtggaagagaaacgaactgaaaaagaaagcatctctattttag

SEQ ID NO: 222252 - DNA, 1626 bp, synthetic construct
  misc_feature 1..1626: note = Description of Artificial Sequence: Synthetic coding sequence
  source 1..1626: mol_type = other DNA
atgatctacgagccacattttacctactccttgcttgagcacgtggagctgcccagatctcgcgagaggtcactgtcgcccaagagtacatcacctccaccaagtcccgaggtgtgggccgatagtcggagcccgggtataatcagtcaggcgtccgcacccaggactaccggaacgcccagaacttctctgccccactttcaccatcccgaaaccagcagaccagacagcaacatttacaaaaagcccccaatttacaaacagcgggaatcggtaggaggaagcccccagacaaaacacttgattgaggatttaattattgagagcagcaaatttcccgcagcccagccccctgatcccaaccagccagccaaaatcgagaccgattactggccttgccctccctctctcgccgttgtagaaaccgagtggcgcaagagaaaggctagccgcagaggcgcagaagaggaggaagaggaggaagacgatgattccggcgaagaaatgaaggcattaagagagcgacaacgggaagaactgtcaaaggtcacctccaacttggggaagatgatactaaaagaagagatggagaagagcctcccaataagacgcaagacgaggtctctaccagataggacacctttccacacgagtctacatcagggaactagcaagtcttctagtctgcccgcatacggtcgcactaccctgtccagactccaaagcacagagttttcaccgtccgggtccgaaactggatcccctggtcttcagaatggtgagggccagcgagggaggatggatcgcggaaatagcctgccctgcgtgctggagcagaagatctacccctacgaaatgctcgtagtcaccaacaaaggccgaaccaaactgccccctggggtggatcggatgcgtcttgagcggcacctctcagctgaggacttcagtcgggtatttgccatgagtcctgaagaattcggaaaactcgccctgtggaaacgtaatgagctgaaaaagaaagctagcctgtttggtgccttagtggtgcggcctgtgggatgtttggaacagctggaaggtcggtgccggggaggaaaacgaccaggaaggaagtcaagtcgcttgctttgccgacctcccagccctccaatcttaaccccagactcattccccgctctgcagcctcctgcacctctgaccctggtggggacaggacccagtagcgcaagcggtcgggaggtgactccccctctgcagttggcgcttacgtctgcccgtaaaccaagagccagcaaaccttttgcacctgcattgcggctgcctcagaagcctggactgcgcgtggagatgccaccaacgcacgacccagggcctcctcctgccagcaggccccgaaatggcaatagctctaccaaacctgggaccggtcagaagctgggtcttcccccacctctggacggtgtcaagagacccggactcgcacactttggtgtgtcttggctgcccgcactcacttacacccatgctccccctcatacactttgtagcctaaagaatgtaatatactggggcccaccttcgtgcttcccacacctaccactaccttacctcacacctcctgcttag

SEQ ID NO: 222253 - DNA, 1152 bp, synthetic construct
  misc_feature 1..1152: note = Description of Artificial Sequence: Synthetic coding sequence
  source 1..1152: mol_type = other DNA
atggagcgactacagaaacaaccattaacctcgcccggttctgtgagtccttctcgggactcgtccgttcctggttctccaagctcgatcgtcgcgaaaatggacaaccaggtactcggttataaggatttggccgctatcccaaaggacaaagccatcttggacatcgaacgcccagaccttatgatttatgaaccccatttcacatactccctactggagcacgtcgaacttccgcgtagccgtgagcggagtctttccccaaaatccacctctccgccacccagtcctgaggtatgggccgactcccggtcaccaggaatcatttcgcaggcctccgcccctcggactaccggcactccaaggacatccctcccacacttccaccaccccgagacatctcggcctgattccaacatatacaagaaacctcccatctacaagcagcgagaaagcgtcggaggttcaccacaaacaaagcacctgattgaggatctcattattgagtcttccaaatttcctgcagcccagcccccagacccaaaccagcccgctaagatagagacagactactggccatgtccccctagcttggccgttgtagaaactgagtggaggaaacgcaaagccagcagaaggggcgctgaagaagaagaggaggaggaagacgacgactctggagaggaaatgaaggctctgcgcgaaagacagcgggaagaactttccaaagtcacttccaacctaggcaaaatgatcctaaaggaggaaatggagaaatccctgccaatccggcgtaaaaccagatccctgccagatagaacaccgtttcacacctccctgcaccaggggacttccaaatcttcttccctccctgcctacggtaggacaacactgtcaaggctacaaagtaccgagttctccccaagtggaagcgagacgggttcccctggtctgcagatttacccttatgagatgctggttgtgacgaacaaggggagaaccaagcttcccccaggcgtggaccgtatgagattggagaggcacctgagcgccgaggacttttcccgagtatttgcaatgtccccagaggagtttggaaagctcgctctgtggaaacgtaacgagctcaagaaaaaagcatcccttttttag

SEQ ID NO: 222254 - DNA, 1152 bp, synthetic construct
  misc_feature 1..1152: note = Description of Artificial Sequence: Synthetic coding sequence
  source 1..1152: mol_type = other DNA
atggagcgtctgcaaaagcagcctcttacgtccccagggtcagtgtcgccatctcgcgactcaagcgtgcccggttctcctagctcgatcgtggcaaagatggataaccaagtcctcggatacaaggaccttgcagcaatacccaaggacaaagcgatactggacatagagcggcctgacctgatgatttacgagccccactttacttatagcctcttagaacacgtagagttgcccagatcccgggagagatctctgtccccaaaatctacctctccaccaccttccccagaagtgtgggccgactctcgaagccccggtattatctctcaagcttccgctccccgtactacagggacgcctaggaccagtctcccccattttcatcaccctgaaacttcaagaccagattccaacatttacaagaaaccaccaatttataaacagagggaatccgttggcggttccccccagactaaacatttaatcgaggaccttattatcgaaagttcgaagtttcccgctgcacagcctccagaccctaaccagccagccaaaatcgaaactgactactggccctgccctccgagtttggcagtggtcgagactgaatggaggaaaagaaaggctagcaggaggggcgctgaggaggaggaagaggaagaagatgatgactctggagaagagatgaaagccctgagagaacgccaacgagaggagttgtctaaggttaccagtaatttgggcaaaatgatacttaaggaagagatggaaaagagccttccgatccggagaaaaactcgtagcctgccagaccgcacccctttccacacatcactccatcaaggcaccagcaaatcttcatcactacctgcctacggacggactaccctgagccgtctgcaaagtacggaatttagtcctagcggtagtgagacaggatccccaggcttacagatttatccctacgagatgctagtggttacaaataaaggtcgaactaaactgcctccaggggttgatcgaatgcggctggaacggcaccttagtgccgaagactttagcagggtcttcgcgatgtcgccagaggaattcggaaaactagccttatggaagcggaacgagctgaagaaaaaagcgtcactgttctag

SEQ ID NO: 222255 - DNA, 1218 bp, synthetic construct
  misc_feature 1..1218: note = Description of Artificial Sequence: Synthetic coding sequence
  source 1..1218: mol_type = other DNA
atggagcgcttgcagaagcaaccactgacctccccaggatcagttagccccagtcgggacagcagtgtcccaggaagccccagctccatcgtggccaaaatggataaccaggtactgggttacaaagatctcgctgcgattcctaaggataaggcaatcctggatattgaacgccctgacctgatgatttacgagcctcatttcacttactctctgcttgagcacgtggaactgcccagaagtagagagcgttcactgtccccaaaatccacctctccacccccatccccagaggtgtgggccgactcccgcagtcctggaatcattagtcaagcaagcgcgcctagaaccaccggaacacctcggacatccctgccccacttccaccaccccgaaacctctcgcccagactcgaacatatacaaaaagcctcccatctacaaacagagggagtcagtgggtggcagccctcagacgaagcatctgatcgaggaccttatcatcgaatctagcaaattccccgcagcccagcctcctgatccaaatcagccagctaaaattgaaacagactattggccatgtcccccaagtttagccgtggttgagaccgaatggagaaagaggaaagcctctcgtcgcggagctgaggaggaagaagaggaggaggacgacgatagtggcgaggaaatgaaggccttgcgtgaacgtcaaagggaagagctctcaaaggtcacgtccaacctcggcaagatgattctgaaggaggaaatggagaagtcactgccgattcgccgtaagacccgcagtctgcccgacagaaccccctttcatacttcactgcatcaggggacttcgaagtcatcctcactgccggcttatggaagaacaaccctgagcaggctgcagtcaacagagttcagtcccagcgggtccgaaacaggatcacctgggctgcaaaatggcgagggtcagcgaggtagaatggaccgcggtaactccctcccctgcgttcttgagcaaaagatctatccgtacgagatgttggtggtgacaaataaggggagaaccaaactgccaccaggagtggacaggatgagacttgagcgccacctgagcgccgaagattttagcagagtcttcgccatgagcccggaggagtttggtaagctggctttgtggaagcggaacgaactcaagaaaaaagcgagccttttctag

SEQ ID NO: 222256 - DNA, 1077 bp, synthetic construct
  misc_feature 1..1077: note = Description of Artificial Sequence: Synthetic coding sequence
  source 1..1077: mol_type = other DNA
atggaacgcttgcagaaggccaaaatggacaaccaggtgctcggttacaaggacctggctgccatcccaaaggataaggccattctcgacatcgaacgcccagacctcatgatctatgaaccccacttcacttattcactcctcgaacacgtggaattaccgcgaagccgcgagagatctttgtccccaaagagtaccagccctcctcccagtcccgaagtttgggcagattctcgctctcctggcatcatctcacaggcctcagcccctcggacaaccggcacaccacgtacaagtctgccccattttcaccaccctgagacctctagaccggatagtaacatctacaagaaaccaccaatttacaagcaacgtgagagcgtgggcggatcaccgcagacgaagcatctaatcgaagacctgattattgagtcctctaagtttccagctgctcagccacccgatccgaatcagcctgccaagatcgagacagattattggccctgtccaccatcgctggcagtggtggagacggagtggcgtaaaagaaaggcatctagacgtggcgctgaagaggaagaggaggaagaggacgatgattctggggaggagatgaaggccttaagagaaaggcagcgagaagagttatctaaggtgaccagtaatctgggcaaaatgatcctcaaagaggagatggagaaaagccttcctattcgtagaaagacacgatccctgcctgatcgaactccctttcacacctcccttcatcaagggacatccaaatccagctcattacctgcttatggcaggacgacattaagcaggcttcagtcaaccgaattcagcccaagcggttctgagacaggcagccctggacttcagatttacccgtacgaaatgctcgtcgtgacgaataaagggagaaccaagctccctcccggtgtggaccgcatgaggcttgagcgacacctgagtgcggaagactttagtagggtgttcgcaatgagccccgaggagtttggcaagctggcactgtggaagagaaacgagctcaagaagaaagcttctcttttttag

SEQ ID NO: 222257 - DNA, 1152 bp, synthetic construct
  misc_feature 1..1152: note = Description of Artificial Sequence: Synthetic coding sequence
  source 1..1152: mol_type = other DNA
atggaaagacttcagaaacagccgctcaccagcccaggcagcgtgtccccctcaagggacagctctgtgcctggaagcccttcaagcattgtggcgaaaatggacaaccaggttctgggctataaggacttagccgctattcccaaggataaagctattctggatatcgaacgtcctgatctgatgatttacgaacctcacttcacctacagcctactggaacacgtggaactgccccgaagcagggaaagatcattatctcccaagagcacctccccacctcctagtcccgaggtgtgggcagattctagaagtccaggcattatcagccaggcatctgctccacgcacaactggcacccccaggacctccctgccgcacttccatcaccccgaaacttcccgtcctgatagcaacatttacaaaaaacctccgatctataagcagagggagagcgtaggaggcagtccccagactaaacaccttatagaagacctaatcattgagagctctaaattccccgcagcccagcccccagatcccaaccagcctgcaaaaattgagacggactactggccttgccctccctccttggctgtggttgagactgaatggcgcaagaggaaagcttcccgcaggggcgcagaagaggaagaagaagaggaagatgatgatagcggcgaggagatgaaggcgctccgcgagcggcagagagaggagttgtccaaagtgacctctaatttaggaaaaatgatacttaaggaagagatggagaaaagcctgcccattcggcgaaaaactcgtagcctgcccgaccgaacaccgttccacaccagcctgcatcagggtacatctaagtcctcaagcctgcccgcttatggaagaactacactgagtaggctgcagagtacagagttctcccctagtggtagtgaaacaggctccccgggtctccagatctacccttatgagatgctggtggtgaccaataaggggaggaccaaactcccgccaggggtggatagaatgaggctggaacggcatctgtcagctgaggacttttcacgggttttcgccatgtctccagaagagttcggcaagcttgccctatggaagcgtaacgagctcaaaaagaaagcttctttattttag

SEQ ID NO: 222258 - DNA, 1218 bp, synthetic construct
  misc_feature 1..1218: note = Description of Artificial Sequence: Synthetic coding sequence
  source 1..1218: mol_type = other DNA
atggaacgcttacagaaacagcccttgacttcgccagggtccgtcagcccttctcgtgacagtagcgtccccggatctccaagttccatcgttgcaaaaatggataaccaggtccttggatataaagatctagctgccataccaaaagacaaggcaatcttggacatcgagcggcctgacctgatgatttacgagcctcactttacctactctttgctggaacacgtcgaactgcccaggagccgagagcgttcactgagtccgaagtctaccagcccccctcccagtccagaggtgtgggccgactcccgaagccctggcataatttctcaagcgtcagcccctcgtaccaccggtaccccaaggacatcactgccgcatttccatcaccccgagacttctcgccctgactccaacatctataaaaagcctccaatttataagcagagagagagcgtaggtggcagcccccagacgaagcatctgatcgaggatctgataatcgagtcttcaaagttccccgcagctcaaccacccgatcccaatcagccagcgaaaattgagactgactactggccctgtccaccctccctcgctgtcgttgaaacagaatggcgcaagagaaaggctagccgccgaggagctgaggaagaagaggaggaggaagacgacgatagcggcgaagaaatgaaggcacttagagagcgccagcgagaggagttgagcaaggttacaagcaacctgggaaaaatgatcctgaaggaagaaatggagaagtccctgcccatccggaggaagacacgaagtctgcccgaccgcactcctttccacacctctcttcaccaggggacatctaaatcatcctcactgcccgcttacggtcgtaccacactttctcggctgcagtctactgaattctcaccatcagggtcggagactgggagccctggcctacagaatggggagggtcaacgtgggaggatggaccgaggcaatagcctaccttgtgtgcttgagcaaaagatctacccatatgaaatgctggttgtcacaaataagggcagaacgaagttgcctcctggggtcgacagaatgcggttggagcgccacctcagcgccgaggacttcagtcgcgtgtttgccatgagcccagaagagtttggaaagcttgccctttggaaaagaaacgaactcaagaagaaagcctccctcttctag

SEQ ID NO: 222259 - DNA, 1098 bp, synthetic construct
  misc_feature 1..1098: note = Description of Artificial Sequence: Synthetic coding sequence
  source 1..1098: mol_type = other DNA
atggaacgactgcagaaagccaaaatggataatcaggtcctaggctacaaggacctggctgccataccaaaagataaagccatattagacattgagcgacccgatctgatgatttacgagcctcactttacctatagccttctggaacatgtcgagttgcctcgctcccgagaggtgtgggctgattcacgaagtcccggaatcattagccaggcctccgcccctcggaccaccgggactccacgcactagcctcccgcactttcaccaccccgaaacctcacgccctgacagcaatatctataagaaacccccaatttataaacaacgcgaatctgtgggagggtcgccacagacaaaacatctcatcgaggacttgatcatcgagtcttccaaattcccagctgcgcagccaccagaccccaaccagcctgccaagattgagaccgattactggccctgcccaccatctctggctgtcgtggagacagaatggcggaagagaaaagccagccggaggggggcagaggaagaggaagaggaggaggatgatgattcaggagaggagatgaaagccctgcgagagcgtcagagagaagaactctcgaaagtaaccagtaacctaggcaagatgatcctgaaagaggagatggagaagtcccttcctatacgacggaaaactcgctcgctgcctgacagaacacccttccatacctccctgcaccagggaacaagtaaatcatcctcgctgcccgcatacggacgtactacgttaagccggctccagtcaacagaattctccccaagcggatccgagaccggcagtcccggactgcaaaacggcgaaggacaaagaggaaggatggaccgaggaaactccttaccctgcgtgctggagcagaagatttatccttacgagatgctggttgttacaaacaagggccgtacaaagctgccaccaggtgtcgacagaatgcgtcttgaaaggcacttgtctgcagaggacttctcccgggtgttcgccatgagtcccgaagagttcggtaagctcgcgttgtggaaaaggaacgagttaaagaaaaaagcctctcttttttag

SEQ ID NO: 222260 - DNA, 570 bp, synthetic construct
  misc_feature 1..570: note = Description of Artificial Sequence: Synthetic coding sequence
  source 1..570: mol_type = other DNA
atggatgctgtcgatgccaccatggagaaactccgtgcccaatgcctcagccggggtgcctcaggtattcagggccttgccagattctttcgccagctagatcgggacggctcccgctctcttgacgccgatgaattccgccagggactggcaaaactcggtctggtgctagatcaggctgaggcagagggcgtttgtagaaagtgggaccgaaatggatctggtacgctagacttggaggaattcctacgcgctcttcgccctcccatgtctcaggctagagaggctgttatcgcagctgccttcgccaagctagatcggtctggagatggggtcgtgacggtcgacgacctgagaggcgtatactcgggtagagctcaccctaaggtccggtctggcgaatggacggaggacgaggtgcttcggcgttttctggataattttgatagttctgagaaggacggccaggtgaccctggccgaattccaggactattacagcggggtgtctgcctccatgaacaccgacgaggagttcgtggccatgatgaccagcgcctggcaactctag

SEQ ID NO: 222261 - DNA, 2565 bp, synthetic construct
  misc_feature 1..2565: note = Description of Artificial Sequence: Synthetic coding sequence
  source 1..2565: mol_type = other DNA
atggcccttgagcaggcattacaggctgccaggcaaggcgagttagatgtcctcaggagcctccacgcagctgggctgcttggacctagtctgagagaccctctggatgccctccctgtccaccacgcagccagggctggaaaactccactgtctcaggttcctcgtggaggaggccgctctgcccgcagccgctagggcccgaaatggcgctacgccagcccatgacgcttccgctaccggtcaccttgcctgcctgcagtggctgttgagccaggggggttgtcgtgtgcaggataaagacaacagcggagcaaccgttcttcatctagccgcacgatttggccaccccgaagtcgtgaattggcttttgcaccatggcggaggggacccaacagccgcaacagatatgggggctctgcctattcactatgccgcagccaagggggactttccaagcctgcgactgctggtggagcactatccagagggtgtgaacgctcagaccaaaaatggcgcaacaccactctacctcgcctgtcaggagggtcacttggaggtgacgcagtatcttgtgcaagagtgtggagctgatccccatgcacgagctcacgatgggatgacgcccctacatgctgcagctcagatggggcactcaccagtcatagtttggctcgtttcatgtactgatgtcagcttgtccgaacaggacaaggacggcgcaaccgcaatgcacttcgcggcaagcagggggcataccaaagtactcagttggcttctcctgcatggaggagaaataagcgccgatctgtggggtggaacacctctgcatgacgccgctgagaatggtgaactcgaatgctgccagatcttggtggtgaacggggcagagctcgacgtgagggaccgggatggatacacggcagctgatcttagcgactttaatggacactcacattgtacaagataccttcgtacagtggagaatctgtccgtcgagcatcgtgtcctcagccgcgacccatctgctgaacttgaggccaaacaacccgacagcggtatgtccagccctaataccactgttagcgtgcaacccctgaattttgacctgagctctcccacgagtactctcagtaattatgattcctgtagttctagccactccagcattaaggggcagcaccctccatgtggactcagctccgcgagagcagcggacattcaaagttatatggacatgctgaaccccgagctggggttgccacgtggaaccataggcaagccgactcctccacctcctccaccttcctttccccctcctcctcctcccccaggcacgcagttaccccctccccctcctggataccctgccccaaagcctccggtgggcccacaggctgcagacatttacatgcagactaagaataagctgaggcacgtcgagacagaggcactgaaaaaggaactgtcttcttgcgatggtcatgacgggctgcggaggcaggattcctcacggaaacctcgggctttctctaagcaacccagtactggcgactactaccgtcagctgggtagatgtcccggagagaccctggctgcaagaccagggatggcacacagcgaggaagtgcgcgctcgtcagccggcacgagctggctgtcccaggcttggccctgcagctcgtgggtccttagagggcccatccgctccgcctcaggcagcgctgctacccggaaaccacgtgcccaatgggtgtgctgcggatcccaaggctagtcgcgaactccctccaccaccccctccacccccacctccactaccggaggccgcaagttcccccccacctgctcctcccctgccactggaaagcgcaggccctggatgcgggcagaggagaagctcttcaagcactggctccactaagtcctttaacatgatgtcccctaccggggataattcagagcttctcgctgagataaaagcgggaaaaagcttgaaacccacacctcagtcaaaaggattaaccacagtgttttcaggcatcggacagccggcatttcaacccgactcccccttgcccagtgtgtctccagcactgagccccgtgcgtagtccaacgccgccagccgcaggtttccaaccactcctgaatggcagcctggtgccagtgccacctactacccccgctccaggtgtgcagctcgacgtggaggcgcttattccaacccacgatgagcaaggccgaccaattccggagtggaaacggcaggtcatggtacgcaagatgcaactcaagatgcaggaggaagaggaacagcgacgtaaggaggaagaagaagaagcgcgtcttgcctctatgccggcatggcgcagggacctactcagaaaaaagttggaggaggaacgtgaacagaagaggaaggaggaggaacgccagaaacaagaggaactgcgacgtgagaaggaacagtccgagaagctccgaaccctgggctacgacgaatccaagctggccccatggcagagacaagttattcttaaaaagggcgatatcgcaaaatactag

SEQ ID NO: 222262 - DNA, 867 bp, synthetic construct
  misc_feature 1..867: note = Description of Artificial Sequence: Synthetic coding sequence
  source 1..867: mol_type = other DNA
atggctcactcagaagaagcggctctgcttcctggcaaccacgtgccgaatggctgtgccgctgacccaaaggcctcacgagaactcccaccccctcccccaccccctccacccccactgcctgaggccgcatcatcgccacctcctgcaccacccctgccactagagtccgccggtcccggatgcggtcagcggagatccagctccagtacgggtagcaccaagtcgttcaacatgatgtctcccaccggcgataactccgagttgctcgccgagataaaagctgggaagtccctcaaacccaccccccagtctaagggtctgaccactgttttctccggaattggacagccagctttccagcccgattcccctcttccctccgtttctccagctctgagcccagtgagatcacccactccccctgctgctggattccagcctctacttaacgggtctctggtgccggttccaccaacaactcctgcacctggggtacagctggatgttgaagccctgattcccactcatgatgagcagggacgtcctattccagaatggaaaaggcaggtcatggtccggaagatgcaattaaagatgcaggaggaggaagaacagaggagaaaggaggaagaggaggaggcgcgacttgcctctatgcccgcttggcgacgcgaccttttgaggaaaaagttagaggaggaacgtgaacagaagcggaaagaggaggagagacaaaaacaggaggagctccgcagagagaaagagcagtctgagaaactgcgaacactgggctatgatgaaagcaaactggcgccatggcagagacaggtgattttaaagaagggggacatcgccaagtactag

SEQ ID NO: 222263 - DNA, 645 bp, synthetic construct
  misc_feature 1..645: note = Description of Artificial Sequence: Synthetic coding sequence
  source 1..645: mol_type = other DNA
gatggcatgactccactccacgcagctgctcagatgggccactctccagtaatcgtgtggcttgataaggacggggctactgcgatgcacttcgcagcttctagaggccacactaaggtgcttagctggcttctgctgcacggtggagagatatctgcagatctttggggtggcactcccttacacgatgctgctgagaacggcgaattggaatgctgccagatactggtcgttaatggcgctgagttggacgttcgagaccgggacggatatacagccgcagatcttagcgatttcaacgggcactcacattgcacaaggtacttgagaaccgtggaaaacctttcagttgaacacagagtcctctcccgggatcctagcgctgagctggaggctaagcagcctgattccggcatgagcagcccaaacaccactgtgtccgtgcaaccactcaacttcgacctctccagccctacaagcacgctttcgaattatgacagctgctcatcatctcactcgtccattaaggggcagcatccaccatgcgggctaagcagcgcccgagctgcagatatccaatcctacatggatatgttgaacccggagctgggactgccacgcggaacaattgggaagcccacatag

SEQ ID NO: 222264 - DNA, 567 bp, synthetic construct
  misc_feature 1..567: note = Description of Artificial Sequence: Synthetic coding sequence
  source 1..567: mol_type = other DNA
tgagagattaaggccggtaagtccctgaagccaacccctcagagtaaaggtctgactaccgtttttagtgggatcggccagcctgcttttcaacccgattcccccttgccatctgtgtcccctgccctgtccccagtgaggagcccaacaccgccagctgctgggttccagccgctcttgaatggtagtctagttcctgtgccaccgaccacacccgctcctggggtgcaactggatgtcgaggccttgattcccacacatgacgagcaggggagaccaataccagagtggaagcgccaagtcatggtccgaaagatgcaactcaaaatgcaagaggaggaggagcagaggcgcaaagaagaagaagaggaggcgaggttggcaagcatgcctgcctggaggcgcgacctcttgcgtaagaagttagaagaggaacgcgagcagaagcgaaaggaggaagagcgtcaaaagcaagaagaactaagacgggaaaaagaacagagcgaaaagctgcgtactctgggctacgatgaatctaaactggcaccgtggcaacgccagatctag

SEQ ID NO: 222265 - DNA, 1335 bp, synthetic construct
  misc_feature 1..1335: note = Description of Artificial Sequence: Synthetic coding sequence
  source 1..1335: mol_type = other DNA
atggcccgagttggacccggaagggctggtgtttcctgccagggacggggtcgcggacgtggcggttcaggccagcggaggcccccaacgtgggaaatttccgactccgatgccgaagattctgccggaagcgaggctgctgccagggccagagatccggctggagagaggcgcgctgctgcagaagctcttagacttctgagacccgagcaagtcctgaaacgattggccgtttgcgtggacaccgccatcttggaggatgccggtgcagacgtcctcatggaggcattagaagccctggggtgcgaatgccgaatcgagccgcaaagaccagccagatctctacgctggactcgcgcaagccccgacccttgtcctcgatcgctcccacctgaggtctgggcagctggggaacaggagttgctgcttctgttagagccagaagaattcctgcagggggtggcaacattgacccagatctctggccctacccactgggttccttggatctctccagagacaaccgccagaccacatctggccgtcataggcctggatgcttatttgtggtatcgatccctttcttgcccccaacaggggtggctggggagaggcttccggggaggtggcctgtggcagaggccttcctcagggagagccggacccatggggagcggcgaggagtggagccctcttctccggagtcgtcaacacgttagccgaggcacgcagcaacccgaaagccctaaagttgcaggggcagaggtagccgttagctggccagaggttgaagaggttcgggcttgtctttcttgggccctggtgcttctgcaattgtgggctaacctggacgtacttctcgtcgcctcctggcaggaactctctcgacatgtttgcgctgtgaccaaagctctagcccagtacccccttaagtgtgttatgcccaggcttaaaggagggcgtattacttccagacagtacagggagtcccaggccttctctttttgtactgcagggcgatgggccgcaggcgagccagtagcaagagatggagcgggactgcaggcagcctggcgtcgccagatcagacagttttccagagtaagcccagctgttgctgacgccgtcgttaccgccttcccctcaccaagactgcttcagcaggccttggaggcctgttcaaccgagcgggagaggatgggcctcctcgccgatttgcccgtgcccccatccgagggcggtcggccaaggcgcgtcggaccagacttaagcaggcgtatttgcctttttttgaccacggctaatcccgatttgctcctggatctagggtcatag

SEQ ID NO: 222266 - DNA, 1161 bp, synthetic construct
  misc_feature 1..1161: note = Description of Artificial Sequence: Synthetic coding sequence
  source 1..1161: mol_type = other DNA
atggcacgggtcggacctgggagggccggagtgagctgccagggacggggtagagggaggggcggttctggccagcggaggccgcctacctgggagatctcagatagtgatgccgaggattcagctggatccgaggccgctgcccgagcccgagacccggcaggcgagcggagagccgctgccgaggcactgagactgcttaggccggaacaggtcctgaaacggcttgccgtgtgcgtggacactgcgatccttgaagatgcaggtgcagatgtgctgatggaggcccttgaagcattgggctgtgagtgccggatcgagccccagagaccagcgagaagcctacggtggacccgagcttcacccgacccttgtccaaggagccttccacctgaggtgtgggccgctggggagcaggagctcctgctccttcttgaacctgaagagttcctgcagggcgtggcaacactcactcagatctccggacctacacactgggtgccctggatttccccggaaacaacagctcgccctcatctggctgtgattggccttgatgcttatctgtggtccaggcaacacgtaagccgtggaacacagcagccggaaagcccaaaggtcgccggagcagaggtggcagtaagttggcctgaggtggaggaggtacgggcatgcctttcttgggcgctggttttgctccagctctgggcaaaccttgatgtgctgttagtggcctcttggcaagaactgtcgaggcatgtgtgtgcagtgacaaaagccttggcacaatacccactgaagtgtgttatgcctaggctgaagggcggacgcattacgtcacgccagtatagagagagccaggccttcagcttctgcaccgctgggaggtgggcagcgggtgagcctgtggcgcgagatggtgcaggcttgcaggcagcctggagaagacagatccggcaattcagcagggtttcccccgctgttgcagacgcagtggttacagccttccccagtccgagactactccagcaggccttagaggcatgctcgactgagcgcgaacggatgggactgctagccgttgggccagatctgtctcgccgtatttgcttgtttcttaccacagccaaccccgacctgctcctcgacctaggatcctag

SEQ ID NO: 222267 - DNA, 2523 bp, synthetic construct
  misc_feature 1..2523: note = Description of Artificial Sequence: Synthetic coding sequence
  source 1..2523: mol_type = other DNA
atgatgtcaatccaggagaagagtaaagagaatagctcaaaagtgacaaagaaaagtgatgataaaaactcggagaccgaaattcaggacagccaaaagaacctagccaagaaatccggacctaaggagacaattaagtctcaagctaagtcctcaagtgagagcaagattaatcaaccggagcttgaaacacggatgagtaccaggtcgtcaaaagcggcatctaacgacaaggcgacgaaaagcatcaacaaaaacacagtgacggtgagaggctactcacaagagtctaccaagaagaagctttcacagaaaaagttagttcatgagaaccctaaggccaatgaacagctgaacagaaggtcccaacgcttacaacagctgactgaagtgagccgcagatccctgcgctccagggagatccagggccaggtgcaggctgtgaagcagagtctccctcctacaaaaaaggagcaatgctccagcacgcaaagcaagagtaacaagacaagtcaaaaacatgttaaacgcaaggtcctggaagtgaagtcagactctaaggaggacgaaaacttagtgatcaacgaggtcattaatagccccaaaggcaagaaaagaaaggtggaacatcaaactgcatgcgcttgttcctcccagtgtacccaggggagcgagaagtgccctcagaagactactcgacgggatgaaacgaagccggttcccgttacaagcgaggttaagagaagtaagatggctacaagcgtagtcccgaagaagaacgagatgaagaaatccgtgcatacccaggttaataccaataccactcttcctaagagccctcagccaagtgttcctgagcagtctgataacgagctcgagcaggcgggaaaatccaagcgaggaagtattctacagctgtgtgaggaaatcgccggagaaatagaaagtgacaatgtggaggtcaaaaaggagtcaagccagatggaatcggttaaggaggagaagcctacagagatcaaacttgaagagaccagcgttgaacggcagatcctgcaccagaaggagacaaaccaggatgtccaatgtaaccgattcttcccaagccggaagacaaagccagtgaagtgcatattaaacgggatcaattcaagcgctaagaagaactccaactggaccaaaatcaagctaagtaaattcaattcagttcagcacaacaagcttgacagccaggtgagccctaagctgggcctgcttagaacgtccttctcaccacccgctctggagatgcatcaccctgtcacacagtccactttcctgggtacgaaactgcacgatcgcaatatcacgtgtcaacaggagaaaatgaaagagatcaattcagaggaggtgaagattaacgatatcactgtggagataaacaagacaaccgaaagagcgcctgaaaattgccacctggccaatgagatcaaaccgtctgatcccccactggacaaccagatgaagcacagttttgattctgcatctaacaaaaacttctctcagtgtctggagtccaaactggagaactcacccgtggaaaacgtcacagctgccagtaccctgttgtcccaggcaaaaattgacactggggaaaataaatttccaggctccgcccctcagcaacattctatcctgtctaatcagacatccaaatcttcggataaccgtgagacaccacggaaccactccctcccgaagtgcaattcccacttggaaataactatccccaaagacctaaagcttaaggaggctgagaaaacagacgagaagcagctgatcattgatgcaggtcagaaacgatttggtgccgtgagctgcaatgtctgcgggatgctgtacaccgcatcgaaccccgaggacgaaactcagcatctattgtttcacaatcaattcattagcgcggtcaaatatgtggggtggaaaaaagagcggatactcgctgaataccctgatggtcgaatcatcatggtactgcccgaggatccaaagtacgctttgaagaaggtcgacgagatacgagagatggtcgataacgacctgggcttccagcaggcccctctcatgtgttactctcgaaccaagaccctcctgtttatttccaatgataagaaggtggtgggatgcctgattgccgaacacattcagtggggatatcgcgtcatcgaggagaaactcccggttattcggtccgaagaggaaaaagtacggttcgagaggcaaaaagcgtggtgctgctcgaccttgccagagccagcaatatgcggaatatcaagaatctgggtgtttagtatgatgcgacggaaaaaaatcgccagcagaatgatcgagtgcttgcgctcaaatttcatctacggcagctatctttctaaagaagaaattgctttttccgatcccacccctgatggaaaactgtttgctacccagtactgtggcactggacagtttcttgtttataattttatcaatggccagaatagcacctag

SEQ ID NO: 222268 - DNA, 2106 bp, synthetic construct
  misc_feature 1..2106: note = Description of Artificial Sequence: Synthetic coding sequence
  source 1..2106: mol_type = other DNA
atgatgtccatccaggaaaaaagcaaggagaactcgagcaaggtgacaaaaaagtctgacgacaagaacagcgagaccgaaatccaggacagccaaaagaatcttgcaaaaaaatctggtccaaaagagaccatcaagagccaagccaagtccagttcggaaagcaaaatcaaccagcccgagctggaaactcggatgagcacacggtcatctaaggctgcatccaacgacaaggcaaccaaatcaatcaataaaaataccgttacagtgagaggctactcgcaggaaagcaccaagaaaaaactttcacagaaaaagctggtgcacgaaaaccccaaagcaaatgagcagctgaacaggaggagccagcgtctccagcagctgactgaggtgtcacggagaagcttgcgaagtagggaaattcagggccaggtccaggccgtgaaacagagcctgcctcccactaaaaaggaacaatgtagctctacacaatcaaagagcaacaagacatcccaaaagcacgttaaacggaaagtgctggaggttaaatccgactctaaagaggatgaaaatctggttataaacgaagttattaatagccctaaaggaaagaagcggaaggtagagcatcagaccgcttgcgcttgtagcagccagtgtacccagggcagcgaaaaatgtccccagaaaacaacccggagagatgagacaaagccggtccccgtgacatctgaggtgaaaagaagtaagatggccacctccgtagttccaaaaaagaacgagatgaagaaaagcgtgcatacccaggtgaacacaaatacaacattacccaagtctcctcagccctcagtgcctgagcagtccgacaacgagctcgagcaagctgggaagagcaagcgcggttctatcctccagttatgcgaggagatcgccggagaaatcgagagcgacaatgtggaagtgaagaaggagtccagccagatggagtcagtgaaggaggaaaaacctacagagataaaattggaggagacttccgtggaacgtcagattcttcatcaaaaagaaaccaatcaggatgttcaatgtaatcggttcttcccgtctagaaaaaccaagcccgtcaagtgtatcctcaacggtattaacagctctgccaaaaaaaacagcaactggacaaagatcaaactctcaaaattcaacagtgttcagcataacaaacttgactcacaggtaagcccaaagctgggcttgctgaggaccagcttttctccgccagccttagagatgcaccacccggttacccagtctacctttctgggaactaagcttcatgatcgcaatattacctgtcagcaagaaaagatgaaagagatcaactccgaagaggtcaagatcaatgacatcacggtggagatcaataagaccactgagcgagcccctgaaaattgccatttagctaatgagattaagccgtcagatccgcctctggataaccaaatgaaacactcgttcgatagcgcgagcaacaagaactttagccaatgtcttgaaagcaagctggagaattcccctgtggaaaatgttacagccgcaagcacgctcctgagccaagccaaaatcgacaccggagagaataagtttcctggttcagccccacaacagcactctatcctgtctaaccagacctctaagtccagcgataatcgcgaaacacctcggaatcacagcctccccaagtgcaactcacacctggaaatcactattcccaaagaccttaagcttaaagaggctgaaaagacagacgaaaagcaactgatcatcgatgccggacagaaaagatttggtgccgtgtcatgtaatgtctgtggcatgttgtacacagcctctaatccagaggatgagacccaacacctattatttcacaaccagttcatatctgcggtaaagtatgtagtgctcctgatcaaccatcacgaatgtggcagcgaggaagaattcataactagcctgttcctcagtatgttcaattttcgctacactcaaagaagcttctcctttcctatccggttcctagaaggactagaagagcgcaagaactccggttag

SEQ ID NO: 222269 - DNA, 1806 bp, synthetic construct
  misc_feature 1..1806: note = Description of Artificial Sequence: Synthetic coding sequence
  source 1..1806: mol_type = other DNA
atggctgctctgactcccaggaagcgcaagcaagactccttgaaatgtgattcgctgcttcatttcacggaaaacctcttcccaagccccaataaaaaacactgcttttaccagaattccgataaaaacgaggaaaatttacactgctcccaacaggagcattttgtgttatcagccctcaaaactacagagatcaacagactgccttcagcaaatcagggctcaccattcaagtcggctctgtctacagtgtccttttataaccagaataaatggtacctaaatcctctcgagaggaagttgataaaagaatcccgaagtacttgtctgaagacgaacgatgaggataagagtttcccaatagtcactgagaagatgcagggtaaacccgtgtgtagcaagaagaataacaagaagccccagaagagcttaactgcgaagtaccagccaaaataccggcatattaagcctgtgtcacggaattcacgcaactctaaacaaaaccgcgtgatctataagcccattgtcgagaaggaaaataactgccatagcgccgagaataacagtaatgcccctcgcgtgctctcacagaagattaagccccaggtgacattacagggaggcgctgctttttttgtgaggaagaagagtagccttaggaaatcctccttggagaacgaaccaagtcttggacgtacacagaaatcaaagagcgaagtaatagaagacagcgatgtggaaacagtcagtgaaaagaagacctttgccactaggcaggttcctaaatgccttgtgctggaagagaaattaaagattggcctcctgtcggcctcatctaagaataaggagaagctgattaaggatagctccgacgacagagtgtcttccaaggagcacaaggtggacaaaaacgaagcttttagtagcgaagactctcttggtgaaaataaaactatcagtcccaagtcaaccgtttatcccattttctcagcaagtagtgtgaatagcaagaggtcactcggagaggagcagttctctgtgggctcggtgaactttatgaaacaaacaaatatacagaaaaacaccaatacacgcgatactagcaaaaagacaaaggaccaactcatcatcgacgctggccagaaacattttggggcaaccgtgtgtaagagctgcggaatgatttatacggcaagtaacccagaagatgaaatgcaacacgttcagcatcatcataggtttcttgaaggaattaagtatgtcggttggaagaaggagcgagtggtggcagagttttgggatggaaagatcgtattagtgctcccccatgatccgtcctttgctatcaagaaagtggaagatgtgcaagagcttgtagacaatgagctcgggttccagcaggtagtccctaagtgtccaaataagataaagacgtttttgttcattagtgatgaaaagcgggtcgttggctgtctgatcgcagaaccaattaaacaagcctttagagtcctctctgaaccgattggtccggagagtccatcttcaacagagtgtccacgtgcttggcagtgttctgacgtacccgagcctgcagtatgcggcatctccagaatctgggtcttccggctgaagcgcagaaagagaattgcacgcagactggtagatactctgaggaattgttttatgtttggctgctttctgtcgactgacgagatagcgttctcagacccaacacctgacggtaaattgttcgcaaccaaatactgcaatactccaaatttcctggtttacaactttaacagctag

SEQ ID NO: 222270 - DNA, 720 bp, synthetic construct
  misc_feature 1..720: note = Description of Artificial Sequence: Synthetic coding sequence
  source 1..720: mol_type = other DNA
atgaagcagacaaacatccagaaaaacacaaatactcgggatacatcaaaaaagaccaaagaccagttaatcatcgatgctggccagaagcatttcggagccaccgtgtgtaaatcgtgcgggatgatctatactgcctccaatccagaggacgagatgcagcacgttcaacatcatcacagattcctggagggaatcaagtatgttggttggaagaaagaacgcgtggttgccgagttttgggacggcaagatagtgcttgtattgccccatgacccaagcttcgctatcaagaaagtcgaagacgttcaagaactggtcgacaatgagttaggatttcagcaggtcgttcctaaatgtccaaataaaataaagaccttcctctttataagtgatgagaaacgggtcgtgggttgtctcatcgctgagccaataaaacaggcattccgtgtgcttagcgagcccatcggccctgagtcaccaagcagcaccgagtgtccacgggcatggcaatgttcggatgtcccagagcccgcagtgtgtggaatatctaggatctgggttttccgactcaaacgccgtaaacgcattgcaaggcggctggtggacacattgcggaactgcttcatgtttggatgcttcctcagtaccgatgagatagcatttagtgatcccactccagatgattgtcgtagactgaaccggtaccaggaaacttag

SEQ ID NO: 222271 - DNA, 849 bp, synthetic construct
  misc_feature 1..849: note = Description of Artificial Sequence: Synthetic coding sequence
  source 1..849: mol_type = other DNA
atggccctcaaacagatttctagcaacaaatgtttcggcggattgcaaaaggttttcgaacacgactctgttgaactcaactgcaagatgaagttcgctgtttacctcccaccaaaggctgagacaggtaagtgccctgcgctgtactggttaagcggactgacatgcaccgagcagaattttattagtaagtccggctatcatcagtcagcgtccgaacatggtctggtcgtgattgccccagacaccagccctagaggctgcaatattaagggagaggatgaatcatgggacttcggaaccggagcaggcttctatgtggacgccacagaagacccctggaagactaattatcgcatgtactcttacgtgactgaggaactgcctcagctgatcaacgctaactttccagttgatcctcagcgcatgtccatatttggacacagcatgggcggtcacggagccctgatctgcgctcttaagaacccaggaaagtacaagtctgtctccgcttttgccccaatctgtaacccggtcctttgcccttggggaaaaaaagccttttctggctatcttgggacagatcagagtaaatggaaggcctacgatgccacacatttggtcaaatcttaccctgggtctcaattggacatccttattgatcaagggaaggatgaccagttcttgctcgatggccagctgctgcccgataattttattgctgcctgtaccgagaaaaagattccagtcgtgtttcggctccaagagggctacgaccattcatattatttcatcgccacgtttatcaccgaccatatcagacaccatgccaaatacctcaacgcgtag

SEQ ID NO: 222272 - DNA, 642 bp, synthetic construct
  misc_feature 1..642: note = Description of Artificial Sequence: Synthetic coding sequence
  source 1..642: mol_type = other DNA
atggccatcacccagttccgcctgttcaaattctgtacctgcctggcaactgtcttctccttcttaaagaggctcatctgccgttctggtcgcggtaggaagctaagcggggaccaaattactctgccaaccactgtcgactactccagcgtgcctaaacagactgatgtcgaggaatggacttcttgggatgaggacgccccaacatctgtcaaaatcgaaggagggaacggaaacgttgcgacacagcagaatagtctcgagcagctggaacctgattactttaaagacatgacaccaacaatcagaaagacgcagaaaattgttatcaagaagagggaacccttgaatttcggaattccggatggatctactggatttagcagtagactggcagcgacacaggacctccctttcatccatcagtcttccgagttaggcgacctcgacacctggcaagagaacacgaacgcttgggaggaagaagaggatgcagcctggcaggctgaagaggtgctccgccaacagaagctggctgatcgagagaaaagagcagctgagcagcagagaaagaagatggagaaagaggcgcagaggctgatgaagaaggagcagaataagattggtgttaagctcagttag

SEQ ID NO: 222273 - DNA, 642 bp, synthetic construct
  misc_feature 1..642: note = Description of Artificial Sequence: Synthetic coding sequence
  source 1..642: mol_type = other DNA
atggctatcacccagttccggctgtttaagttttgtacttgcctggctactgtgttttccttcctgaagcgccttatttgtaggagcgggcgtgggcgtaagctgagcggagatcagattacccttcctaccaccgtggactattcctccgtcccgaagcagacggatgtggaggagtggaccagttgggacgaagatgcacccacctctgtcaaaatcgaaggtggcaatgggaacgtggcaacccaacagaatagcctcgagcagctcgaaccggactattttaaggatatgactccgactattcggaagacccagaaaatcgtcataaagaaacgtgaaccattgaattttggaatcccagacggcagcacaggttttagctctaggctggcagctacacaagatctccctttcatccaccagtcatccgagctcggtgacctggatacttggcaagaaaacactaacgcctgggaagaggaggaggacgccgcttggcaggcggaggaggtacttcgacagcaaaagctggccgacagagaaaagcgggctgccgaacagcagagaaagaaaatggagaaggaagcccagagactcatgaagaaggaacagaataagatcggagtcaagctcagctag

SEQ ID NO: 222274 - DNA, 594 bp, synthetic construct
  misc_feature 1..594: note = Description of Artificial Sequence: Synthetic coding sequence
  source 1..594: mol_type = other DNA
atggcaattacgcagtttcgacttttcaaattctgcacatgtttggccaccgtcttcagctttttgaagcgcctcatatgcaggagcgggcgagggcgaaaactgagcggggatcaaatcactctgcccacaactgtggattattcaagcgtgcccaaacagaccgatgttgaggaatggaccagttgggacgaggacgctcctacatcagtgaagatcgaagggggaaatgggaatgtggcgacccagcagaactctttagaacagctggagcccgattattttaaggatatgacaccaactatccgcaaaacccaaaagatcgtgatcaaaaagcgcgaaccgctaaacttcggtatccccgacggctccacagggtttagtagcaggctcgccgcaacacaggatttacccttcatccaccaaagcagtgaattaggagacttggatacgtggcaggagaacacaaatgcctgggaagaggaggaagacgccgcatggcaggctgaggaggtgctcagacagcagaagctggccgacagggaaaagagggccgcagagcagcagaggaagaaaatggaaaaggaggcatag

SEQ ID NO: 222275 - DNA, 777 bp, synthetic construct
  misc_feature 1..777: note = Description of Artificial Sequence: Synthetic coding sequence
  source 1..777: mol_type = other DNA
atggccatcactcagttcagattgttcaaattctgcacctgtctcgcaaccgtatttagtttccttaaacggttgatctgtcgctccggcagaggccgtaaattgtctggagatcagatcacactcccgactacagtcgattacagtagcgtgcccaagcagactgatgtggaggaatggacctcatgggacgaggatgctcccacgtcggtgaagatagaagggggtaacggaaacgtcgctacacaacaaaactcactggaacagctagaacccgattatttcaaggatatgaccccaactattcgcaagactcaaaagatcgtgatcaagaaaagagaacccctaaacttcggaattcccgacggatcgactggctttagttccagactggctgccacacaagatctaccgtttattcaccagagctcggaactaggagacctcgatacatggcaggaaaatacaaatgcttgggaggaggaagaagacgccgcttggcaggctgaagaggttttacgtagtagaaccaacgtgtgcctgctgtgttccctgctgtttcaccatcctacccccacgtccacgccctatatcaaccagtcggtcaagatcgagcgggtgtcacttggccagtggtcgtatggtaagagtaaggaacaacagaagttggcagaccgtgagaaacgggcagccgagcagcagcggaaaaagatggaaaaggaagcccaaaggctgatgaaaaaggagcagaacaaaataggagtaaaactctcgtag

SEQ ID NO: 222276 - DNA, 237 bp, synthetic construct
  misc_feature 1..237: note = Description of Artificial Sequence: Synthetic coding sequence
  source 1..237: mol_type = other DNA
atggcaattacacagttccgtctgtttaagttctgcacctgcctggcgaccgtctttagctttttaaagcggctgatctgtcgcagcggacggggaagaaagctgagcggcgaccagattactctacccaccaccgtggattactcatccgtgcctaaacagaccgatgttgaagaatggacttcctgggacgaggacgctcctacttcggttaaaattgaaggcggaaacggctag

SEQ ID NO: 222277 - DNA, 1272 bp, synthetic construct
  misc_feature 1..1272: note = Description of Artificial Sequence: Synthetic coding sequence
  source 1..1272: mol_type = other DNA
atgagcagccaggttgtcggcatcgaacctctgtacatcaaggcggagccggcttccccggacagcccgaaaggcagcagcgagaccgaaaccgagccccctgtggcactggcgcctggtccagcacctactcgctgtctccctggccacaaggaggaggaagatggcgagggggctggcccaggcgaacagggcggaggaaagctcgtgctctctagcctccccaagcggctttgccttgtgtgcggtgatgtagcaagcggctaccattatggagtagcctcttgtgaggcctgcaaagccttctttaagcgcaccatccaggggtctatagaatatagctgtccggcttctaatgagtgcgagattacaaagcggagaaggaaggcttgtcaggcatgtcgatttacaaagtgcctcagagtgggcatgctgaaggagggggtgagactggacagggtccggggaggcagacagaaatataagcgcaggccagaggtggaccccttaccctttccagggccattcccggctggccctcttgccgtggctggcggacccaggaaaacagctgctccagttaacgccctggttagtcaccttcttgtggtagagcccgaaaagctgtacgccatgcccgacccagccggacccgacgggcacctgcccgctgtggccaccctgtgtgacttatttgaccgtgagatagttgtaacaatttcctgggccaagtccattccagggttttcttcgctgtctctgtctgaccagatgtccgtactgcagtctgtctggatggaagtgctagtgttgggtgtggcacagcggtccctaccgttgcaggacgagcttgcattcgccgaagacctcgttctcgatgaagagggcgctcgagccgctgggctgggtgaactcggcgctgccctgctgcagttggtgaggaggctgcaagccctgagactggaaagggaagaatatgtactcctgaaagctctggcactggcaaactccgactccgtgcacatcgaagatgctgaagctgtggaacaactcagggaggcattgcacgaagctctattagagtacgaagccggaagggcgggtccgggtgggggtgctgaacgacgaagggccggaagactgctattaactcttccattgctgagacagacagcgggaaaagtcctggcccacttctatggcgttaagctggaaggaaaagtgccaatgcacaagctttttcttgagatgctggaggccatgatggactag

SEQ ID NO: 222278 - DNA, 1272 bp, synthetic construct
  misc_feature 1..1272: note = Description of Artificial Sequence: Synthetic coding sequence
  source 1..1272: mol_type = other DNA
atgtcctcccaagtggtgggcattgaacctctctacattaaagccgaacctgcatctcctgacagtccgaaaggctcgtcagagactgagacagaaccacctgtcgcactcgcaccaggacccgctcccacaaggtgcctacccggtcataaagaggaagaggatggcgaaggtgccggtcctggggagcagggcggaggcaagctcgtgctgtcctctctccctaagagactgtgtttggtctgcggggatgtggcgagcgggtatcattatggggtggcctcttgtgaagcatgcaaagctttctttaagaggacaatccaggggtccatcgaatacagttgccctgctagcaatgaatgcgaaatcacgaagcggagaaggaaagcctgtcaagcctgtcgtttcacgaaatgcctccgagtgggcatgctgaaggagggcgtcaggcttgacagggtgcggggaggcaggcagaagtataagcgtaggcctgaggtcgaccctcttcctttccctggacctttcccagcgggaccactcgctgtcgctggtgggccacggaaaactgctgctcccgtaaatgcactggtctcccatctccttgtggtggagcccgagaagctttatgccatgccagatccggctgggccagacggccacttgcctgccgttgccaccttatgtgatctattcgatcgcgaaatcgtggttacaatctcctgggctaagtcgatccccggattctcgtctttgtccctgagcgaccagatgtccgtattacagagcgtgtggatggaagtgttggttcttggggtggctcagcgatccctccccctgcaggacgaactggcattcgcagaggacctggttctcgacgaagaaggcgctagagccgcagggttgggagagctgggagctgcactcctgcaactcgtcagaaggctgcaagctttgcgattggaacgcgaggaatatgtgctccttaaagcactggccctggcgaactcagactccgtgcatatcgaagatgccgaggcggtggaacagctgcgtgaggcccttcacgaagccctcctcgaatatgaagcaggaagagctggacccggaggcggtgcagaaagaagacgggctgggcgtctgcttctcacacttcctctgctacggcagaccgcgggtaaggtactggcacacttctacggagttaagctcgaggggaaggttcctatgcataagctcttcctcgagatgctcgaggcaatgatggactag

SEQ ID NO: 222279 - DNA, 1269 bp, synthetic construct
  misc_feature 1..1269: note = Description of Artificial Sequence: Synthetic coding sequence
  source 1..1269: mol_type = other DNA
atgagttcccaagttgtgggaattgaacccctatacattaaggctgaaccggcaagccctgactcgccaaagggatcctccgagacggagacagagccaccagtagccctcgcccctggcccagcgccaactcggtgtcttccagggcacaaagaagaggaggatggggaaggcgctggacccggtgaacagggaggaggaaagctcgttttgtcatccctaccaaaacgactgtgcttggtgtgcggagacgtcgcctcaggctatcattatggtgttgcaagttgtgaggcctgcaaagctttcttcaagagaacgatccagggctcaattgagtattcatgcccagcttcgaacgaatgtgagataactaagcgtcgcaggaaggcatgtcaggcctgtcgatttactaagtgtctgcgagtaggtatgctcaaagagggcgtgagactcgaccgcgtaaggggtggcagacagaaatataaaagacgacccgaagtggatccactcccgttcccgggacccttcccggctggcccattagccgtagcgggaggccctagaaaaactgctcccgtcaatgccctagtctcacatttgcttgtggtcgaaccagagaagctgtacgctatgccagatcccgctggaccggacgggcacctccctgctgttgccaccctttgcgatctgtttgacagagagattgttgtcacgattagttgggctaaaagcatccctgggttttcctctctctctctgtctgatcagatgagcgtgcttcagtcagtgtggatggaggtactggtgctcggtgttgcgcagcggagtctaccactccaagatgagctggccttcgccgaggatcttgtgctagacgaggagggagcccgagctgccggtttgggcgagctgggtgccgctctgctccagctcgttcggagactccaggccctccgtttggagagagaagaatatgtgctcttgaaggcgctagccttggctaactccgatagcgtccacattgaggatgccgaagccgtggagcagctgagggaggccctccacgaagccctcctcgaatatgaggctggcagagcaggtcctggtggcggagctgaacgcaggagagctggcaggctgctcttgactctgcctttgcttcgtcagaccgcaggtaaggtattagctcacttttacggagtgaagcttgaaggtaaggtccctatgcacaagttgtttctggaaatgctggaggcaatgatggactag

SEQ ID NO: 222280 - DNA, 330 bp, synthetic construct
  misc_feature 1..330: note = Description of Artificial Sequence: Synthetic coding sequence
  source 1..330: mol_type = other DNA
atgtcctcccaggtcgtaggcatcgagccactgtatattaaggctgagcctgcgagtccagactcgcccaagggtagttcggagactgaaaccgaaccacctgttgccctggccccaggacccgcaccaacccggtgtctccctggacacaaagaggaggaggatggtgaaggcgcaggtcctggggagcaggggggaggcaaattagtgttgagctctcttcccaagagactctgtctcgtgtgcggggatgttgcatctggttaccactatggagtggcgagctgcgaggcatgtaaggccttttttaaaagaactatccagggatag

SEQ ID NO: 222281 - DNA, 1503 bp, synthetic construct
  misc_feature 1..1503: note = Description of Artificial Sequence: Synthetic coding sequence
  source 1..1503: mol_type = other DNA
atgtctagtgatgatcgtcacttaggtagttcttgtggcagcttcatcaaaacagaaccatcttcacccagctccgggattgacgccctgtcacaccactcaccctccggctcctccgatgccagcggcggtttcgggctggccctgggtacccacgccaacgggctcgattctccaccaatgtttgcaggggctgggctcggtgggactccttgccgtaaatcatacgaagactgcgcaagcggaatcatggaggactccgcaataaaatgcgagtacatgctgaatgccattcccaaacggctctgtctggtctgcggggacatagcctctggctatcactatggtgtagcctcgtgcgaggcttgtaaggccttctttaagcgaacgatccagggaaacatcgagtatagctgtccagcaaccaacgagtgcgaaatcactaagcgccgacgcaagtcgtgtcaggcatgccgattcatgaagtgtctgaaggtgggtatgctgaaggaaggcgtgcggcttgaccgtgtccgaggcggacgccagaagtataaaagaagattagattccgaatcctcaccatacctgagtcttcagatcagcccccctgccaagaagcctttaaccaagattgtgtcctatctgctggtcgctgagcccgataagctgtacgccatgccgccacccggaatgcccgagggggatatcaaggcattaacgacactctgcgacctcgccgatcgtgagttggtggtgattatcggttgggctaagcacatccccggtttcagttccctgtccttgggcgatcaaatgtcactacttcaatctgcctggatggagatccttatccttggcattgtctatcggagtctgccctatgacgataaactggtttatgctgaagactatataatggatgaagagcactcacgacttgccggtctccttgagctctaccgggctatacttcagctggtacgtcggtataagaagctcaaggtagaaaaagaggagtttgtaaccctgaaggccctggctctagcgaattctgattctatgtatattgaagatctggaggcggtccagaaattgcaagatctgcttcacgaagccctgcaggattatgagttatcccagcgtcatgaggagccttggagaacaggcaaacttctgcttacattgcctctgctgaggcagactgcagccaaagcagtgcagcacttctatagcgtcaagctgcaagggaaggttccaatgcataaactgtttctcgagatgctagaggccaaagcgtgggcccgagcggatagcctccaagagtggcggcctttggagcaggtccccagcccacttcaccgagccaccaaacggcagcatgtgcactttctaacccctctgcctccacccccttccgtggcctgggtgggcacagcccaagcgggttaccacttggaggtgttcctgccacagcgcgcaggttggccaagggcggcatag

SEQ ID NO: 222282 - DNA, 1527 bp, synthetic construct
  misc_feature 1..1527: note = Description of Artificial Sequence: Synthetic coding sequence
  source 1..1527: mol_type = other DNA
atgagcagtgacgaccgccatctgggttccagctgtggaagtttcattaaaacagagccctctagcccctcctccggcattgatgctctgagtcaccatagtccatctggcagctcagatgcctccgggggtttcgggctggctctgggcacacatgcaaacggcctagatagcccaccaatgttcgcgggtgccggactcggcggaacaccttgccggaagtcatacgaggattgcgcctctggcattatggaggattccgcaattaaatgtgagtacatgctgaacgctatcccaaaacggctctgccttgtgtgtggcgacattgcatcaggataccactacggggttgcttcctgtgaggcttgcaaagctttcttcaagcggaccattcaggggaacattgagtattcgtgtcctgctaccaacgaatgcgagattactaaaaggagaagaaaaagctgccaggcctgcagattcatgaagtgcctgaaggttggaatgctcaaagagggagtgcgattagatagagtgcgcggagggagacagaaatacaaaaggcggctggattcagaatcttcaccttacttatccctgcaaatctccccccctgcaaagaaaccacttaccaagatcgttagctacctattagtcgctgagcctgacaaactttacgcgatgcctccaccaggtatgcccgaaggagacatcaaggctcttacaacactgtgtgacctcgccgaccgggaattggttgtgatcataggttgggcgaaacacatacccggattttcatctctgagcctgggagatcagatgtcactgctgcagagcgcttggatggagatcctcattctcggcatcgtgtatcgttctctcccttatgatgacaagctggtgtacgccgaagactacattatggatgaagaacattctcgcctcgccggtcttctggagttgtaccgcgctatactccaactggtcagacggtataagaaactgaaagtagaaaaggaagaatttgtcaccttaaaggccctggcccttgccaattccgactcaatgtatatcgaggaccttgaggctgtccagaagctgcaggaccttctgcacgaggcattgcaggactatgaactttcccagagacacgaagaaccgtggagaaccgggaaactacttctaacactgccactgcttagacagacggccgctaaggccgttcagcatttctattccgttaagcttcaaggcaaggtgcctatgcacaaactcttcctggagatgttggaggctaaagtgggtcaagagcagttacgaggtagtccgaaagatgagaggatgagtagtcatgatggaaagtgtccatttcagtcagctgctttcaccagccgcgaccaatcgaacagtcccggtatccccaaccctcggccatcatctcccaccccactgaacgagcgcggtagacagatctcaccaagcaccaggacccctgggggtcagggtaagcacctctggctcaccatgtag

SEQ ID NO: 222283 - DNA, 1503 bp, synthetic construct
  misc_feature 1..1503: note = Description of Artificial Sequence: Synthetic coding sequence
  source 1..1503: mol_type = other DNA
atgtcatcagatgacagacacctcggatcctcttgcgggagcttcatcaaaaccgagccatcttcccccagcagtggaatagatgcactgagccaccactctccttccggaagttctgatgccagtggcggattcgggttggctctggggacccacgcaaacggcctcgatagccccccaatgtttgccggagctgggctaggagggacgccttgccgcaagtcgtacgaggattgtgcctctggaattatggaggacagcgctataaagtgcgagtatatgttaaatgctattcctaagcgactgtgccttgtgtgtggagatatcgccagcggctaccattatggcgtggcctcatgtgaagcctgcaaagcctttttcaaacgcacgatacagggaaacatcgagtacagctgtccggcaacaaacgagtgtgaaattaccaagaggcggaggaagtcctgccaagcctgccggttcatgaaatgtctcaaagtgggcatgctcaaagagggcgttagattggatcgagtcagaggcggacgacaaaagtacaagaggaggctagatagtgagtcgagcccctacctgtcactgcagatctcacctcctgcgaagaagccccttaccaaaatcgtctcttacttattggtcgcagaaccagataagttatatgctatgccccctcccggtatgcctgaaggagatatcaaagccctgacaactttgtgcgatctggctgatagggagctcgtagtaattataggttgggctaaacatattcctggcttcagttccttgtcactaggtgaccagatgtctttgctccagtcagcctggatggaaattcttatactgggcattgtctataggtcactgccgtacgacgacaagctagtttacgccgaggactacattatggacgaggagcacagccgcctggcgggtcttctggagctctaccgagccattctgcaactcgtcaggcgatacaaaaaacttaaggtcgaaaaagaagagttcgtcaccctaaaagctctggccctagcaaacagtgatagtatgtacatagaggacctcgaggccgtccagaagctgcaggacttactgcacgaggctctgcaggattatgaattgtcccaaagacacgaggaaccgtggcggacaggcaaactactgctgactttgcccctcctgaggcaaaccgccgctaaagcagtgcagcatttttacagtgtcaagctgcagggtaaagtacctatgcacaaacttttcctggagatgctagaggcaaaagcttgggccagggctgacagcttgcaggaatggaggccccttgaacaggtgccctccccgctgcatagagctaccaagaggcagcacgtgcatttcttaactcccctccctcctcctccatccgtcgcttgggttggtactgcacaagccggttatcatttagaggtctttttgccacagcgcgctggatggcccagagccgcttag

SEQ ID NO: 222284 - DNA, 1527 bp, synthetic construct
  misc_feature 1..1527: note = Description of Artificial Sequence: Synthetic coding sequence
  source 1..1527: mol_type = other DNA
atgtctagcgacgatcgccatctcgggtcttcttgtgggtctttcatcaagaccgagcctagtagtccctcttctgggattgatgctctttcacaccactcccccagcggcagctcagacgctagcggtggattcggactggctcttgggacccacgccaacggtttagattctccgcctatgttcgccggagcaggattgggaggcaccccctgccgtaaatcctacgaggattgcgcctcaggcatcatggaagatagcgctatcaaatgcgagtacatgctcaacgctatccccaaaaggctgtgtttggtgtgcggcgatatcgcctcagggtatcattacggcgttgcatcatgcgaagcctgtaaagctttctttaagagaaccatccagggtaacatcgagtattcctgcccagcaaccaatgagtgcgagataaccaaacggagacggaagtcttgccaggcctgtcgcttcatgaagtgcctgaaagtaggcatgttgaaggagggagtgaggttggatagagtcagaggaggacgccagaagtacaagagacggctggactcagaaagctcaccatatttaagcttgcagatcagcccccctgcaaagaaacctcttaccaagatcgtgagttatctgcttgttgctgagcccgataaactgtatgctatgcccccacccggaatgcctgaaggggatatcaaagccctgacaaccctgtgtgatctggccgacagagagctcgtagtcattattggctgggcgaaacacattcctgggttctcatccttgtcactgggggaccagatgtccctgcttcagtccgcttggatggagatattaatacttggcatcgtgtacagaagcttgccatacgatgacaagctggtatatgccgaagattatattatggatgaagaacactctaggctcgccggactccttgagctatatagggcaatattgcagctggttcgacgttacaagaagctcaaggtggaaaaagaggaatttgtcactcttaaggctctggcactggcgaactccgatagtatgtacatcgaggaccttgaagccgtacaaaaactgcaggatctcctgcatgaagccctgcaggattacgagttgagccagcgccatgaagaaccttggcgtaccggcaagctcctgctgacgctgccattgcttcggcagactgctgctaaagccgtgcaacatttttactcagtgaagttgcaggggaaggtccccatgcacaaactctttctcgagatgctggaggctaaggtgggccaggagcagttgcggggatccccaaaggatgaacgaatgtctagccacgacgggaaatgtccatttcaatctgccgcttttacctctagggatcagtccaattcccctggaatcccgaatccgagacctagctctcccacccctttaaacgaaagaggcaggcaaatcagcccctccacaagaactcctggaggacaggggaaacacctgtggttgacaatgtag

SEQ ID NO: 222285 - DNA, 1527 bp, synthetic construct
  misc_feature 1..1527: note = Description of Artificial Sequence: Synthetic coding sequence
  source 1..1527: mol_type = other DNA
atgctgctcaacaggatgtcgtcagacgaccgccatctcgggtcaagttgtggaagcttcatcaaaactgaaccctcctcaccttcgagcggcattgacgcattatcccaccactccccgagtgggtcctccgacgcctcaggcggttttgggctggcactgggaacccatgctaatggattagacagtccacccatgttcgcgggagccggactgggaggaacaccctgtcgcaagagctacgaagactgtgcctctgggatcatggaagatagcgcgataaaatgcgagtatatgctcaatgccattcccaagcgcctctgccttgtctgcggggacatcgcctctgggtatcactatggagtggctagttgtgaggcctgtaaagctttcttcaaacggacgattcagggaaacatcgaatattcctgtcctgccacaaacgaatgtgagatcaccaaacgcaggcgaaaatcctgccaagcgtgcaggttcatgaagtgcttgaaagttggcatgctcaaggaaggagtccgactcgacagagtgcgtggaggaaggcagaaatataagcgacgtcttgatagcgagtccagtccttacctatccctccaaataagccctccagctaaaaagccactgaccaagatcgtgtcctatctgctggtggcagaaccagacaagttgtatgcaatgccacctcctgggatgccagaaggggatattaaggcgctgaccacactgtgcgacttggcagatcgggagttggtcgtcataatcggatgggccaaacatattccaggcttctcttccctgagtctcggggatcaaatgagcctgcttcagtcagcatggatggagatcttgatccttggcatagtgtaccggtccctgccatacgatgacaagctggtctacgccgaagattacattatggatgaggagcattcgcgtctcgcaggactgctcgaactctaccgggctattctgcagctggtccgcagatataaaaagctgaaggtggagaaagaggagttcgtgacgctgaaagccctggccctggccaattcagattcgatgtatatagaggacttggaagctgtacagaaacttcaggatttactgcacgaggctctacaggactatgaactgtctcagcggcacgaggaaccttggcgaactgggaagttgctgctcaccttgcctctgctccggcagacagcagcaaaagcagtccagcacttttacagtgtcaaattacagggaaaggtgcccatgcataagctttttctggaaatgctggaagctaaggtcggccaggaacagctgagaggctctcctaaggatgaaagaatgtcaagccacgacggcaaatgtccttttcagagcgctgccttcacttccagggaccagtccaatagcccaggcattcctaaccctagacccagttcacccactcctcttaacgagaggggtcgccagataagtcctagtactaggactccgggaggccagggcaaacactag

SEQ ID NO: 222286 - DNA, 1302 bp, synthetic construct
  misc_feature 1..1302: note = Description of Artificial Sequence: Synthetic coding sequence
  source 1..1302: mol_type = other DNA
atgtcatccgacgatcgacatctggggtcctcttgtgggtcatttatcaaaactgaacccagctcaccaagtagcggaattgatgctctttcacaccactcacctagtgggtctagtgatgcctccggaggctttggcctggcgttgggcactcacgccaacggtctggatagcccgccaatgttcgccggtgccggtctgggaggcacgccatgcaggaaatcctacgaggactgcgctagcggtataatggaagattcagctatcaaatgtgagtatatgctcaacgccatccctaagcgcctgtgcctggtctgcggggacatcgccagcggataccactacggggtggcttcatgtgaggcatgcaaggcgttcttcaaaaggacaatccagggaaacattgagtatagctgccctgccacaaacgagtgtgagatcactaagaggcgtcgaaaaagctgtcaggcctgcaggttcatgaagtgtctcaaggttggtatgctgaaagagggagtgagactggacagagtgaggggagggaggcaaaaatacaagaggcgtctggacagcgaatcgagcccctacctgtctctacaaatcagtccccctgccaaaaagccactgaccaagatagtgtcatatctgctcgtagccgagccagacaagctgtacgcaatgccacccccaggcatgcctgaaggtgatatcaaagcactcaccacgttatgcgatctggcagacagggagctggtggtgatcatcggttgggccaaacatatacccggattttcatccctcagtctgggcgatcagatgtctctactgcagtccgcctggatggagatcctgattttaggaatagtgtacagatctttgccctacgatgataagctggtctacgccgaggactacataatggacgaagagcattctagattggccggtctcctggaactttacagagctatactccaacttgtccggcgatacaaaaagctcaaggtggaaaaggaggaatttgtgaccttgaaggccctagcattggctaattcggactcaatgtacattgaggatcttgaagccgtacaaaagctccaggacctcctgcatgaagctttgcaggactatgaactttcacaaagacatgaggaaccctggagaaccggaaagctgctgctcacactgcccctcttgcgccagactgccgctaaggccgtgcagcacttctatagtgtgaaacttcagggtaaggtcccgatgcacaagttatttctggaaatgctagaggccaaggtgtag

SEQ ID NO: 222287 - DNA, 1311 bp, synthetic construct
  misc_feature 1..1311: note = Description of Artificial Sequence: Synthetic coding sequence
  source 1..1311: mol_type = other DNA
atgtctaacaaagacagacatatcgactcctcttgcagtagcttcataaagaccgaaccttcctccccggcttccctgaccgacagcgtgaaccaccattcccccggagggagttccgatgcttctggatcctattcatccaccatgaatggccatcagaatggcctcgactctcctcccttgtatcccagcgcaccaatcctgggagggtcaggcccagtgagaaagctgtatgacgattgctcttccaccattgtggaggaccctcaaacaaagtgcgagtacatgctcaactcaatgcctaagcggctctgtctggtttgcggagacatagcatctggataccattatggagtcgcgtcctgcgaggcttgtaaggccttcttcaaaaggacaatccagggtaacattgagtacagttgcccagccaccaacgagtgtgagattaccaagcgtcggagaaagtcgtgccaagcttgcaggttcatgaaatgcttgaaagtaggcatgcttaaagaaggcgtgagattagatagagtgcgcggtggaagacagaaatacaaaagacggattgatgcggaaaactccccgtacttgaatcctcagctggtccagcccgctaagaagccctataataagatcgtatcacacctcctggttgctgaacctgaaaaaatctatgccatgccagatcctactgtcccagatagtgatataaaggcacttacgaccctgtgcgacttggccgaccgggaactagtggtgattatcggatgggccaaacacatccctgggttttctacactctcactggctgaccagatgagtctactgcagtctgcttggatggaaatcttgatcctaggcgtagtgtatcggagcctatcctttgaggacgaactggtttatgctgacgactacataatggacgaagaccagtccaaattagccggactcctggatcttaacaacgctatactccagttggtcaaaaagtacaaatcaatgaagttagagaaggaggagtttgtaaccctgaaagctatcgcacttgcaaatagtgactccatgcatatagaggacgtcgaggccgtccagaagctgcaggacgtgcttcacgaggctctgcaggactacgaagccggtcagcacatggaagatccaagaagggctggcaagatgctcatgaccttaccactgctgcgccagacgagcacgaaagcggttcaacacttctacaatattaagttagaaggaaaggtaccaatgcataaattatttttggaaatgcttgaggcgaaggtttgctag

SEQ ID NO: 222288 - DNA, 1308 bp, synthetic construct
  misc_feature 1..1308: note = Description of Artificial Sequence: Synthetic coding sequence
  source 1..1308: mol_type = other DNA
atgtcaaataaagatagacatattgacagctcgtgcagttcgtttattaagactgaaccttccagccctgcttccctcaccgactctgttaaccatcacagccccggaggcagctccgacgccagcggcagctactcgtcaacgatgaacggtcaccaaaatggactcgattccccacccctgtatccgagcgcacctatcctggggggatcaggccctgtccggaaactgtacgacgattgcagcagcaccattgtcgaagatccacagacaaagtgcgaatatatgctcaactcaatgcccaagagactgtgtttggtttgtggggatattgccagcgggtatcattacggagtggctagttgtgaagcttgcaaagcctttttcaaacgcacaattcaggggaatatagaatactcatgtccagccactaacgagtgtgagattactaaacggagaagaaaatcttgccaagcctgcaggtttatgaaatgccttaaggtcgggatgctcaaggaaggcgtcaggctcgatagggtcaggggaggacgccagaaatataagcggaggattgatgcggagaatagtccataccttaacccacagctcgtgcagcctgcgaagaagccctataacaagattgtgtcccacctgcttgtggcagaacccgaaaagatctacgcaatgccagatcctaccgtgcccgacagcgacattaaggccctgaccactttatgtgacctcgccgaccgagaactggtcgttattatcggatgggcaaaacatattcctggcttttccacattatcgctggctgaccagatgtcactgctccagtctgcctggatggaaattcttattctcggcgtggtgtatcgcagtctcagttttgaggatgagctggtttacgctgatgactatattatggacgaggaccaatcaaagcttgcagggctactggacctcaacaatgctattctccagctcgtcaagaagtataagtccatgaaactagagaaggaggaatttgttaccctcaaggctatagccctggctaattccgactcaatgcacatcgaagatgtagaggccgttcaaaagctgcaggacgtcctgcacgaagcccttcaagattatgaggctggacagcacatggaagatccgcgtagggcaggaaagatgctgatgaccctgccattgttgcgacagacctcaaccaaagccgtgcagcacttttataatattaaattggaggggaaggtgcctatgcataaactctttctggaaatgctcgaagcaaaggtgtag

SEQ ID NO: 222289 - DNA, 1308 bp, synthetic construct
  misc_feature 1..1308: note = Description of Artificial Sequence: Synthetic coding sequence
  source 1..1308: mol_type = other DNA
atgtcaaataaagataggcacatcgactcaagctgtagctcctttattaaaacggagccatctagccccgcaagcctcacagatagcgtaaaccaccactccccaggcggatcctctgacgccagcggaagctattcctctaccatgaacggtcaccagaatggattagatagcccccctttgtacccatcggcacctatattagggggatctgggccagtccgcaagttatacgacgactgctcatccacaattgtcgaagacccgcagaccaaatgtgagtatatgctgaacagcatgccaaagaggttatgtttagtgtgtggagacatagctagcggataccactacggcgttgcttcctgtgaagcatgtaaggcgttctttaagcgaacaatccaggggaatatcgagtatagttgccccgctactaatgaatgcgagataactaaacgaaggcgcaaatcttgccaggcctgtaggttcatgaagtgcctgaaggtgggcatgctgaaggagggagttcgcctggacagagtgaggggcggtagacagaagtataagcggcgaatagatgcagaaaactccccatacttaaatcctcagctcgtgcagccggctaagaaaccttacaataaaatcgtaagtcacctcctggtggcagaaccggagaagatctatgcgatgcccgaccctactgtgcctgattccgatattaaggcacttactaccctctgcgacctagccgacagagagctggtggtcattatcgggtgggccaagcacatcccgggtttctctaccttatcactggctgaccagatgtccctgctgcagtccgcatggatggagattctgatattaggcgttgtctacagatcactaagcttcgaagacgagcttgtatacgccgatgattatatcatggatgaagatcagtctaaactcgctgggctactagacctgaataacgctattcttcagctggttaaaaagtacaagagcatgaagctcgaaaaagaggagttcgtaaccctcaaggctatcgcccttgccaattccgactcaatgcacattgaggacgtggaggcggtgcagaaactgcaggacgttctacatgaagctctgcaagattacgaagcaggccagcatatggaggacccccgacgggcaggaaaaatgctgatgactctcccactcctgagacagacatccacaaaagcagtccagcacttctacaacatcaagctggagggcaaagttcctatgcataaactttttttggagatgctcgaggccaaggtgtag

SEQ ID NO: 222290 - DNA, 1308 bp, synthetic construct
  misc_feature 1..1308: note = Description of Artificial Sequence: Synthetic coding sequence
  source 1..1308: mol_type = other DNA
atgtccaacaaagataggcatattgactctagttgctcctcattcatcaaaaccgaaccctcttcccccgctagtttgaccgatagcgttaaccaccacagtcccggaggcagttccgacgcctccggctcatactctagtaccatgaatggacatcagaacggactggactctccccctctgtatccatctgctcctattcttggcggaagcggccctgtgagaaaactttacgatgactgctctagcaccatcgtcgaggaccctcagaccaagtgcgagtacatgttaaattcaatgcctaaaaggctgtgcttggtgtgtggcgatatcgcgagcggataccactatggagtggcgtcgtgcgaggcctgtaaagccttcttcaagagaacaatccagggcaatatcgaatacagctgccccgctaccaacgagtgtgaaattactaagagacggaggaagagctgccaggcttgtagattcatgaagtgtctgaaagtcgggatgctcaaagagggggtgcgcctcgacagggttagaggcggaaggcagaaatataaacgacgaatcgatgccgagaactcaccctacctcaatccacagctggtacaaccggcaaagaaaccttacaacaaaattgtgtcccacttgctggtagccgaacctgaaaagatttacgccatgcccgaccccactgtcccggactcggatattaaggccctcaccacactgtgcgatctcgccgatagggaactcgtggttatcattggatgggccaaacatattcctggattcagtacattgtccctcgcagaccagatgtccctactccagagcgcatggatggagatcctgattcttggcgtcgtatatagatctttatcttttgaagacgaactggtctatgcggatgattacatcatggatgaggatcaatctaaactggccggacttctggacctgaataatgctattctgcaactggttaaaaaatacaaatccatgaagctggaaaaggaggaatttgtcacattgaaggctatagcactggccaatagcgatagtatgcacattgaagatgtggaagccgttcaaaaacttcaggacgttctccacgaggcccttcaggactacgaagccggtcagcatatggaagatcctaggcgagcgggaaagatgctgatgaccctacccctcctgcgccaaactagtaccaaagcggtgcagcacttttacaacatcaaacttgagggcaaagtacccatgcacaaacttttcctcgaaatgctggaagccaaggtgtag

SEQ ID NO: 222291 - DNA, 1308 bp, synthetic construct
  misc_feature 1..1308: note = Description of Artificial Sequence: Synthetic coding sequence
  source 1..1308: mol_type = other DNA
atgtctaacaaagataggcatattgactcaagctgcagtagcttcatcaagaccgaaccgagctcccctgccagtcttaccgacagcgtaaatcaccactctcccggagggagttcggacgcttctgggtcttattcaagcaccatgaacggccaccagaatggattagactcacctcctctgtatcctagcgcacccatactgggcggtagcgggccagtccgcaaattatatgatgattgctcttctactattgtggaggacccccagaccaagtgcgagtatatgcttaacagcatgcccaagcggttatgcttggtatgtggagatattgcaagcggataccactacggggtggcctcctgtgaggcttgtaaggcattcttcaagaggacaatccagggcaacatcgagtattcatgccctgcaaccaacgagtgtgagatcacaaagaggcgaaggaaaagctgccaagcgtgcaggtttatgaagtgtctgaaagtgggaatgctcaaggaaggggtgcggctagacagagtacggggtgggcgacagaagtataagaggcgcatagacgccgagaattccccgtatctgaatccacagcttgtccagcccgctaaaaaaccatataataagatcgtatcacaccttttagtggcagagcccgagaaaatatatgccatgccagatcccacagtccctgactcagacatcaaagcgttgacgacactgtgcgatctcgccgaccgcgagttggtagtgatcattggctgggccaaacatatccctgggttttctacacttagtctcgcagatcagatgagcctgcttcaaagcgcttggatggagattttgatcctgggtgtggtataccgcagcctgtcttttgaagatgaactcgtgtacgctgacgattatatcatggatgaggaccaaagtaaactggcaggcctgttggacctgaacaacgctattctgcagctggtgaaaaagtataaatccatgaaactcgagaaggaagagtttgtgacactgaaggccatcgccctcgctaacagcgattccatgcatattgaggatgtggaggctgttcagaaacttcaggacgtgctgcacgaggcacttcaggactacgaagccggacagcacatggaggacccacgtcgcgctggcaagatgctgatgaccctacccctgctcaggcagactagcacgaaggctgtccagcatttctataacatcaagttggaaggaaaggtgcctatgcacaaattgttcctggagatgctagaggctaaggtgtag

SEQ ID NO: 222292 - DNA, 1308 bp, synthetic construct
  misc_feature 1..1308: note = Description of Artificial Sequence: Synthetic coding sequence
  source 1..1308: mol_type = other DNA
atgagcaataaggatcggcacattgatagctcatgcagtagctttatcaagactgagccaagcagtcctgcaagcctgactgactctgtcaaccatcactctcccggaggctcctctgacgcttctggaagttattcctctacgatgaacggccaccagaatggccttgactcccctccgctttacccgagtgctccaatcctgggcggaagcggacccgtacgaaaactctatgacgattgttcctccaccattgtggaagacccacaaacgaagtgcgaatatatgttgaacagcatgcccaaacggctgtgtctagtctgcggcgacatcgcttctgggtatcattatggcgttgccagctgcgaggcctgtaaagcattcttcaagcggaccatccaaggcaacattgagtatagctgccctgcaacaaatgagtgtgagatcaccaagagacgcagaaagagctgccaggcttgtcggtttatgaagtgcttaaaggtaggcatgctgaaggaaggtgttcgccttgaccgcgtgcgcggaggtagacagaaatataagcgtcgcatcgacgctgaaaactccccatatctgaatccccaactagttcagcccgctaagaaaccttacaataaaattgtcagccaccttctggtggctgagcctgagaagatttatgctatgccagaccctaccgtgccagattctgacataaaggccctgaccaccctctgtgacctggccgaccgtgaattagttgtaatcattgggtgggctaagcatatccctggtttctctacactgtcactcgcagatcagatgagcctgctgcagagtgcgtggatggaaatcctgatcttgggggtcgtttacaggtccctgagtttcgaagacgagctagtgtacgccgatgattatatcatggacgaagatcaatctaagttagccggtctcctggacttgaataacgccatactccagctggttaagaaatacaagagcatgaagcttgaaaaagaggagtttgtgaccctgaaagccatcgccttagccaatagtgattcaatgcacattgaggatgtcgaggccgtgcagaaactgcaagatgtgctgcacgaagccctccaggactatgaggcaggccagcacatggaagatcccagacgggctggcaaaatgcttatgacactgccactgctgcggcagacctctacaaaagccgttcagcacttctataacatcaagctcgaaggaaaagttccaatgcataagttgtttttagagatgttggaggccaaagtgtag

SEQ ID NO: 222293 - DNA, 1308 bp, synthetic construct
  misc_feature 1..1308: note = Description of Artificial Sequence: Synthetic coding sequence
  source 1..1308: mol_type = other DNA
atgtctaacaaagaccgacatattgactcctcctgttctagtttcatcaagactgagcctagcagtcccgctagcctgactgactctgtcaaccaccactctccgggaggatcatccgacgcttccggttcatactcctctaccatgaacggccatcagaacggcctggattcgcctcctctctatccaagtgcacccattcttgggggttcaggtcctgtgcggaaactttacgatgattgtagctctaccatcgtggaggacccccaaacaaagtgtgaatacatgctgaattctatgcccaagagactctgcctagtttgtggcgatattgcctctggctatcattatggggtggccagctgtgaggcctgtaaagccttctttaagcgcactattcaggggaatattgaatattcatgtcccgctaccaatgagtgtgaaatcacgaaacgcagaagaaagtcatgccaggcttgtagattcatgaagtgccttaaagtcggcatgctgaaggaaggggtacgactcgacagagtgcgcggaggccgacagaaatacaagcggcgtatcgacgccgaaaattcgccatatctgaacccccaacttgtgcagccagcaaagaagccttacaacaaaatcgtctcccatctgctggtcgccgaaccagagaaaatttatgcaatgccagaccctacagtacccgatagcgacatcaaggctctaacaacgctttgcgatttagcagatcgcgagctcgttgtcatcattggctgggccaagcacatccctgggttttctacattaagcctggcagatcaaatgtcccttctgcagtctgcttggatggaaatcctgatacttggggtggtgtatagaagcctcagcttcgaagacgagttagtctatgccgacgattatatcatggatgaagatcagtctaagcttgctgggttgctagacctcaacaacgcaatccttcagctggtcaagaaatacaagtctatgaagcttgaaaaggaggagtttgttaccttaaaggccatcgccctcgcgaactctgacagcatgcacattgaagatgtcgaagccgttcaaaagctgcaagacgtactacacgaagcgctacaagattatgaagccggacaacacatggaagacccaagacgagccggtaagatgctgatgacactgcctctgctccgacagacttcgacaaaggcagtgcagcacttctacaacatcaaactggaaggcaaagtccccatgcataagttatttctggagatgctggaggctaaggtatag

SEQ ID NO: 222294 - DNA, 1329 bp, synthetic construct
  misc_feature 1..1329: note = Description of Artificial Sequence: Synthetic coding sequence
  source 1..1329: mol_type = other DNA
atgagcaacaaggataggcatatagattcctcgtgctcctccttcattaagactgagcctagctcccctgcctcccttacagactctgttaaccatcactcaccagggggttccagcgatgcctcaggctcttactctagcacaatgaacgggcaccagaatgggttggactcgccacctctgtaccctagcgctccgatccttggaggttctggccctgtgcgaaagctgtatgatgattgtagcagcaccatcgtggaggatccacagacaaagtgcgagtatatgctcaattctatgccaaagagactatgtctcgtctgtggcgatattgcctccgggtatcactacggtgtggcgtcctgcgaggcctgcaaagcttttttcaagcggaccatccagggcaatatagaatatagctgccctgctacaaacgaatgtgaaatcaccaaaagacggaggaagtcttgtcaggcatgtaggttcatgaaatgtctgaaggtgggcatgctgaaagagggcgtgcggctggatagagtgcggggtggaaggcaaaagtataaaaggcgcatcgacgccgaaaacagcccctacctgaaccctcaactggtgcagcccgctaagaaacccctcctgtggagcgaccctgccgacaacaaaattgtgtcgcatttactcgtggctgagcccgagaagatctacgcaatgcccgaccctacagtgcctgattcagacattaaagctctgactactctgtgcgatctggccgaccgggaactagttgtgataattggctgggcaaagcacattccgggattcagtaccttaagcctggccgatcagatgtcactgctgcaatctgcttggatggagatcttgatcctgggcgtcgtgtatcggtctttaagctttgaggacgaactggtatatgctgatgactacattatggatgaagatcaatcaaaactagccggattacttgatcttaataacgcaatcctgcagcttgttaagaagtacaagtccatgaagttggagaaagaagagttcgtaacactcaaggccatcgctctggcaaactcggactccatgcacattgaggatgtggaggccgtgcagaagttgcaagacgtactgcacgaggcattgcaggactacgaggctgggcagcacatggaggacccgagacgtgcagggaagatgctgatgacgctgccattattgcgtcagaccagcaccaaggcggtacagcatttttataatattaaattggagggcaaggtaccgatgcataagctctttctcgagatgctggaggcaaaggtgtag

SEQ ID NO: 222295 - DNA, 1377 bp, synthetic construct
  misc_feature 1..1377: note = Description of Artificial Sequence: Synthetic coding sequence
  source 1..1377: mol_type = other DNA
atggacagtgtcgaactctgtctccccgaaagcttttccctgcactatgaggaggagctcctgtgcaggatgtccaataaggacagacatattgactcctcctgttccagctttataaagaccgagccctcctcccccgcttctcttacagatagtgtcaatcaccacagccctggcggaagttccgacgccagcggctcctattcgtcaactatgaatggacaccagaatggcttggactctcctcccctataccctagcgcgccaattctgggcggatctggcccagtgcgcaaactttatgatgactgttcatccactatcgtcgaagacccacagacaaagtgtgaatacatgctcaactctatgccaaagagactgtgcctggtgtgtggagacattgcgtctggatatcattacggggttgcttcttgtgaagcttgcaaggcctttttcaaacgcacaatacagggcaacattgagtattcttgtcctgccactaacgaatgcgaaataactaaacgccgaagaaagtcatgccaagcttgtaggttcatgaaatgtctcaaggttggtatgctgaaagaaggcgtgagactggaccgggtgagaggcggacgtcagaagtacaaaagacgtatcgacgctgaaaacagcccctatctgaacccacagttagtgcagccagccaaaaagccatacaacaaaatcgtttcgcacctactggttgccgagcccgagaaaatttacgctatgccagatcccaccgtgcccgactcagacatcaaagcactgaccacactatgtgacttagccgacagagagttagttgttataatcggctgggccaagcacattcccggatttagcaccctgagcctcgcagatcagatgtccctgcttcaatcagcctggatggaaattttgatcctgggcgtggtctaccggtcccttagcttcgaagacgagttagtctatgcagatgactatattatggatgaggatcagtcaaagctggcaggcttacttgatttgaacaatgccatcctccagttggtgaagaaatataaatctatgaagctggaaaaggaggagtttgtaacgttaaaggccattgctcttgccaatagcgactcaatgcatatcgaagacgtggaggctgtgcagaagctgcaggacgtattgcacgaggcactccaggattatgaagcgggacagcatatggaagaccccaggcgggcagggaagatgctcatgacattaccgctattgaggcaaaccagcactaaagctgtccagcatttctataacatcaagttggaaggtaaggtgccaatgcacaagctgtttcttgaaatgctggaggccaaagtgtag

SEQ ID NO: 222296 - DNA, 171 bp, synthetic construct
  misc_feature 1..171: note = Description of Artificial Sequence: Synthetic coding sequence
  source 1..171: mol_type = other DNA
atgtctaacaaggacagacacatcgatagcagctgctcctccttcataaaaacagagcctagctctcccgcatccttaactgatagtgtcaaccatcattcacctgggggaagcagcgatgcgtctggttcctactcctctacgatgaatggccaccagaacggcctctag

SEQ ID NO: 222297 - DNA, 279 bp, synthetic construct
  misc_feature 1..279: note = Description of Artificial Sequence: Synthetic coding sequence
  source 1..279: mol_type = other DNA
atgagcaataaggatagacacatcgatagtagctgttcaagctttattaagaccgaaccatccagcccggcatctctgacagactcggtcaaccaccactccccgggaggaagcagtgatgcctcagggtcctattcaagcaccatgaacggacatcagaacggccttgactcacccccactatacccctctgctcccattttggggggttccgggccagtgaggaagttatatgatgattgtagttccacaatcgttgaggacccacaaacgaagtag

SEQ ID NO: 222298 - DNA, 1065 bp, synthetic construct
  misc_feature 1..1065: note = Description of Artificial Sequence: Synthetic coding sequence
  source 1..1065: mol_type = other DNA
atgtccaacaaagatcgacatatcgactcgtcctgctcaagctttattaagacagaacctagctcccctgcttccctcacagactctgttaatcaccatagcccaggcggatcctcagatgcgtctggaagctactcctccactatgaacggacatcagaacggactcgacagtcctccactgtaccccagcgcaccaatcctgggcggttctgggcctgtgcggaagctgtacgacgattgttcgagtactatcgttgaggacccacaaactaaatgcgaatacatgcttaattccatgcccaaacgtctgtgtctggtgtgcggcgacatcgcctctgggtaccattatggcgtcgccagctgtgaagcgtgtaaggcttttttcaagcgtaccatccagggaaatatcgagtattcctgtcctgccaccaacgagtgcgagattactaagcgcagacgcaaatcgtgtcaggcatgccggtttatgaagtgcctgaaggttggaatgctcaaagaaggtgtccgtttagacagggtccgaggaggtaggcagaaatataagcgacggatcgacgccgagaacagcccgtacctgaacccgcagctggttcagccagccaaaaaaccctacaacaaaatcgtctcccatttacttgtcgctgagccagagaagatttatgcaatgcctgacccaacggtgcccgattcagacatcaaggccctgaccacgctctgcgacttggccgacagggaactggtggtgatcatcggctgggcaaagcacataccgggattctctacccttagtctggcagaccaaatgagcctactgcagagtgcctggatggagatcctgattttgggtgtggtctaccgatccctcagttttgaggacgagcttgtatatgctgatgattacattatggatgaagatcaatcgaagttagccggacttctggacctaaacaatgccatccttcagctcgtaaaaaaatacaagagcatgaagttggagaaagaggaatttgtcacactgaaggccatagccttggccaattcgtag

SEQ ID NO: 222299 - DNA, 153 bp, synthetic construct
  misc_feature 1..153: note = Description of Artificial Sequence: Synthetic coding sequence
  source 1..153: mol_type = other DNA
atgtccaataaggatagacacattgactcatcatgctcaagcttcatcaagaccgagccttctagccccgcttccttaacagacagtgtgaatcatcactcccctggaggctctagtgatgccagtgggtcttacagcagtacaatgaattag

SEQ ID NO: 222300 - DNA, 1308 bp, synthetic construct
  misc_feature 1..1308: note = Description of Artificial Sequence: Synthetic coding sequence
  source 1..1308: mol_type = other DNA
atgtcaaataaggataggcacatagacagcagttgctcctcgttcataaaaactgaaccatcaagtcccgcaagcttaaccgacagcgttaaccatcattcccctgggggatccagcgacgccagcggatcttattccagcacaatgaatgggcatcagaacggactggactcccctcccctgtacccttctgccccaatcctcggcggtagcggcccagtgcgcaaattatacgacgattgcagttctacgattgttgaggatccacaaactaagtgtgaatatatgctcaattcgatgcctaagcggttgtgccttgtgtgcggcgacatagcctccgggtatcactacggcgtcgcttcttgtgaggcctgtaaagcattttttaagaggacgatccagggcaacatcgagtactcgtgtccagccactaacgagtgcgagataactaaacggaggcgcaaatcgtgccaggcctgcagatttatgaaatgtttgaaggtggggatgctgaaggagggggtgcgcctggaccgggttcggggaggaaggcagaagtataagcgtagaattgatgcagagaattcaccttatctgaacccccaacttgtacaaccagcaaaaaagccatataataagatcgtcagtcacttactagtggcagaacccgagaagatctatgctatgccagacccgactgttccagactcggacattaaggccttaaccacactttgtgacctcgcggaccgagaacttgtcgtgataatcgggtgggccaaacacatacctggattctctaccttgtctttagccgatcagatgtcactccttcagtcagcctggatggagattcttattctaggggtggtttacagatcacttagtttcgaagatgaattagtgtacgcagatgactatatcatggacgaagaccagtctaagctggcgggactgctcgatcttaacaacgcaattctgcagttagttaaaaaatacaaaagcatgaaactagaaaaggaagaatttgtcactctaaaagccatagcgctggcgaacagtgattctatgcacatagaagacgtggaggccgtccaaaaactccaggatgttttgcatgaggcccttcaggattatgaggccggacaacatatggaagatcccaggcgcgcaggcaaaatgctgatgacactccccttgctgagacagacttcaacaaaggccgtccagcacttttataatatcaagttggaaggaaaagtacctatgcacaagcttttcctggaaatgcttgaagcaaaagtctag

SEQ ID NO: 222301 - DNA, 1308 bp, synthetic construct
  misc_feature 1..1308: note = Description of Artificial Sequence: Synthetic coding sequence
  source 1..1308: mol_type = other DNA
atgagcaataaggatagacacatcgactcttcttgtagctcttttatcaaaacagaaccctcatctccagccagcctgaccgattctgtcaatcaccatagccccggaggaagctctgacgcatctggctcttattcaagcaccatgaacggacatcagaatggactagattccccacctctgtatcctagcgcacctatcttgggaggctccgggccagtgcgcaaactctatgatgattgttcttctacaattgtcgaagaccctcagactaaatgcgagtacatgctcaattctatgcctaagagactgtgtttggtatgtggggatatagcatcaggctaccactacggtgttgcctcttgcgaggcgtgcaaagcctttttcaaacggacgatccaggggaatatcgagtattcctgcccagctaccaatgaatgtgaaattactaaaagacgtagaaaaagctgtcaggcatgccggttcatgaaatgtctgaaagtcggcatgttaaaagaaggggtgagactcgacagggtccgtgggggacggcagaaatataagcggagaattgatgccgagaatagcccgtacctgaatcctcagttggtccagcctgcaaagaagccttataataagatcgttagtcatctgctggtggccgaacccgagaaaatctacgccatgcccgaccccacagtgcccgattccgacatcaaagctctgaccaccctctgtgatttggccgatcgagagctcgtggttataattggttgggccaagcacattcccggtttctcgacactgtcccttgccgatcaaatgagtctgctccaaagcgcctggatggagattctaatcctgggagtggtctaccgatcgctgagtttcgaagacgaactcgtgtatgccgacgattacatcatggacgaagaccagagcaagcttgccggtctcctcgatttaaacaatgccatcctgcaactcgttaagaaatacaagtcaatgaaactggagaaggaggagttcgtgaccctgaaggcgatagctctggcgaactccgacagcatgcacattgaagacgttgaggccgtgcaaaagctccaggacgtgttgcacgaggccctgcaggactacgaggctggtcagcatatggaggatccccgacgagctggaaaaatgttgatgaccctccccctcctcaggcagacctctaccaaagccgtgcaacacttctacaacataaagttggaaggaaaggtcccaatgcacaagctgtttctggaaatgctcgaagccaaggtctag

SEQ ID NO: 222302 - DNA, 1308 bp, synthetic construct
  misc_feature 1..1308: note = Description of Artificial Sequence: Synthetic coding sequence
  source 1..1308: mol_type = other DNA
atgtccaacaaggataggcatatagatagctcatgtagctcctttataaaaacagagcccagttcaccagcttctctgaccgattccgtgaaccaccacagccccggaggatctagcgatgctagcgggtcctactcatccactatgaacggccatcagaacggcctggattccccgccactgtatccttccgctccaatactaggcggaagcggaccagttaggaagctgtatgacgactgttcatctaccatcgtcgaggaccctcaaacgaaatgcgagtatatgctaaacagtatgccgaaacgactctgtctggtctgtggcgatatcgcaagcggataccactacggggttgcctcctgtgaggcctgcaaggcttttttcaagagaaccatacagggaaatatagaatattcttgccccgcaaccaatgagtgtgagattacaaagcgccgaaggaaaagttgtcaggcttgcagatttatgaaatgtctgaaagtgggtatgctcaaggagggggttaggctagacagagtcagaggtggaagacagaagtataagcgccgaatagatgcggagaactctccgtacctcaatccccagttggtgcagccagcgaaaaagccgtacaataagattgtaagtcacctgttagtcgccgagcccgaaaagatctacgccatgcccgatcccactgtcccagattcagatattaaggctttgacaactctgtgcgatctagccgatcgggaactcgtggtcattattgggtgggccaagcatatacccggattttcaactctctcgcttgcagatcagatgagtctcctgcagtcggcttggatggaaatcttgattttgggcgtggtgtatagatctctttctttcgaagacgaactcgtatatgcagacgactacatcatggacgaagatcagtcaaaactggctggccttttggacctgaacaatgctatactgcagctggttaaaaaatataaatccatgaagctggaaaaagaggagtttgtaactcttaaggccattgcgctcgccaacagtgacagcatgcacatcgaggacgtggaggcggtgcagaaacttcaggatgtactccatgaagccctgcaggattacgaggcgggtcaacacatggaggatccacgcagagcaggcaagatgttaatgacgctgcctctcctcaggcagacatccaccaaagcagtgcaacacttctacaatataaagctcgaagggaaagtacccatgcataagctgtttttagaaatgttggaggcgaaggtctag

SEQ ID NO: 222303 - DNA, 1413 bp, synthetic construct
  misc_feature 1..1413: note = Description of Artificial Sequence: Synthetic coding sequence
  source 1..1413: mol_type = other DNA
atgtggcgcgagtgcgattgggggcttggcgcagtgaaatccgatctcgcttgcgtcccatccgctaaaaggttgctgtgtcggatgtccaacaaagaccggcacatcgattcttcatgttccagctttattaagacagagccaagcagtccagcttccctgacagacagtgtgaatcatcatagccccggaggctcctctgacgcctcggggagctatagttcaactatgaatggacaccagaacggactcgatagcccacccttatacccatccgctcctattctgggaggcagcggacctgtgcggaagttgtacgatgattgcagttcgacgatcgtggaggatccacagactaagtgcgagtatatgctcaattctatgcccaagaggctgtgtcttgtttgtggtgatatcgcctcgggctatcactatggggtggctagctgtgaggcctgcaaggccttcttcaagagaaccatccaaggtaacatcgaatatagctgtcctgccaccaacgagtgtgagatcacgaagagaagaaggaaatcatgtcaagcatgccggttcatgaaatgtctgaaggtgggaatgctaaaggagggcgtgaggctggaccgggtgcgtggcggtagacagaaatataaaagacggatcgatgctgagaatagtccttacctcaacccccaacttgttcagcccgctaagaagccgctgctttggtcagatcctgccgacaataagattgtttcccatttactagtggctgaacctgagaaaatttacgccatgccagacccaacggttcccgactcagacatcaaggcactgactaccctgtgcgatttagctgaccgagaactggttgtgataatcggctgggccaagcacattcctggcttctctactctctcgctagcagatcagatgtccttacttcaatcagcctggatggaaatcctaattctgggggttgtgtataggtctctctccttcgaggacgagctcgtttacgccgacgattacattatggacgaggatcagagcaaacttgccggacttcttgatctgaacaacgccattctgcagctggttaaaaaatacaagtccatgaagctcgaaaaagaggaattcgtaaccctgaaggccattgcattggctaactcggactccatgcatatcgaggacgtggaggcggtgcaaaagttgcaggacgtcctccacgaggctttgcaggattacgaagcagggcagcacatggaggatccgagacgggcaggaaagatgctcatgacactccccctgttaaggcagacatcaacgaaggccgtccagcacttctataacattaaactggaggggaaggtgcccatgcacaagttgttcttggaaatgctggaggcgaaggtgtag

SEQ ID NO: 222304 - DNA, 1359 bp, synthetic construct
  misc_feature 1..1359: note = Description of Artificial Sequence: Synthetic coding sequence
  source 1..1359: mol_type = other DNA
atgttatgcggtcgtccgcgttcatcctccgataaccggaattttctgcgcgagagggccggactgtccagtgctgccgtgcagactcggatcggtaactccgcggctagtcgcagaagtccggcagcaagaccgccagttcctgcacctcctgccctgcccaggggtcgcccaggaaccgagggatccaccagtctatctgcaccggcagtacttgtagtagcggtggcagttgtggtggttgttgtctctgcagtggcgtgggccatggctaattatattcatgtgccacctggcagtcctgaagtgcctaagctgaatgtgaccgtgcaggatcaggaagaacatcgatgtcgggagggcgcactctcactcctgcagcatctccggcctcactgggaccctcaggaggtgaccctgcagctattcaccgacgggatcacaaataagctgatcggatgctatgttggaaacacaatggaggatgtggtcctagtccggatatatggaaataagactgagttgctggtggaccgtgatgaggaggtgaagagcttcagagtcctccaggcgcatggctgtgcccctcaactctattgtacattcaataacggcctttgctatgagttcatccagggcgaagctctggatccaaaacacgtgtgcaacccggctatttttaggctgatcgcaaggcaactagctaagattcacgctatccacgcacacaacgggtggattcctaagagcaatctctggctcaaaatggggaaatacttttccctgatacccaccggctttgccgacgaagacataaacaagaggttcctgagcgacatcccatcatcacaaattttgcaggaggaaatgacttggatgaaagaaatattaagtaatttagggagcccggtcgtgttgtgccacaatgacttgctctgcaaaaacattatttataatgagaaacagggggatgtgcagtttatagactatgagtactcgggatacaactatctggcgtatgatatcggcaaccactttaacgagtttgcgggtgttagcgacgtcgactacagcctgtatccggacagagagttgcaatcccaatggctgagagcttatcttgaagcatataaagaatttaaggggttcggcaccgaggtgacggagaaagaggtggagatcctgtttatccaggttaatcagttcgccctggcttctcatttcttttggggcttatgggccctgatccaggccaagtacagtactatagagtttgattttctaggatatgcgattgttcgattcaatcagtacttcaagatgaaacctgaggtgaccgccttgaaggtcccagaatag

SEQ ID NO: 222305 - DNA, 777 bp, synthetic construct
  misc_feature 1..777: note = Description of Artificial Sequence: Synthetic coding sequence
  source 1..777: mol_type = other DNA
atgctctgtgggaggcctaggagttcgtccgacaacagaaattttctgagagagagggctggcctgagctctgccgctgttcagactcgaatcggaaacagcgccgcaagcaggaggtcacctgcagccagaccaccagtccctgccccacccgctctccctagaggacgacctggaactgaaggatcaacttctctgagcgctccagcagtgctggtggtcgctgtcgccgtggtagtagttgtggtcagcgctgtagcatgggcaatggctaactatattcacgtaccacctggatctccagaagtgccaaagctcaatgtgaccgtacaagaccaagaggagcaccggtgcagggaaggcgctcttagcctcctccaacacctgaggccccattgggacccacaggaggtcacactccagctgttcactgatggaattacaaataaactcatcggctgttacgtcgggaacaccatggaggacgtggtcctcgtgcgcatctacggaaataagactgagctgttggttgacagggatgaggaggtcaagagcttcagggtgctacaggcgcacggctgtgctcctcagctttactgcacttttaacaacggcctatgctacgaatttatacagggagaagccctggaccccaaacacgtatgcaacccagccatcttcagtttgtcttcactcactctgtgcaaaggaaagactacaaggtgttttggtctgacaggctgtagaggatctcggttacttctgtcctttttttag

SEQ ID NO: 222306 - DNA, 1305 bp, synthetic construct
  misc_feature 1..1305: note = Description of Artificial Sequence: Synthetic coding sequence
  source 1..1305: mol_type = other DNA
atgctctgcggcagacccaggtcatctagcgataatagaaatttcctccgtgagcgtgctggcttgtcttccgccgcagtgcagactcgtattggaaattctgcagcatcccgcagatccccggcagctcgcccacctgtgccggctccccctgccctaccaagaggacgtcctggcaccgagggcagcacatcactgtcagccccagccgtattggttgtggcagtcgcggtcgtggttgtggtggtgtcagcagttgcatgggctatggcaaactatattcacgtgccccctggctcacccgaggtgccaaaactgaatgtgaccgtgcaggaccaagaggaacatcgatgccgtgaaggagctttgtctttgctgcaacatctcagacctcactgggaccctcaggaagtgacactgcagctgttcacagatggtatcactaataagctcatcggctgctacgtgggcaatactatggaggatgtggtgctagtccgaatttacggaaataagactgagctgctggtggatagagatgaagaagtaaagtcgtttagggtgctccaggcccatggctgcgcccctcagctctattgtaccttcaacaacggcctctgctatgaatttatacagggggaggcccttgaccccaagcatgtatgcaatcccgctatattcagactaatagcaagacagcttgcaaagatccatgccatccatgcccacaatggttggatcccaaaatcaaatctatggttaaagatgggcaagtacttctccctgatccctacaggtttcgcggatgaggatataaataagcggtttctctccgatatcccaagttcacaaatcctgcaggaggagatgacatggatgaaggagattctcagcaacttaggctccccagttgtgctgtgtcataacgatttgctctgcaagaatattatctataacgagaaacagggtgacgtccagtttattgattatgagtacagcgggtacaactatctcgcttatgacataggtaatcactttaatgaatttgcgggagtctccgatgtggactacagtctgtaccccgacagggagctccagagccagtggctgagggcctatctggaggcatataaagagttcaagggtttcggaacggaggtaacagaaaaggaggtagagattctttttattcaggtgaatcagttcgctctgggtgaaaatctgaactttatcatcgggaacaagtattgtcagctattctccctaaaatggctgctgatatccttcggcgattgcggcctgtag

SEQ ID NO: 222307 - DNA, 627 bp, synthetic construct
  misc_feature 1..627: note = Description of Artificial Sequence: Synthetic coding sequence
  source 1..627: mol_type = other DNA
atggcgaaaatccatactatccacgccaatgggtcactcccaaagcccatcctgtggcataagatgcacaactattttacgctggtaaaaaatgaaatcaacccctctttaagtgccgacgttccaaaggttgaagtgctggagcgtgagctcgcatggcttaaggagcatttgtctcaactcgagtcccccgttgtcttctgccacaacgatctcctatgtaaaaacattatttatgactccattaaaggccacgtccgcttcatagactacgagtacgctggatacaactaccaggcttttgatatcggtaaccattttaatgagtttgcaggcgtcaacgaagtggactattgcctctatcccgctagggagacacagctgcagtggttacactattacctccaagctcagaagggcatggcagtgacaccgagggaggtgcagcggttgtatgtgcaggttaataagttcgctttggcctcccacttcttctgggcactatgggcattgattcaaaatcaatactccaccattgacttcgattttttgcgctacgccgtgattcgcttcaaccaatatttcaaggtgaaacctcaagccagcgctcttgaaatgcccaagtag

SEQ ID NO: 222308 - DNA, 954 bp, synthetic construct
  misc_feature 1..954: note = Description of Artificial Sequence: Synthetic coding sequence
  source 1..954: mol_type = other DNA
atggaggagaaagccgcagcttctgccagctgtagggaaccccctggtcccccacgggctgccgcagtggcctatttcgggatctcagtcgatcccgacgatatcttacctggtgccctgcgactgattcaagaactgcggccacattggaagcctgagcaagtccgcactaagcgctttacggatggtattacaaacaagttagtcgcctgttacgttgaagaggacatgcaagactgcgtgctggtgagagtgtacggagagaggactgagttgctggtagacagagaaaacgaggtacggaattttcaactactccgagcccatagctgcgcacccaaactctactgcacctttcaaaacggcctctgttacgaatacatgcaaggcgtagctctcgaacctgagcatataagagaaccacggcttttctcgctgtccgccgacgtgccaaaggtggaagtactggaacgcgagctggcttggttgaaggagcacctgtcccaactcgagtcaccggtggtgttctgtcacaatgaccttttatgtaagaacatcatctatgacagtattaaaggacatgtgcgttttattgactacgagtatgctggttacaattatcaggcatttgacataggaaatcactttaacgaatttgccggtgtgaacgaggtggattattgcttatatccagccagagagacacagttgcagtggctgcactactacctacaggcccagaaaggcatggcggtgaccccacgcgaggtccaaagactctacgtccaggttaacaaatttgccctggcatcccattttttttgggctctttgggcacttattcagaatcagtattccactatcgattttgactttctccgatacgctgtcatcaggttcaatcagtacttcaaagtcaagccccaggcaagtgccctggaaatgcctaaatag

SEQ ID NO: 222309 - DNA, 1185 bp, synthetic construct
  misc_feature 1..1185: note = Description of Artificial Sequence: Synthetic coding sequence
  source 1..1185: mol_type = other DNA
atggctgtgcccccatcggctccacagcctcgtgcatcttttcatctgcgcagacatacgccatgcccccagtgctcctggggtatggaagagaaggccgctgcaagcgcaagttgtcgggaaccccctggccctcccagggccgctgccgtcgcttacttcggtatctctgtcgatcctgacgacatactaccgggtgccctgcggctgattcaggagttgaggccccattggaaaccagagcaggtcagaacaaagcgatttacagatggcattaccaataaacttgttgcctgctatgtggaagaggacatgcaggactgtgtgttagtccgggtatacggagagagaacggagcttcttgtggaccgtgagaacgaggtccggaattttcagctgctgcgtgcacatagctgcgcacccaagctgtattgcaccttccagaacggattgtgttacgaatacatgcagggtgtggctttggagccagagcacatcagagagcctagattgtttcggttaattgcacttgagatggccaagatccataccatccatgcgaatggctcccttcctaagccaattctgtggcacaaaatgcataactatttcaccctcgtgaaaaacgagatcaatccttccctgtccgctgatgtccctaaagtggaggttttagagagagaactcgcttggctgaaagagcacctctcacagctggaatcacccgttgtgttctgccataacgacctgctgtgtaaaaacattatatacgactcaattaaaggccacgttcgcttcattgattatgaatacgccggatacaattaccaggccttcgacattggcaaccacttcaacgagtttgctggcgtcaatgaggtcgactattgcctctatcctgccagggagactcagctgcagtggttgcattactatctgcaggcccaaaaggggatggctgtgactccaagggaggtccaacggctgtacgtccaagtgaataaatttgccctaggccctagctgtgtcagttcaaccatgacagcttctcttcagtgctgtcgggtggggaacaggcacggcgagatcgcccgactaactctctctggactgtttcccggagtttcattgctgctggggagcttgggacctcatcctgaaccagtcctgcatcacaggctttag

SEQ ID NO: 222310 - DNA, 1161 bp, synthetic construct
  misc_feature 1..1161: note = Description of Artificial Sequence: Synthetic coding sequence
  source 1..1161: mol_type = other DNA
atggccgttcccccttctgccccacagccacgtgccagcttccacctgcgacggcacactccctgtccacaatgctcctggggaatggaggagaaggccgctgcttctgctagctgccgggaacctcctggcccaccacgcgcagctgccgtcgcttactttggcatttcagtggatcctgacgacatacttccaggcgctctccgcttgattcaggagctgagacctcactggaagcccgagcaggtcaggacgaagcgcttcactgacggaataaccaacaagcttgttgcctgctatgttgaggaggacatgcaagattgtgtcttggtgcgtgtgtacggagagcggaccgagcttctggtcgatcgggagaacgaggttaggaacttccaattactcagagcacacagctgtgcccctaaactttactgcaccttccaaaacggtctctgttatgaatacatgcagggcgtagccttagagccagagcacatcagagagcccaggcttttccgccttatcgccttggagatggcaaagattcacacaatacacgcaaatggaagtctgcccaaaccaattctgtggcacaagatgcacaattactttactctcgtcaagaatgagattaatccatcactgagtgctgatgtgccaaaggttgaggtcctcgaaagagagctcgcctggctgaaagaacatctcagccagcttgagagcccagtagtgttttgtcacaatgatttactgtgtaagaacattatatacgacagcattaagggtcacgtccggtttatcgattatgagtacgcaggttacaattaccaggctttcgatatcggaaaccacttcaacgagtttgcaggggttaatgaggtcgattactgtctttatcccgctagggagactcaactgcagtggctgcactattacttgcaggcgcaaaaaggcatggcagtgaccccacgggaagtccagcgtctttacgtgcaagttaacaagttcgctctggcctctcactttttctgggcactgtgggctctgatacaaaaccagtatagtaccatagatttcgactttctgcgctacgccgtgatacgatttaaccagtatttcaaggtgaagccccaagctagcgctctcgagatgccgaagtag

SEQ ID NO: 222311 - DNA, 759 bp, synthetic construct
  misc_feature 1..759: note = Description of Artificial Sequence: Synthetic coding sequence
  source 1..759: mol_type = other DNA
cggagactgggcggagggaccgctgagggtaaaaccggtagggggctcggtggaccgagctgggacacaggacccagagcaatgggaagtctgtctcgacccagtttcagtgatcggctcatcgccctggagatggctaaaatccacaccatccatgccaatggctccctgcccaagcctattctgtggcacaagatgcataactacttcaccctcgtcaaaaatgagatcaaccccagcttgagtgccgatgtgcctaaagtcgaggtgctggaaagagagctcgcttggctcaaagaacatctttcccagctggaatcaccggtagtattttgtcacaacgatctgctgtgcaagaacataatctatgactccatcaaaggacatgtaaggtttatcgattacgagtatgccggttataactaccaggcgttcgacatcggtaaccacttcaacgagtttgcgggagtaaacgaggtggactactgtctgtaccccgcacgggagacacaactgcagtggttgcattactatttgcaggcccagaaaggcatggctgttacgccacgagaagtgcagcgcttgtacgtccaagtgaacaagtttgctctggcatcacatttcttttgggctctgtgggctctgattcagaaccagtatagcacaatcgatttcgatttcttaagatatgctgtgattcggtttaaccagtactttaaggtgaagcctcaagccagtgccttggagatgccgaagtag

SEQ ID NO: 222312 - DNA, 765 bp, synthetic construct
  misc_feature 1..765: note = Description of Artificial Sequence: Synthetic coding sequence
  source 1..765: mol_type = other DNA
atggctgaagccgtgctaagggtcgcccgacgacagttaagccagagagggggatctggcgctcctattctactccggcagatgttcgagcctgtaagctgcacctttacctacttattgggagacagagagtctagagaggcagttctgattgacccggttctcgagacagcccctcgagacgcccagctgattaaggaattgggcctgcggttgctttatgctgttaacacacattgtcacgccgaccacattaccgggtccggattgttgagaagtctcctccccggttgccagtcagtcatctcccgactttccggagctcaagctgaccttcatatagaggacggtgactctatacggtttggacggtttgcactcgagacaagggcttccccgggtcatacgccaggctgtgtgacattcgtcctcaatgaccattcgatggcatttaccggcgacgctctcctgatcagaggttgcgggcgtactgattttcagcaggggtgcgccaagacgctttaccattctgtgcacgagaaaatcttcactctgcccggagactgcctgatctatcctgcccacgattaccatgggttcactgtcagtactgtagaagaagagcgaactctaaatccgagactgacactctcctgtgaggagtttgttaagatcatggggaaccttaatctgccgaagccacagcagatagacttcgcagtaccagccaacatgcgatgtggtgtgcagacgcccacagcatag

SEQ ID NO: 222313 - DNA, 1020 bp, synthetic construct
  misc_feature 1..1020: note = Description of Artificial Sequence: Synthetic coding sequence
  source 1..1020: mol_type = other DNA
atggccgacagtgtgaaaaccttcctgcaggatttagccagaggcatcaaagacagtatatggggtatctgcacaatttcaaaactggatgcgcgaatccagcaaaagcgggaagaacagagacggaggcgcgcttctagcgtgctggctcagaggagagcccagagcattgaacggaagcaggagagtgagccacgaatcgtctcacgcatcttccaatgctgcgcttggaatgggggagtgttctggtttagtcttctcctgttctatcgcgtcttcatccccgtactgcaaagtgttacagctcgcatcattggagacccctccctgcatggggatgtatggtcttggttagagttcttcctcactagcatattctcagctttgtgggtgctgcccctgttcgtgctctcaaaagttgtgaatgcaatctggttccaggatatcgcagacctggcctttgaggtgtctgggcgaaagccccatcccttcccctctgtgagtaaaatcatagccgacatgctttttaacctgctgttgcaagccctcttcttaatccaagggatgtttgtgagtctgttccctattcacctagtcggtcagcttgtctcgctactgcacatgtcactactgtactcattgtattgctttgagtatcggtggtttaataaaggcatcgaaatgcaccagcgcctctcaaacatcgagaggaattggccgtattactttggctttgggctacctctcgcattcttgacagccatgcagagcagctacatcatatccggttgtctgttttcaattctgttccctttgttcatcatctccgctaatgaagctaagcccggaaaggcttacctatttcagctgcggcttttcagcctagtcgtctttctgtctaataggctgtttcataaaaccgtgtatcttcagtcagcgttatcatcttctacctccgccgaaaaattcccatcaccacacccaagtccagctaaattgaaagccaccgcaggccattag

SEQ ID NO: 222314 - DNA, 786 bp, synthetic construct
  misc_feature 1..786: note = Description of Artificial Sequence: Synthetic coding sequence
  source 1..786: mol_type = other DNA
atggcagatagtgtaaagaccttcctccaggacctggccagggggataaaggactccatatggggcatctgcaccatctcaaagctcgacgccaggatccagcagaaacgtgaggaacaacgtagaagaagagcttcaagtgtgctggcgcagcgccgagcgcagtcgatcgagaggaagcaagaaagcgagcccaggatcgtgtccaggatttttcagtgctgtgcctggaacgggggtgtcttttggtttagcttactcttattttacagggtatttatccccgttttgcagagcgtcaccgcacggatcataggggacccaagtttgcacggagatgtttggagttggctcgagtttttcctcaccagtatcttcagcgcactgtgggtgctgcctctcttcgttttgagtaaggtggtcaatgctatctggtttcaagacattgcagacctcgccttcgaggtgagcggtcgcaagccacacccattcccaagcgtctcaaagatcattgcagacatgttgtttaatttgttactgcaagcactatttctaattcaaggcatgttcgtttccctattcccaattcacctggttggtcagctggtgtccttactccatatgtcgctgctctacagcttatattgttttgagtatagatggtttaacaaggttgccgcattctctttgtcttcattcctgtattcgcttagtgccccaatgaagcagagacccgcaaagcatatcagcagcagctgtgcttcgagcccctggtggagttcctag

SEQ ID NO: 222315 - DNA, 903 bp, synthetic construct
  misc_feature 1..903: note = Description of Artificial Sequence: Synthetic coding sequence
  source 1..903: mol_type = other DNA
atgattcttgaaggtgggggtgtcatgaatttaaaccccggaaataacttgctccaccagcccccagcctggactgattcctacagcacttgcaacgtttcaagcggttttttcggcggtcagtggcacgagatccatccacagtattggaccaagtatcaggtgtgggagtggctgcagcacctgctggacactaaccagctcgatgctaactgcatcccttttcaagagtttgatattaatggggaacatctgtgctctatgtcactgcaggaattcacaagagccgcagggactgccggtcaactgctgtacagcaatctgcaacatctgaagtggaacggacagtgtagtagtgacctctttcagagcacacacaatgtaattgttaagacggagcagacagagccgtcaataatgaacacatggaaagacgagaactatctttacgacactaactatggctctactgtagacctgcttgactctaagacattctgccgcgctcagattagcatgaccactacatcacacctccctgtggctgagtcgcctgacatgaagaaggagcaggaccctccagccaagtgtcacaccaagaagcacaatcctagaggcactcatttatgggagttcatccgcgacatcctcttaaaccccgacaagaatccaggcctgatcaaatgggaggaccggagcgaaggagtgttccgatttctgaaatctgaagcggttgctcagctttgggggaagaagaagaataactcctccatgacctacgagaaactctcccgggctatgcgctactattataagagggaaatattagagcgggttgacggacggaggctggtatataagttcggtaaaaacgcacgcggttggcgggaaaacgagaattag

SEQ ID NO: 222316 - DNA, 903 bp, synthetic construct
  misc_feature 1..903: note = Description of Artificial Sequence: Synthetic coding sequence
  source 1..903: mol_type = other DNA
atgatactggaaggcggtggggtcatgaacctgaaccccggaaataacctgctgcatcagcctccagcttggacagatagttattcgacatgcaacgtgtctagtgggttttttggcggtcagtggcacgaaattcatccccaatattggaccaaataccaggtgtgggaatggctacagcatctgctggataccaaccaactggatgccaactgcatcccctttcaagaattcgacattaacggagagcacctgtgcagtatgtccctccaggagtttactagggccgcagggacagctggccagctgctctacagtaaccttcagcacctgaaatggaatggacagtgctccagcgacttattccagtccacccacaatgtgatcgtgaaaaccgaacagactgaacctagtattatgaacacctggaaggacgagaattacctttacgataccaactacggctcgacggtcgatctactggatagcaaaacattctgtcgggctcagatatctatgaccactactagccacttgccagtcgctgaaagccccgacatgaagaaggagcaagatcccccagctaagtgccacaccaaaaaacacaatccacgaggtacacacctgtgggagttcattcgggacatactgctaaacccggacaagaacccgggactgatcaagtgggaagataggagtgagggggttttcaggttcttgaagtctgaggcggttgcccagctgtgggggaagaagaaaaataactcctccatgacatacgagaagctatccagagccatgagatattactataaaagggaaattttagaacgtgtcgacggtcgtagactagtctacaaatttggaaagaacgccaggggttggagggagaatgaaaattag

SEQ ID NO: 222317 - DNA, 969 bp, synthetic construct
  misc_feature 1..969: note = Description of Artificial Sequence: Synthetic coding sequence
  source 1..969: mol_type = other DNA
atgggtctgcccgagaggaggggcctggtgctgctcctgtctttggccgagatacttttcaaaattatgatactcgaaggaggtggcgtcatgaatctgaaccctgggaataaccttctgcaccagcccccagcctggactgattcctatagcacgtgcaatgtgtcatccggattctttggcggacagtggcatgagatccatccacagtattggaccaagtaccaggtgtgggaatggctccagcatctcctggacaccaaccagctcgacgccaattgcatcccattccaagaattcgatataaacggagagcacctttgcagtatgtcactgcaggaatttactcgcgctgctggaactgccggacagcttttgtattccaatttgcagcatctgaagtggaacggacaatgtagtagtgatctgtttcagtccacacataatgtaattgtgaagacagaacagacggaaccatcgatcatgaatacttggaaagacgaaaactatttatacgacaccaactacggaagtacggtggatctgcttgactctaagaccttttgccgagctcagatctcaatgactactacatctcaccttcccgtggcggaatccccagacatgaaaaaggaacaggacccacctgccaaatgccatactaaaaaacacaacccgcgagggacccacctgtgggagtttatacgagacattttgctaaacccagataagaatcctggactgatcaagtgggaagatcgatcagaaggtgtgtttcgatttcttaagtcagaagccgtcgcccagctgtggggtaagaaaaagaacaactctagcatgacatatgaaaagctctcacgagccatgcggtattattataaacgggagatccttgaaagagtggatggacggagactggtgtataagtttgggaagaacgccagaggctggcgggagaatgagaactag

SEQ ID NO: 222318 - DNA, 903 bp, synthetic construct
  misc_feature 1..903: note = Description of Artificial Sequence: Synthetic coding sequence
  source 1..903: mol_type = other DNA
atgatcctcgaaggtggcggagttatgaacctcaacccaggtaacaaccttcttcatcagccccctgcttggactgatagttactcaacatgcaacgttagtagcgggttttttggcggacagtggcatgagattcatccacagtattggaccaaataccaggtttgggagtggctccagcacctactggacaccaatcagctggatgcaaattgcattccatttcaggagtttgacattaacggggaacatctctgcagcatgtccctgcaagaattcacccgcgctgcgggaacggcaggccagctcttgtactcgaacttgcaacacctgaaatggaacggccagtgttcctctgatctattccagagcactcacaacgttattgtcaagacagaacagactgaaccttctatcatgaatacttggaaggatgagaattacttgtatgatacgaactacggaagtacagtggacctgttggattcaaaaactttctgtagagctcagatcagcatgactactacatcccatttgcccgttgcggagtcccctgacatgaagaaggaacaggacccgccagcaaaatgccacacaaagaaacacaaccctaggggaacgcatctgtgggagtttataagagacatcctgctgaatcctgacaagaatccaggtttaattaagtgggaggatcgatccgagggggtgttccggtttctgaaatctgaggcagtggctcagttatggggaaagaagaaaaataacagctctatgacttacgaaaaacttagtcgggcaatgcgctattactataagagggaaattctggagcgcgtggatggaaggcgactggtctacaagtttggcaagaacgcacgtggctggcgcgagaatgaaaactag

SEQ ID NO: 222319 - DNA, 834 bp, synthetic construct
  misc_feature 1..834: note = Description of Artificial Sequence: Synthetic coding sequence
  source 1..834: mol_type = other DNA
atgattctcgaaggaggcggagttatgaatctgaatcctggaaataatcttctgcaccagccacctgcctggacggactcttactcaacctgtaacgtgtcctcaggtttctttggagggcagtggcatgagattcacccacagtactggactaaatatcaagtgtgggagtggcttcaacacttgctcgacactaaccagctcgacgccaactgcatccctttccaggagtttgacattaacggcgaacacctgtgttctatgtcattgcaggagttcactagagccgcaggaacagctggacagctgctttattccaatttacagcacttgaagtggaacgggcagtgttcgagtgacttgttccagtccacacataacgtgattgtgaagaccgaacagactgaaccatccatcatgaacacctggaaggacgagaactacctttatgacacaaattacgggtctactgtggccgaaagcccggacatgaagaaggagcaggacccgcctgccaaatgtcacactaaaaaacacaacccacgcggtacccacctgtgggagttcatccgggatattctgctcaacccagataagaatcctggactcataaagtgggaagaccgatccgagggggtgtttcgcttcctcaagagcgaagcagtggctcagttgtgggggaagaagaaaaataactcgagtatgacatatgaaaagctgagccgggctatgaggtattactataagagggagattttggagcgtgtcgacggccgacggttagtgtataaattcggtaagaatgctaggggctggagggagaatgaaaactag

SEQ ID NO: 222320 - DNA, 555 bp, synthetic construct
  misc_feature 1..555: note = Description of Artificial Sequence: Synthetic coding sequence
  source 1..555: mol_type = other DNA
atggacctctggaactgggatgaggcatcgccccaggaggtgccaccaggcaacaagcttgctggacttgaaggagctaaacttggcttttgttttccagacctggccctgcagggcgacactccaactgccaccgcagagacctgttggaaggggacttcctccagcctcgccagttttcctcaacttgattggggtagcgccctgttgcacccagaggttccgtggggtgcagaacctgattctcaagctctcccttggagcggcgactggaccgatatggcgtgtactgcgtgggatagttggagtggggcaagtcaaaccctggggcctgccccacttgggccaggtccgattccggcagccggtagcgaaggagcggcaggtcagaactgcagccctcccgcacccggtctgtaccacctgctggaacccggagcagcatgcggctggcatcatttattcgaagccgtgcctgaacttagtagtcatcgactgctgaggactgagccagccgttggcccttgtcagtttggcagtatgccgcaaaattag

SEQ ID NO: 222321 - DNA, 468 bp, synthetic construct
  misc_feature 1..468: note = Description of Artificial Sequence: Synthetic coding sequence
  source 1..468: mol_type = other DNA
atggacttatggaactgggacgaagcatccccgcaggaggttcctccgggaaataaattagcaggactcgaaggtgccaagctgggtttttgtttccccgacctcgcattgcagggagacaccccaacagcaaccgctgaaacctgttggaaaggccctatccagttgtggcagttcctgctggaactgctgcatgacggcgcacggtctagttgcattcgctggacaggtaactctcgggaatttcagctgtgcgaccctaaggaggtggccagactctggggggagcggaagcgcaagcctgggatgaattatgagaagcttagcagaggtttgagatattactaccggagggacattgtccgtaagagcggcggtagaaaatatacatacagatttggcggtcgagtcccaagtttagcttacccagactgcgcagggggaggtcggggagcagaaactcagtag

SEQ ID NO: 222322 - DNA, 1029 bp, synthetic construct
  misc_feature 1..1029: note = Description of Artificial Sequence: Synthetic coding sequence
  source 1..1029: mol_type = other DNA
atggatctttggaactgggatgaagcaagcccccaagaggttccacctggcaataagctggccggactggagggggctaaactgggcttctgctttcccgacttagccctgcagggcgatacccctacagctacagcggagacctgctggaaaggcaccagcagctcactggccagctttccacagcttgactggggatcggctctccttcaccctgaggtcccatggggggcagaaccggactctcaggccctgccatggtccggggattggaccgatatggcttgcaccgcctgggactcatggtctggtgcctcacagactctaggtcctgcccctcttgggccagggccaattcccgctgccggtagcgagggagccgctgggcaaaattgcgtgcctgttgctggagaagctactagttggtctagggcccaagccgctggcagtaatacctcctgggattgtagcgtgggaccagatggtgatacatattggggaagcggactgggaggtgagccccgtacagactgcactatctcgtggggtggcccagccggacccgactgcaccacttcttggaatcccggtctacatgcaggcggaactacatccctcaagagataccagtcatcagcgttgactgtgtgcagtgagccatcgccacaatctgatcgggcttcattggcccgatgccctaaaacaaatcatcgaggccctatccagttatggcagtttttactcgaattactgcacgatggggcaagaagttcttgcatccgctggacggggaattccagggagttccagctgtgcgaccctaaggaagtggccaggttatggggcgaaaggaagcgtaaacccggaatgaactatgaaaagttatctcggggtttgaggtattactaccgacgcgatatagtgcggaaatcaggcggtcgaaagtacacatatcgatttggcggtcgggtgccatctctcgcttatccggattgtgcaggaggaggtcgcggagcagaaacccagtag

SEQ ID NO: 222323 - DNA, 1029 bp, synthetic construct
  misc_feature 1..1029: note = Description of Artificial Sequence: Synthetic coding sequence
  source 1..1029: mol_type = other DNA
atggacctctggaactgggatgaagctagtcctcaggaggtgccgcctggcaataagcttgcaggccttgagggcgctaagctggggttctgtttcccagatctggccctgcagggcgacacccccaccgccaccgccgaaacttgctggaagggcacctcaagctctttggcttccttcccacagttggattggggatctgccttgctacacccggaagtgccctggggagcggagccagattctcaggctttaccatggagcggcgattggacagacatggcatgcacggcctgggactcctggtcaggtgctagccagaccctggggccagctcctctcggacccggacctatcccggctgctggctctgaaggcgctgccggtcaaaattgtgttccagtggctggggaggccacatcttggtcaagggcacaagccgcaggttctaacacctcttgggactgttccgtcggaccagacggcgatacttattggggctctggactggggggagagcctcgtacggattgtacgatctcctggggcggaccagcgggtcctgactgcacgacttcctggaatccagggctgcacgctggcggaaccacctccttgaaaaggtaccaaagtagcgctttaaccgtgtgtagcgaacccagtccacagtcagatcgggcatcccttgccagatgccccaaaaccaatcacaggggcccaatacagctctggcaattcctgctcgagttactacacgatggcgctagaagcagttgtattcgctggacaggtaatagccgtgagttccagctgtgtgatccaaaagaggtcgccagactgtggggtgagagaaagagaaaacctggtatgaactatgagaagctgtctcgaggactgcggtattattacaggagggacattgtgcgcaagagcggaggaagaaagtatacatacaggttcggcggaagagtgccatccctcgcttatcctgattgcgccggaggcggacggggtgctgaaacacagtag

SEQ ID NO: 222324 - DNA, 432 bp, synthetic construct
  misc_feature 1..432: note = Description of Artificial Sequence: Synthetic coding sequence
  source 1..432: mol_type = other DNA
atgaaagcaggttgctctattgtggagaagcccgaggggggaggtgggtaccagttccctgattgggcatataagaccgaatcgagtcccggtagcaggcagattcaattatggcattttatcctggagcttctacagaaagaggagtttaggcatgttatcgcctggcagcagggggaatatggcgagttcgtgatcaaggacccagatgaggtcgcaaggctgtgggggcgacggaagtgcaagcctcagatgaactacgacaagttaagcagagccttaaggtactattataataagcgtatcctccacaagactaagggtaaacgtttcacctataagtttaactttaataagctggtgatgccgaactatccctttataaatatccgcagtagtggcaaaatccagaccctgctagtcggaaactag

SEQ ID NO: 222325 - DNA, 1539 bp, synthetic construct
  misc_feature 1..1539: note = Description of Artificial Sequence: Synthetic coding sequence
  source 1..1539: mol_type = other DNA
atgaaagcgggatgctccatcgtggagaagcccgagggcggaggcggataccaatttccggactgggcttacaaaacggaaagctcacccggtagtcggcagatccaactgtggcacttcatccttgagctcctgcaaaaggaggaatttagacacgtcatagcttggcagcagggggaatatggcgaattcgtcatcaaggatccagatgaggtcgcgagactatggggtcgaaggaagtgtaaaccccagatgaactatgacaaattaagccgagccctgcggtattattataacaaacgcatcttacacaaaaccaaaggcaaaaggttcacatataaatttaactttaacaagctcgttatgcccaactatccctttatcaatatccggtcctcaggggtcgtaccccagtcagcccctcctgtgccaacagcttcttccaggttccacttcccccctttggacacacactctcccacaaatgatgtccagcccggtagatttagcgcttcatcgctcacggcctctggtcaggagtcctctaatggaacagaccgcaaaactgagctctctgaattggaggacgggtcggccgctgattggaggaggggagttgaccccgtttcctcacgcaacgcaattggcggtggtggcatcggacaccagaagcggaagcctgacatcatgctgccgttattcgcacggccaggcatgtaccccgacccccattctccattcgccgtctctccaatacctggtcgcggtggcgtcttgaacgtgccaatttctccagcactgagcctgactccgactattttctcatattctccatcgccgggactgtctcccttcacttcatcatcttgcttcagcttcaatcctgaggagatgaagcactacttgcattctcaggcatgttctgtctttaactaccaccttagcccaaggacattccccaggtatccgggtttaatggtgcctcctctgcagtgtcaaatgcatccagaagagagcacgcagttctccataaagttgcagccccctccagttgggcgaaagaatagagagcgagtggagtcttccgaggagtccgcaccggtgaccaccccgaccatggcatctatccctccaaggataaaggtggagccagcctcggagaaggatccagagtctctgagacagagcgcgagggagaaagaggaacacacacaagaggagggaactgtgccatcccgtaccatcgaggaagaaaaggggactattttcgcaagacctgctgctccgcctatttggccgagcgtgccaatctcaactccatccggtgaacccttggaagtgactgaggactcagaggaccgtcctggaaaggaaccatccgcccctgagaaaaaggaggatgccttgatgccacctaagctgcgcttgaagcgaagatggaacgatgaccctgaggccagagagctgagcaagtcaggaaagtttctttggaacgggagcggccctcaaggactagccaccgccgctgccgacgcgtag

SEQ ID NO: 222326 - DNA, 1533 bp, synthetic construct
  misc_feature 1..1533: note = Description of Artificial Sequence: Synthetic coding sequence
  source 1..1533: mol_type = other DNA
atggatggattttacgaccaacaggtgccattcatggtcccaggaaaaagtcgctcagaagagtgcagagggcgtcctgtgatcgacaggaagcgtaagttcctcgacacagacctggctcacgacagtgaggagctctttcaggacctgagccagctgcaggaggcctggcttgcagaagcccaggtccccgacgatgagcaattcgttccggattttcagagtgacaacttagtgctccatgccccaccccctacaaagatcaaacgcgaacttcatagcccctcctccgagctgagtagctgctcccatgagcaggctctgggagccaattacggagaaaagtgcctctataactactgcgcttacgaccgtaagcccccatcaggatttaagcccctcacacccccaactacgcccttgtctccaacacatcagaacccattatttcctccgccacaagccacacttccaacctccggccacgcacccgctgctggccctgtgcaaggcgtcggaccagcccctgctcctcattcgttaccagagccgggtcctcagcaacagacgttcgccgtccctagaccaccacaccagccattgcagatgccgaaaatgatgcctgaaaaccagtatccttccgagcaacgcttccagaggcagcttagtgaaccatgccatccattcccaccgcagccgggtgttccaggtgataacaggccctcctaccatcgccaaatgtcagaacctatcgtgccagccgcaccacctccgcctcagggatttaagcaggaataccatgatcctttgtacgaacatggcgtgcccggaatgccagggcctcccgctcatggtttccagagccctatgggaattaagcaagaacctagagattactgcgtggactcagaagtgccaaactgtcagtcatcctacatgagggggggttacttttcgtccagccacgagggctttagttacgagaaggatccccgtctctacttcgatgatacgtgcgtcgttcctgaacgactggagggaaaagtgaagcaggaaccaactatgtatcgcgaaggtccaccctaccagcgcagggggtcccttcagctgtggcagttcttagtgactctgttggatgaccccgctaatgcgcattttatcgcctggactggacgtggtatggagtttaagttgatcgagccagaggaggtagccagacggtgggggatccagaaaaatagacccgctatgaattacgataagctgagtcgcagtctccggtactattatgaaaagggtatcatgcagaaggttgcaggggaaaggtacgtttacaaattcgtgtgcgaccccgatgcgctctttagcatggccttccccgacaaccagaggcccttcctgaaagctgaatctgaatgccacctgtcagaagaggatacgctgccccttacacattttgaggattcccccgcttacctgctcgatatggatcgctgctcctccctcccttatgccgaagggttcgcttactag

SEQ ID NO: 222327 - DNA, 399 bp, synthetic construct
  misc_feature 1..399: note = Description of Artificial Sequence: Synthetic coding sequence
  source 1..399: mol_type = other DNA
atggacgggttctatgaccaacaggtgccatttatggtacctggcaagagccggagcgaagagtgtcgcggtaggcccgtgatcgataggaagcggaaatttctagacaccgacttagctcatgattctgaagaattgttccaggatctgtcacaattacaagaagcctggctcgcggaagcccaggtgccagatgatgaacagttcgtccccgatttccagtctgacaacctggtattacatgctccacccccaacaaaaatcaagcgcgagttgcacagtccatccagcgagctgtcctcttgctcacacgagcaggccttgggcgctaactacggcgaaaagtgcctgtacaactattgtgcctatgatcgcaagccaccaagtgggtttaagtag

SEQ ID NO: 222328 - DNA, 423 bp, synthetic construct
  misc_feature 1..423: note = Description of Artificial Sequence: Synthetic coding sequence
  source 1..423: mol_type = other DNA
atggacggattttatgatcaacaggtgcctttcatggtacccggaaaatcacggtccgaagaatgcagagggagaccagtaatcgatcgtaaacgcaaatttttagacacggacctggcccacgactcggaagaactgttccaggaccttagtcagttgcaggaagcatggctggccgaagctcaggtgccagatgacgagcaatttgtccccgattttcaaagcgataatctggtgctccatgcccctccacccacaaagataaagagggaactgcacagtcccagcagtgaactgtcctcatgtagccacgagcaggctctaggcgctaattatggggagaagtgtctgtataactactgcgcctacgatcgcaagccccctagcggctttaaacctcttaccccacccactactccctag

SEQ ID NO: 222329 - DNA, 1533 bp, synthetic construct
  misc_feature 1..1533: note = Description of Artificial Sequence: Synthetic coding sequence
  source 1..1533: mol_type = other DNA
atggatggattctacgaccagcaggttccatttatggttcccggaaaatcaagatccgaggagtgccgagggagacctgttatcgatagaaagagaaagttcctagacacagatctagcgcacgattccgaagagctttttcaggatctaagtcaactgcaagaggcctggcttgccgaagctcaggtgcccgacgacgaacaatttgtacctgactttcaatctgataaccttgtgcttcacgcccctccacctactaaaatcaaacgcgaactgcacagcccgagctcagagctcagttcctgtagccacgagcaggctctgggcgctaattacggagaaaagtgtctgtacaactattgtgcttatgaccgcaagcccccttcagggtttaagccgctcacccctccaacgactcctctctctcctacccatcagaaccccctgtttccacccccacaagctacccttccaacatccggacatgccccagccgcagggcctgtccagggggttggaccagcgccagcccctcactctcttcctgagcccggaccacagcagcagaccttcgcggtgccgcgacccccacatcagccacttcaaatgccaaagatgatgcctgagaatcagtatccatcggagcagagattccagagacagctcagcgaaccgtgccacccattccccccacagccaggggtccccggtgacaaccgtccatcatatcacaggcagatgagtgaacctatcgtgcctgcagctccgccacctcctcagggtttcaagcaagaatatcacgacccgctgtacgagcacggcgtcccgggaatgccaggcccacccgcacacgggttccaatcgcctatgggcattaagcaggagcctcgtgactattgtgtggattccgaggtaccgaactgtcagtcatcatatatgcggggaggctattttagttccagccacgagggtttctcgtatgaaaaagatcctcgtctctatttcgatgacacatgtgtggtgccagagcgactggaaggtaaggtgaagcaagaacctacaatgtaccgcgaaggacccccataccagcgtaggggcagtctccagctgtggcagttcctcgtcactcttctggacgacccggctaacgcacacttcattgcttggacgggccgaggtatggaattcaagctcattgaacctgaagaggttgcaaggaggtgggggatccagaaaaatcgcccagcaatgaattacgataagttaagcaggagcctgagatattattatgaaaagggtattatgcagaaggtagcaggggagcgatacgtgtataaatttgtttgcgaccctgacgcactgttctctatggcttttccggacaaccagcgccctttcctgaaagccgaatcagagtgccacctcagcgaagaggacactctgcctctcacacatttcgaagattccccagcctaccttcttgatatggaccggtgctccagcttgccttacgcagaaggattcgcctactag

SEQ ID NO: 222330 - DNA, 453 bp, synthetic construct
  misc_feature 1..453: note = Description of Artificial Sequence: Synthetic coding sequence
  source 1..453: mol_type = other DNA
atggacggcttctacgatcagcaggtcccttttatggtgcctggtaagagtcgttcagaagagtgccgcggaaggcccgtgattgacaggaaacggaagttcttggacacagatcttgcccacgacagcgaggaattgtttcaggacctctcccagctccaggaagcctggctcgctgaagcccaggttcccgacgatgaacagttcgtcccagattttcaatcagataatctggtgcttcacgctcctccgcctaccaagattaaaagagaattacactcaccttccagcgaacttagctcctgttcacatgagcaggccctcggcgcaaactacggagaaaagtgtctctataactattgtgcctatgataggaaaccgcctagcgggttcaagcctctaacccctcctacaacccccctttcacccacccaccagaacccattgttttag

SEQ ID NO: 222331 - DNA, 1659 bp, synthetic construct
  misc_feature 1..1659: note = Description of Artificial Sequence: Synthetic coding sequence
  source 1..1659: mol_type = other DNA
atgtcggagaggcggtgccctccagagcaccgggagggagttaatgataccggcggaagtctttttccccaaaaattgctaaacgcagaaactagtcagtccggcattagagacgccgaatctacaatggacggcttctatgatcagcaggtacctttcatggtccctgggaagtccaggagtgaggagtgtaggggcaggccagtaattgatcgaaagcgcaagttcctggatacagaccttgcccatgatagcgaagagctttttcaggatctgtcccaactgcaggaggcctggttagctgaagctcaagtgcccgatgacgaacagttcgtgcctgatttccagagtgataatttagttctgcacgcaccgcctccgactaagattaaacgcgagctgcattcccctagttctgaactctcgtcatgttctcatgaacaggcactaggggcaaactacggcgaaaagtgcttatacaactactgcgcctatgatcgtaaaccaccatccggcttcaaacctctgacccctccaaccactcctctgtctcctacacaccagaatcctctgttccccccaccccaagctaccctgcctacttccggccatgctcctgccgctgggcctgtgcagggggtgggcccagcacctgcacctcattcccttccagagccaggccctcagcagcagacattcgccgtgcctcgcccaccgcaccagcccctacaaatgcccaagatgatgcctgaaaatcagtacccgtctgagcagagattccaacggcaactctctgagccatgtcacccattcccacctcagcctggcgtgcctggtgataatcgtccctcttaccacaggcagatgtctgaacctattgtccctgcagccccacctccccctcaggggttcaaacaagagtaccatgacccattgtacgaacacggcgtccctggaatgcccggtcccccagctcacgggttccagagccctatgggaatcaaacaagaacctagagactattgcgtggacagcgaggtccccaactgtcagagctcttacatgaggggcggatacttttcctcctcacacgaaggcttttcctacgagaaggacccacggctttatttcgacgacacatgcgtggtcccagagagacttgaagggaaggtcaagcaggaaccaactatgtacagagagggaccaccataccaacgtcgagggtccttgcaactgtggcaatttttagtcacacttctggacgacccggcaaacgctcatttcatcgcctggacagggagggggatggagtttaaactcatcgagcctgaggaagtggccagaaggtggggtatccagaagaaccggcctgcaatgaactatgacaagctgtctcggtccctcaggtactactatgagaaaggcataatgcagaaagttgcaggtgaacgatacgtttacaaattcgtatgtgaccctgacgccctcttttctatggctttcccggataaccagagaccgtttctaaaagctgagtccgagtgtcatttgtccgaggaggataccctgcccctaacccactttgaagacagcccggcttacctgcttgacatggacagatgctcctccctaccgtacgctgagggtttcgcctactag

SEQ ID NO: 222332 - DNA, 1359 bp, synthetic construct
  misc_feature 1..1359: note = Description of Artificial Sequence: Synthetic coding sequence
  source 1..1359: mol_type = other DNA
atgtccgaaacccccgctcaatgtagcatcaagcaggaacgaatctcctatacccctcctgagtctcccgtgccctcgtacgcatcatccacaccactacacgtgcccgtgccacgagctctgcggatggaggaagacagtataaggctgccagctcatctgagactgcaacccatctattggagccgggatgacgtagcacagtggctaaagtgggccgagaacgagttctctttacggcctattgactccaacacattcgagatgaacggcaaagcactgttattgctcaccaaagaggatttcagatatcggagtccccactccggtgacgtgctctatgaacttttgcagcacattctgaagcaacggaagcctaggattctgtttagcccatttttccaccctgggaactcgatccacactcagccggaggtgattcttcaccagaaccatgaggaggacaattgcgtccagcgaacacctcgcccatctgtcgacaacgtccatcacaaccccccaacaatcgaattgctgcatcgtagtaggtctcccataacgacaaaccaccggccatcccccgacccggagcagcgcccactgagatcccctctggacaatatgatacgacgtctgtcacctgccgaacgagcacaaggaccgaggccccaccaggagaataaccaccaggaatcgtatcccttatccgtgagccccatggagaataatcactgtcctgcaagctccgaatctcaccccaaaccttcttctccccgtcaggagtctacgagagtgattcagctgatgccgagccccatcatgcacccactcattctgaaccctcgccatagtgttgacttcaagcagagccggctgtcggaggatggcctccatagggaaggtaagcctatcaacttgtctcatcgcgaggatctcgcttatatgaaccatatcatggtaagtgtgtctccgcctgaggagcacgctatgcccatcggcaggatcgcagactgccgactgctgtgggactatgtgtatcaactcctgtccgattcccggtatgaaaacttcatccggtgggaggataaggagtccaaaatctttcgcattgtggaccctaacggtctggccagactgtggggcaatcacaagaatagaaccaatatgacctacgagaagatgagccgggcattacgtcactactacaagctaaacattatcaggaaagaacctggccagcggttattgttccggtttatgaagacgccagacgaaatcatgagcggtcggaccgacaggctggagcaccttgagtctcaagagctcgacgagcagatttatcaggaagatgaatgctag

SEQ ID NO: 222333 - DNA, 954 bp, synthetic construct
  misc_feature 1..954: note = Description of Artificial Sequence: Synthetic coding sequence
  source 1..954: mol_type = other DNA
atgcaggagggggaacttgccatttcccccatttcacccgttgccgcaatgccgcctctaggaacacacgttcaggcccgatgcgaagcacagattaatctgcttggagaggggggtatttgtaagctgccagggcgactgaggattcagcctgccctctggtccagagaggatgtcctgcactggctgcgctgggccgagcaagagtactcactgccatgtactgccgaacatgggtttgaaatgaatggacgggcactttgtatcctcacaaaagatgattttcgtcatcgtgctccatcctccggagacgtcctgtacgaactgctgcagtacatcaaaactcagagaagagccctggtgtgcgggcctttttttggtgggatctttagacttaagaccccgacacaacactctcccgtgcctccagaggaagtgacgggcccaagccaaatggatacaagacggggacacctgctgcagcccccagatcccggactgacctccaattttggacacctcgacgatccaggccttgcccgttggacccccggtaaagaagagtccctgaacctgtgtcactgcgcagagcttggctgtcgcacacagggagtttgctctttccctgcgatgccacaagcacccatcgacggccgtatcgctgactgtaggttgttgtgggattacgtatatcagctactgctcgacaccaggtacgagccatatattaaatgggaagataaagatgccaaaatttttagggtggtcgatccgaacggactcgcaaggttgtgggggaaccataagaatcgggtgaatatgacctatgagaaaatgtcccgcgctctgcggcattattataagttgaatatcattaaaaaggagcccggacaaaagctgctgttccgaaatggtcttcagctaatttttattttcatttggagctttcaatag

SEQ ID NO: 222334 - DNA, 1026 bp, synthetic construct
  misc_feature 1..1026: note = Description of Artificial Sequence: Synthetic coding sequence
  source 1..1026: mol_type = other DNA
atgcaggaaggagagctagccatttcccccatttcccccgtggcagctatgccccctctgggaacccacgttcaggcgcgatgtgaagcgcagattaatctactgggcgaagggggtatctgcaagctccccggtaggctgaggatacaaccagcactgtggtccagggaggatgttctgcattggctccggtgggcagagcaagaatactccctgccctgcactgctgaacatggattcgagatgaacggcagggcgctgtgcatattgactaaggacgattttagacacagagccccttcctccggggatgtcctctacgagcttcttcaatatataaagacacaaagacgtgcgctggtgtgtggcccattttttgggggaatcttccggttaaagaccccgacccagcactccccggtgcccccagaggaagtcaccggcccaagccagatggatacaagacgcggacacctgctgcagccccctgacccaggtctgacgtcaaacttcggacaccttgacgaccccggtctggcccgatggactccaggtaaggaggagtcacttaatctgtgccattgcgcagaactgggttgcagaacacagggagtctgttctttccctgctatgccacaggctcccatagatggccgaatagctgattgccgattactgtgggactacgtgtaccaactattacttgacacaaggtatgagccttacattaagtgggaagataaggatgcaaaaatctttcgcgtcgtcgatccaaacggactcgcacgactttggggtaaccataaaaacagggtgaacatgacatatgagaaaatgtcgagggcactgagacactactacaaactgaacataatcaagaaagagcctgggcagaagctccttttccggttcctaaagaccccaggcaagatggtacaggataagcattcccatctcgagccacttgaaagtcaggagcaggatcggattgaatttaaggacaagcgtcctgagatttctccctag

SEQ ID NO: 222335 - DNA, 795 bp, synthetic construct
  misc_feature 1..795: note = Description of Artificial Sequence: Synthetic coding sequence
  source 1..795: mol_type = other DNA
atgcaggaaggggagttggccatatctcctatttcaccagtcgcagcaatgccgcctctgggaacacacgtacaggctcgctgtgaagcccagatcaatttgctcggtgagggcggaatttgcaaactgccgggtcgcctcaggatccagccagccctgtggagccgcgaggatgttctgcactggctgcggtgggcggaacaggaatattcattgccctgtactgccgagcatggattcgagatgaacgggagagctttgtgcatcctgactaaagacgacttcaggcaccgggctcctagctccggcgacgttctgtacgaacttcttcaatatatcaagacacaaaggagagccctcgtctgtggcccatttttcggtggtatttttaggctgaaaacccctacacagcattcccctgtacccccagaggattgtaggctgttatgggactacgtctatcaactgcttttggataccagatacgagccctacatcaagtgggaagacaaggatgccaaaatttttagagtcgttgacccaaacggcttggcacgtctgtggggcaaccacaaaaatcgagtgaatatgacatacgagaagatgtccagagcacttcgccactattataagttgaatataatcaaaaaggagcctggacagaaactgcttttccgctttttgaagacacctggaaaaatggtccaggataagcattcccatctagagcccttggagagccaggagcaggaccgtatcgagttcaaggataaacgtccagagatctccccatag

SEQ ID NO: 222336 - DNA, 861 bp, synthetic construct
  misc_feature 1..861: note = Description of Artificial Sequence: Synthetic coding sequence
  source 1..861: mol_type = other DNA
atgcaggaaggcgaactcgctatttcccccatttcacccgtagctgcgatgccacccctgggcacgcacgttcaggcacgctgcgaggcgcagatcaatttattaggggagggaggaatttgcaagcttccaggaaggctgagggatgtcctctatgaactcctgcagtatattaagacacagagacgggcactcgtgtgtggcccattctttgggggtatctttcggcttaagacaccgacccagcatagcccagtgccccctgaggaagtgaccggtccaagccagatggatactcgccgagggcatctcctgcagccaccggacccgggattgacatcaaacttcggccacctcgacgatcccggactcgccagatggacccccggaaaggaagaaagtttgaacctgtgtcattgtgccgaacttgggtgtcgaacccagggagtttgctctttccctgctatgcctcaggccccaatagacggacgcattgctgactgccgtctcttatgggattacgtgtaccagcttctccttgacacacgctatgaaccatacataaaatgggaagacaaggacgccaagattttcagagtggtggacccaaacggcctggcgcgactctggggcaaccacaaaaatagggtgaatatgacttatgaaaaaatgagtcgagccttgcgccactactataagcttaatataatcaaaaaagaacccggacagaaattgctgtttcgtttcttaaagactcccggtaagatggttcaggataaacactctcacctcgaacctcttgagtctcaggaacaggatcgtatcgagttcaaagataagagacctgagataagcccatag

SEQ ID NO: 222337 - DNA, 573 bp, synthetic construct
  misc_feature 1..573: note = Description of Artificial Sequence: Synthetic coding sequence
  source 1..573: mol_type = other DNA
atggacacccgtagggggcatttgttgcagccaccagacccgggactgacttcaaatttcggccatctggacgaccccggactcgctagatggacaccaggcaaagaggaatcattaaatctttgtcattgtgctgagctgggctgcagaacccagggggtatgcagctttcctgctatgccccaagcccctatcgatggcaggattgctgattgtcgactcctgtgggactatgtgtaccagctcctactggacacaaggtacgagccatacatcaaatgggaggacaaagacgcaaagatctttagagtcgtcgatcctaatggacttgctcgcctgtggggtaatcacaaaaatagagttaacatgacgtacgaaaagatgtcacgcgcattgaggcattattataagctgaacataatcaaaaaggaacctggtcagaagttgctgttccgctttttaaagacaccagggaagatggtccaggacaagcacagccatctcgaaccactagagtctcaggaacaggatcgcattgagttcaaggacaagaggcctgaaatctccccatag

SEQ ID NO: 222338 - DNA, 1242 bp, synthetic construct
  misc_feature 1..1242: note = Description of Artificial Sequence: Synthetic coding sequence
  source 1..1242: mol_type = other DNA
atggccagctgtgcagaaccatccgaaccgtctgctccccttccggcaggcgtacccccactcgaggatttcgaggtcttggacggcgtggaagacgcggagggagaggaggaagaagaggaggaggaggaggaagaagatgatctcagcgagctaccaccgttagaggacatgggacagcctcctgcagaagaggcggagcagcccggagctctcgcgcgtgagttcttagcggctatggaaccagaacccgcacctgcccctgcaccagaggagtggctcgacatcttaggaaatggcctgctgcgcaagaagactcttgtccccggtcccccaggatctagccgcccagtcaaaggacaggtcgtgactgtccatctgcaaaccagcctggagaacggcacccgtgtacaagaagagcctgagctggtgtttacactgggtgactgtgacgtgatacaggcactcgacttaagcgtgcccctgatggacgtaggggagactgcaatggtgaccgcggacagcaagtattgttatggtccacaaggttcacgctcgccatacattcctccccacgcagcactctgcctggaggtgactctgaaaacggcagtcgacggacctgacctcgagatgctgactgggcaagagagagttgctcttgccaatcggaagagggaatgcggcaatgcccactatcaaagggcagacttcgtcctcgccgcaaactcgtacgatctggcgatcaaagccatcacaagttctgccaaagttgatatgaccttcgaagaagaagctcaattgctccagcttaaggtgaaatgtctgaacaatttagcagcttcacagctcaaactagaccactatagggccgctctacgatcttgtagcctggttctggaacaccagcctgacaatatcaaggccctgtttcgaaaagggaaggtcctggctcagcagggtgagtacagcgaagctatccctatcttgcgggctgccttaaagctggagcctagcaacaagacaattcatgcggagctgagtaagctcgtaaagaagcatgccgcacagcgcagtaccgaaactgcactgtatcggaagatgctgggaaatcccagtcgactccctgctaagtgtccaggcaagggcgcatggagtatcccttggaagtggttgtttggggcaaccgcagtggctttgggcggagtggccctctccgtggtcatagctgcaaggaactag

SEQ ID NO: 222339 - DNA, 1422 bp, synthetic construct
  misc_feature 1..1422: note = Description of Artificial Sequence: Synthetic coding sequence
  source 1..1422: mol_type = other DNA
atgaattatgataagctcagtagggccctcaggtattattataacaagaggatacttcacaagactaagggcaagcgattcacctataagtttaatttcaacaagctcgttctggtgaactacccatttattgatgtgggacttgccggtggcgcagtcccccagtccgccccacctgtgcctagcggaggatcacactttcgattcccccctagtaccccctccgaggttttatcccctacagaggatcccagaagccccccagcatgctccagctccagttcttctctcttctcagctgtcgtcgcaaggagactcggcagaggaagcgtgtctgactgttccgatggcacaagcgaactcgaggaacctttgggagaagatcccagggctaggcctccaggcccacccgatctcggggcattccgcggacctccgcttgctcggctcccccacgatccaggcgtgtttagagtgtacccaagaccacggggaggtcctgaaccactctcaccctttccagtctcccctcttgccggacccggaagtttacttccacctcagctgtcacctgccctgccaatgactccaactcacctagcatatactccaagccccaccctgtcacccatgtatccatccggcggaggcggaccttctggaagcggaggtggaagtcacttctccttttctcccgaggatatgaagagatacctacaggcgcacactcagtccgtatacaattaccatctttctccaagagccttcttgcactaccccggattggttgtaccccagccccagcgtccagataaatgccctttaccgcctatggcacccgagacacctcctgtcccctcctcagccagcagctcctccagcagttcctcttccccattcaagttcaagctccagccccctccactaggcaggaggcagagggccgcaggcgaaaaagctgtcgccggagccgacaagtcaggcggatcggcagggggactggctgagggtgcgggagctctggccccacctccgccacctcctcagatcaaggtggaacctatttctgaaggtgaatcagaagaggtggaggtgacggatatcagtgacgaggatgaagaagatggagaagtgtttaagactcccagggcacctcctgctcctccaaagccagagcccggtgaagccccaggcgcttcccagtgtatgcccctcaagctcaggttcaagcggcgatggagcgaggactgtcgtctggagggcggtggtgggccagccggaggctttgaagatgaaggcgaggacaagaaagtccgcggtgaaggcccaggcgaggctggcggacccttgacacctcgtcgggtatcttcagacctccaacatgcaactgcccagctgtccctcgaacatcgggactcgtag

SEQ ID NO: 222340 - DNA, 2478 bp, synthetic construct
  misc_feature 1..2478: note = Description of Artificial Sequence: Synthetic coding sequence
  source 1..2478: mol_type = other DNA
atggccgcagatgaaggatcagcagagaagcaggctggcgaggctcacatggccgctgatggggagactaacggcagctgcgagaatagcgatgcatcaagccatgcaaatgccgctaagcacactcaggacagcgccagggttaatccccaggacggaactaacactctcacgcggattgctgagaacggcgtctctgaacgagactctgaggctgcaaaacagaaccatgtgaccgctgatgatttcgtccaaacatctgtgataggcagtaatggctacatactcaacaaacctgccctgcaagcgcagccgctccgcacaacctctaccctggcaagcagcctgcctggccacgcagccaagactctgccaggtggtgctggcaagggcaggacgccatctgctttcccacagacaccagcggctcccccagctaccttaggagaggggtcagccgatacagaagataggaagcttcccgcaccaggcgcagatgtaaaggtccaccgggcacgcaagaccatgccaaagtcagtggttgggctgcacgcagctagcaaagatccacgagaggtccgggaggccagggaccacaaggagcccaaagaggaaatcaacaagaatattagtgacttcggccgacaacaattgctgcccccatttccgtctttacaccagtccctgcctcagaatcagtgttacatggcgacaaccaaatctcagactgcctgccttcctttcgtactggctgcagctgtatctcggaagaaaaagcggaggatgggaacatactctctagtgcccaaaaaaaagacaaaagtcctgaagcagcgtacggtgattgaaatgttcaagtccattacccattccaccgttggttcaaaaggtgaaaaagacttgggtgcaagtagtctacatgtgaacggcgaatctctcgaaatggattcggacgaagacgactctgaagaactcgaggaggacgatggccacggagctgagcaggctgccgcattcccaacagaggatagcaggacatcgaaggagtcaatgtccgaggccgacagagctcagaagatggatggggaatccgaagaagagcaggagagcgtggacactggagaggaggaggaggggggtgatgagagtgacctgtcgagtgagagcagcatcaagaaaaaatttttgaagcgaaagggaaaaaccgattctccctggattaagcctgccaggaagaggcggcgacgaagccgcaagaaaccttcaggcgctctgggctccgaatcgtacaagtcctcagcagggtccgcggagcagactgctccaggcgattcgacaggctatatggaggtgagcctggattcattggacctgcgggttaagggtatcctgtcctcccaggctgaggggttagctaacggaccagacgtattggagacggatggactgcaggaagtgcctctatgctcctgtagaatggaaaccccaaagtctcgcgaaattactacgttggcgaataatcagtgcatggccaccgagtcggttgatcacgagctgggcaggtgcactaattccgtcgttaaatacgagttgatgagaccctcaaataaagcaccccttctcgtgctgtgcgaagaccaccggggtcgaatggtgaaacaccaatgttgtccaggctgtgggtacttctgtaccgctggcaacttcatggaatgtcaaccggaatcgtcaatttctcatagattccacaaggattgcgcaagccgtgtgaacaatgcctcgtactgtccgcactgcggggaagagtcatcaaaggcgaaagaggtaactatcgctaaggctgataccactagcaccgtaacccccgtccccggtcaagagaagggttctgctctggaaggtagggccgacacaactaccggcagcgctgctgggccaccattaagtgaagatgataagcttcagggagctgcttctcacgtaccagagggctttgatccgactggccctgcaggactggggagacctacaccaggactctctcagggaccgggtaaggagacccttgaaagcgccctgatcgccctggactctgagaaacctaaaaaactgcgcttccaccctaagcagctgtatttctctgcaagacaaggcgaactacaaaaagtgctgctcatgcttgtggacggcatcgatccaaatttcaagatggagcaccagaacaaaaggagtccactccatgccgcagccgaggcaggccacgtggatatctgccatatgttggtccaggccggagcaaacattgacacctgctcggaggaccagcgcacacctttgatggaagcagccgaaaataatcatctcgaggcagtgaaatatttaattaaagccggagctttggtcgatccgaaaattcagaaaacaagtaaggtctatactgaatctcaggagacacagagaagccagacaattctttag

SEQ ID NO: 222341 - DNA, 3462 bp, synthetic construct
  misc_feature 1..3462: note = Description of Artificial Sequence: Synthetic coding sequence
  source 1..3462: mol_type = other DNA
atggctgctgacgaggggagcgcagaaaagcaggcaggcgaagcgcatatggcagcagatggcgagacaaatggcagttgcgaaaactccgatgcctcatcccacgccaacgcggcaaaacacacacaagacagcgctcgcgtgaatcctcaggacggaactaacaccctaacaagaatcgcagaaaacggcgttagtgagagagactctgaggcagcaaaacagaatcacgttaccgcggacgacttcgtgcagacttcggtgataggatccaacgggtacatcctgaacaaacccgctctgcaggctcaacccctgagaaccactagcaccctcgcgtcaagtttacccggacacgccgcaaaaactcttcccggtggtgccggaaagggccgtactccctccgcattcccgcagacccctgccgctccccctgccactctgggcgaaggatctgccgacacagaggatcggaagctgcctgcccctggcgcagatgtgaaggttcatcgagccagaaaaaccatgcctaaatccgtcgtggggctacacgctgcgagcaaggatcctcgagaagtgcgagaggccagagatcacaaggaacctaaggaagagatcaacaagaacatttcagattttggaaggcaacagctgctcccaccatttccatctctccatcagtcactgccccaaaaccagtgctatatggcaactacaaaatcccaaacggcatgcctcccatttgtattagcggctgctgtgagccgcaaaaagaaacggaggatgggcacctattccttggtccctaaaaaaaaaacaaaggtcctgaagcaaaggactgtgatcgagatgttcaaatcgatcacgcacagtaccgtaggctccaaaggcgagaaggacctaggggcatcctctttacatgtcaatggggagagcttggaaatggattctgacgaagacgatagcgaggagctcgaggaagacgatggccacggggctgaacaggcagcggcattccctaccgaagattctcggactagtaaagaaagtatgtccgaggccgatcgagcccagaagatggacggagaaagtgaggaggaacaagaatcggtcgatacgggcgaggaagaggaagggggtgatgagtcagacttgagctcggagtcatcaataaagaagaaatttctcaagcgcaaggggaagaccgactccccctggatcaagcccgctcggaaacggcgaaggaggtccagaaaaaaaccgagtggtgcgttgggaagtgagagttataagagcagcgctggctctgcggagcagacagcccctggggattctacggggtacatggaggttagtcttgacagcttggacctgagggtgaagggcattctctctagtcaagcagagggccttgcgaacggcccagacgttctggaaaccgacggtctccaggaggtgcctctctgtagttgtaggatggagactcccaagtctcgagagattaccacactggctaacaaccagtgtatggccacagaaagcgtagatcacgagctggggagatgcaccaatagcgttgttaaatacgagctgatgcgaccatccaacaaggcacctctgctcgtcttgtgtgaggatcaccgcggtagaatggtgaagcatcagtgctgtcctggctgcgggtacttctgcactgcaggaaactttatggaatgtcagccagaatcatccatcagtcaccgttttcacaaggactgcgcctcccgtgtcaataacgcttcatactgcccacactgtggcgaggagagttcgaaagcaaaagaagttacgatcgccaaggcagatactacctccacagtgactcccgtccccggtcaggaaaaaggtagcgctctggaaggccgtgccgatactaccactggctctgcagcaggcccaccactctctgaggatgataaattacagggggctgctagccatgtcccagagggatttgaccctactggccctgcgggactcggccgaccgaccccagggctgagccagggcccaggaaaggaaacgctcgagtccgctctaatcgctttggattccgagaagcctaagaaacttcgttttcaccctaaacagctgtatttcagtgctaggcaaggcgagctacaaaaagtgcttctgatgctggttgatggcatcgaccctaacttcaagatggagcatcaaaacaagaggtctccattgcacgccgctgccgaagctgggcatgtcgacatttgtcacatgctcgtacaggccggagccaacatcgatacctgttcagaggatcaacgtaccccacttatggaggccgctgaaaacaatcacttggaggccgttaagtatctgatcaaggctggcgctctggtggatcctaaggatgccgaaggctccacatgtctacatctggcagccaagaagggccactacgaagtagtacagtatctgcttagtaacgggcagatggatgtgaattgccaagatgatggcggatggactccgatgatctgggccacggagtacaagcacgtcgaccttgtgaagctcttactgtctaaaggttctgacatcaacattagagataatgaggagaatatatgcctgcactgggcagccttttcgggatgtgtcgacattgcagagatcctgctagccgcaaagtgcgatcttcacgccgtgaatatccatggagattcacccctacacatagccgcacgggagaatagatatgactgcgtggtgctcttcttatcgagggacagtgatgttacactgaaaaacaaggagggggagactcctctgcagtgtgcctcccttaactcccaggtgtggtccgccttgcagatgagcaaagcgcttcaggattcagctccagaccggccttcaccagtggagcgtattgtcagtcgcgacattgctcggggatacgaaaggattcccatcccatgtgtgaatgccgtggacagcgaaccttgtccatcaaactataagtacgtctcccaaaattgcgttacctcccccatgaatattgatcggaacattactcatcttcaatactgcgtctgcattgacgactgcagtagcagcaattgcatgtgtggacagctttcgatgcgctgttggtatgacaaggatggcaggctgttgccagaatttaatatggctgagcccccactcatctttgagtgcaatcacgcatgcagttgctggaggaactgtaggaatcgtgtggtgcagaatggcctgcgcgctagactgcagctgtatcgaacccgtgacatgggatggggtgttagatctctacaagatatccccccaggcacatttgtctgtgagtacgtgggcgaactaatttcagattctgaggcggacgtccgcgaggaggatagttacctttttgatctggacaataaagtgatttccgcttag

SEQ ID NO: 222342 - DNA, 3897 bp, synthetic construct
  misc_feature 1..3897: note = Description of Artificial Sequence: Synthetic coding sequence
  source 1..3897: mol_type = other DNA
atggccgctgcggatgccgaggccgtacccgcaaggggcgagcctcaacaagattgctgtgtgaaaacagaactcctgggtgaagagaccccaatggccgctgatgagggatctgccgaaaagcaggccggagaggctcatatggctgcagatggcgagaccaatggcagttgtgagaatagtgatgcctcttcacacgccaatgcagctaagcatacccaggacagcgcaagggtaaatccccaggacgggaccaacacacttactcgtattgcagagaacggggtgtctgaacgggactccgaagccgctaaacaaaaccacgtaacggccgacgactttgttcaaacgtccgtgataggtagcaatgggtacatcttgaataaaccggcactccaggcccaaccccttcggactacgtctacattggcgagtagcttacccggtcacgccgcaaaaacgcttcccggtggcgcaggaaaaggtagaactccctctgccttcccacagacacccgctgccccaccagccactctgggcgagggttccgcagatacagaagaccgcaaactgccagctcccggtgctgatgtcaaagtgcacagggctcgcaagactatgccgaagagtgttgtgggcttgcatgctgcttctaaagacccacgcgaggtcagagaggctcgtgatcataaagaaccgaaggaggaaatcaataagaacatttcggacttcggcagacagcagttgttacccccttttccctcattgcaccaatcactgccacagaatcaatgctatatggccaccactaagtcccagaccgcttgcctgccatttgttctggctgccgctgtttcacggaaaaaaaagagaaggatgggcacttattctttagttccaaagaagaaaaccaaggtcctgaaacaacgaactgtgatcgagatgtttaagtctataacgcacagcactgtggggtcaaaaggagaaaaagatctcggagccagctcactgcacgtcaacggagaaagccttgagatggatagtgatgaggacgactccgaagaattagaagaggacgatggacatggggctgaacaagccgctgcatttcccacggaagactcccggacctctaaagaatctatgtcggaggcagatagggctcagaagatggatggagaaagcgaggaggagcaggaatcagttgacactggagaagaggaggaagggggagacgaaagcgacctgagctcggaaagttccatcaaaaagaaatttctgaaacgcaaggggaaaactgactctccttggatcaagccagcccgaaagagacgtcgccgatcgcggaagaagccctccggcgctttgggctcggaaagctacaaatcctccgcaggatctgctgaacagacagctccaggagactctacagggtatatggaggtcagtctagacagcctagacttaagagtgaaaggcatcctcagctcccaagctgaaggcctggctaacggtcccgatgtcttggagacagatggactacaggaggtgccgctctgcagctgccggatggagacaccaaagagtagggagatcacaactctggcaaataaccaatgtatggcgaccgagagtgttgatcatgaactgggacgctgcacaaatagtgtggtcaagtatgaactgatgcggccttctaataaagccccactgctggttctgtgcgaagaccacagaggaaggatggtgaagcatcagtgctgccctggatgcggttatttttgcactgctgggaactttatggagtgccaacctgaatcttccatatctcatcgtttccacaaagattgtgcctcccgagtcaataatgcctcctactgcccacattgcggagaggagagctctaaagcaaaggaggtgacaattgccaaggccgatacaacctccaccgtgacccctgtgcctggccaggaaaagggttcagcacttgagggtcgggctgacaccacaaccgggtccgccgcagggccaccactttccgaggatgacaaactccagggtgccgctagccacgtgcctgaaggcttcgaccccacaggcccagccggtttggggcgaccaacgccaggtctgagccaagggcctggaaaagagactctagaaagcgcgctcattgcattggacagcgaaaaaccaaaaaagctgcgatttcatccgaagcagttgtacttcagtgcccgtcaaggagagctacagaaggtgctcctgatgctggtggacggaattgaccccaatttcaaaatggagcatcagaataagcgttcgccactccacgcagccgcagaagccggacacgtcgatatttgtcatatgttagtgcaggctggcgctaacatcgatacgtgctctgaagatcagagaacacccttgatggaggcggctgaaaacaatcacctggaggccgtaaaatacttaataaaggccggagccctggtcgatccaaaggatgccgagggatccacatgcctccacctggccgcaaagaagggacactatgaagtggtccaatacctcctgagcaacggccagatggatgtaaattgtcaagatgacggaggttggacgcctatgatctgggctaccgagtataagcacgtcgatcttgtgaagctattacttagcaaggggagcgacatcaatatcagggacaacgaagagaacatttgtcttcactgggcagcattctccgggtgtgtggacatcgccgagatcctcctcgccgcaaaatgcgatttgcacgcagtgaacatccatggcgactcccccctgcatattgctgcccgtgagaatagatatgactgcgtggttttgttcctgtcgcgcgattccgacgtgacgctcaaaaacaaggagggggagactcctctccaatgtgcatccctcaatagtcaggtgtggagcgctctgcagatgagtaaagcactgcaagactctgcacccgaccggccatctcctgtggagcgcattgtctctagggatattgcccgaggatatgagagaatccccattccgtgcgtgaacgccgtggatagcgaaccatgtccttctaactacaaatacgtatcacagaattgcgtcacctctcccatgaacattgacagaaatatcacacatttgcagtactgtgtatgcatcgatgattgctcatcctctaactgtatgtgcggtcagctgtccatgcgatgctggtatgacaaagatggcagattattaccagagttcaatatggccgagccacctcttatattcgagtgcaaccatgcgtgtagctgttggcgaaattgtcggaaccgtgtggtccaaaacggcttgagagctagacttcagctttataggacacgtgacatgggctggggggttaggtccctccaagacatccctcccggaaccttcgtttgtgaatacgttggagagttaatcagtgattctgaggcggatgtgagagaggaggacagctacctgtttgatttggacaacaaggatggggaagtttactgtatcgatgcaagattttacggcaatgtgagccgcttcataaatcaccattgcgaaccaaaccttgtgccagtaagagtctttatggcccatcaggatctgcgattcccaagaatcgctttcttctccacacgtctcattgaggctggggagcagctcggcttcgactacggtgaaagattttgggacatcaaaggcaagcttttcagttgccgatgtggcagccctaagtgtaggcattctagcgccgctctagctcaacgccaggcttctgcagcacaggaagctcaggaagacggattaccagatacgtcaagcgcggcagctgcagatccactgtag

SEQ ID NO: 222343 - DNA, 2427 bp, synthetic construct
  misc_feature 1..2427: note = Description of Artificial Sequence: Synthetic coding sequence
  source 1..2427: mol_type = other DNA
atggccgcagccgatgccgaggctgtgcctgctagaggtgaaccacaacaggattgttgcgtcaaaacggagcttctcggggaagagactccaatggcggcagatgagggttcagccgaaaaacaagcgggagaggcacacatggcagcagatggcgaaaccaacggatcctgtgaaaattcagacgcatcatcccacgccaacgctgccaagcatactcaggattctgccagggttaaccctcaggacggtacaaacactctcacacgcattgctgagaacggggttagcgaacgtgattctgaggccgcaaaacaaaatcatgttacggctgatgactttgttcagacttccgtgataggaagtaacgggtacattttgaataagccagcactccaggcccagccactcagaacaactagtaccctggcatcctcactgcccggacatgcagccaagaccctgcctggaggggctgggaaagggagaaccccatctgctttcccccagacgcctgccgcaccacccgcaactctgggcgagggctcagccgatacagaggacaggaagttgccagctccaggagcggacgttaaggtccaccgtgccaggaagactatgcccaagagtgtggttggcctccatgccgcaagcaaggatccacgggaagttcgtgaggccagagaccataaggagcccaaggaggagataaataaaaacatctccgactttggacgacaacagctgttgcccccatttccatctcttcaccagtcactgccgcagaaccagtgttatatggccaccaccaagagccagactgcctgtctgccctttgtgctcgccgcagctgtgtctcgtaaaaaaaaacgccgtatgggaacatacagcctcgtccctaaaaagaaaactaaagtcctcaagcagaggactgttatagaaatgttcaagagcattacacattcaactgttggctccaagggtgaaaaagacctcggggcatccagcctccacgtgaacggcgagtcacttgagatggacagcgacgaagacgatagcgaggagctggaagaggacgacgggcacggtgcagagcaggcagcggctttccctaccgaggactcgcgtactagtaaagagtctatgtctgaagccgatcgcgcacaaaaaatggacggagagagcgaggaagagcaggagagcgttgataccggcgaggaagaggagggaggagatgaatcagacttgagctcagaatcttccattaaaaaaaagttcttaaaacgaaaaggcaagacggacagtccttggattaaacccgctaggaagcgccgacgccgttcgcgcaagaagccttcaggcgctctgggatccgagtcctacaagagttcagccggaagcgccgagcagacagcacctggagacagtacaggctatatggaagtgtcccttgacagcctagaccttcgggtgaagggaattctgagcagtcaagccgaagggttagctaacggcccagatgtgctggaaaccgacggccttcaggaagttcccctctgttcttgccgcatggaaacccccaaaagtagggaaatcacaaccttggccaacaaccagtgcatggcgacagaatccgtcgaccacgaacttggcagatgtacgaatagcgtggtgaaatacgagctgatgcgtccctccaataaggctccattgcttgtactgtgcgaggatcatcgcggtcggatggtgaagcatcagtgttgtccaggttgcggttatttctgcaccgcaggcaattttatggagtgtcagcccgaatcaagtatatcacaccgattccataaagattgcgcttcacgcgtgaataatgccagctactgccctcattgcggggaggaaagtagcaaagccaaggaggtgactattgccaaggccgacactacatccacagtaacccctgtccctggtcaggagaaaggttctgctctggagggacgtgccgatacaacaaccggctccgcggcaggcccaccactgtccgaggatgataagctccagggagctgcctcccacgttcccgaaggtttcgatccaactggaccagccggtctgggcagaccaacccctggattgtcccagggcccagggaaggaaaccctggaaagtgcgctaatcgcccttgacagcgagaagcctaagaaattgaggttccatccaaagcagctgtacttctctgctcgccaaggcgagctccagaaagtcctccttatgctggtggacgggattgatcctaatttcaaaatggagcaccaaaataaacggtctccactccacgcggctgctgaggccggtcacgttgatatttgtcatatgttggtgcagttctgccgcttaggaagccccaggtcaagggggtgcttgtggtag

SEQ ID NO: 222344 - DNA, 3702 bp, synthetic construct
  misc_feature 1..3702: note = Description of Artificial Sequence: Synthetic coding sequence
  source 1..3702: mol_type = other DNA
atgcggggtctgcccagaggacgaggtctgatgagagctcggggtcggggaagagcagccccacctggctcacgcggaagaggccgaggaggtccgcaccgcggtcggggaagacccaggtccctattatccctaccacgggctcaggcctcctggactcctcaactctctaccggactgacttccccacctgtcccttgtctaccatcccagggcgaggcccctgccgagatgggggcactgctactcgaaaaggagactcggggagccacagagcgggtgcatggatctctcggggacacacctcgcagtgaggaaacgttacctaaagctacacccgactccttggaacctgccggtccgagctccccagcctcagtcactgtgacagtgggagacgagggtgcagacacaccggtgggagcaactcccctgataggcgatgaaagcgagaacttagagggagatggggacctccgtgggggaaggatcttactgggccacgccacaaaaagcttcccttctagcccatcaaaggggggttcatgcccctctcgagccaagatgagtatgacgggggctgggaaatctccaccaagcgttcagagcctcgctatgcggttgctgagtatgcccggtgcacagggtgcagctgcagcagggtccgagcctcccccagcaacaactagtcccgagggacagcccaaagtgcaccgagctagaaagaccatgagtaaacctggcaacgggcagcctcccgtgcctgagaagaggccaccagaaatacaacacttccgaatgtctgacgacgtgcacagcctggggaaggtcacgtcagatctggccaagagacgcaaattaaatagcggaggtggcctgagtgaagagctgggatcagcgcgacggtctggagaggtgacattaaccaagggtgatcccggaagcttggaggagtgggagactgtagtgggagacgatttctccctgtactacgatagctactctgtcgatgaaagggtagactccgatagcaagtccgaggttgaggccctcaccgaacaattgagcgaagaggaggaggaagaggaagaggaagaggaagaggaagaggaggaagaggaggaagaggaggaggaggaggacgaggaaagcggcaatcagagtgataggtcaggcagttccgggcgtcgcaaagctaagaagaagtggcggaaagattccccatgggtgaagcctagccgaaagagaaggaagagagagcctcccagagcaaaggaacccaggggcgtgagcaacgatacgtccagtctcgagacagaacggggtttcgaagagttgccactgtgcagttgtaggatggaagcacccaagattgatcgaatcagcgaacgggcaggacacaagtgcatggctacagaatccgtagacggggagctgtcggggtgtaatgccgctattctgaaacgggagacaatgcggcctagttctagagtcgcactgatggtcctgtgcgagacacaccgagcgaggatggtgaaacatcactgttgcccaggctgtggttacttttgcacagccggtaccttcctggagtgtcatcccgacttcagagtcgcccatagatttcacaaggcgtgtgtcagccagttaaacggaatggtgttttgcccccactgtggagaagacgcctctgaggcccaagaggtgactattcctcgcggagatggagtgaccccaccagctggcacagcagcccctgcaccacctcccctatcccaagatgtacccggtagggccgacacatcccagccctccgctaggatgcgtgggcatggagagccaaggagacctccatgcgatccccttgccgacactatcgatagctcaggccctagtctcacactccctaacggcggatgtcttagcgccgtgggacttcccttgggacctgggagggaggccctcgagaaagccctcgtcattcaagagagcgaacggaggaaaaagcttcggtttcaccccaggcagctgtatctgtccgtgaaacaaggtgagttgcagaaagtgattctcatgctgctagataatcttgatcctaattttcagtccgatcagcaatccaagcgcacgccactgcatgccgcagcccagaaaggatcagtggaaatatgtcatgttctgctgcaagctggagccaatattaacgccgttgataagcagcaacgtacgcctctgatggaggctgttgtcaacaatcatttggaggttgcccgttacatggtgcagcgaggagggtgtgtttatagcaaggaggaagatggaagcacgtgcctacaccacgctgcgaagatcggtaacctggaaatggttagcctgctcctcagtactggacaggttgacgtgaacgcacaagatagtgggggatggactccaatcatctgggctgctgaacacaaacacattgaggtgatcaggatgctactcacgagaggggctgatgtgaccttaactgacaatgaagaaaacatctgcctgcattgggcttctttcacagggtccgccgctatcgccgaggtgctcctgaatgctagatgtgatctccatgcagtgaactatcacggcgatacccctctgcatatagccgctagggaaagttatcatgattgcgtgttgttgtttcttagtaggggggctaacccagagctcaggaataaggagggcgataccgcttgggatttaaccccggaacgaagtgatgtctggttcgccttacaactgaatcgcaagctccgtctcggagtaggaaatcgcgcaatccggaccgaaaagatcatctgccgggatgttgctcgcggatatgaaaacgtgcctattccatgcgtgaacggcgtcgacggagagccctgtcctgaggattacaagtatattagtgaaaactgcgaaactagcactatgaacattgataggaacattacacacctccagcactgcacctgtgtggacgattgcagctcaagtaactgtctctgcgggcagctgtctatccgatgttggtacgacaaggacggacggctgctgcaggagttcaacaagattgagcctccattgatcttcgaatgcaaccaggcatgttcatgttggcggaattgtaagaaccgagtggttcagagcggcataaaagtgcgcctacagctgtataggactgccaaaatgggttggggcgtgcgggctttacagaccatcccacagggaactttcatctgtgaatatgtgggggaattaattagtgatgccgaagctgatgtacgcgaggacgattcgtatttattcgacctagataacaaagatggggaggtgtactgcatcgacgctcgttattatgggaatataagcagatttattaatcacctgtgcgatccaaacatcattcccgttagggtgtttatgcttcaccaggacttaagatttccccgtatcgccttcttttctagtcgagacataaggacaggcgaagagttgggtttcgactacggggatcgattttgggatatcaaaagtaaatactttacatgtcagtgtggttccgagaaatgtaagcattccgctgaagccatcgccctggagcagagcagacttgccagactcgacccacatccagagctactcccggaattgggttccctgccacccgtaaacacttag

SEQ ID NO: 222345 - DNA, 3531 bp, synthetic construct
  misc_feature 1..3531: note = Description of Artificial Sequence: Synthetic coding sequence
  source 1..3531: mol_type = other DNA
atggccgcagccgctggcgcagcagcagccgcagccgcagagggcgaagctccagctgagatgggtgctcttctgcttgagaaagagacacgcggagctacagaacgcgttcacggttcgcttggagatactcccagatccgaggagaccctaccaaaggctacacccgacagcctggaacccgcaggacctagtagccctgccagcgtgactgtgacagtgggcgacgagggcgcagacactccagtgggcgctacccctctcatcggtgatgagagtgagaacttagagggtgacggcgacctgcggggaggccgtatcctgttaggccacgccaccaaaagttttccctcttcacctagtaaaggagggtcatgtcccagccgggctaaaatgagcatgaccggagccggaaaaagcccgccttcagtgcaatctttggcgatgcggctcctgagtatgcctggcgctcagggagccgctgctgcaggaagcgagccccctccagcgacgacttcaccagagggccagcccaaagtgcaccgcgctcggaagaccatgtcaaagcctgggaacggacagccaccggttcccgaaaaaaggcctcctgaaattcaacactttaggatgtcggacgatgtgcatagcctgggaaaagtgacctcagatctggctaagcgcagaaagctgaatagtgggggaggcttgtcagaggagctgggcagtgcgagaagatcaggcgaagtgactttgaccaaaggagacccaggttctcttgaggagtgggaaactgtagtgggcgacgactttagcctgtactacgactcctatagcgttgatgaaagagtcgattctgatagcaagtccgaagtagaggctctaaccgaacagctgagcgaggaggaggaagaagaggaggaagaagaagaggaagaagaagaggaagaggaggaagaagaagaggaagaagacgaggagtccggcaaccagtcagatcggtccggatccagcggtcgcaggaaggctaaaaagaaatggagaaaggattcaccctgggtgaagccctcgcgcaagaggcgaaagagggaacctccccgagccaaggagcctcgcggtgtttccaacgacacaagttcactcgaaacggagcgaggtttcgaagaactccccctgtgttcttgccgaatggaggctccgaagatcgaccggatttcagagagggctgggcacaaatgcatggccaccgagtccgttgatggcgagttgtctgggtgcaatgcagccatcctgaaacgcgagaccatgcgacccagctctcgggtggccctaatggtgttatgcgagacgcacagagcacgtatggttaagcatcattgctgtcctggctgcgggtacttttgcaccgccggaaccttcctcgaatgccacccagatttccgtgtcgctcacaggtttcataaggcctgcgtaagccagctgaacggcatggtgttctgcccccactgtggcgaagatgcaagcgaggctcaggaagtgaccatcccgcgaggtgacggggttacccctcctgccggtaccgctgccccagcccctccccctctgtctcaagatgtgcctggcagggccgatacctcacaaccttcagctagaatgcgcggacatggtgagcccagaagacctccctgtgatcccttggcggacacaatcgactcttccggaccctcacttactctgcctaacggaggctgcctgtctgccgtcggcttgccacttggcccagggagagaagccctggagaaggcgctcgtgatccaggaatctgagcgcagaaaaaagctgcgcttccatcccagacagctatacttgtcagtgaaacagggcgagcttcaaaaagtgatactaatgctgctggataacctcgatccaaactttcagtccgatcagcaatctaaaagaacccctctgcacgcagctgcccagaaagggtccgttgagatatgccatgtcctactgcaggcaggagcaaacatcaatgctgtggataaacagcagcggaccccactgatggaagctgtggtgaacaatcaccttgaagtagcgagatatatggtccaaaggggtgggtgcgtgtattctaaagaagaagacggctcaacgtgcttacatcatgccgctaaaattggaaacctggaaatggtgtccctcttgctttctacaggacaggtggatgtgaacgctcaggattccggcggatggactcctatcatatgggcggctgaacataaacacatcgaggttattaggatgctgctgacccggggagctgacgtaactttgactgataatgaggagaatatctgtctgcactgggcttctttcaccggaagcgccgctatcgcagaggtgttactcaatgcacggtgtgatcttcatgccgtgaattaccacggagatacgccactccacatcgcagctcgggaatcctatcatgactgcgtgctcttgtttctctcacgaggggctaatcctgagttaaggaataaagaaggcgacaccgcttgggacctgacccctgaaaggtctgatgtttggtttgccctccagttgaacagaaagctgcgtctgggggtggggaacagggccatccgcactgagaaaattatttgtcgcgacgttgctcgtggatatgagaacgttccaatcccatgtgtcaacggcgtggacggagagccgtgcccagaagattataaatatataagtgaaaactgcgaaacttctactatgaacatcgacaggaacataacccatctgcagcattgcacatgcgttgatgactgttcgtccagtaattgtctttgtggacagcttagcatcaggtgttggtacgacaaggacggtaggttgctacaagaatttaacaagatagagccgcctctcatttttgaatgtaatcaggcttgctcctgttggcggaactgcaagaatcgggtggtccagagcgggatcaaggttcgtctgcagctctatcggaccgctaaaatggggtggggcgtacgtgccctgcagacaatcccacagggcacctttatatgtgagtacgtcggcgagctaattagtgacgccgaggcagatgtccgggaagatgattcataccttttcgacctcgacaataaggacggcgaagtctactgcatcgatgctaggtactacggaaacattagcagattcattaaccacctttgtgatccaaacatcatccctgtgagggtctttatgttacaccaagatctccggtttcctcgcattgcctttttttcttccagagacatccgaactggggaagaactcggttttgactatggcgaccgcttttgggatattaaatcaaaatatttcacctgccagtgtggcagcgagaagtgtaagcacagtgcagaagccattgccctggagcaatctcgcctggctaggttggaccctcacccagaactcctgcccgagctgggatctctcccccctgtgaacacctag

SEQ ID NO: 222346 - DNA, 3633 bp, synthetic construct
  misc_feature 1..3633: note = Description of Artificial Sequence: Synthetic coding sequence
  source 1..3633: mol_type = other DNA
atggccgcagccgctggagccgcagcagctgccgctgcagagggcgaggcccctgcagaaatgggagcactcctgttagaaaaggaaacccgcggagccaccgagagggtgcatgggagcttgggggatactcccagatccgaagagactctgcccaaggctaccccggactctttggaaccagcaggccctagcagccctgcttcagtgacagttactgtgggagacgaaggagcggatacgccagtaggcgcaaccccacttattggtgacgagtcagagaatcttgagggggacggcgatctcaggggcggtaggatcctcctgggtcacgcaacaaagtcttttccatcttctcccagcaaaggcggatcttgtccctcccgggctaagatgagcatgacaggagcaggtaagagcccacctagtgttcagtctctcgccatgaggctgctgtccatgccaggggctcagggagctgccgctgccggaagtgagccacctccggcaacaacgagccctgagggacagccaaaggtgcaccgcgcaagaaaaacaatgtctaagcctggaaacggtcagccccctgtaccagagaaaaggccaccggagatccagcactttcggatgtctgacgatgtacactccctggggaaagtgacttcagatctggcaaagcggcgaaaactcaactccggcggtgggctttccgaagaactcggaagcgccagaaggagcggcgaagtgactctcactaaaggcgaccctggctctcttgaggagtgggaaacagtggtaggggacgatttctccctgtactacgactcttactccgttgacgagcgagtggacagcgacagcaaatctgaagtggaggccctaaccgagcaactgtcggaggaggaagaggaggaagaagaagaggaggaagaagaagaggaagaggaggaggaggaggaagaagaagaggacgaggagtcaggaaaccagtccgacaggagcggaagctccggacgccgtaaggctaagaaaaagtggagaaaagatagcccctgggtcaagccttctcggaaacgcagaaaaagagaaccacccagagcaaaggaaccacgcggtgtcaatggtgtggggtcctcaggaccctctgagtatatggaggttcctctgggatcactggaactcccttctgagggaaccttatctccgaaccacgcgggagtgagcaacgacacgagcagtctggagaccgagagaggcttcgaggagcttcccttatgctcctgtaggatggaggccccaaagatcgatagaatctcagaaagagcagggcataaatgcatggccaccgaaagcgtggatggggagctctctggatgtaatgccgcaattttgaaaagggagaccatgaggccttcgagcagggtcgccctcatggtgctgtgcgaaacccatagggccaggatggtgaaacatcactgttgtccaggatgcggatacttctgcaccgccggaacatttctggagtgtcaccctgactttcgggttgcacaccggttccacaaggcgtgcgtctctcagctgaatggcatggtgttctgcccacattgtggagaggacgcctccgaagcccaggaagtgacaattcctcgcggtgacggggttacacccccagctgggaccgccgctccagcccctcccccactatcccaggacgtacccggtcgggcagacaccagccagccgtcagctcgcatgagaggacacggcgagccacgccgtccaccctgcgatccccttgccgacacgattgacagtagcgggccttccctgaccctccccaacggcggttgtttgagcgccgtgggacttcctcttggacctgggcgtgaggcactcgagaaggctttggtgatccaggaaagcgaacgtcggaagaagcttcgctttcaccccagacagctgtatctctccgttaagcagggcgagctccaaaaagtgatcctgatgcttcttgataatctcgatcctaacttccagagtgaccagcaatctaagaggacacccttacatgcagctgcccagaaaggcagcgtcgagatctgccacgttctactgcaggccggtgcgaacattaacgcagttgacaaacaacagcgtacccccctcatggaagctgtagtgaacaaccacctggaggtcgcacggtacatggtacagcggggtgggtgtgtatactccaaagaagaggatggatcaacgtgcctgcaccatgccgctaagattggtaacctggagatggtgtctctgctgctctccacgggccaggtggatgtgaacgcccaggatagcggcggttggactcccatcatatgggccgcagaacataagcatattgaagtgatcaggatgctcctcacccgcggtgctgacgttacacttactgacaacgaggaaaatatctgccttcattgggcgtcttttaccgggagcgctgcgattgcggaggtgctcttgaatgctaggtgtgacctccatgctgttaactaccatggcgatacacctctgcacatagccgcaagggaatcctaccacgattgtgttcttctgttcctgagcaggggggctaatcccgaactgcggaataaagagggggacactgcctgggatctgacccccgaacgaagcgacgtgtggttcgcactgcagctcaacagaaaactcaggcttggcgtgggcaacagagctatccgtactgagaaaatcatttgccgggacgtggcacgcggttacgagaacgtccccatcccgtgcgtcaacggtgtggacggagagccctgcccggaagactacaagtacatttccgaaaattgcgagaccagtacaatgaacatcgatcgaaacattacacacctgcagcactgtacatgtgtcgacgattgctcaagcagcaactgtctgtgcggccagctctctatcaggtgttggtacgacaaagatggtaggttgctgcaggaattcaataaaatcgaaccccctctgatctttgaatgcaatcaggcctgcagttgttggcggaactgcaaaaacagagtggtgcaatcaggaattaaggttaggctacagctctatcggaccgcaaaaatgggctggggcgtccgagccctgcaaaccatcccacagggaacttttatctgtgagtacgtgggcgaactgatctctgacgcagaagcagacgtccgcgaagatgacagctacctgtttgatctggataacaaggatggcgaagtgtattgcatcgatgccaggtattacggtaacattagtcggttcatcaaccatctgtgtgatccgaatattatcccagttcgagtcttcatgctgcaccaggatctacgcttccctcggatagcttttttctcctctcgcgacatcagaaccggagaggaacttggctttgactacggggatagattttgggatattaaatctaagtatttcacatgtcaatgtgggagcgagaagtgtaagcattctgctgaggcaatcgccctggagcaaagtcgactggctagattagatccccatcccgaactcctgcccgagctgggatccttacctcccgtaaatacgtag

SEQ ID NO: 222347 - DNA, 3531 bp, synthetic construct
  misc_feature 1..3531: note = Description of Artificial Sequence: Synthetic coding sequence
  source 1..3531: mol_type = other DNA
atggcggctgccgcaggcgctgccgcagctgccgctgctgagggagaagcgcctgcggagatgggcgctctgctgctggagaaggagactcgcggagccacggagcgtgtacacggaagccttggggataccccacgcagcgaagaaactctgcccaaggcaacccccgacagtttggaacctgcaggaccttcttctccagctagcgtgactgttaccgtgggggacgagggagccgatacccccgtgggagctacacctctgatcggcgacgagagcgaaaatctggagggagacggcgatctgcggggaggccgaatattactcggccacgcgactaaaagtttcccctcaagtccgtccaaaggtgggagttgtccaagtcgcgctaagatgtctatgaccggggctggcaaatcacctccgtctgtccagtccctggcaatgcgcctgctgtcaatgcctggtgcccagggcgcagctgccgctgggtctgagcctcctccggcaactacaagcccagaggggcagccaaaggttcaccgcgcacgtaagacaatgagcaagcccggtaacggccagccaccggtccccgagaagcgacccccagaaatccagcactttcgcatgtccgacgacgttcacagcctcggaaaggtgacatccgacctggccaagcggcgtaaacttaactccggaggcggactaagcgaggagctggggagcgccagaagaagcggggaggttactctgactaagggagatccaggctcattggaagagtgggaaaccgtggtgggcgacgatttttcgctgtactacgattcctattctgttgatgagcgggttgattcagatagtaagtccgaagtagaggcactcacagaacagctctctgaggaggaggaggaggaggaagaggaggaagaggaggaagaagaggaagaagaagaggaggaagaggaagaagatgaggaatcggggaaccagtcagatcggtctggttctagcggccgtcggaaagccaagaagaagtggcgcaaagacagcccttgggtaaagccatctcggaagcggaggaaacgcgaacctccccgtgctaaagaaccgcgtggagtgtcgaacgacacgtcttcattggaaaccgagagagggtttgaagagttgcccctttgttcgtgtaggatggaggccccaaagatcgacaggataagtgagcgggctggacacaaatgtatggccactgagtctgtggatggtgagttgtctggatgcaacgctgcaattctgaaacgggaaaccatgcggccttcgagccgcgttgcgttaatggtcctgtgtgagactcatagagctcgcatggtcaagcaccactgttgtccaggctgcgggtacttttgtactgctgggacctttctcgagtgccaccctgattttagggtggcgcacaggttccacaaagcctgtgtctcccagcttaatggcatggttttctgtcctcactgcggggaggacgccagcgaggcacaggaggtaactattccaaggggagacggggtgacgccgccagctggcaccgccgctccagccccaccccctctctcacaggatgttccaggacgggcagatacatctcaaccctctgcgcgaatgcggggacacggcgagcctagaaggcctccttgcgatccactcgccgatacgattgacagctctggcccaagcttgaccctgccaaacggaggatgtctgtcagcggtcggcctgcccctcggtcctggcagagaggccctggaaaaggccctcgtgatccaggagtccgagcggagaaagaagcttagattccaccctagacaactgtatctgagcgtgaagcaaggcgagctgcagaaagtgatactgatgctgttggacaacctcgatccgaacttccagtccgaccagcagagtaaacgcacaccactccacgccgctgcacaaaaggggtccgtagaaatctgtcacgttttactacaagctggggcaaacatcaacgccgtggacaagcaacagaggacaccactgatggaagcagtggtaaacaatcaccttgaagttgccaggtacatggtgcagcgtgggggatgtgtttactcaaaggaggaagatggctcgacatgcctccatcatgcagccaaaatcggcaacctggagatggtcagtctactgctttctacggggcaggtcgatgtgaatgcccaggattccggtggctggacacctataatctgggccgctgagcataagcacatagaagtgattcggatgctgctgaccaggggggctgatgtgactctcaccgacaacgaagagaacatctgcctgcattgggcctcattcacgggctcagcagcaattgccgaggttctcctgaatgcacgctgtgacttgcatgcagtgaactaccacggggacacccccctgcacattgcagcccgagagtcatatcatgactgcgtgctgctgtttctgtcacgaggcgctaacccagaattgagaaacaaggaaggcgacaccgcctgggacctgactcccgaacgaagtgatgtgtggttcgcactccagctcaatagaaaactcaggctgggcgttggaaaccgagcgataagaaccgagaaaatcatatgtagggatgttgcgcgaggttacgaaaacgtgcctataccctgcgtgaacggcgtcgatggcgaaccgtgcccggaagattacaaatacatatccgaaaattgcgagacttctaccatgaatattgatcggaacataacccatcttcagcattgtacctgtgttgatgattgctcatccagcaattgcttgtgcgggcaactctcgatccgatgctggtatgacaaagatgggcgattgctgcaagaattcaataagatcgaacccccactcattttcgagtgtaaccaagcatgcagctgttggcgcaactgtaagaacagggttgtgcagtccgggattaaggtgcgactgcagctgtaccgcaccgccaagatgggctggggggtcagagcactacagactataccccagggaacattcatatgtgaatacgtgggggagttgatctctgacgcagaggcagacgtgagagaggacgattcatatcttttcgatttagataataaggacggggaagtgtactgtatcgacgctcgatactatggaaacatcagtcgctttattaaccatctgtgcgatcctaacattattccggtgcgtgtcttcatgctgcatcaagacctgcgttttccgaggatcgcgtttttctccagtcgagatatcagaacgggtgaagagctcggctttgactatggggaccggttctgggacatcaagtccaaatactttacatgtcaatgcgggtccgagaagtgtaaacacagcgcggaggctatcgctttagaacagagtcggttagccaggctcgacccccacccagaactgctgcccgagctggggtccctcccaccagtcaacacctag

SEQ ID NO: 222348 - DNA, 3633 bp, synthetic construct
  misc_feature 1..3633: note = Description of Artificial Sequence: Synthetic coding sequence
  source 1..3633: mol_type = other DNA
atggctgccgctgccggtgctgcagccgcagccgcagctgaaggagaggctccagccgagatgggagcgctgctactggagaaggaaactaggggagcgactgagcgagttcacggctccctaggagacaccccacggagcgaggagaccttgcccaaagcaacacccgactcactggagcctgctggaccctcttccccagcctccgtgactgtgacagtaggagatgaaggcgctgatactcccgtgggcgcaacaccgttgattggtgatgagtccgagaatctggaaggcgacggagatctgaggggcggacgcatcttactcggtcacgccacaaaaagctttcctagcagtcccagcaaaggcggttcctgtcccagtcgggctaagatgtctatgaccggagcaggtaagagtccaccctccgtacagagcttggccatgaggctgctgtctatgcctggggcacagggcgctgccgctgccggaagtgagccaccgcctgccacaacaagcccagaggggcaacctaaagtgcatagggcaagaaaaaccatgtctaaacccggaaatggccagccacccgtgccggagaaaaggcctcctgagatccagcactttagaatgtcagacgacgtccatagcctggggaaggtgacgagcgatctagcaaagaggaggaaactgaattccggaggtggactcagtgaagagctgggatctgcacgaagaagcggcgaggttacgctgaccaaaggagaccctggctcacttgaggagtgggagacagtggtcggagacgatttcagtctatattatgacagttactcagtggacgaacgcgtggatagcgattcaaaatctgaagtagaggccctcaccgagcagctttccgaagaggaggaggaagaagaggaagaagaagaagaagaggaagaggaggaggaggaagaagaagaggaggaggatgaagaatcagggaatcaatctgaccgaagcggaagcagcggacggaggaaagcgaagaagaaatggcgtaaagattctccctgggtgaaaccttctcgcaagcggaggaagagagagcctcccagggcaaaggagccgaggggagtcaacggcgttgggtcatccgggcctagcgagtatatggaggtccccctcggctccttggagttgcccagcgagggtacactgtctcccaaccacgctggcgtttctaatgatacctcatcactggaaaccgaaagaggttttgaggagctgccactgtgctcttgccggatggaggcccctaaaattgatcgtatcagcgaaagggcaggacacaaatgcatggccacggaaagcgttgacggcgagctttcaggctgtaatgctgccatccttaaacgggaaacaatgcgacctagctcgagggtggcactgatggtattatgcgagacccatcgtgctaggatggttaagcatcattgttgccccggatgcgggtacttctgtaccgctgggacctttttagaatgtcaccccgattttagggtagcccacagattccataaggcatgcgtgtcgcaactgaatgggatggtgttttgtccccactgcggtgaggacgcctcagaagcccaggaggtgacaattccacgcggagatggcgtgacgcctccagctggaacggccgcacctgctccccctccattgtctcaggacgttccagggagagctgacacctcgcagccatccgctcgtatgcggggtcatggcgagcccagaagaccgccatgtgatcctttggcagacacaatcgactcgtctggacctagtctcactctgccgaatggaggctgcctatccgctgtggggctccctctggggccaggacgtgaagcccttgagaaggccctggtgatccaagagtcagagcgacgaaagaaactccgattccacccaagacagctttacctgtcagtgaaacagggcgagctgcaaaaagtgatcctgatgctgctggataacctagatcctaattttcagagcgaccagcagtccaagagaacgccactccacgccgctgctcaaaaggggagcgttgagatttgccacgtgcttctgcaggctggggcaaacatcaacgccgtcgataaacagcagagaacaccgctgatggaagctgtcgtgaataatcacctggaggtcgcacgatatatggtgcaaaggggaggatgcgtgtattcgaaagaggaagatggatcaacttgccttcatcatgcagctaagattgggaacttggagatggtcagcttactattatctacaggccaggtggacgtcaatgcgcaggacagtggcggatggacacctatcatctgggcagccgagcacaagcacatagaggtaatcaggatgctactgactcggggagcagacgtcactttgaccgacaatgaggaaaatatctgcttgcattgggcttctttcacggggtccgctgcaatagccgaagtcctcttgaacgcccgttgtgacttacacgccgttaattaccacggcgacaccccgctgcacattgctgccagagagagttatcatgactgtgtgttgttatttctcagccgaggcgcaaatcctgaactacgcaacaaggagggagacaccgcatgggacttgacaccggagcggtccgacgtgtggttcgcactgcaactaaataggaaacttaggctgggggtgggaaatagagcaataaggacagagaaaattatctgtcgggacgtggcgaggggttatgagaatgtaccaatcccctgtgtcaacggcgttgacggtgaaccttgcccggaggactacaagtacataagtgaaaattgtgagacatcaacgatgaatattgaccgtaacatcactcacctgcagcactgcacctgtgtagacgactgctctagctctaactgtctatgtggacagcttagtatcagatgttggtatgataaggacggcaggctccttcaggagtttaataaaatcgaaccaccactgatcttcgaatgcaatcaggcatgcagttgttggagaaactgcaagaaccgggtcgttcagtcagggattaaggtgaggcttcaactgtacaggaccgcaaagatgggatggggtgtccgagcactgcagactattccccagggcacctttatttgtgagtacgtgggtgaactgatctccgacgcagaagcagacgtgcgcgaagacgactcctacctgtttgatctggataacaaggacggcgaagtgtattgtatcgacgcacggtactacggcaacatctcacgcttcatcaaccacctgtgcgaccctaacattattccagtccgagtgtttatgcttcatcaagacctcagattccctaggattgccttcttctcatcgagagatatacgcaccggagaggagctaggattcgactatggagatcgattttgggatatcaaaagtaagtacttcacctgccagtgcggctccgaaaaatgtaagcacagcgccgaggccattgccttagagcagtccaggctcgcccgactggacccccatcccgagttactgccagaactcggcagtctccctcctgtgaatacatag

SEQ ID NO: 222349 - DNA, 3804 bp, synthetic construct
  misc_feature 1..3804: note = Description of Artificial Sequence: Synthetic coding sequence
  source 1..3804: mol_type = other DNA
atgcggggattgccgcgtggcagaggattgatgcgcgctcgagggcgaggccgagccgctccgccagggagccggggtaggggccgtgggggaccccatcgaggccgtgggcgaccaagatctctgttgagtctcccaagagcacaggctagctggactcctcagctcagcacaggactaacatctccccctgtgccatgcctgcccagccagggcgaggctcccgcagagatgggcgctctcctgctggagaaggaaacgcggggagccactgaaagagtgcatgggagcctgggggatacccccagatccgaagaaacattacccaaggccaccccagatagcctcgagccagccggaccctcttcacccgcttctgtaacagtcacagtgggtgacgaaggagctgacacacctgtgggcgcaactccccttatcggcgacgagtccgaaaacttggaaggggatggcgatctgcggggtggaagaatccttctgggtcacgcaaccaaaagttttccatccagcccctccaagggtggctcttgtccttctagggccaagatgtcaatgacaggtgcagggaagtccccaccaagcgtacagagcttagctatgcgcctgctctctatgcctggggctcagggggctgccgctgcaggaagcgaaccccctcctgccactacgtcacccgaaggacagccaaaagtgcatagagccagaaaaaccatgtcaaagccaggcaacgggcaacccccagtccctgagaagcggccaccagaaattcagcattttcggatgagtgacgacgtccattccctgggaaaagtgacaagtgacttagctaagcgacgtaagctgaactccggcggagggttatcagaggaactgggctctgcccgacggtcaggggaagtgacactgaccaaaggtgatcccggaagtctggaggagtgggagacggttgtcggtgatgacttttccctgtattatgattcttacagcgtggacgaaagagtggattcagattctaaatcagaggtagaagccctaaccgaacagctttccgaagaggaggaagaggaggaagaagaggaagaagaagaagaggaggaggaggaggaagaggaggaggaagaagatgaagagtcaggcaatcaatcggatcggtcggggagctccggcagacgtaaagcaaagaaaaagtggcggaaagattctccgtgggtgaaaccttcacgaaagcggcgtaagagagagccgcctcgggcaaaggaaccacggggagtcaatggagtcggatcctccggtcccagcgagtatatggaagtgcctctcgggtcactagagctgcccagtgaagggaccctgagtccaaatcatgcgggagtgtctaatgatacatcttccctcgaaactgagcgagggttcgaagaacttccactttgtagctgtagaatggaggcccctaagatcgaccggattagtgaaagggctgggcacaaatgcatggccaccgagtctgttgacggtgagctctcggggtgcaacgcagcaatacttaagagggagaccatgaggccgtctagcagagtagcgctcatggtactctgtgaaacacaccgcgcacgcatggtgaaacaccattgctgtccaggctgtggctatttctgcaccgcaggaaccttcttagaatgccatccagacttcagggtggcgcaccgatttcacaaggcctgcgtgagccagctgaatggcatggtgttctgtccccattgcggggaggatgctagtgaagcccaggaggtaaccatccctaggggggacggtgttacacccccagccggaacagccgctcctgcacccccacctctgtcacaggacgttcctgggagagctgatacttcccagccaagtgcgaggatgcgcggacacggcgagccccgacggcctccatgtgaccccctggctgacactatcgattcctccggccctagtctcaccctgccaaacggcggttgtctctcggccgtgggcctccctttagggcctggcagggaggcattagagaaggcacttgtgatccaggagtctgagcgtcggaaaaagctcaggtttcatcctcgccagttatacctgtctgtgaagcagggcgaactgcagaaggttattctcatgctcctcgacaaccttgaccccaactttcaatctgaccagcaatcgaaaaggacgcctttacatgccgcagcgcagaaaggttccgtggaaatctgtcacgtgttattgcaagccggtgctaacatcaatgctgtggacaaacagcagcgcactccacttatggaagctgtggtcaacaatcacttggaagtggctaggtacatggtacagaggggaggctgtgtgtattccaaggaggaggacggtagtacttgcctgcaccacgcagctaaaatcggtaacctggaaatggtgtcactgctgctctctacgggacaggtggacgttaacgctcaggattccggtggctggacccctattatatgggccgctgaacacaagcatattgaggtgatcaggatgttactcacgcgcggagccgacgtgaccctcacagacaatgaagagaacatctgcctgcactgggcttcgttcacagggtcggctgctatcgctgaggtgctgctgaacgcccgttgtgacctgcacgctgttaactaccacggcgacacccctcttcatatagcggcacgggaaagctaccatgactgcgttttgttattccttagccggggtgctaatccagagcttcgcaataaggaaggtgatacagcttgggacctgacacctgagcgcagcgatgtctggtttgctctccagctcaaccggaaactgcgcctgggcgtgggtaatcgtgcaattcgaaccgagaaaattatttgccgcgatgtggcaagaggatatgagaacgtacccataccttgcgtgaatggagtggacggtgaaccatgccccgaagattataagtatatctcagagaactgtgagacttcaactatgaacatcgacagaaacatcacccacttgcagcactgcacatgcgttgacgactgctcctcctcaaattgtttatgtgggcagctctcaatccgatgttggtatgataaggacggcagactgctgcaagagtttaacaaaattgagccacctctgatcttcgagtgcaaccaagcttgtagctgttggagaaactgtaaaaatagagtcgtgcagagcggcatcaaggtgagactccaactgtaccggacggctaaaatggggtggggagtgagggccctgcagacaattccacagggcacattcatttgtgagtacgtgggtgagcttatctccgacgctgaggcagatgtgcgcgaagacgattcgtatctatttgatctggacaacaaggacggagaggtctactgtatagatgcgcgatattacggtaatatttctcgctttattaaccatttatgtgatcctaacattattcctgtgcgcgtgttcatgcttcatcaggacctgcgcttccccagaattgcatttttttctagccgggacatccgaacaggcgaggagctgggctttgactacggagaccggttctgggatatcaaatctaaatactttacatgtcaatgcggaagcgaaaagtgcaaacattcagcagaagcaatagcccttgaacagtctcgactggctcgactggacccacaccctgagctgctgcctgaattggggtctctgccccctgtcaatacctag

SEQ ID NO: 222350 - DNA, 3804 bp, synthetic construct
  misc_feature 1..3804: note = Description of Artificial Sequence: Synthetic coding sequence
  source 1..3804: mol_type = other DNA
atgagggggctccctcggggacggggactcatgagggccagggggcgtgggcgtgccgcacccccaggcagtcgcggtagaggcaggggagggccacaccggggaagaggacgcccacgcagcttgttgtccctgcctcgcgcacaggcttcctggaccccccagctgagcacagggttgactagtccccctgtgccttgtctgcccagtcaaggcgaggcgcctgcggaaatgggcgcactcttattagagaaagagacgaggggggctactgaacgtgtgcatggctctcttggggataccccacgaagcgaagaaacactgcccaaggccaccccggattccctcgagccagctggcccttcttccccggcttctgtgactgtgaccgtaggcgatgaaggcgcagatacacctgtaggggcaacaccccttattggcgacgaaagcgagaatctggaaggtgacggcgacctacgcggaggacgaatcctgttaggccacgcgactaagagcttcccttcctctccttccaagggcggatcctgcccctctagagcgaaaatgagcatgaccggggctggcaagagtcccccatctgtgcagtccctggctatgaggctcctctccatgcctggagctcaaggcgctgccgctgcagggtccgagcctccccctgccaccacttcgccagaagggcagccaaaggttcacagggcccgaaaaacaatgtctaaaccgggaaatgggcagccccctgtgcccgaaaagcgccctcccgaaattcagcattttagaatgtccgacgacgtacactctttgggaaaagttacttccgacttggccaagagacgcaagctgaattccggcggagggctgtccgaggagctaggatccgcacgccgatctggtgaggtaacgctgaccaagggagaccctggatccctcgaagagtgggaaaccgtggtgggagacgatttctcactctactatgatagctactcagtcgatgaacgggtcgactccgattcaaaaagcgaagtggaggccctgaccgagcagctgtccgaggaggaagaggaagaggaggaagaggaggaagaagaggaggaggaagaagaggaggaggaagaagaagaggatgaggagtccggaaatcagagtgaccgaagcggctcctcaggcagaagaaaggctaagaagaagtggcggaaggattccccttgggtcaagccatcccggaagcgaaggaagagagagccccctagggccaaggaacccaggggcgtcaatggcgtggggtcaagtggtccttccgaatatatggaggtgcctttgggctctcttgagctgccgagtgagggcaccctgagtcccaatcacgcgggtgtttctaacgatacgtccagcttggaaacagagcgcggattcgaggaattgcccctctgttcttgtcgaatggaagccccaaagattgataggatttctgagcgggctggccataaatgcatggcaaccgagtcagtagatggagagctgagtggatgtaacgcggctattctcaaaagggagaccatgaggccctctagcagagtcgccctgatggttctgtgtgaaactcacagggcgaggatggtgaagcaccattgctgtcctggatgtgggtacttttgcaccgcaggaacctttctagagtgtcacccagacttcagagtggctcaccgttttcataaagcatgcgtttctcagctgaatggtatggtgttttgtccacactgtggcgaggacgcaagcgaggcccaggaggtcactattccccgaggcgatggtgtaacccctcccgcaggaactgctgccccagctccacctccattgagtcaggacgtgcctggcagagcagatacttcacaaccctccgctaggatgagaggtcacggtgaaccgagaaggcctccctgcgaccctctggcagataccattgacagctccgggcctagtctgacactgccaaacggaggctgcttgtctgcggtgggacttcccctggggcctggccgtgaagcgttggagaaagcgttggtgatccaggagagtgagcgccgaaagaagcttcggttccaccctaggcagctctaccttagtgttaagcagggggagttgcaaaaagtcattttaatgcttttagataatcttgatccgaatttccagagtgatcaacagagtaaacgcactcccctacacgcggctgcccagaaggggtcggtggaaatctgccacgtcctcctccaagccggagcaaacattaacgccgttgataaacagcaacgcacccccctgatggaagcagtggttaataatcacttggaggtcgccaggtacatggtccagcgtggcggatgtgtgtactcgaaagaggaggatggcagcacatgcctccaccacgctgctaagataggtaaccttgagatggtgtcacttttgctgtctactggccaggtcgacgtgaacgcacaggactccggcggatggacccccattatctgggcggctgagcacaaacatatcgaagttatccggatgctactgaccaggggagcagatgtaacactcaccgacaacgaggaaaacatctgtctacattgggcttcatttacgggatctgccgcaattgcggaagtgctcttaaacgcgagatgtgacctgcacgctgtgaactatcacggcgacaccccgctgcatattgccgctcgcgagagctaccacgactgcgtgttattgtttttgtccagaggagctaaccccgaactgcgcaacaaggaaggggataccgcctgggatctgacccccgagcgcagtgatgtctggttcgctctgcaactaaatcgtaagttgcggctgggggtcggaaacagggccattcgcactgaaaaaattatatgccgcgatgtggcaagaggttacgagaatgtaccaataccatgcgtcaatggcgtggatggggagccttgcccagaagactacaagtacatcagcgaaaattgcgagaccagtaccatgaatattgaccgaaatatcactcatctgcagcactgcacctgtgtggatgactgttcctctagtaactgcctttgcggccagctgtccatccgctgttggtatgataaggacggtaggttgcttcaggagtttaacaagatcgaacctcctttgatctttgagtgtaaccaggcatgcagctgctggaggaactgcaagaatagagtggtccagtcaggaattaaggttcgtttgcagctctacagaactgcgaaaatggggtggggcgtcagagcattacagactatcccccaaggaactttcatttgcgagtacgtcggtgaactgatttctgatgcagaagctgatgtgagggaggacgactcctatcttttcgacctggataataaggatggcgaggtgtattgcatcgatgccaggtattacggaaatataagtagatttattaatcatttgtgcgatcccaatattatccctgtccgggtctttatgctgcaccaggatctgcgtttcccacggattgcatttttcagttctcgggatatcaggaccggagaggagctggggtttgattatggggaccgattctgggatattaagtctaagtacttcacatgccagtgtggtagtgagaagtgcaagcattcggcagaggcgatcgccctcgagcaatcgcgactcgctcgtctagatccccatcctgagttattgcccgagttgggaagcctgcctccagtgaacacttag

SEQ ID NO: 222351 - DNA, 3702 bp, synthetic construct
  misc_feature 1..3702: note = Description of Artificial Sequence: Synthetic coding sequence
  source 1..3702: mol_type = other DNA
atgagagggcttcccaggggacgtggcctgatgagggctcgcggaagggggagggccgctccgcctggaagccggggaagaggacgcggaggtccgcatcgcggaaggggcagaccacgatccctcctatctttgcctcgcgctcaggcttcttggacgccccagctgtctaccggcctgacgagtccgccagtgccgtgcctgccctctcagggagaagcccctgctgagatgggagccctgctcctggaaaaggagacgaggggagcaacggaacgggtccatggctctctcggcgatacaccaaggagcgaagaaacattaccaaaagctacacctgactctctcgaaccagctgggcctagctcgccagccagcgtcaccgtaacagttggagacgaaggggcagatacgcctgtgggagcgacacctctaattggggacgaatctgagaacctcgagggtgatggggatctcagagggggaagaatattactaggacatgccaccaagagtttccccagctctcccagcaaggggggatcctgccctagccgcgcaaaaatgagtatgactggtgcaggaaaatcaccaccatccgtccagtctttagcaatgcgacttcttagcatgcctggtgcccaaggcgctgctgccgctgggtccgagcctcctccggcaacgacctcccctgaaggacagcctaaggtgcacagagctcgcaagaccatgtccaaaccaggtaatggtcaacctcctgttccagaaaagaggccaccagaaatacaacacttcagaatgagtgatgacgtccactcattagggaaagtcacttcagatctcgcaaaacggaggaagctgaactccggcggaggactcagcgaagagctgggaagcgcccgtagatccggggaggtgacactcaccaagggggatcccggaagcttagaggaatgggaaactgttgttggtgatgatttcagtctttattatgactcttatagcgtcgatgagagggtggactccgacagcaagtcagaagtcgaggctctaacagagcagctctccgaggaggaggaggaggaggaggaagaggaggaagaagaagaagaggaggaggaggaggaagaggaagaggaagacgaggagagcggcaaccagtctgacagatctggctcctccggccgaaggaaggctaagaaaaagtggcgaaaagactccccctgggttaagcccagccgaaagcgtaggaagagggagcccccacgcgcaaaagagccacggggtgtttccaacgatacttcttcactggagacggaacgtgggttcgaagagctccctttgtgctcctgtcgcatggaggccccaaagattgaccgtatctccgaacgggcaggccataaatgtatggccactgaaagtgtcgatggagagctctcagggtgtaacgccgcaatccttaaaagggagactatgcggcctagttctagagtcgctctcatggttctatgtgagacgcaccgtgccaggatggtcaagcaccattgctgccctgggtgcggatacttctgtacagcgggaaccttccttgagtgccaccccgacttccgtgtcgcacataggtttcacaaggcatgcgtcagccagctcaacggaatggtgttctgtccacattgcggcgaggatgcctccgaggcacaggaagtgactatcccgaggggcgacggagtgactccccctgctgggactgccgctcccgctccacctcccctgtctcaggacgttccaggcagggctgacacatctcagccatctgctcgcatgcgcggtcacggagagcccaggcggccaccgtgcgatccattggcggataccatcgactcctctggacccagtctgactctgccaaatggcggttgtctttccgcagttggacttcctctgggcccaggtagggaagcgctggagaaggccctcgtgattcaggaatctgaacggaggaaaaagctcaggttccacccacgtcaactgtacttgagtgttaaacagggcgaactacagaaggtgatcttgatgctgctggacaatctggaccccaatttccagtccgaccaacagtcaaagagaacgccgcttcacgctgccgctcagaagggctccgtcgagatttgtcacgtattactgcaggccggagccaatattaatgccgtggacaagcaacaacggacccccctcatggaggcagtggttaacaaccacctggaggtcgccagatatatggtgcagaggggcggatgtgtgtactccaaggaagaggacggatctacgtgtttgcaccatgcagctaagattgggaatctggaaatggtcagcctgttgctgagtaccggacaggttgatgtgaatgcccaggattcgggagggtggacgccgattatctgggcggcagagcataagcacattgaggtcatacggatgctgctgacccgaggtgccgacgtaacgctgactgacaatgaggaaaatatttgcctgcactgggcctcattcactgggagtgcagcgatcgcagaggttctgctcaacgcaagatgcgatcttcatgccgtgaactatcacggggacactccccttcacattgctgcaagagagtcctatcatgactgcgtcctgctcttcctctcgcgaggcgctaatcctgagttgaggaacaaggagggggatacagcttgggatcttacacccgaacgatcagacgtgtggtttgcactgcaattgaatagaaaacttcgcctgggggtagggaaccgggctatcaggactgagaaaattatttgtagagacgtcgcacgtggctacgagaatgtgcctattccatgtgtgaatggtgtggacggggaaccttgcccggaggattacaaatacatctccgagaattgcgagaccagcactatgaatattgataggaatatcacacatttgcagcattgtacttgcgtggatgactgcagctcatccaactgtctgtgcggacagctgtcaatccgatgctggtacgacaaggacgggaggttgctgcaagagttcaataaaatcgaaccaccactgatctttgaatgcaatcaggcttgctcgtgttggaggaactgcaagaaccgcgttgttcagagcggcattaaggtccgtttgcagctttaccgtactgcgaagatggggtggggggttcgcgcactgcagactatcccacagggaacattcatctgtgagtatgtaggtgagcttatctccgacgcagaggcggacgttagggaagatgactcatacctgtttgacctggacaacaaggacggcgaggtttactgtatcgatgcaaggtactacgggaatatcagcagattcatcaaccatctgtgtgaccctaatatcatcccggtgcgggttttcatgctgcatcaagatcttcgcttccccaggatcgccttcttctcttctcgagacatacgtacaggagaggagttgggattcgattatggggatcgtttctgggacatcaaatctaaatactttacttgccagtgcggctccgaaaagtgcaagcatagcgctgaagccatcgctctagagcagagccgcctcgctcgcctcgatcctcacccagaattgcttccagagttaggatcactgccccctgtcaacacctag

SEQ ID NO: 222352 - DNA, 3804 bp, synthetic construct
  misc_feature 1..3804: note = Description of Artificial Sequence: Synthetic coding sequence
  source 1..3804: mol_type = other DNA
atgaggggactgcccaggggccgtggcctgatgcgggctcggggtcggggacgtgcagccccacccggatctaggggtagaggaaggggcggtccacacaggggcaggggcagaccccgtagcttgctgtcactaccaagagctcaagctagctggacccctcagctgtccaccgggctcacatccccacccgtgccttgcctgccttcgcagggcgaggcccctgcagagatgggcgcattactcctcgagaaggaaacccggggagccactgagagggttcatggttcattgggagatacccccagatccgaagagactttgcctaaggctaatccagattccctggaacccgcaggcccatcatcccccgcttccgtcacagtcaccgtgggagatgagggcgctgacacccccgttggggctactcctttaattggcgacgagtcagagaatctggaaggagatggagatctgcgaggcggaagaattctgctcggacatgcgaccaaatcttttccatcctctcccagcaagggcggtagctgccctagtcgcgctaaaatgtcaatgacaggcgcaggtaagtccccacccagcgttcagtctctggctatgcgcctgctctctatgcctggagctcaaggcgctgcggctgcaggctccgaaccgcctccagctaccacaagcccagaaggtcagcctaaggtgcatagagcgcgaaaaacaatgtctaagcccggtaatggccagcccccagtgcccgagaaaaggccccctgaaatccaacacttcagaatgagcgatgacgtacactccctggggaaggtcacctccgatttggccaaaagaaggaagctgaattccgggggtggtctgtcagaagagctgggatccgctcggcgatcaggggaggtgactttgactaaaggggaccctgggtccctggaagaatgggaaacagtagttggggacgatttcagcttgtattatgattcctactctgtcgacgaaagagtcgatagtgatagtaaatcagaagtcgaggctctgaccgaacagctatctgaagaagaggaggaggaggaagaggaagaagaggaagaagaggaagaggaagaagaagaggaggaagaggaggacgaggagtccgggaaccagtctgaccgaagcgggtcctccggtaggcgaaaggcaaaaaagaagtggaggaaggactccccttgggttaaaccctcacgaaagcgtagaaagcgcgaaccgccaagggcgaaggaaccacggggagttaacggcgtgggttcttctggccctagtgagtacatggaggttcccctggggtcgcttgagctgcctagcgagggcacactctcgcctaaccacgccggtgtgtccaatgacacatcctccctcgaaaccgaaagagggttcgaggagctacccctgtgctcctgccgtatggaggctccaaagatagataggatctcagaacgggctggccacaagtgcatggcaaccgaatccgtggacggcgaactgtccggttgtaatgcagcaatcttgaagagagaaaccatgagacccagttccagggtggctttgatggtgttgtgcgagacacaccgcgcacgcatggttaagcaccactgttgccccggatgcggttatttctgcaccgccggaacttttttggagtgtcaccctgattttagagtggcccatcgttttcataaagcatgcgtgtctcagctgaacgggatggtcttctgcccacattgtggcgaggacgcttccgaagctcaagaggtgaccatcccaagaggagatggggtgactccaccagctggcactgcggcacccgcaccaccgcctctgagccaggacgtgcccggaagggcagataccagtcagccaagcgccagaatgcgcggtcatggggagccgagacggcctccatgcgatccgctcgccgacactatcgactcctcaggtccctctctcaccctccccaacggcggatgcttgagtgccgtcgggttacccttgggtccaggacgcgaagccttagaaaaggcactagttatccaggagtctgagcggagaaagaagctgcgcttccacccacgccaactttacctgagtgtgaagcagggcgagcttcagaaggtcatcctaatgctactggataacctggaccccaatttccagagcgaccagcagtcaaaacgcaccccgttgcacgcagcggcacagaaagggtccgtcgaaatttgtcacgtactgttgcaagctggagccaatattaacgcagtggacaagcagcagcggacccccctcatggaggctgtcgtgaacaaccatttagaagttgcccgatatatggtgcagagaggcggatgtgtgtacagcaaagaggaagatggcagtacttgcctccatcacgccgctaagatcggcaacctggagatggtgtccttgttgctctctacaggtcaagtggacgtcaacgcgcaagactccgggggatggactccaataatttgggctgctgaacataagcacattgaggttattaggatgctgctgaccagaggagccgacgttactttaaccgataacgaggaaaacatttgtctgcactgggcatccttcacaggtagtgccgctatcgctgaggttctgcttaacgcacgatgtgacctgcacgccgtcaactaccacggggatacacctcttcatatcgccgctagagagtcctatcatgattgtgtgctgctctttctttcccggggagctaaccccgaactgcgtaacaaggagggcgacaccgcctgggatctgacgcccgaaaggagcgatgtgtggtttgctctccaactgaatagaaagctcagactgggtgtggggaacagggccattagaactgagaaaatcatctgcagggatgtggccaggggctatgagaacgttccaattccctgcgtcaatggagttgatggggaaccatgccctgaggactacaagtatattagcgaaaactgtgaaactagcactatgaatatcgaccgcaacatcacgcacctgcagcactgcacttgtgtcgatgactgtagctcctcaaattgcctctgcggccagctctcaattcggtgctggtacgacaaggatggtcgcctattgcaggagttcaacaagatcgagcctcctctcatttttgaatgtaaccaagcctgctcctgctggcggaattgcaaaaacagggttgtccaatcagggatcaaggtgcgcctccagctgtatcgcaccgcaaagatgggctggggtgtcagagccctgcagaccattccccagggcacgtttatttgtgagtatgtcggagaactcatcagtgacgccgaggctgacgtccgggaagacgactcttacctgttcgacttggataacaaagacggtgaggtgtattgtatcgacgcacgctattacggaaatatatcaaggttcattaaccacttgtgcgatccaaatatcattcctgtcagggtgttcatgttgcatcaggacttgcgcttccccagaatagctttttttagctcacgagatatacggacaggagaagagctggggttcgattacggagaccgcttttgggatatcaaatccaaatatttcacgtgccaatgtggttctgaaaagtgtaaacactctgctgaggctattgccttagagcagtctaggctagcgcgtttggatccacaccccgagctactgccagagttagggtctttgccacctgtgaatacttag

SEQ ID NO: 222353 - DNA, 897 bp, synthetic construct
  misc_feature 1..897: note = Description of Artificial Sequence: Synthetic coding sequence
  source 1..897: mol_type = other DNA
tagtcaaagcgtacccccctgcatgcagcggctcagaaaggctctgttgagatctgtcatgttctgctccaagccggagcgaatatcaatgcggtggataagcagcagcggactcctctgatggaagcagtggtgaacaaccacctggaggtggctaggtacatggttcaaaggggcggatgcgtgtatagtaaggaggaagacggttccacctgccttcaccacgctgctaagataggaaatctggagatggtgagcttgttactgtccacagggcaggtagacgttaacgcccagggtcaactgcctcccccaagcctgcctagccatcctcaagattcaggaggctggacaccgatcatttgggcagctgaacacaaacacattgaagtgatacgcatgctcctgacgaggggcgcagacgttaccctgaccgacaacgaggaaaatatctgcctccattgggcgagcttcaccggctctgccgcaatcgcagaggtgttgctcaatgccagatgcgacctgcatgctgtaaattatcatggggatactcctctgcatatcgccgcaagagagagttatcacgactgcgttctgctttttctttctcgcggtgccaacccagagctaagaaataaggaaggtgatacggcgtgggatttaacacccgaacgtagcgatgtatggtttgccttacagctcaacagaaagctgagacttggagtagggaatagggccattcgcacagaaaaaattatatgccgcgacgtagccaggggctatgaaaacgttcccatcccttgtgtgaacggcgttgacggggagccatgccccgaggactacaagtacatctccgagaattgcgaaacaagcactatgaatattgatcgcaattag

SEQ ID NO: 222354 - DNA, 3633 bp, synthetic construct
  misc_feature 1..3633: note = Description of Artificial Sequence: Synthetic coding sequence
  source 1..3633: mol_type = other DNA
atggccgcagcggctggagcagcagctgccgcagcagccgagggcgaagcacccgcagaaatgggagccctgctgttagagaaggagacccgcggagctacagaacgcgtccatggttcccttggagatacaccaagatctgaggaaacattaccaaaagccaatcccgatagtctggaaccagctgggccttccagtcctgcgagcgtcacggtcacagtcggtgatgagggggctgatacaccggtcggcgctacccctcttatcggagatgaatccgaaaacctagaaggtgacggcgaccttcgcggagggaggatactcttaggccacgccaccaagtcgttcccaagtagcccgtctaagggcggtagctgccctagtagggctaagatgtcaatgactggagctggtaagagtccaccctccgttcaatctctggcaatgcgcttgctgtctatgcccggagcacagggcgcagctgccgcagggtccgagccgccacctgcaacaaccagccctgagggccagcctaaggtgcacagggcccgtaaaactatgtctaaaccaggcaatggtcagcctcctgttccagagaaacgtcctcccgaaatccagcactttcgaatgtcagacgacgtgcattccctggggaaggttacgtcggatctggctaaacgaagaaagctcaactcaggcggagggttgtccgaggagttagggtcagccaggcgctctggcgaggtgacattaaccaagggcgaccccggatccctagaggaatgggaaacagtagtcggggatgacttttctctatattacgattcttatagcgtcgatgagagggtcgactcagacagtaagagtgaggtggaggccttgacggagcagctgtccgaagaggaagaggaagaagaggaagaagaagaagaagaagaagaggaggaggaagaggaggaggaagaagaagacgaggaaagcggcaaccagagtgaccgcagtgggtcaagcgggagaaggaaggctaagaagaagtggcgtaaagactccccatgggtgaaacccagtcgtaagagacggaagagggagcctcccagggctaaggagccgcgaggcgtgaacggcgtgggaagctctggcccttcagaatatatggaagtgcccctcggcagcctcgagctgcccagtgaaggcaccctgtctccaaaccatgcaggtgtctccaatgacacttccagcttggagactgagcgcggttttgaggaactgccactgtgttcctgcagaatggaggctccaaagattgatcggatttcagagagggccggacacaagtgtatggccacagagagcgttgacggcgagctcagtggctgtaacgctgctatattaaagcgggaaacaatgaggccttccagcagagtcgcgctcatggtcttgtgcgagacacatcgggcacggatggtgaagcaccactgttgtcctgggtgtggctacttttgtacggctggcacttttctggaatgtcacccagactttagagtcgcccatcgattccacaaagcctgtgtgtcccagctaaatggcatggtgttctgccctcactgtggagaagatgctagtgaggctcaggaggtcacaatcccaaggggtgatggcgtgacacccccagccggtacagccgctccagccccaccccctctgagtcaagatgtccccggaagggctgataccagccagccttctgctcggatgcgaggtcacggcgaacccagacgtcctccttgtgacccgctggctgataccatcgattcaagcgggccatctctgacgctgcccaatggcggttgcctgagtgccgtgggtctgcctttaggcccaggaagagaagccttggagaaagcgctagtaattcaggagagtgagagaaggaaaaaacttaggtttcacccgagacaattatatctgagcgtaaagcagggggagctgcagaaggtcattctgatgcttctggataacctcgacccgaattttcagtctgaccagcagtccaaacggactcctctgcatgccgctgcacagaaaggcagtgttgagatttgtcatgtgttgctccaggccggagcaaacatcaatgcagttgacaaacaacaacgcaccccattaatggaggccgtggttaacaaccatctggaagttgctcgctatatggttcagcgaggagggtgcgtttatagtaaagaggaggacggatcaacatgtcttcaccatgccgctaagatcggcaacttggagatggtgtctctgctgttatccactggacaggtagacgtgaacgcccaggattcaggcggttggactccaataatttgggctgctgagcataaacacatcgaggtcattcgcatgctgttgacacggggtgctgatgtgactcttaccgacaatgaagagaatatttgcctgcattgggcatcattcaccgggagtgctgccatagcggaggttctgctcaatgccagatgtgacctccacgctgtgaattaccatggagacacccccctgcacatcgcagcccgagaatcctaccatgactgcgtcttgctgtttttgtcacgtggggctaatcccgagcttcgcaacaaggaaggagataccgcatgggatctgacccctgaacgcagtgatgtgtggttcgcgctgcaactgaacaggaagctaaggctgggcgtgggcaacagggccatcagaacagaaaaaatcatttgccgtgacgtggctcgaggttatgagaatgtgcccattccatgcgtgaatggagtggacggggaaccctgccctgaagactataagtatatctcggaaaactgtgagacctcaacgatgaatattgaccgcaatatcacccatctacaacactgcacatgcgttgatgactgttcctcatccaattgtctctgcggacaactgtctatccggtgctggtatgacaaagacggtcgcctgctgcaggagtttaacaaaatagaacctccccttattttcgaatgtaatcaggcgtgctcctgctggagaaattgcaaaaacagagttgtgcagtcaggaattaaggtccgccttcaactgtatcgcacggccaaaatgggttggggagtcagagccctccagaccatcccccagggaacatttatctgcgagtatgtcggcgagctgatctccgatgccgaggccgacgtgcgcgaagacgatagttacctgttcgatctggacaataaggacggtgaggtgtactgcattgacgcccgttactacggaaacataagccggttcattaaccacctctgcgaccctaatattattccggtgcgagtgttcatgcttcatcaagacctgagattccctcgaatagctttcttcagctcaagagacatccgaaccggcgaggagctcggcttcgattatggagaccggttctgggacatcaaatccaagtatttcacgtgtcagtgcggatccgaaaaatgtaagcacagcgcagaagctattgccctagagcagtcccggctggctagattggatcctcatcccgagctgctacccgaacttgggtctctgccacctgtcaatacttag

SEQ ID NO: 222355 - DNA, 897 bp, synthetic construct
  misc_feature 1..897: note = Description of Artificial Sequence: Synthetic coding sequence
  source 1..897: mol_type = other DNA
tgatccaagagaacgcctctgcatgcagcagctcagaaagggtctgtggagatttgccacgtgcttctgcaggcgggtgctaacatcaatgcagttgacaagcagcagcggaccccgttgatggaggccgtcgtcaacaatcaccttgaagtcgccaggtatatggtgcagagaggaggttgcgtctattccaaggaggaggatgggtcgacatgcttgcaccatgcggctaagatcggaaacttggaaatggtgtccctgctgctgagcaccggtcaggtagacgtgaacgcccagggccaactgccgcctccctctcttccaagccatccccaggatagcggaggttggacacctatcatatgggccgctgagcacaagcatattgaggtgattcggatgctgctcacaagaggcgcagacgtgaccctgacagataacgaggagaacatttgtctccactgggcttcattcacgggtagtgcagccatcgctgaggtcctgctaaacgctagatgcgatctccacgctgtgaattaccatggagacactcctctgcacatagctgccagggagagctatcacgattgcgtgctgctgttcctaagcaggggcgcaaaccccgaacttcgcaacaaagaaggggacaccgcctgggatctcacacctgagagatcagatgtatggttcgccctgcagctgaatagaaaacttcgattgggtgttggaaatcgtgctatccgcacggagaagattatttgtcgggacgtggcgagaggttatgagaacgtgccaataccctgtgtgaatggagtggatggtgaaccttgtccagaagattacaaatatatctccgaaaactgcgagacaagcactatgaacatcgataggaattag

SEQ ID NO: 222356 - DNA, 3531 bp, synthetic construct
  misc_feature 1..3531: note = Description of Artificial Sequence: Synthetic coding sequence
  source 1..3531: mol_type = other DNA
atggccgctgccgctggggctgcggcagccgctgcagcggaaggcgaagcacccgctgagatgggagctctgctgctcgaaaaagagaccagaggagccacggagagagtccacggatccctgggtgacactccacggagcgaggagactctccccaaggcgacccccgattccctggagcccgcaggtccatcaagtcctgcctctgtgacagttacagttggtgatgagggagcagacacacccgtcggagctaccccactgattggggatgagtctgaaaacctggaaggcgatggggatcttaggggaggccgaatcctgctcggtcacgctacgaaatcttttccaagcagtccgagtaaggggggttcctgcccgtcaagagccaagatgtctatgaccggggcaggcaagtctcctccttccgtgcagagtctcgccatgagattgctatccatgccaggagcccaaggcgcagcggctgctggcagcgagcctccccctgcaactacatcaccagagggtcagcctaaagtccacagggcccgaaagacaatgagcaagcccggaaatggccaacctcccgtacctgagaaaagacccccagagatacagcactttagaatgagcgatgacgtgcactccctaggtaaagtgacctccgacctagccaagcggaggaagcttaactccggaggagggctcagtgaggagttgggttctgcccgacggtcaggtgaggtgacactaaccaagggagatcctggctctcttgaggaatgggagacagtcgtgggagacgatttcagcctttattatgactcctactctgtggatgagagggtggattctgactccaagtcagaggtcgaggctctgactgaacagctgagcgaggaggaggaggaagaggaggaggaagaggaggaggaggaagaggaggaagaggaggaagaggaagaagaagacgaggagagcggcaatcagtctgatcggagtggatcaagtgggaggagaaaggcgaaaaagaagtggcggaaggacagcccgtgggtgaaaccttcaagaaagagaaggaagcgggaacctccaagagcaaaggaacctcggggtgtgtctaatgatacaagctctcttgagacagaaagaggctttgaagaactgccgttgtgtagctgcagaatggaagcgcctaaaatagacagaataagtgagcgggcaggccacaagtgcatggccaccgaatccgtcgacggagaactatccggctgtaacgctgccattctgaaaagagagactatgaggcccagcagtagggtggcgctgatggtcctgtgcgaaacccacagagcgagaatggttaaacaccattgctgtcccggttgcgggtacttctgcacagcgggaacctttctcgaatgtcatccagactttcgggtggctcatcgtttccataaagcttgtgttagccagctgaatggaatggtgttttgtcctcactgcggcgaagacgcttccgaggcccaggaggtaacgatacctaggggggatggggttacacctcccgcagggacagcggcaccagcccctccacctttaagccaggatgtgcccggtcgtgcagacacttcccaaccttccgccagaatgcgtggccacggtgagccacgtagaccaccttgcgaccccctcgctgacaccatcgattcttcaggtccaagtcttactctgccaaatgggggttgtctttcagccgtaggcctgccgttgggtccgggaagggaagcccttgagaaggctctggtgatacaggaaagcgaacgcagaaagaagctgcggttccacccaaggcaactctacttatcagtcaaacagggggagctgcaaaaggtgatcctgatgcttctcgacaacttagaccctaatttccagtccgatcaacagagcaaaagaactcccctacacgcggcagcccagaaggggagcgtcgagatctgccacgtgctcctccaggctggcgcaaatatcaatgcggtcgataagcagcagcgaactcccctgatggaagcggttgtgaacaatcatctcgaggtggctcggtatatggtgcaacggggtggctgcgtgtattccaaggaagaagacggcagcacttgtctgcaccacgccgctaaaatcgggaacctcgaaatggtcagtcttttattatctacaggacaggtagatgtcaacgcccaggactccggcggatggacaccaattatttgggccgctgaacacaagcatattgaggtgatcaggatgctattgacccggggtgcggatgttaccctgaccgacaacgaagagaacatatgtttacattgggcatcctttaccggaagtgccgctatcgctgaggtgctcttaaatgccagatgtgacctgcacgccgtgaactatcacggcgacacccctttacatatcgccgctcgggagagctaccacgattgtgttcttttgttcttgagcaggggcgctaaccctgagctaaggaacaaggagggagacactgcctgggacctgacacccgagcgatctgacgtgtggtttgcactacaactcaatcgaaagttacggcttggagtggggaatcgggctatccggacagagaaaatcatctgtcgggacgtcgcgagaggctacgagaatgtgcctataccgtgtgtgaatggagtagacggcgagccctgtcccgaagattacaagtacattagcgaaaattgtgagacgtccaccatgaatattgatcgcaatatcacacaccttcagcattgtacatgcgtagatgattgcagcagctctaattgcctctgcggccagctaagcattcgctgttggtatgacaaggacggcagactgctgcaggaatttaacaagattgaacccccactgatttttgagtgcaatcaggcttgctcttgttggcgcaattgtaaaaatagggtcgtccagagcggaatcaaagtgcgtctacagctttataggacagctaagatgggctggggggttagagccctccagacaatccctcagggaacatttatttgcgaatatgtcggcgaacttatcagcgacgcagaggccgatgtccgggaggatgactcttatttgtttgatctggataacaaagatggggaggtgtattgcattgatgcacgttattatggtaacatcagcagatttattaaccatctctgcgatcccaacatcattccagtccgtgtgttcatgctgcatcaggacctgcgttttcccaggattgctttctttagtagccgagatattcggaccggcgaggaactgggtttcgattatggcgatcggttctgggacatcaaatccaagtatttcacttgtcagtgtggttccgagaaatgtaaacatagtgcagaagcgatcgcacttgaacagtctcgtttagcgagactcgatccccaccctgagttgctgccagagctgggttcgcttccgcctgtgaacacatag

SEQ ID NO: 222357 - DNA, 3804 bp, synthetic construct
  misc_feature 1..3804: note = Description of Artificial Sequence: Synthetic coding sequence
  source 1..3804: mol_type = other DNA
atgagaggtctccccagaggaaggggcctcatgagggctcgcggtcggggacgggcagccccacctgggagcaggggacgcggtcggggtggaccgcaccggggtcgcggacgcccacgttccctgctgtccctccccagggctcaagcaagttggacaccccaactcagcaccggcctgacctccccaccagtcccttgtcttccatctcaaggagaggcccctgcggaaatgggagctttgctccttgagaaggaaacccgcggagcaacagagcgtgtccatgggtctctcggcgacacaccccgtagtgaagaaactctgcccaaagctaccccggacagcctggagccagcagggcctagtagtcctgcctccgtcactgtgaccgtgggcgacgagggcgctgacactccagttggtgctactccactcattggcgacgagtctgagaacttagagggcgatggcgatctcagagggggacggattctcctgggacacgcgaccaaaagttttccctcaagcccctccaagggtggatcttgtccgtcacgagccaagatgtctatgacgggtgccggaaaatcccccccatccgtgcagagcctggcaatgcgtctgttgtccatgcctggagcacaaggggcagctgcagccggttccgagccccctccggcaacaacatcccccgagggccagccaaaagtccaccgcgctcgtaaaacaatgtccaaaccgggaaacggccaaccgccagtgcccgagaaaagacctcctgagattcagcattttaggatgagtgatgacgtacactctcttggtaaggtgacaagtgacctggccaagagaaggaaactgaacagtgggggagggctcagcgaagaacttggatcagcaaggcggtccggcgaggtaacgctcacaaagggggatcccggaagtctggaggagtgggagaccgtggtcggcgatgatttcagcctctactacgactcctatagcgtcgacgagcgcgttgactcagattccaaatctgaagtggaggctcttacggagcagctctccgaggaggaagaggaagaggaagaggaggaggaggaggaggaagaagaggaggaggaggaagaggaggaggaggacgaggagtcggggaaccagtctgacagatccggctcctcaggacgcaggaaagccaagaaaaaatggagaaaagacagtccttgggtaaaaccttcccggaagaggcggaagagagagccgcctagagcaaaggaacctcgtggtgtcaatggagtgggctcaagcggacccagcgagtatatggaggtgcctttagggagcctggagctccctagcgaaggtactttgagtcccaaccacgcaggcgtgtccaatgacacatctagtcttgagactgagaggggctttgaggagctgcctctgtgctcttgcaggatggaggccccaaaaatcgatcgcattagcgagcgggcaggccacaagtgtatggccacggaaagtgtggatggggagctgtctggatgcaatgcagccattcttaaaagggagacaatgcggccatcatcgcgggtcgccctgatggtcttatgcgaaacacaccgtgcccgaatggttaagcaccactgttgtcccggttgcggttatttttgcaccgcgggaacctttcttgagtgtcatcccgactttagggttgcccatcggttccacaaagcttgcgttagccagctaaacggcatggttttttgtcctcactgcggcgaggacgccagtgaggctcaggaggtgaccattccgagaggtgacggcgtcactcctcctgccggaactgctgcccctgcccctcctccactgtcccaggacgtgcctggcagggctgatacgtctcagccaagtgctaggatgcgagggcacggagagccacggcgacctccttgtgaccccctggcggacactattgactcctcagggccatcgctaactctgccaaatggaggatgtctgagcgctgtaggcttaccactggggcctggcagggaagcgctggaaaaagccttagtcattcaggagagcgagagacgcaagaaattgcgattccaccctcgccaactttatcttagcgttaaacagggtgaactgcagaaggtgatccttatgctgctggataacctagatcctaactttcagagcgatcaacagagtaagaggacacctctgcatgccgcagcccagaaaggaagcgtggagatctgtcacgtcctgctccaggccggagctaacatcaatgccgtcgacaaacaacagcgtacaccacttatggaagcagtggtgaacaaccatctcgaggtagctaggtacatggtacaacggggagggtgtgtgtactccaaagaagaggacggcagcacttgcctgcaccacgctgctaagattggcaatctagagatggtgtccctgctgctctccacagggcaggtggacgttaatgctcaggactctgggggatggaccccgataatttgggccgcagagcacaagcatatagaggttataagaatgctgttgacccgtggtgccgacgttacgctcacggacaacgaggagaacatctgcctgcactgggcttcttttactggcagcgccgctattgctgaggttctcttgaacgcacgctgcgatttacacgcagtgaactatcacggggacacaccactgcacattgcagcgcgagaatcttaccacgattgtgtgctcctctttctgtcccgcggtgcaaacccggagttgcgaaacaaagagggtgatactgcgtgggacctaacccccgaaagatcggatgtctggttcgcattgcagctcaaccgtaaactgaggctcggggtgggtaaccgggctatcagaactgagaaaatcatatgtagagatgttgccagaggttacgagaatgtccctatcccttgtgtaaatggagtcgacggggagccttgtcctgaggactacaagtacatcagtgagaattgcgaaacatcaaccatgaacatcgataggaatattacccacctgcagcactgtacatgtgtggatgactgttctagctcaaactgtctgtgtggtcagcttagcatccggtgctggtacgacaaggacggtaggctgctgcaggaatttaataagatagaaccaccactgattttcgagtgcaatcaggcctgctcatgttggcggaactgcaagaaccgcgtggtgcagagcgggattaaggtaaggctgcagctgtacagaactgccaaaatgggatggggcgtgcgggcactgcagaccataccccagggaacgttcatttgcgaatatgttggggagttgatctccgatgctgaagcggatgtacgcgaagatgattcctatctatttgatctcgataataaagatggagaggtttattgcattgacgctagatactacggcaatatctcccggtttatcaatcacctgtgtgatcctaacatcattccagtgagggtattcatgctgcaccaggatttgcgcttcccccgaattgcttttttttccagtcgggatattcgaacgggtgaagagctcggcttcgactacggagaccgcttctgggacatcaagtccaagtacttcacatgtcaatgcggctcagagaagtgcaagcatagcgctgaggcaatagctcttgaacagagtcgccttgcgcgtcttgaccctcatccagaactgctgccagaattgggtagcttgcctcccgtcaacacatag

SEQ ID NO: 222358 - DNA, 3633 bp, synthetic construct
  misc_feature 1..3633: note = Description of Artificial Sequence: Synthetic coding sequence
  source 1..3633: mol_type = other DNA
atggcagcagccgctggggctgcagctgcagccgctgccgagggtgaagcccctgccgaaatgggtgctttgttactggagaaagaaaccagaggcgcaacagaacgggtgcatgggagcctgggggataccccacggagtgaggaaacgctgcctaaggcgaatccagacagtctagagccagccggtccttctagtcctgccagtgtgacagtgacagttggggacgaaggagctgacacacctgtgggggctacccctctgatcggcgacgagagcgagaacctggaaggtgacggtgacctgagaggagggagaatcctgctcggccacgcaactaagagctttccaagtagcccgtctaagggcggatcttgtcccagcagggctaagatgtctatgacgggggctggaaagagtcccccaagcgtgcagtctctggctatgcgtttgctgagcatgcctggcgcacagggcgctgcagcagccggtagcgagccccctcccgctacgactagcccagagggacagccaaaagttcatcgggcacggaagaccatgagtaagccaggaaatgggcagccacccgttcctgaaaagagaccgccagaaattcagcattttcgcatgtcagatgatgttcactctcttggcaaagtgaccagcgacctagcaaagagaagaaaactcaactccggaggcggtctgagtgaagaactgggaagtgcccgtcgatctggcgaagtcactctcactaagggcgaccctggatccctcgaggagtgggagaccgtggtaggggacgacttttcactctactatgattcatactcagtggacgaacgagtggactccgattccaagtcagaagtggaagccctgactgagcagctttcagaagaggaggaggaggaggaggaggaagaggaggaagaagaggaggaagaagaggaggaggaggaggaggaagacgaggagagtgggaatcaaagcgataggagcggatcttccggcaggcggaaggctaaaaaaaagtggcgcaaagactccccatgggtaaagccctcgaggaaacggaggaaaagggagccgccaagagctaaggagccccgtggagtgaatggggtgggttcctcaggacccagcgaatacatggaggtgcctttgggatccctggagttgccgtccgaaggtaccttgtcccctaaccacgctggcgtaagcaacgataccagctcactagaaacagagagggggtttgaggagctgcctctttgttcctgtaggatggaagcacctaagatcgataggatcagtgaacgggctggacacaagtgcatggccaccgagagcgttgacggcgagctgagcgggtgtaatgccgctattttaaagagagagactatgaggccgagctccagggtcgcactgatggttctgtgtgagacacatagggcacgaatggtgaagcaccattgctgtccaggatgcggttacttttgcaccgctgggacattccttgagtgccaccccgacttccgagtggcacacaggttccataaggcatgcgtcagccagctgaatgggatggttttttgcccccattgtggtgaagacgcttcagaagctcaggaggtcacaatcccacgaggagatggggtgacacccccagctggaactgcagccccagctccacccccattgagccaagatgtccccggtagggccgacacttcacagcctagtgcacggatgcgaggacacggcgagccccgaagacctccttgcgatccgctggccgatactatcgattccagcggcccatccttgacactccccaatggaggatgtttaagtgccgtcgggttacccctcggacctggcagagaggcgttggaaaaggcgcttgtgattcaggaaagcgagcggaggaagaagcttcgttttcaccccagacaactctacctctctgtgaaacagggcgaacttcagaaagtcattctgatgctgctcgataacttggacccaaattttcagtcggatcagcaatctaagcgaaccccacttcacgctgcagcgcagaagggctctgttgagatctgccatgttctcctgcaggccggagcgaacatcaacgcagtagataaacaacagcgcactccactcatggaagctgtcgttaacaatcatctcgaggttgctagatatatggttcaaaggggcggatgtgtgtactctaaggaggaggacgggtctacctgtctgcaccacgctgccaaaatcgggaacctcgagatggtctcactgctactttccacgggccaggtcgacgtcaatgcgcaagactcaggaggatggacaccaatcatctgggccgcagagcacaagcacatagaagtgattaggatgcttctgacgcgcggagcagacgtgacgcttaccgataatgaggaaaacatctgccttcactgggcatcctttacaggctccgccgcaatcgccgaggtgctgttgaacgccaggtgtgatttgcatgcagtgaactatcacggggatactcctctgcacatcgcagctcgggaatcatatcatgattgcgtgctcctgtttttgtcaaggggtgccaaccctgagctccgaaataaggagggtgacaccgcttgggaccttacgcccgagaggtccgatgtctggtttgcccttcagctaaatagaaagcttcgcctgggggtcggaaacagagctattagaactgaaaagatcatctgcagggatgtcgcacggggatatgagaatgttccaatcccctgtgtcaatggcgtagatggggaaccatgccctgaggattacaaatatatttctgagaactgcgaaaccagcacaatgaacattgacagaaacatcactcatctacagcactgcacctgcgtggacgattgctcgtcctccaattgcctgtgtggccagttgagcatcagatgttggtacgataaggatggcaggctactgcaagagttcaataagatcgagccccctctcatatttgagtgcaaccaggcttgctcctgctggagaaattgcaagaatagagtggtacagagcggtattaaggtccggttacagctgtatagaactgctaaaatgggctggggagtccgcgctctacagactatcccacaaggcacttttatctgcgagtatgtaggtgaactgatctctgacgcagaggcggacgtaagggaggatgacagctatctttttgaccttgataacaaagacggagaagtatactgcatcgacgcaaggtactacggcaacatcagtagatttattaaccacctgtgtgatccgaacatcatcccagttcgtgtgtttatgctgcaccaggacttgaggttccccaggatcgcttttttctcatcccgcgatattagaaccggtgaggaattgggcttcgactatggtgacagattttgggacattaagagcaagtattttacctgtcaatgcgggtcagaaaagtgcaaacactccgccgaggcaattgcactggaacaatcacgactggccagactggatcctcaccccgagcttctacccgagctcgggtcactgcctcccgtgaatacgtag

SEQ ID NO: 222359 - DNA, 897 bp, synthetic construct
  misc_feature 1..897: note = Description of Artificial Sequence: Synthetic coding sequence
  source 1..897: mol_type = other DNA
tagtctaagcggaccccactacacgctgcggcacagaaaggcagtgttgagatctgtcacgttttgttgcaggctggagctaatatcaacgctgtggacaagcaacagaggacgcccttgatggaagcagtggtgaacaatcatttagaggtagcccgatacatggtgcagagggggggatgtgtctactctaaagaagaggacggctcaacctgtctgcaccatgcagctaagataggaaatttggagatggtgagcttgctgctttcaacaggtcaggtggatgttaacgcgcaaggccaattgcctcccccaagcttaccctcgcatccgcaggatagtggaggctggactccgatcatctgggcggcagagcataagcatatcgaggtcatccggatgcttctgaccagaggtgcagacgtaacattgactgataatgaggaaaatatttgtctgcactgggcctcattcacggggagcgcagcaattgccgaggttctgctcaacgcacgctgcgacctccatgccgtgaactaccacggcgacactccgctgcatattgctgcacgtgagtcctatcatgactgtgtactgctcttcctcagtaggggggctaatcccgaactgcggaataaggaaggcgataccgcttgggaccttactcctgaacggtccgacgtctggttcgccctgcagttgaaccggaaactccgcttgggggtcggaaacagggctattaggaccgagaagattatatgccgggacgttgctcgcggatacgaaaatgtgcctatcccttgcgttaacggggttgacggggaaccatgcccggaggactataaatatatctctgagaactgcgagaccagcactatgaacatcgaccgaaactag

SEQ ID NO: 222360 - DNA, 2769 bp, synthetic construct
  misc_feature 1..2769: note = Description of Artificial Sequence: Synthetic coding sequence
  source 1..2769: mol_type = other DNA
tctgaggtggaagctctcaccgagcagctgtccgaggaggaggaggaggaggaggaagaagaagaggaagaagaagaagaggaagaagaagaggaggaggaggaggacgaagagagcggaaatcaaagcgataggagcggctcttcgggtcgcaggaaggccaagaagaaatggcgaaaggacagcccctgggtaaagccctctcggaaacggagaaaaagagagccgccaagggcaaaggaaccacgcggagtaaacggagtaggttcatccggccctagcgaatatatggaggtcccattaggctcgctggagttgccgagtgaggggaccctgagtcccaaccatgcaggcgtttcaaacgatacttcgagtttggagacagagcggggtttcgaggagctgcctctgtgcagttgccgaatggaggcccctaagatcgatcgcatctctgagagggcaggacacaagtgcatggccaccgagagcgtggacggggagctgtcaggatgcaatgccgcaatcctgaagcgggagaccatgcggccaagcagcagggtggcactcatggtcctgtgcgagacccatcgggctcgcatggtgaaacaccactgttgccccggatgtggctatttctgtactgcaggtacattcctggagtgccaccccgatttccgagtggcacaccgattccacaaagcttgtgtgtctcaacttaatggcatggtgttttgtccccactgtggagaagacgcctccgaagctcaggaggtcacaataccacgcggagacggggtcacaccccctgctggaactgcggctccagccccacctccactctctcaggatgtccccggaagggctgatacctctcaaccatcggcgcgaatgcgtggccacggagagccccgacggccaccttgtgacccactcgctgataccatagattcctccggaccaagcttgaccctgcccaatggcggatgcttgtctgccgtgggcttgccactcgggcctggacgggaagccttggaaaaggccctagtgatacaggagtctgaacgcagaaagaaactgagatttcatccaaggcagctctacttaagcgtcaagcagggcgagctccaaaaagtgatacttatgctgttagacaacctggacccaaacttccagtctgaccagcagagcaaaaggacaccattgcacgcagctgcacagaagggcagcgtcgagatctgccatgtgctccttcaagctggggcaaacataaacgctgtggacaaacagcagcgcactcctttgatggaggctgttgtgaacaaccaccttgaagtggcccgttacatggtgcagcggggaggttgcgtgtactctaaggaggaggacggatcaacctgccttcatcacgctgcaaaaattggcaacctcgagatggtgagtctgttactgtctacgggccaggtcgatgtgaatgcgcaggattccggtggatggacccccataatatgggcggcagagcacaagcatattgaagtgattcgtatgttactgactcggggagcagacgttactctcaccgataacgaggaaaatatttgtttacattgggctagtttcaccggctccgctgcaatcgccgaggtattattaaatgccagatgcgacctgcatgccgtgaactaccacggggatacccctctgcacattgctgccagagaatcctaccacgactgtgtcctgctgtttctgtcccgcggagccaaccctgagcttcgcaataaggagggcgatacagcatgggatctgacccccgagagatccgacgtgtggttcgcccttcaattaaaccgcaagcttcgcctgggcgtgggaaatcgagccatccgcacagagaaaataatctgccgggacgtggccaggggctatgaaaatgtgcctatcccctgcgtgaacggtgtggacggcgagccatgtcctgaggactacaagtacatctcagaaaattgcgagacgagtaccatgaatattgaccggaacataactcacctccaacattgtacctgtgtcgatgattgctcctcctccaattgtctctgtggccagctctccattcgttgctggtatgacaaggatggtcgcttattgcaggagttcaacaagattgaacctccactcatttttgaatgcaaccaggcctgtagctgttggagaaactgtaagaatagagtggtccaaagcggcataaaggtgcgcttgcagctgtaccgcactgctaagatgggttggggggtacgtgcactccagacaatcccacagggtacctttatctgtgaatatgttggagaacttatctccgacgccgaggctgatgtacgggaggacgattcgtatctgttcgacctggacaataaggatggcgaggtctactgcatcgacgccaggtactacgggaatatctcccgttttattaatcacctctgtgaccccaatataataccagtcagggtgttcatgctccatcaggatctgagattccccagaatagccttcttttcaagcagagatatccgcacgggagaggaattgggttttgattacggggatcgattttgggacataaaaagtaaatactttacttgccagtgcggctccgagaagtgtaaacatagcgcagaggcgattgctctggagcagtctcgtttggcacgcctggacccccacccagagttgctaccagagctgggctcgctgccacccgttaacacatag

SEQ ID NO: 222361 - DNA, 3702 bp, synthetic construct
  misc_feature 1..3702: note = Description of Artificial Sequence: Synthetic coding sequence
  source 1..3702: mol_type = other DNA
atgaggggactgccacgcggtcggggtctgatgcgcgctcgcggtagaggacgcgcagccccacctgggtcccgcggtaggggtcggggagggcctcataggggcagagggcgaccccgaagcctcctgtctctccctcgggctcaggccagctggactccccagctctccactgggctgaccagcccgcctgtgccgtgtctgccatctcagggggaggcacctgctgaaatgggcgctcttcttctggaaaaggaaactcgcggagccaccgagagggtgcacggcagtctgggtgatacacccagatccgaggagacactgccaaaggctaaccccgattcactcgaaccggctggtcctagtagccctgcttcagtcaccgtcaccgttggcgacgagggcgctgatacccctgtgggcgcaactcctctcatcggggacgagtcagagaacctggagggcgacggcgacttgagagggggacgcatcctactcggccacgcgactaagagctttccaagctcaccttccaaaggaggctcttgtcccagcagggccaagatgagcatgacgggcgcaggaaagagcccgcctagcgttcagagcctggcaatgcgtctgttgagtatgcctggtgcccaaggcgcagccgctgcaggaagtgagccaccccctgctaccacatcccccgagggacaacctaaagttcacagggcgagaaaaactatgagcaagcccggtaacggtcaaccgcctgtccccgaaaaacgaccacctgagatccagcattttagaatgtccgacgatgttcatagcctgggcaaggtgactagtgatctggctaagagacggaaactgaacagtggtggagggctctccgaagagctgggctctgctaggagatcaggcgaggtgaccctgaccaaaggtgatcctggctcgcttgaggaatgggagacggtggtcggggacgattttagcctatactatgactcctactctgtggacgagcgagttgattccgatagtaaatccgaggtggaggccctcaccgagcagcttagcgaagaagaagaggaggaggaggaagaagaagaggaggaggaggaggaagaggaggaggaggaagaggaagaggatgaggagtccggaaatcagtcagatcggagtgggtcctctggtagacgcaaggctaagaagaaatggcggaaggattctccctgggtgaaaccttctaggaagagacgaaagcgggagccaccaagagccaaagagccgaggggagtctctaatgacacaagcagtctggagactgagaggggttttgaagaactgccattatgcagctgccggatggaggcccctaaaatagacaggatctctgagcgggctggacacaagtgcatggccactgaatcggtcgacggtgaactgtcaggttgtaatgcggctatactcaagcgcgaaacgatgcggccttctagccgcgtggctcttatggtgctatgcgaaacacatcgggcaagaatggtaaagcatcactgctgtccaggctgcggttatttttgcaccgctgggaccttcctggagtgccacccagattttagggttgcgcataggttccataaggcatgcgtgagccagctcaacggaatggtattctgtccccactgtggcgaggacgcttcagaggcccaggaagtgacgatccctaggggtgatggtgtgaccccccctgccggtaccgctgcccctgcccctcctccccttagccaggacgtccccggtagagctgatacttctcaacccagcgccaggatgcgaggtcacggagagccacgacgccctccttgtgatccactcgccgatactatcgattcttctgggcctagcctaacattgcccaatggcggatgtttgtctgccgtgggtctgcctcttggtcctggccgagaggcactggaaaaagccctggtgattcaagagagtgagcgaagaaagaaactccggtttcacccaaggcagctgtacctctccgtaaaacaaggcgagttacagaaagtcattttgatgcttttggacaacctcgatcccaattttcagtccgaccaacagagtaagcgaacccccctacatgccgctgcccagaagggctccgtcgaaatctgccatgtcctgctccaagccggagctaatattaatgccgtggacaagcagcagaggacccctctcatggaagccgtggtaaacaatcacctggaagtggcgaggtatatggttcagagaggaggatgcgtgtacagtaaggaggaagacgggtccacctgccttcatcacgctgctaagatcgggaatctcgagatggtatccctgttactctcaactgggcaggtggacgttaacgctcaggatagcggagggtggaccccgattatctgggctgcggaacacaagcacattgaagtaatacggatgctgctgactcggggtgcagatgtgactctgaccgacaacgaggaaaacatttgcctgcactgggcttcattcactggctcagcagcaatcgctgaggtcctgctcaacgcgaggtgcgatcttcatgcagtgaattatcacggcgataccccactgcacatcgccgcaagggagtcataccacgactgcgtgttgctgttcctgtcacgtggggcaaatcccgagcttcgcaacaaagagggagacaccgcctgggatctgacacctgagcgcagtgatgtttggtttgccctacagcttaataggaaactgaggctcggggtcgggaatagagccatccggaccgaaaaaatcatttgcagggacgtggcacgcggttacgagaatgtgcccattccttgtgtcaatggggtcgatggggaaccctgtcccgaggactacaagtacatatcagaaaattgtgagactagcacaatgaacatagatcggaacattacacacctgcagcactgcacatgcgtggatgattgcagttcatccaactgtctgtgtggacaactttcaatcaggtgttggtacgacaaggatggcagactgttgcaagaattcaataagatcgaacccccactcatctttgagtgcaaccaagcttgctcctgctggcggaactgcaaaaaccgggtggtccagtctggcatcaaggtgcggctgcaactttacaggaccgcaaagatgggctggggagtacgagcacttcagaccatcccacaaggaacgtttatatgcgagtatgtaggggagctgatttcagatgcagaggccgatgtaagggaggacgactcatatctgtttgacctggacaacaaggacggtgaagtttattgtatcgacgccagatactatggaaatatcagcaggttcattaaccacctgtgcgatccaaatattattcctgtaagagtcttcatgcttcaccaagacctaaggtttccacgtattgccttcttcagctcaagagacatacggaccggggaagagctgggtttcgattatggtgacaggttctgggatattaagagtaagtattttacttgccagtgtggatcagagaaatgtaaacacagcgccgaagccattgcgttggagcagagtagactggcaaggctcgatccacaccccgaactactgccagaactcggcagtcttccacctgtgaatacctag

SEQ ID NO: 222362 - DNA, 3702 bp, synthetic construct
  misc_feature 1..3702: note = Description of Artificial Sequence: Synthetic coding sequence
  source 1..3702: mol_type = other DNA
atgcgagggctgcccagaggacgagggcttatgcgcgcacggggaaggggcagggcagcaccaccaggctcgcgaggtcgcggacggggtggaccccaccggggtcgcggacgcccaaggtctctcctctccctccctagagcgcaggccagttggacgccccagctgtcaactgggctgacatcacctcccgtgccatgcttgcccagtcaaggggaagccccagctgagatgggtgccctgctactcgaaaaggagacacggggtgccaccgagcgggtgcacggaagcctcggtgatacaccacgatcagaggaaaccctaccaaaggccacccctgatagcctggaacctgccggtccatcctcacccgctagtgtgaccgtgactgtgggcgacgaaggcgcagacacccccgtcggggcaactccgctcatcggagatgagtcagagaatctcgaaggtgacggggatctgagaggcggtcggattctgctgggtcacgctacaaaatctttcccgtcctcccctagtaaggggggatcctgcccctctagagctaaaatgtcaatgacaggagctggcaaaagcccaccatccgtgcagtcgctggcaatgcgtcttttatcaatgccaggagcacaaggggcagcggctgctgggtcagagccgccaccagctaccacgtccccagaaggacaaccgaaagtacacagagctagaaagaccatgagcaagccagggaatgggcagccccctgttccggagaaacgaccacccgaaattcaacactttcgcatgagcgatgacgtgcactccctggggaaagtgacttccgaccttgcaaaacggcgaaagctaaactccgggggtggcctgagtgaggaattgggctccgcccgtcggtccggcgaagtcacactcaccaaaggggatcctggaagcctcgaagagtgggagaccgtggtgggggacgatttctcgctatattacgacagctactcagtggatgaacgagtcgacagtgactctaaatcagaggtcgaggccctgactgagcagctctcagaggaggaggaggaagaagaagaggaggaagaagaagaggaggaggaagaggaggaggaagaggaggaagaggacgaagagtcagggaatcaatctgaccgctctggaagctcaggacgtagaaaggctaagaagaaatggcgaaaagactcaccttgggtgaagccctctagaaaacgccgtaagagagagccccctagggcgaaggagccacggggtgtgtctaatgacacatcttctctggagacggaacgcggttttgaagagctgcctttatgctcttgccggatggaagctcccaagatcgatcgcatttctgaaagagctgggcacaaatgcatggccacagaatcagtggatggcgagctaagcggctgcaatgctgctatactaaagcgcgaaaccatgcgaccatcctctagggtagcccttatggtcctctgcgaaacacaccgagcccgaatggtaaagcatcattgctgtcccggttgtggctacttctgtactgctggcacgtttttagagtgccatccggatttccgtgtggctcaccgctttcacaaggcatgtgttagccaacttaacggcatggtcttttgcccccactgtggggaggacgctagtgaggcccaggaggtgacgattcccagaggcgacggggtgacacccccagccggtactgcagctcctgcgcctccgcctttgtcccaggacgtccctggtcgggcagacacaagtcagccctcagcccgtatgcgcggacatggtgagccgagacgcccaccttgtgaccccttggccgacacaatcgattcttccggcccatctctcacgcttcccaatgggggttgtttgagcgccgtcgggctgcctctaggacccggtagggaggctctggagaaagccctggtgatacaggaatcggagagacgaaaaaagctaagattccatcctagacagctttatctctctgtgaagcagggcgaactgcaaaaggtgattctcatgctgctcgataacttagacccaaacttccaatcagaccagcagtcaaagcggacacctctccacgctgccgcacagaagggcagcgtggaaatttgccacgttttgctgcaagcaggtgccaacatcaatgctgtagacaaacagcaaaggacccctttgatggaagccgtcgtgaataatcatctggaggttgccagatatatggtgcaaagaggagggtgcgtgtactctaaagaagaggacgggtccacctgcctccaccacgcagctaagatcggaaatttagagatggtcagtctcctacttagtacgggacaggtcgatgtgaatgctcaagattccggaggatggacgcccatcatctgggctgcagagcacaagcacatcgaggtgattcggatgctgctgacacgaggggctgatgttaccctgactgacaatgaggagaatatatgtcttcactgggccagttttaccgggtcggccgcaattgccgaggtgctgctcaatgctcgatgtgacctccatgcggtgaattatcatggcgatactccactacacatcgcagccagggagtcctatcacgattgtgtcctgctgttcctatctcgcggagcaaatcctgagctgagaaataaggaaggagacacagcatgggatctaactccagaaagaagtgatgtttggttcgccctccagcttaataggaagctgcgactgggcgtagggaatagggcgatacggactgaaaaaatcatttgtcgcgatgtagctcgcggatacgaaaacgtgccgattccctgtgtgaatggcgtagacggggaaccctgtccagaggattataagtatatctctgagaattgtgagacttcgaccatgaatatcgacagaaacataacacatttacagcactgcacctgcgtggatgactgctcttctagcaactgtctgtgcggccagctgtccattcgctgttggtacgacaaagatggacgcctcttgcaggagttcaacaaaattgagccccctctaatctttgagtgtaaccaagcgtgtagctgctggcggaactgcaagaaccgtgtggtgcagagcggcatcaaggtacgcttacagctgtaccggactgctaaaatgggatggggcgtgcgcgcactgcagacaataccccagggaacattcatctgtgaatacgttggagaactgatcagcgatgctgaagctgacgttagggaggacgattcatacctgttcgatctcgacaacaaggacggcgaggtatattgcatcgatgctaggtactacggcaatatcagtcgcttcattaaccacctgtgcgatccgaatatcatccccgtgcgggttttcatgctgcaccaggacctcagatttccacgcatagctttcttcagctcacgggatattcgcaccggcgaggagctaggatttgattatggggatagattttgggatatcaagtccaagtactttacctgtcagtgtggttcagaaaaatgcaagcacagcgcagaggcaatagcacttgagcagagcagactagccaggctggatccccaccccgagttgttaccagagttaggctccttgccacctgtgaacacatag

SEQ ID NO: 222363 - DNA, 3633 bp, synthetic construct
  misc_feature 1..3633: note = Description of Artificial Sequence: Synthetic coding sequence
  source 1..3633: mol_type = other DNA
atggccgcagcagccggagccgcagcagccgctgccgcagagggggaggccccagccgaaatgggcgctcttctgctggagaaggagacgcgtggagccaccgagagagttcatgggtctttgggggatacaccaaggtccgaggaaactttaccaaaagccacacccgactcattagagccagccggaccatcttctcccgcaagtgtcacagtgacagtcggtgacgaaggcgcagacacccccgtcggggcaactcctctgatcggggatgagtccgaaaatttagaaggcgatggcgatctccgaggcggacgtatcttgctgggccatgctaccaaatcatttccatcttcgccgagcaagggtggctcttgccctagtcgggctaaaatgtccatgacaggggcaggtaaatctccaccatcagttcagagtctcgctatgagattgttaagcatgccaggggcacaaggcgctgctgcagccggatccgaacctccaccagctaccacatctccggaaggccaacctaaggtccacagggctagaaagacaatgtccaaaccagggaacggtcaacccccagtccccgagaagcgtccgcctgagatccagcattttcgcatgagtgatgacgtgcattcactaggcaaggtcacaagcgatctggccaagcggaggaagcttaactctggcggtggcctgagcgaggagcttgggtctgcaagacgaagtggtgaggtcactctcacaaagggggatcccggatctcttgaagaatgggagactgttgtcggcgatgactttagcttatattacgactcatatagcgtggatgaacgggtcgactctgatagtaagagtgaggtcgaggctcttacagagcagttatctgaggaggaggaggaggaagaggaagaggaggaagaagaagaagaggaagaggaagaagaggaggaggaagaggacgaagagagtggaaaccagagcgaccgctctggctcaagcggccgacgtaaggcgaagaagaagtggcggaaagacagcccttgggtaaaaccctctcggaaacggagaaagagggaaccgcctcgcgcaaaggagccccgaggtgtgaacggtgtaggcagctctggccctagcgagtacatggaggtgcctctcggaagtttagagcttccatcggaaggcaccctgagccctaatcatgcgggagtctccaatgatactagttccctggagacagagcgcggattcgaggaactgccgctctgctcgtgccgcatggaggcccctaagatcgatcggatctccgaaagagccggtcacaaatgtatggctactgagagcgtcgatggagaactttcaggctgcaacgccgcaatcttgaagagagaaacgatgagacccagttcccgcgtggctctgatggtgctctgcgagacccatcgcgcaagaatggtcaagcatcattgctgtcctggatgtggctacttttgtaccgccggaactttccttgagtgccatccagacttccgggtggcccatagatttcataaggcatgtgtcagccagctgaacggcatggtcttttgccctcactgtggggaggatgcatcagaagcccaggaagttaccattcccagaggagatggggtgacccctccagcaggtacggccgcaccagctccccctccactgagccaggatgtgccgggacgggcagacacctctcagcccagtgccaggatgcgcggtcacggcgagccacgaagacccccttgcgatcccctggccgacaccatagacagttcgggtcctagtctgaccctgccgaacggtggatgcctgagtgcagtcggcttgccactcggtcccggtcgtgaggcactggagaaggccctcgtgatccaggagagcgaacgacgtaaaaagctccggtttcatccgagacaactttacctgtccgttaaacaaggagagttgcagaaagtcatcctgatgctgctcgacaatcttgacccaaatttccaatcggatcagcagagcaagaggactccacttcacgctgcagcccagaagggctctgtggaaatatgtcacgtgttgctccaggcgggtgccaacattaatgctgtggacaaacaacagcgaacgccccttatggaagccgtcgtcaataatcacctggaggtggctaggtacatggtgcagagaggcggatgcgtgtatagcaaagaagaggatggcagcacttgtttgcatcatgctgccaaaatcgggaatctggaaatggtgtcccttttgctgagtacgggccaggtcgatgtcaacgcccaggactctgggggttggactccaattatctgggctgcagaacacaagcatatcgaggtcatcaggatgctgcttacccgaggcgcagatgttactctcacagataatgaggagaacatttgcctccattgggcttcatttactggctccgccgctatcgccgaggtgctgctgaacgcccgatgcgacctgcacgccgtcaactaccacggcgacacacctctgcacatcgctgccagggagtcctatcacgactgtgtcctcttgttcctgtcccgcggagccaaccccgaactacggaacaaggaaggcgataccgcctgggacctcacacctgagaggtctgatgtgtggtttgccctgcagctgaatagaaagcttcgtcttggcgtcggcaatagggccattcgcaccgaaaagataatttgtcgcgatgtcgcgcgaggatacgaaaacgtcccaattccctgcgtgaacggtgttgacggtgaaccgtgtccagaggactacaagtacatttccgaaaactgtgagactagcactatgaacatagatcggaatatcacccatctgcagcattgcacttgtgtggatgactgcagttcaagtaattgcctgtgcggccagctcagcatccgatgttggtatgacaaggacggccgattgctgcaggaattcaataaaattgagccccctctcatttttgagtgcaaccaagcctgttcctgctggcggaactgcaagaacagagttgtgcaatccggcattaaggtccgcctgcagttataccgcacggcaaagatgggttggggggtccgggctctgcagactattccccagggcacattcatttgcgaatatgtcggcgagcttatctcggatgccgaagccgacgtccgtgaggatgacagctacctgttcgatctggataacaaagatggtgaggtgtactgtattgacgcccgatactacggcaatatttccagattcatcaatcatttgtgtgacccaaacattatcccagtgagggtttttatgttgcatcaggatctgaggttcccccgtatagcgttttttagctcccgcgacatccgcactggggaggagctcggcttcgattatggcgaccggttctgggatattaagtccaagtatttcacctgccaatgtggctctgaaaagtgtaagcactctgcggaagcaatcgccctggaacaatcccggttggctcgactcgacccccacccggagctcctgccagagttgggatcgttgccccctgtgaacacgtag

SEQ ID NO: 222364 - DNA, 897 bp, synthetic construct
  misc_feature 1..897: note = Description of Artificial Sequence: Synthetic coding sequence
  source 1..897: mol_type = other DNA
tagtcaaagcgaacccctctccacgccgctgcgcagaaaggctccgtggagatttgccatgtgttacttcaggctggcgcaaatatcaacgcagtcgataagcaacagcgtaccccactcatggaggctgtggtcaataatcatctggaagtggctcgatatatggtgcagcgtggaggttgtgtatacagcaaggaggaagatggtagtacatgtctccaccatgccgctaaaatcggcaacctagagatggtcagtctgttattgtccaccggacaagtcgatgtaaatgctcaaggtcagctgccaccaccgagcctcccctctcatccacaagactcggggggatggacacctataatttgggccgctgaacacaaacacatagaggtgattcgcatgctgctgacccgcggagcggatgttactttgaccgataacgaggaaaacatatgtcttcactgggcctcctttaccgggtccgcagcaattgccgaggtgctgctgaatgctagatgtgaccttcacgctgtgaattatcacggagacactccgctgcacattgctgcgcgtgaaagttaccacgactgcgtcctgctgttcctctcaagaggggctaatcccgagctcaggaataaggagggggatacagcctgggacctgactcccgagagatccgatgtttggtttgcgcttcaacttaataggaaactccgcttgggagtggggaaccgagctattcgaaccgagaaaataatttgtcgcgacgttgcaagggggtatgaaaatgttcccattccttgtgttaacggggtggacggggagccctgtcctgaagactataagtacatttcagaaaattgtgagacgtccaccatgaacattgatcggaattag

SEQ ID NO: 222365 - DNA, 3804 bp, synthetic construct
  misc_feature 1..3804: note = Description of Artificial Sequence: Synthetic coding sequence
  source 1..3804: mol_type = other DNA
atgcgcggactcccacggggtcgtggtctcatgagagctcgcggtcgcggacgggctgcgcctccagggtcaagaggtagaggaagagggggaccacatcgcggtcggggacggccacgtagcctgctgagcctgcctcgagcccaagctagttggacaccccaactctccacaggattaacctcacctcctgtgccctgcttacctagccaaggagaggctccagctgagatgggtgcactcctgttggagaaggagactcggggtgctaccgaacgggtccacggatcactcggagacacccctcgctcagaagaaacgctgccaaaggccacccctgacagcctggagccagccggacctagctcccccgcatctgttaccgtcaccgtcggcgatgaaggcgctgacacacctgtgggcgctacgcctttgattggagacgagtcagagaaccttgagggagatggcgaccttagaggtggccgaatactgttggggcacgccactaaatcgttcccatcgagtcccagcaaagggggatcttgtcccagcagagctaagatgagtatgacaggtgctgggaaatctccaccatccgtccagtctctggccatgcgtctcctgagcatgcccggagctcagggggctgcagcggctggaagcgagccaccgcctgcaaccacgtcgcccgagggtcagccaaaagttcatagggctagaaagactatgtctaaaccaggtaatgggcagccaccagtacccgagaaaaggccccctgaaatccagcactttcgcatgagtgacgatgtccatagtcttggcaaagtgacttcagatctcgcaaaaagacggaagctgaactcaggcggtggcttgagcgaggaacttggatctgctagaagaagtggtgaagttacacttactaagggtgatcccggtagcctggaagagtgggaaacagtcgtgggcgatgacttctccctctattacgactcttactcagtggatgaaagggttgacagcgatagcaagagtgaggtggaagcgctgacagagcagctgtccgaagaagaggaggaggaagaagaagaagaggaagaggaggaggaggaggaggaggaggaggaggaggaagaagacgaagagtctggcaaccagtctgatcgctccggtagttctggcaggaggaaggctaagaaaaagtggcgtaaggactcgccttgggtcaagccgtcacggaagaggcgcaagagagagcccccaagggctaaagaacctaggggggttaatggggtaggctcctccggaccctcagagtacatggaggtcccattgggttctcttgagctgccatccgaggggaccctgtcacccaatcatgcaggagtgtccaatgatacaagctctttggagaccgagagagggtttgaggagctgccgctctgctcctgcagaatggaagcgccaaagattgacaggatctccgagagagcgggtcacaagtgtatggctactgaatctgttgatggcgaactgagtggttgtaacgctgccatcctgaagagggagactatgagacccagctctagagtggccctcatggttttgtgcgaaacacacagggctagaatggtcaagcaccattgttgccccggttgcggctatttctgcaccgctggaacgttccttgagtgtcatccggactttagggtggcgcacaggttccacaaggcatgcgtctcacaacttaatggtatggtgttctgcccccactgcggcgaggatgcaagtgaagcgcaggaggtcactataccaagaggggatggtgtgacaccaccagccggaaccgctgctccagcacctccacccttgagccaggatgtgcccggtcgggcagacacctcgcagccatccgctagaatgcgagggcatggtgagcctcgaaggccaccttgcgatccactagcagatactattgatagcagcgggccttctctcactctccctaacggaggctgcctatcagcggtcggactcccactgggtcccggaagggaggctctggaaaaagctttagtgatccaggaaagcgagcgccgtaagaagcttcgctttcatcccagacagttgtatcttagtgtaaagcagggagagcttcagaaggtcattcttatgctgctggacaatcttgatcccaacttccagtccgatcaacagagtaaaaggacccctcttcatgctgccgcacagaaaggatcagttgaaatatgtcacgtgctactccaggcaggcgcaaatattaatgccgttgataagcaacagcgcactcccctcatggaggcagtagtaaataaccacctcgaagtcgcccgatacatggttcaacgtggcggatgcgtgtacagcaaagaggaagacggctccacatgcctacaccacgccgctaagataggaaatctcgagatggtaagcctgttactgtctactggacaggtggacgttaatgctcaggacagtgggggatggacaccaattatttgggctgccgaacacaagcatatcgaagtgatcaggatgctcctcactaggggagccgacgtgactctaaccgacaacgaggagaatatctgtctgcattgggcttccttcaccggctccgcagccatcgccgaagtattactaaacgcacgttgtgatctgcacgccgttaattatcatggtgacactccactgcacatcgccgctcgtgagtcttaccacgactgcgttctactctttctatccagaggcgctaatcctgaactgcggaataaggaaggcgacactgcatgggatctgacacctgagcggtctgatgtgtggtttgccttgcagctgaaccgcaaactgcgactgggagtcggaaatagggctatccgcactgagaaaattatttgtcgagacgttgctagggggtatgagaacgtgccaataccttgtgtcaacggtgtggatggggaaccatgccccgaggactataaatacatctctgaaaattgcgaaacaagcaccatgaatatcgaccgcaatattacgcacctgcaacactgtacatgcgtggacgactgtagctcctccaattgcctttgcggacagctgagtattcgatgttggtatgacaaggatggtaggctgcttcaagagttcaacaagattgaacctcccttaatctttgagtgtaaccaggcttgctcctgctggcgcaactgtaaaaaccgagtcgtgcagtctgggattaaagtgcggcttcagttgtaccgcaccgccaagatgggatggggggttagagcactgcagacaatccctcagggtacatttatttgcgaatacgtgggcgaacttatttcagatgcggaggctgacgttagggaggatgactcatatctgtttgacctggacaataaggacggcgaggtgtactgcattgacgccaggtactacggcaacatcagccgtttcatcaatcacctctgcgaccctaatataattcccgtccgagtcttcatgcttcaccaggatcttaggtttccccgtatagccttcttttcttcacgagatattcgcactggggaggaacttgggtttgattacggcgaccgcttctgggatatcaaaagtaagtatttcacatgtcagtgtggcagcgaaaaatgcaaacactctgccgaagccatagctctggaacaaagcaggcttgcacgcctggaccctcaccccgaactgctgccagagctcggttctttgccgccagtcaacacatag

SEQ ID NO: 222366 - DNA, 2667 bp, synthetic construct
  misc_feature 1..2667: note = Description of Artificial Sequence: Synthetic coding sequence
  source 1..2667: mol_type = other DNA
tcagaagtggaggcactgaccgagcagctctccgaagaggaagaggaagaggaagaggaagaagaggaagaagaggaggaagaggaggaagaagaggaggaggaggacgaggagtctggcaatcaatctgacaggtcaggctcaagcggtcggagaaaagccaagaagaaatggcgaaaggattcaccgtgggtcaaaccatccagaaagcgtcgaaaacgcgaaccaccacgagccaaagaacctagaggcgtgagcaacgacacgagcagtcttgaaacagaacggggattcgaggaactccctttgtgcagctgcagaatggaagctcccaaaatagatcggatctctgagagagccggacacaaatgcatggcgacggaaagtgtggacggggagctcagcgggtgcaacgcggcaattctaaagagggaaacgatgcggccatcttctcgagtggccctcatggtactctgcgaaacacaccgggctcggatggtcaaacatcattgttgccctggttgcggatatttctgcacagcaggcacgttcctggaatgtcatccagacttccgggttgcacaccgattccacaaggcctgtgtgagtcagctgaatggcatggtgttctgccctcattgcggtgaggatgcttccgaggcccaggaggtcaccatccccaggggtgatggcgtcaccccgccagcaggcacagccgctccggcacctccaccactgagtcaagacgtccctggcagggctgacaccagccaacccagcgctcgcatgcgtggtcatggcgagccccgtcggcctccatgtgaccctctcgctgataccatcgattcatcaggtccaagcctcaccctaccgaacggcggttgccttagtgccgtgggactgcctctgggacctgggagagaagctttagagaaggccttggttattcaggaatccgagcgacgcaagaaactgcgctttcatccgaggcagctgtacctcagcgtgaagcagggcgaactgcagaaagtaatattaatgctcctcgataacctggaccccaatttccaatccgatcagcaatccaagagaacacctcttcatgccgctgcccagaaggggtccgtggagatctgtcatgtactgctacaggccggtgccaacatcaacgccgtggataagcagcagcggacaccgcttatggaagccgtggtcaacaaccatcttgaggtggctagatatatggttcaacggggtgggtgcgtgtattcgaaggaagaggacggaagtacttgtttacatcacgccgctaaaatagggaacctggaaatggttagtctattgcttagcacaggacaggttgacgtgaacgcacaagattccggtggctggacgcctatcatctgggcagccgaacacaagcatattgaggtgatccgcatgctgctgacgagaggcgctgacgtgaccctcaccgacaacgaagaaaacatctgtctccactgggcctcattcaccggttcggccgcaattgccgaagtgctcctcaacgccagatgcgacctgcatgcagtgaattatcatggcgacacgccgcttcacattgctgctcgagaatcatatcatgactgtgttctgttgttcctgagccgtggagccaacccagagttgcgcaataaggagggcgatactgcctgggacttgacgcctgaacgtagtgacgtgtggtttgcgctccagctgaacagaaagctgcggttgggcgtaggaaatagagcaattaggacagagaaaatcatctgcagagatgtagcgaggggttacgaaaacgttcccattccttgcgttaatggcgttgatggggaaccatgccctgaagattataaatatatatccgagaattgcgagacatctaccatgaatatagacagaaacatcacccacctccaacattgcacctgtgtcgatgattgttcgtctagcaattgcctctgcggccaactcagcattcgctgctggtatgataaagacgggcgtctgcttcaggagttcaacaagatagaacctccactgattttcgagtgcaatcaggcctgctcctgctggcgcaactgtaagaatagggtagtgcaatccggaataaaggtgagattacaattgtatagaacagcgaagatggggtggggagtcagagctttgcagaccattccacaaggcaccttcatctgtgagtacgtcggggagttaattagcgacgctgaggccgacgttagggaagacgattcgtatctgtttgacctggataacaaggacggtgaagtgtactgcatcgacgcacggtactatgggaacatcagcagatttattaatcacttatgcgacccgaatatcatacccgtgcgggtatttatgctccatcaggacctgagattcccgcgtatcgccttcttttctagccgtgatatccgcaccggcgaagagctggggtttgactacggcgacagattctgggacatcaagtccaaatatttcacatgtcagtgtgggagcgaaaaatgtaagcacagtgcggaagccattgcccttgaacagtcccggctcgcacgcctcgacccgcaccctgagctgctcccagagctggggtcccttccaccagttaatacctag

SEQ ID NO: 222367 - DNA, 3531 bp, synthetic construct
  misc_feature 1..3531: note = Description of Artificial Sequence: Synthetic coding sequence
  source 1..3531: mol_type = other DNA
atggcagctgcagctggggcagcggcagctgccgcagcggagggggaggcaccggcagagatgggggctctcctgctagagaaagaaacacgcggtgccactgagcgggtccatggatctctgggcgacaccccacgcagcgaagaaaccctgcctaaggccaatccagactcgctggagcccgctggaccttcttcacctgctagcgtcacggtgaccgtgggggacgagggcgctgatacccctgttggtgccacacctttgataggggatgagtctgagaatctggagggagacggggatctcagaggtgggagaattcttttgggccatgcaaccaagagttttccgtcatcacccagcaaagggggatcctgcccctcccgcgctaagatgtcaatgactggcgctggcaagagtccgcctagcgtccagtctttggctatgcggttactttcaatgccaggggctcagggggctgcagctgcaggttccgaaccaccacctgccaccacgtctccggaggggcagccgaaagtgcaccgggcaagaaagaccatgtccaagcccggaaacgggcagccccctgtccctgaaaagcgccctcctgagattcagcattttcgtatgtcagatgatgttcactcattggggaaggttaccagtgacctcgccaagcggcgtaagcttaatagcggagggggactgagtgaagaacttggcagtgcacgaagatctggggaagtgacactcactaaaggggacccaggatccctagaagagtgggaaacagtggttggggatgactttagtctgtattatgactcctatagtgtggatgaaagggtcgacagcgatagtaagtccgaggtggaggctttaactgagcagctctcagaggaggaagaggaagaggaagaggaggaagaagaagaagaagaggaagaagaggaagaagaagaggaggaagatgaggagtctggaaatcagtctgacaggagcgggtcaagtgggagaagaaaagccaagaagaaatggcgcaaggatagtccttgggtaaaaccttcaaggaagcgaaggaagagagagccgcctcgagctaaagagcctagaggggtctctaatgacacctcttctctcgaaaccgagaggggctttgaggagctgccattatgctcctgtcgcatggaggcccctaaaatcgaccgaatctccgaacgtgccggacacaaatgtatggcaacggaaagcgtcgatggggagctgtcaggctgtaatgccgctattctgaagagagaaactatgcgtccctcatcacgggtcgcgctcatggttctctgtgaaacccacagggccagaatggtgaaacaccattgctgtccgggatgcggctacttctgcactgccggtacattcctggagtgtcacccggatttcagagtggcacatcggtttcacaaggcctgcgtgtctcaactaaatgggatggtgttctgccctcattgcggtgaagacgcttcggaagctcaggaagtcaccatcccccgtggcgatggggtgacgccaccggctggaacagctgcaccagctccgccaccactgtcccaggatgtccccggacgcgcagacacatctcagcccagtgccaggatgcgcggacatggagagcccaggcgtcccccttgcgatccactggccgatactatcgatagctcaggcccttccctcacactgccgaatgggggttgtttgtctgctgtgggcttacctctgggacccggaagagaggctctagaaaaggccttagtgatccaagagtcagagcggcgaaaaaaacttaggttccaccccagacagttatacttatcagtgaaacagggggagttacagaaagtgattcttatgctcctcgataaccttgatccaaactttcagtctgaccagcagagcaagaggacgccgctacatgcggctgcccagaaaggcagcgtcgagatttgtcatgtgctgctgcaggcaggcgctaatattaatgctgtggataagcagcagcggacccctctgatggaggccgtggttaacaaccacctggaggtggcccgatatatggttcagaggggagggtgcgtttacagcaaggaagaggatggatccacatgccttcatcatgcagctaaaatcggaaatctagagatggtcagtctcctgttgagcactggccaagtcgacgtcaacgcacaagactcgggaggttggaccccaattatttgggccgctgaacacaagcacatcgaggtgattagaatgctcctgactcgcggagcagatgttacactgactgataatgaagagaacatttgcttgcactgggcctccttcaccggcagcgctgctattgcagaagttctactgaacgcacggtgtgacctgcatgccgtcaactaccatggggatacacccctgcatatcgctgccagggaaagttaccatgactgcgtgctcctgttcctgtctcggggtgcaaaccctgagcttagaaataaggagggggacactgcctgggaccttacacccgagcggagcgatgtatggttcgccttacagctcaacaggaaactccgactaggagttggtaaccgcgctatccgtacagaaaaaatcatctgtagggatgtcgcaaggggttacgagaatgttcctatcccttgtgtgaacggagtggatggagagccctgcccagaagactataagtacatctccgagaactgtgagacgagcactatgaacattgatagaaatattacacatctgcagcattgtacatgcgtggacgattgcagctcctccaactgcctctgtggacaactatcgatcaggtgttggtacgacaaagacggcaggctgttacaagaattcaacaaaattgagccccctctgatttttgaatgcaatcaggcatgttcctgttggaggaactgcaaaaacagggtagtgcagagtggtatcaaagtaaggctgcagctctatcggacagccaaaatgggctggggtgttagagccctgcagacaataccccagggaacattcatttgtgaatatgtcggggagctcatctctgatgctgaggcagatgtgagagaagacgactcatatctgtttgacctagacaacaaggatggagaggtatactgtatagatgctaggtattatggcaacatctctcggttcatcaaccacctctgtgacccgaacattatccccgtgcgggtctttatgctgcaccaggatctgagatttccaagaatagcattcttctctagtcgggatataagaactggtgaagagcttggcttcgattacggtgacagattttgggacataaagtccaagtacttcacatgccagtgcggctctgagaaatgtaaacacagcgcagaagctatagcgttggaacagagtcgtctggcaaggctcgatcctcatcctgagctcctccctgagctggggtccctaccacctgtcaatacctag

SEQ ID NO: 222368 - DNA, 3096 bp, synthetic construct
  misc_feature 1..3096: note = Description of Artificial Sequence: Synthetic coding sequence
  source 1..3096: mol_type = other DNA
agctgtcactgtacaccttcatggccccctgtgccggagaagagaccccctgagattcagcactttcgcatgtcggacgacgtgcacagccttggcaaggtgacctctgacctggcaaaaagaaggaagttaaactcgggaggcggacttagcgaggagctgggcagcgcccgaaggagtggcgaggtaacccttactaagggtgatcccggttcgctcgaggaatgggagactgtagttggcgatgacttcagtctttactatgacagctattctgtggacgaaagggtggacagcgactcaaaaagcgaagtggaagccttgacagaacaattaagcgaagaagaggaagaggaggaagaggaggaggaggaggaggaggaggaggaggaagaggaggaggaagaggaggatgaagagagtggcaaccaatccgatagatctggatcatcaggccgtaggaaggccaagaaaaagtggcgtaaagattctccttgggtcaagccgtccagaaaacgcagaaaacgtgagcctcctagggccaaagaacccagaggggttaacggcgtcggatcatctggccctagcgaatatatggaggttccacttggctctctcgagcttccaagcgaggggactctcagtcccaaccacgctggagtaagcaacgatacatcttcgttagagaccgaaaggggatttgaggagttgccattgtgctcctgccgtatggaagccccaaagatcgataggatttccgaaagggctggacacaaatgtatggccactgagtccgtggatggcgagctcagtgggtgtaacgccgcaatattgaagagggaaaccatgcgacctagtagccgcgtggccctaatggttctgtgcgaaacccaccgagcccgtatggtgaaacatcattgctgccccggttgcggctatttctgcactgcaggcacattcttggaatgccaccctgatttccgtgtcgcgcatcgctttcacaaagcgtgcgtcagccaactgaacggcatggtcttttgtccacattgcggagaggacgcatcagaggcccaggaagttacgatcccaaggggagacggggtgaccccccctgctggcactgccgctcccgcacccccaccactttcacaggacgtgccaggtagggccgatacatcccagcccagcgctcgaatgagagggcatggagaacccaggcgaccaccctgtgatccactcgctgacactatcgacagcagcggcccaagtctcacccttcccaatggaggctgtctgtccgccgtcggactgcccctcgggcctggtcgcgaagcactggaaaaagctctcgttatacaggaatctgaaagacgcaaaaaactgaggttccaccctcggcaactgtatctgtccgttaagcagggagaactccaaaaggtgatcctcatgttgctggataatctcgaccctaatttccagtccgaccaacagagcaagaggactccgcttcacgctgccgctcagaaagggtccgtagagatctgtcatgttctgctccaggcaggcgctaacatcaacgctgtggataaacaacaaagaacaccgctcatggaagctgtcgtgaataaccacctcgaagtggcacgttacatggtgcagagaggcggatgcgtttacagcaaggaagaggacggatcaacatgtctgcatcacgccgcaaaaataggcaacctcgagatggtctcattgctcctcagcacagggcaagtagatgtgaatgcccaagattctggaggttggacgccgattatttgggcggctgaacacaaacacatcgaagtgatccggatgttgctgacaagaggtgcagatgtgactctgactgacaacgttagcgagagattagtcgaggaggaaaatatctgtctgcactgggcctcttttaccggcagcgcggcaatcgctgaggttctgctcaacgcaagatgcgatctgcacgccgtgaattaccatggggacacacctctgcacattgcagcgagggaatcctatcacgactgtgtccttctctttctgtcacggggtgcaaatcccgaactgcggaataaggaaggcgacactgcctgggatctgacacctgagcgcagtgacgtgtggtttgccttacagctgaatcgcaaacttaggctgggcgtgggcaatcgagcaatccgtaccgagaaaataatctgccgggatgtggcgagaggttacgaaaacgtacctataccttgtgtaaatggggtggatggcgaaccctgcccagaggattacaaatacatcagcgaaaattgtgaaaccagcactatgaacatcgaccgaaacattacacacctgcaacactgcacctgtgtggacgactgttctagttccaactgcttgtgcggccagctgtccattcggtgctggtatgacaaggacgggaggctgctgcaggagttcaataagatcgagcccccactcatttttgaatgcaatcaggcttgtagttgctggagaaactgtaaaaatcgagtcgtacagagcggcattaaggttcgcttgcagttgtatcgaacagccaaaatgggatggggagtcagggcattacagacaattccccagggcacctttatctgtgagtatgtgggtgaactgatttctgacgcggaggccgatgtccgcgaagatgacagttacctctttgatctcgacaacaaagatggagaggtctattgcattgacgcacgctactatggcaatattagtcggttcatcaaccacctgtgtgacccgaacatcatccccgtgcgtgtgtttatgctccaccaagatcttaggtttccccgtatcgcctttttcagctctcgagatattcgcacgggcgaggaattagggttcgattacggggatcgattttgggatattaaatccaaatacttcacgtgtcagtgtggctcagaaaaatgcaaacattccgcagaagccatcgccctggagcaatcccgcctggccagacttgatcctcaccctgaactgcttcctgagctcggaagcttgccacccgtcaacacctag

SEQ ID NO: 222369 - DNA, 3702 bp, synthetic construct
  misc_feature 1..3702: note = Description of Artificial Sequence: Synthetic coding sequence
  source 1..3702: mol_type = other DNA
atgcgaggactccccaggggaagggggctgatgcgggctcggggaagagggagggccgctccccctggcagtagagggagggggagagggggtcctcataggggccgaggtagaccacgtagtctgttgtctttaccaagggcacaagccagctggactcctcagttgtctacaggtctcaccagccctccagtcccttgcttaccatcccaaggcgaagcaccggcagagatgggcgctctgcttttggagaaggagactcggggagcaaccgagcgcgttcatggaagtctcggcgatactccacgcagcgaggagacattgccgaaagccacccctgacagcttagagcccgctgggccatcctcccccgctagtgtgacagtgaccgtgggagacgagggagcagacacccctgtgggtgctactccgctcatcggagacgagtctgagaatttagagggtgatggcgatttgagaggtggccgaatactattgggccacgccacaaagtcattcccatcctccccctcgaaaggtggaagctgtccctcccgtgccaaaatgagcatgaccggggctggtaaaagccccccttctgtgcaatctcttgcaatgaggctgctgtcaatgccgggagcccagggtgctgccgctgccggatccgagccgccacctgctacaacctcccccgagggccagcccaaggtgcaccgggctaggaagaccatgtcaaaacctggtaacggtcagcctcctgtccccgagaaacgccctcccgaaatccagcactttagaatgtcagatgacgtgcattccctgggcaaggtaacctctgatctcgctaagagacgaaaacttaatagtggaggtgggttgtccgaggaacttggttctgcacgcagatcgggggaggtgacccttaccaaaggcgatcccggttccttagaagaatgggagaccgtggtgggcgacgacttttctttgtactacgatagctactcggtggatgaacgtgttgacagtgatagtaaaagcgaagttgaagctttgactgagcagctgtccgaggaagaggaagaagaagaggaggaggaagaggaggaggaagaggaagaggaagaggaagaggaggaagaggacgaggagtccggcaaccaatcggatcgttccggaagcagcgggaggaggaaggctaaaaaaaagtggcgtaaagattccccctgggtgaaaccttctagaaaaagaaggaaacgcgaacctccccgtgccaaagagcccagaggcgtttccaatgacaccagctccttggaaacagagcggggtttcgaagaattgccactgtgttcttgtaggatggaagctccaaaaatcgatcgaatctctgaacgcgcaggccataagtgtatggcaaccgaatccgtggacggagaactgtccggctgcaatgccgctatcctcaaacgcgaaaccatgaggcccagctcaagggtagccctgatggtgctctgcgaaacacacagggcccgaatggtaaaacaccattgttgccccggttgcggttatttttgcactgcagggaccttcctggagtgccatccagacttcagggttgcccatagatttcacaaggcatgtgtgagccagcttaacggaatggtgttttgccctcactgcggcgaggatgcctctgaagctcaggaggtcacaatacctcgtggggacggcgtgacaccccctgcaggcaccgctgctcccgctccacctcccctaagccaggacgtaccaggacgggcagatactagccagccatctgcgaggatgcgaggccacggggagccacggagaccaccctgcgatccgttagccgacaccatcgacagcagtgggcctagcttaaccttgcccaacggtggatgtttaagcgccgtcggactgcccctcgggccaggcagagaggcactggagaaggccctggtcatccaggaaagtgaaaggaggaagaagctgcgtttccaccctcgtcagctttacctcagcgtcaaacagggagaactccagaaggtgatattaatgctccttgataatctggacccaaacttccagagcgaccagcagtcaaagagaaccccgctccacgccgctgcacagaaagggagtgtggagatctgccacgttctgctgcaggcaggtgctaacatcaacgccgtggataagcagcaaaggactccactaatggaagctgtggtgaacaatcatctggaggtggcacggtatatggttcagagaggcggttgcgtatattccaaagaggaggatggatctacctgtctgcaccatgccgctaaaattggaaatctggagatggtcagcctgcttttgagcactgggcaggttgacgtgaacgcgcaagacagcggaggttggactcctattatctgggctgccgagcacaagcacatcgaagtgatcagaatgttgcttacaaggggtgcggatgtgacgctgaccgacaacgaggaaaatatttgcttgcattgggcctccttcaccggaagcgctgcgattgctgaagtgctactcaacgccagatgtgacttacacgctgttaactatcatggcgacacaccgctacatatcgcagccagagaatcctaccatgactgcgttcttctgttcctgtctaggggcgcaaatcctgagttaaggaataaagaaggagacaccgcttgggacctgacgcccgagcgaagcgacgtgtggttcgctctgcagctgaaccgaaagctgcggctcggagttggcaatcgtgctattcgcacagagaagattatctgccgcgacgtcgccagaggatacgagaacgtgcctatcccatgtgtcaatggggtcgatggtgagccctgccctgaggactacaagtacatcagcgagaactgtgaaacctcaacaatgaacattgatcgtaatataacccacctgcagcactgcacctgtgtggatgattgttcctcctctaactgcctttgtggacaattgagcatccgatgctggtatgacaaagacgggaggttgcttcaagagttcaacaaaattgagccaccccttatatttgagtgtaatcaggcctgctcttgctggaggaactgcaaaaatcgcgtcgtgcaatctggcatcaaagttcgactgcaactttaccgaaccgcaaagatggggtggggggtgcgtgctctgcaaactattccacaggggacatttatctgtgaatatgttggagaattaatttcggacgccgaggccgatgtcagggaagacgattcttacctgtttgacctcgataacaaagacggtgaggtgtattgtatcgatgctaggtactacgggaatataagccgcttcatcaaccacctgtgtgacccaaacatcattcctgtgagagtgttcatgctccaccaggacttaaggtttcctcgcatcgcctttttttcaagtcgcgacattcgcacgggcgaggaactcgggttcgattacggggatcgcttttgggacattaaatccaaatacttcacttgccaatgcggttctgaaaaatgcaagcactcagctgaggcaatcgcacttgagcaatccaggcttgccagactcgacccccatccggaactcttacccgagttaggctccctccctccagttaacacgtag

SEQ ID NO: 222370 - DNA, 3804 bp, synthetic construct
  misc_feature 1..3804: note = Description of Artificial Sequence: Synthetic coding sequence
  source 1..3804: mol_type = other DNA
atgcgcggtctacctcgcggtcgtggcctcatgagggctcggggaaggggcagggcagcacctcctggtagccgcggtcgagggcgtggagggccacacagaggacggggtcggcctaggagtttgctctcactccctagagcacaagccagctggacgcctcagctgtcgacaggcctgacttctcctcctgtgccttgcttgccatcacaaggtgaggcacccgcagagatgggggctctgttgctggagaaggagacccgcggagcaactgaaagagtccacgggtcgttgggagacacccctcgtagtgaggaaacactgcctaaggccaaccctgactcactggaaccggcaggaccatcgtcccccgcatcagtcacagtgaccgttggtgacgaaggagcagacactcctgtcggggcaacaccactcatcggggatgagagtgagaatctcgaaggtgacggggacctgcgcggtggtaggattttactagggcacgccacaaagtctttcccctcatccccgagtaaaggtggatcatgcccttcaagggctaaaatgtctatgactggggctggaaaatcaccccctagcgttcagagtttggctatgagattactgtctatgcctggagcccaaggtgcagctgccgctgggtctgagccacctcctgccacaacatctcctgaaggccagccaaaagtccatcgggcacggaaaaccatgtccaagcctggtaacggacaacctccagttccagaaaagagaccacccgagatacaacactttagaatgtcagatgatgttcacagcctgggaaaggtaaccagcgacctggcgaagaggagaaaattaaactccggtggaggtctctcggaggaattgggctctgcgcgtcggagcggcgaggtgaccctgaccaaaggtgacccaggatctttagaagaatgggaaactgttgttggagacgattttagcctctactatgacagttactctgtggacgagcgggtcgactccgattcaaagtcggaggtggaggctcttaccgagcaactctctgaggaggaggaggaagaagaggaagaggaggaagaggaggaggaggaggaagaggaagaggaggaggaagaggatgaagaatcgggcaatcaaagtgacaggtccggcagctcaggaagacgaaaggctaaaaaaaaatggaggaaggacagcccttgggtgaaacccagtcgcaagaggcggaaaagagaaccaccaagggccaaagaaccacgcggtgtaaatggcgtgggctctagtgggcctagcgaatacatggaggtgcccctggggagcctagaactcccgtccgaggggaccctgagtccgaatcacgctggagtgtcaaacgataccagctcactggaaacagaacggggatttgaggagcttccactgtgtagctgtagaatggaagcgcctaagattgatcgcattagcgagcgggctggccataaatgtatggcaaccgagtccgtggatggagagctgtccggctgtaacgctgcgatcctgaagagagagaccatgcgcccatctagccgcgtggccctcatggtgttgtgcgagactcaccgggctagaatggtaaagcaccattgctgtccaggttgtggatacttctgcactgcagggacatttctcgaatgccaccccgacttcagggtggctcaccgtttccacaaggcctgcgtctcccagctgaatgggatggttttttgccctcattgtggcgaggacgccagcgaagcccaggaggttactatacccagaggggacggagtcactcccccagcgggtaccgctgctccggctccccctcctctcagccaggatgtaccaggaagagccgacacctcacagcctagcgccaggatgcgaggccacggagagccacggagaccgccatgcgatcccctggcagacactatcgattccagcggtcccagccttacgctacctaacggcggttgcctcagcgccgttggcctgccacttggaccgggacgggaggctttggagaaagcactggtaattcaagagtcagagagaaggaagaaattaagattccaccccaggcagctctacctaagcgtcaagcagggcgagctgcagaaagtgattttgatgcttttggataacctggaccccaactttcagtcagaccagcaatccaaacggaccccattacatgctgcagcgcagaaaggttctgttgaaatttgccatgttctactgcaggccggagcgaacataaatgccgtcgataagcagcaacgcacaccgctaatggaagctgttgtgaacaaccacctggaagttgctagatacatggttcagcggggtggttgcgtatacagcaaggaggaagacggtagcacctgtctgcaccatgcagccaagatcggtaatttagagatggtctctctgttacttagtactggacaggtggacgtcaacgcccaggacagcgggggttggacccccatcatttgggctgccgaacacaaacacattgaggtcataagaatgttactcacacggggagcagatgtgaccctgactgataacgaggaaaacatctgtttgcactgggcttctttcaccggctctgcggctatcgcagaagtgctactgaacgccagatgcgatctgcatgccgtgaactatcatggggatacccccctccacatcgccgcaagggaatcatatcatgactgtgttctgctgttccttagtagaggcgctaatccggagctccgaaacaaggagggagacacagcttgggatttaacaccagagcgtagtgacgtgtggtttgctctgcagctgaataggaaactgaggctgggagtagggaacagggcgatccgcaccgaaaagattatatgccgtgatgtggctcgcggttatgaaaatgtgcctattccttgcgtgaatggagtggatggagaaccctgccccgaggactacaaatatatttcggaaaactgtgaaactagcacaatgaacattgacagaaacattactcacttgcagcattgtacatgcgtcgacgattgtagttcaagcaattgcctgtgcggtcaattatccattaggtgttggtacgacaaggatggccgactgttgcaggagttcaacaaaatcgagccaccactgattttcgagtgcaatcaggcctgctcatgttggagaaattgcaaaaaccgagtggtccagagcggaattaaggtgaggttgcagctctatcggaccgctaagatggggtggggtgtaagggcgttgcagaccatcccacagggcacattcatttgcgagtatgtgggggaactgatctctgacgcagaagccgatgtgagggaggacgattcttacttgtttgacctggacaacaaagacggagaggtgtattgcatcgacgctagatattacggcaacatttcgcgtttcatcaatcacttgtgcgatccaaatatcatcccagtgcgagtgttcatgctccaccaagaccttaggtttcccagaatcgcattcttttctagccgcgacattcggacgggcgaggagttaggctttgattatggcgaccgtttttgggacatcaaatcaaaatacttcacctgtcagtgtggctccgaaaaatgcaagcatagtgctgaggccatcgcactcgaacagagccgactagccaggctcgatccccatccggagctgctgccggaactcggttcactgccacctgttaatacttag

SEQ ID NO: 222371 - DNA, 897 bp, synthetic construct
  misc_feature 1..897: note = Description of Artificial Sequence: Synthetic coding sequence
  source 1..897: mol_type = other DNA
taatcaaagaggacgcctctgcacgctgccgcacagaaagggtctgtggagatctgtcacgtactcctgcaggcaggcgctaatattaatgccgtagacaaacagcagaggactccgcttatggaggccgtggtaaacaaccacctggaggtggccaggtacatggtgcagcgcggtggttgtgtttacagtaaggaagaagacggatccacatgtctccatcacgctgctaaaattggcaaccttgagatggtttcactgctcctgagcaccggccaagtcgatgtgaatgcccagggtcagcttccccctccttccctgcccagccaccctcaggactctggcggttggactcccataatttgggctgcggaacacaagcacatcgaggtcatccgcatgcttctgacgagaggagccgatgtcaccctcactgacaacgaggagaacatttgcctacattgggctagcttcacaggctccgctgctatagccgaggtccttctgaatgcacggtgcgacctccacgcagtgaattaccacggggacacacctctgcacattgccgcaagggagagttatcacgactgtgtgctcctcttcctctcccggggagccaaccctgagcttagaaataaggaaggtgacacagcctgggacctcacacccgagaggtccgatgtttggttcgccctccaactgaataggaagctgcgtctcggggttggtaaccgagctattagaaccgaaaaaatcatatgtcgggatgtggcaagaggctacgaaaacgtcccgatcccctgcgtgaatggagtggacggcgagccatgccccgaagactataaatacatcagcgaaaattgcgagacctccaccatgaatatcgataggaactag

SEQ ID NO: 222372 - DNA, 897 bp, synthetic construct
  misc_feature 1..897: note = Description of Artificial Sequence: Synthetic coding sequence
  source 1..897: mol_type = other DNA
tgaagcaagagaactccgctgcatgccgcagcgcaaaaagggtccgtggagatctgccacgtccttctgcaggcgggagccaacattaatgcagtggataagcagcagcggacaccattaatggaggccgtcgtgaacaaccatctcgaggtggctaggtacatggtccagcgcggtggctgcgtgtatagcaaggaggaagatggctccacttgtcttcaccacgctgccaaaatcggcaatttggaaatggtgtccctcctgctctcaactggccaagttgatgtaaatgcccagggacagctcccccctccgagcctcccctcccaccctcaggactccggtggatggacccccattatatgggccgcagagcacaagcatatagaggtaattaggatgctgcttactcgcggagccgatgtcacattgactgacaacgaggagaacatctgcctgcattgggcttcattcactggttcagctgctatcgcagaggtgctgttgaacgcccgatgtgacctgcatgcagtgaactaccatggagatacaccactgcatattgccgctcgcgagtcataccatgactgcgtgctgttattcctgtctcgaggtgctaaccccgaactgcggaacaaagaaggcgatactgcctgggatctgacaccggaaaggtcagatgtatggtttgctcttcaacttaatcgtaaactccgtttgggagtaggcaatagggccatcagaaccgagaaaattatttgcagagacgtcgcgagaggatatgaaaacgtgcctataccgtgtgtgaacggagtggacggggaaccttgccccgaggactataagtacatctctgaaaactgcgaaaccagcacaatgaatatagaccggaactag

SEQ ID NO: 222373 - DNA, 3633 bp, synthetic construct
  misc_feature 1..3633: note = Description of Artificial Sequence: Synthetic coding sequence
  source 1..3633: mol_type = other DNA
atggccgctgccgctggcgctgcagccgcagccgctgctgaaggcgaagctcccgcagagatgggggcactcctccttgagaaggaaactagaggagctactgagagggtgcacgggagcctcggggacactccgagaagtgaggagacactgccaaaagcgacccctgactccctggaaccggcaggcccatcatccccggcaagcgtgacagttaccgttggcgatgagggagctgacacccccgtgggcgctacaccattgattggtgatgagagcgaaaacctcgagggggacggagacctccgtggtgggcgaatcctgttgggacacgcaaccaaatcctttccgtcctcaccctccaaggggggatcttgcccctcgagagccaagatgagcatgactggagcaggcaagtccccaccatccgtccagagtctggcaatgcgcctcctcagtatgcctggcgctcagggggctgctgccgctgggagtgaacccccaccagcaaccacaagcccagaggggcagcctaaggtgcatagggctaggaagacaatgagcaagccaggcaacggacaacccccagttcccgagaagaggcctccagaaatccagcacttccgcatgagcgacgatgtgcattccctggggaaggtgacgtccgatctcgcaaagcggcgaaagctgaacagcggtggtggattatccgaagaactgggctctgcacgacgttcgggcgaggtcactctgaccaaaggggatcctggcagcttggaagaatgggaaactgtagtgggcgatgacttttccctctattatgattcatatagtgtcgatgaacgtgttgatagcgactctaagagcgaagtcgaggccctcacagaacagctgagcgaagaagaggaagaagaggaggaggaggaggaggaagaggaagaagaagaagaagaggaggaggaggaggaagatgaggagagcggaaaccagtccgaccggtcaggatctagcggcaggcgaaaagctaagaagaaatggcgcaaggattctccttgggtgaagccttctcggaaacgcagaaagagggaaccaccacgcgcaaaggaaccaaggggagttaacggtgtggggtccagtgggccttctgagtacatggaggttcctttggggtctttagagttgccgtcagaagggacgctcagccctaaccacgctggagtgtcaaacgatacgagctccctcgagaccgaacggggttttgaggagttgcctttgtgctcttgtaggatggaggcccctaaaatagaccgcatatctgagcgcgctggacataaatgtatggcgacagagtccgtagatggcgagctgtcaggctgtaatgccgctattttgaagcgcgaaacaatgagacctagcagtcgtgtagcactgatggtactctgcgaaacacacagggcacgcatggtcaagcaccattgctgccccggttgcggatacttctgtacagcgggaacattcttagaatgccatcctgacttcagagtagctcatcggttccacaaagcatgcgtctcccaattgaatggcatggtcttttgtccacattgcggggaagatgcctccgaggcgcaggaggtgacgatcccacgcggtgatggtgtgacccccccagctgggacggctgccccagcaccccctccgctcagtcaggacgtgccaggtcgcgctgacaccagccagccatccgcgagaatgaggggtcatggtgagccgagaagacccccttgcgatcctcttgctgatacaatcgattcctcagggccttctttgactctgcctaacggcggttgcctgtctgctgtggggttgcccttgggcccaggtcgggaggctctcgagaaagcgttagtcatccaagagtctgagcgcaggaaaaaactgcgctttcacccaaggcagctgtacctgagcgtcaagcagggggaactgcaaaaagtcatcctgatgcttctcgataaccttgaccccaatttccagagtgaccaacagtctaagcggacacctctgcacgcggcagcacagaagggttctgtggagatctgtcatgttttactccaagcgggagccaatataaatgccgtagacaaacagcaacgcacccccctgatggaagcggttgtgaacaaccacctggaggtggcgagatacatggtccagagaggtggctgcgtttacagcaaggaggaggacgggtctacttgccttcaccatgcagccaagatcggtaatctggagatggtgagtcttttattgtctacggggcaggtggacgtcaacgcccaggacagtggaggctggaccccaatcatctgggccgctgagcataagcacattgaagttatccgcatgcttctgactaggggggcagatgtgactctgactgacaatgaggagaacatatgtttgcactgggcatcatttaccggcagtgcagctatcgcagaggtccttctcaacgccaggtgcgacttacacgctgtcaattaccacggtgacacaccacttcacattgctgcaagggagtcgtaccacgattgtgttctgcttttcctcagcaggggtgccaatccagagctgaggaacaaagaaggcgacacagcttgggatcttactcccgaacggtctgatgtctggttcgcccttcagctcaaccggaagctccggcttggggtcggcaacagagccattagaaccgaaaaaattatctgtcgggacgtggcacgagggtacgagaatgtaccaataccttgcgttaatggcgtggatggcgaaccctgcccagaggactataagtatatttcggagaactgtgaaacatcgacaatgaatattgacaggaacattacacatctgcagcactgcacctgcgtggatgattgtagctcgagtaactgcctgtgcggccaattatctatccgctgctggtatgataaggatggcagactgcttcaggaatttaacaagattgagcctcctctaatcttcgaatgtaaccaggcatgcagctgttggcgaaactgtaagaatcgtgtagtacagtctggcataaaggtacggctgcaactctataggaccgcaaaaatgggatggggggtgcgcgctctacagacaattcctcaggggacatttatatgtgaatacgtgggggagctcatctctgacgccgaagctgacgtgcgggaggacgacagttacttgtttgacctcgataacaaggacggggaagtgtactgcatcgatgcacgatactatgggaacatctcccgtttcatcaaccacctgtgtgaccccaacattatccctgtgagggttttcatgctgcatcaggatcttcgtttcccgaggattgcatttttttcttcgagggatatcagaacaggggaggagctgggcttcgattacggtgatcggttctgggacatcaaaagtaaatatttcacctgtcagtgcggatctgagaaatgcaagcacagcgccgaagctatcgcgctggaacagtcccggctagctcgcctggacccacacccagagctgttgccggagctaggctctctgccgccagtgaatacctag

SEQ ID NO: 222374 - DNA, 3531 bp, synthetic construct
  misc_feature 1..3531: note = Description of Artificial Sequence: Synthetic coding sequence
  source 1..3531: mol_type = other DNA
atggcagcagccgctggcgctgctgccgcagccgcagcagagggcgaggcgcctgccgagatgggggcactcctgctggaaaaagagacgagaggcgctacggagagagtgcatggttctctgggggacacgccacgaagtgaggagacattgcctaaagcgacccccgactcactcgagcctgctggcccatctagtcctgcctccgtcactgttaccgtcggcgacgaaggggcagatacacctgtaggtgccacacccctgattggtgatgagagtgagaacctggaaggcgacggcgacttgaggggaggtaggatcctgctcgggcacgctacgaaatccttcccgtcttctcctagtaaggggggtagctgcccatcccgcgctaaaatgagtatgactggcgcaggaaagtcgcccccttcagtgcagagcctcgccatgaggttgttgtcgatgcccggtgctcaaggcgcagcagccgctgggtccgagcctccgcctgctactacttctcctgaaggccagccaaaagtgcacagggccagaaaaaccatgtcaaagccgggtaacggccaaccaccagttcccgaaaaacgccctcctgaaattcaacatttcaggatgtccgacgatgttcactctcttggcaaagtgactagtgacctggcaaaacgtcgtaaattgaatagcgggggagggttatctgaggagctgggaagcgccagacgatctggagaggtaacacttaccaagggagatcccggttctttggaagagtgggagacagtcgtcggggatgacttctctctgtattacgatagttatagcgtggatgagagagtcgacagtgactctaagtccgaggttgaagcgcttactgagcagctatccgaagaggaagaggaggaggaagaagaggaggaagaagaggaagaggaagaggaagaggaagaagaggaggaggatgaagaaagcgggaatcagagcgatcgctccggatccagcggcaggagaaaagcaaaaaagaagtggagaaaagattccccctgggtcaagcctagtcggaagagacgcaaaagggaacccccaagggcaaaagagccccgaggcgtcagtaatgacacatcatctttagaaaccgaaagaggctttgaggagctgccactgtgctcctgcagaatggaggctccaaaaattgaccgcatcagcgagcgtgccggacacaagtgcatggcaactgagagtgtggatggggaactgtccggatgcaatgctgcaatcttaaaaagagagaccatgcggcctagcagcagggtggctcttatggtgctctgcgagacccacagagccagaatggttaagcatcattgttgtcctggttgcggatacttctgtaccgcaggaaccttcctggagtgccacccagacttccgggttgctcatagattccacaaggcatgtgtgagccagctgaacgggatggtcttctgcccccactgtggtgaagacgcctctgaagctcaggaagtgactattccaagaggcgacggagtaacacctccagcaggaaccgcagccccagctccccctcccttaagtcaggacgtgcccggacgtgccgacacttcacagcccagcgcccgtatgcggggacatggtgagcctaggaggcctccttgcgatccactcgctgacacaatagactccagtgggccatccctcacattgcctaacggcggatgcttgtccgcagtggggcttccactgggtcctggtagagaggccctggaaaaggccctggtcatccaagagagcgaacggaggaagaaacttcggttccaccctcggcagctgtacctcagcgtgaaacagggagagctgcagaaggtgatactgatgctgttggataatctcgatccaaatttccagtccgatcagcagagcaaaagaaccccgctccacgccgcagctcagaaaggatctgtggagatctgccacgtgctgcttcaggctggagctaacatcaacgcggttgacaagcagcaacggaccccactgatggaggcggtagtcaacaatcatctagaagttgcgaggtacatggtgcagcggggtgggtgtgtatattccaaggaggaagatggttctacctgccttcaccacgctgctaaaatagggaacctggagatggtgagtctcttactctccacggggcaggtggatgtgaacgcacaggacagcggcggttggacaccaatcatctgggccgctgagcataagcacatagaggtaatcaggatgctgcttactcgcggagcagatgttacactgacagataacgaggagaacatctgccttcactgggcctctttcaccggctcagcagccattgccgaggtgctgttaaacgccagatgtgacttgcacgccgtgaactatcatggcgacactcccttgcatattgccgcaagagaaagctatcacgattgcgttctcctctttctctcccgcggtgcaaaccctgagcttaggaataaagaaggcgacacagcttgggatctcacgcccgaaagatctgacgtctggtttgccctgcaactgaacaggaaactgaggctgggcgtgggcaatagagccattagaaccgagaagatcatctgtagagacgtggccaggggctacgaaaacgtgcccattccatgtgtgaatggcgtggacggagagccatgtccagaagactataagtatatctctgagaattgcgagacctctacgatgaatattgatagaaacattactcatctccaacactgcacctgcgtggacgattgttcatccagtaactgcctttgtggacagctgtccatccgctgctggtatgataaagacgggagacttctgcaggagtttaataagatcgagcctcctttgatcttcgagtgcaaccaggcctgcagttgctggagaaactgtaaaaaccgggtggtgcaaagtggaatcaaggtgagactccaactgtaccggacggcgaagatgggctggggagtgcgggcactgcagacgattcctcaaggaacatttatctgcgaatacgtgggtgaactgatctccgacgctgaggcggatgtacgggaagacgactcttacctctttgatttggacaacaaagacggggaagtgtattgtatcgacgccagatactatggaaacatctcccgttttattaaccacctgtgcgaccctaacatcattcctgtccgcgtatttatgttgcaccaggatctgcgtttccctcgaatcgcttttttctcctcccgcgatattcggacaggtgaagaactcgggtttgactacggggatcgcttctgggatattaagagtaaatacttcacatgccaatgtggatcagagaagtgtaagcattcggctgaagccattgccttggagcagagcaggctggcccgtctcgaccctcacccagagctcctgccggaactgggttctctgccaccagtgaatacttag

SEQ ID NO: 222375 - DNA, 3702 bp, synthetic construct
  misc_feature 1..3702: note = Description of Artificial Sequence: Synthetic coding sequence
  source 1..3702: mol_type = other DNA
atgagaggtctgccaaggggtagaggcctgatgagagctcgcggtaggggacgcgctgctcccccagggtctaggggtagaggccgaggcggacctcaccggggacgcggaagaccacgctcactgctgagccttccacgggcacaggcatcttggactccgcagctgtccacggggctgaccagccccccagtaccgtgtctgccttctcagggcgaagctcccgctgaaatgggcgcactgttgctggagaaggagacccgcggagcaaccgagcgcgtccatggttctctcggagatacaccaagatctgaggaaaccctgccgaaagcaaatcctgactccctggagccagccggtccaagtagcccagctagcgtaactgtgaccgttggggatgaaggagctgatacaccagtcggcgctaccccactcatcggcgacgagtccgagaacctggagggcgatggcgacttgcggggtggacggattttgctggggcatgcaacgaaatccttcccttcttcgccgagcaaagggggatcttgtcccagtcgggctaagatgagcatgaccggagcaggcaaaagcccaccatcggtccaatctcttgccatgcgcctgctgtccatgcccggagcacagggtgcagctgccgctggaagtgagccccctcctgcaaccacctcccctgagggccaacccaaggtgcacagagcacgtaagacaatgtctaagcccggtaatggccagccgccagttcctgagaaaagaccaccagagatacagcacttccgaatgtctgatgatgttcactccttggggaaggttacatctgaccttgcgaaaaggaggaagctgaatagtggcggaggtttgagtgaagaactaggcagcgccagacgctcaggggaggtgactttgactaagggggatccgggaagtctagaagagtgggagacagttgtgggagatgatttttctctatactacgattcctactccgtggatgaacgcgtggatagcgactcaaaatcagaggttgaggccctgacagagcagttgtctgaggaggaggaggaagaggaagaagaagaggaggaggaagaggaggaggaagaagaggaggaggaagaagaggacgaggaatccggcaatcaaagtgatcggtccgggtcatcagggcgacgtaaagctaagaagaagtggcggaaggattcaccatgggtgaagccttcccgtaaacggcgaaaacgagagcctccacgagctaaggagccacgcggagtgtccaacgatactagctctttggagaccgagaggggattcgaggagctgccgttatgctcttgtaggatggaggccccaaagattgaccggatctctgaacgggctggccacaagtgcatggcgaccgagagtgtcgacggcgaactgagcggctgcaacgctgcaattttgaagagggaaacaatgcggcctagctcgagagttgctttgatggttctgtgtgaaacgcacagggcgaggatggtcaagcaccactgctgccctggctgtggttatttttgtaccgccggtacttttttagaatgccatcctgactttcgggtcgctcatcggttccacaaggcatgcgtgagccagttgaacggcatggtcttttgcccacattgcggagaggatgccagtgaagcccaggaagtgaccattcctaggggagatggcgtgacacccccagctgggacggccgctccagcgccacccccactgagccaggatgtgccaggaagagctgacacatctcaaccctccgcaagaatgagagggcacggcgaacctcgaagacctccctgcgatcctcttgcagacacaattgacagtagtgggcctagcctgacattgccgaatggtggctgcctctccgccgtgggcttgcccctaggcccaggccgtgaagccctcgaaaaagcgcttgtaatccaggaatctgagcggagaaagaaactgcgatttcaccccaggcagctctacctctcagttaaacagggcgagctccagaaagtgatactgatgctcctggacaatctggatccgaatttccagagcgaccaacaatctaaaagaacaccactgcatgccgcagctcaaaagggcagtgtcgaaatctgtcacgtacttcttcaggctggtgcgaatataaacgctgtcgataagcaacagcgaacccctctgatggaggccgttgtgaataaccatctggaggtcgccaggtatatggttcagcgcggagggtgtgtgtacagcaaggaggaggacgggtccacgtgcctccaccacgctgcaaaaatcgggaacctggagatggtgtctctgctattgtcgaccgggcaagtcgatgttaatgcgcaggatagcgggggatggactcccatcatctgggccgcagaacacaagcacattgaggttatcagaatgctgctgacacggggagctgatgtgaccctcactgacaacgaggaaaatatttgcttgcattgggcatcatttactggatccgcagcgatagctgaagtcctgttaaacgccaggtgcgacctgcatgctgtgaattaccacggcgacacccccttgcacatagccgctagggagagttatcacgactgcgtgctacttttcctctcaaggggcgctaacccagagctgaggaataaggagggtgacaccgcatgggacctcacaccagaacggtctgacgtgtggtttgcacttcagctaaatagaaagttgaggcttggagtagggaatagggcaattcgcaccgagaaaatcatttgccgggatgtggccaggggctacgaaaatgtgcccataccctgtgtgaacggggtggatggggagccttgccccgaggactacaagtatatcagcgagaactgtgagacatcaacaatgaatatcgaccgcaacattacacacctccagcattgcacctgcgtagacgactgttctagtagcaattgcctgtgcggccagctatctataaggtgttggtatgacaaagacggacgtctgctgcaggagtttaataagatcgaaccccctctgatctttgagtgcaatcaagcctgttcctgttggcgtaattgtaagaatcgggtggtccagtccggcattaaagtaaggctacaactgtaccgcaccgcgaagatggggtggggggtgagggcgctgcagacaatcccccagggcactttcatttgtgagtacgtgggcgagctgattagcgatgcggaagctgacgtgcgcgaagacgactcgtacctgttcgatcttgacaataaggatggagaagtctactgtatcgatgccagatattacggcaacatctcacggtttataaatcacctctgcgatcccaatatcataccagtgcgggtgtttatgctgcaccaggacctgagattcccccgtatcgcgtttttcagctcccgggacatccggaccggcgaagagctggggttcgattacggagacaggttttgggacataaaaagcaagtactttacctgccaatgcggtagcgagaaatgtaaacactccgctgaggccatcgcacttgagcagtctcgactggcacggcttgacccgcacccagagctgttgcccgagttgggctccctcccgcctgtgaatacgtag

SEQ ID NO: 222376 - DNA, 897 bp, synthetic construct
  misc_feature 1..897: note = Description of Artificial Sequence: Synthetic coding sequence
  source 1..897: mol_type = other DNA
taatctaaacgcactcccctacacgcagccgcacagaaggggtctgtggaaatatgccacgtgttgttacaggccggagccaacatcaacgccgtcgataaacagcaaaggaccccactgatggaggcagtcgttaacaaccatctggaagttgccaggtacatggtccagaggggaggatgcgtgtactcaaaggaagaggacgggagtacatgtctacaccatgccgcaaagattggaaatcttgaaatggtaagcctactgttgtcaaccgggcaagttgatgtcaatgcacagggtcagctcccccctccatccctgccatctcaccctcaagattcagggggatggaccccaatcatctgggctgcagagcacaaacacatcgaagtgatacgcatgctgctgacgcgcggtgctgacgttactctgacagataatgaagaaaatatctgcctgcactgggccagcttcactggttctgcagctattgccgaagttctgctcaacgcaagatgtgacctacacgccgtgaattaccacggggacacccctctgcatatcgccgctagagaatcctaccatgattgcgtgctcttattcttgtctcggggagcaaaccccgagttaaggaataaagaaggtgataccgcatgggacctgaccccggaaaggtccgatgtttggttcgcccttcagcttaacaggaagttaagactgggcgtcggaaatagagcaatccgtaccgagaaaatcatatgtagggacgtcgccagagggtatgagaacgtgcccattccctgcgtcaacggtgtggatggcgaaccatgtcctgaagattacaagtatatcagtgagaactgtgagacgagtaccatgaatatcgaccgtaattag

SEQ ID NO: 222377 - DNA, 3531 bp, synthetic construct
  misc_feature 1..3531: note = Description of Artificial Sequence: Synthetic coding sequence
  source 1..3531: mol_type = other DNA
atggccgcagccgctggagccgcagccgcagctgccgctgagggcgaggctcctgctgaaatgggagccctgcttctggaaaaggagacccgcggtgccacagaacgcgtgcatggcagtctgggggatactcctcggagtgaagagactctgcccaaagccaaccccgatagccttgaacctgctgggcctagctcgccagcaagtgtcacagtgaccgtgggcgatgaaggtgccgacactccggtaggcgcaacccccctcataggtgatgagtccgagaaccttgagggtgatggagacctgagaggcggaaggatactgctgggtcatgcgaccaagtccttcccctcatccccatcgaagggcggaagctgccctagcagggcgaagatgagcatgacgggagcaggtaagagccctccaagtgtacagagcctggctatgcgcctactgtctatgcctggggctcagggtgcagccgcagccggttctgagccaccgccagcaacaacatcgccagagggacagcccaaagtacatcgcgcacgaaagactatgtcgaagcccggtaacgggcagccccctgtgcctgagaagcgtcccccagaaatccaacatttccgtatgagcgacgatgtgcactcgttaggaaaagtcacatctgacttagccaagaggcgtaagctcaattccgggggaggcttaagtgaagaactaggcagcgcccgtaggtccggcgaggtcactttgactaaaggcgacccagggtcgttggaagagtgggagacagtagtaggcgacgatttcagcctctattatgatagttactccgtggacgagagggtagatagcgattcgaagagtgaagtcgaggccctgaccgaacagttgtcggaggaggaagaggaagaggaagaagaagaggaggaggaagaagaagaggaggaggaggaggaggaggaagaagacgaggagagtggcaaccaatctgataggtctggctcatccggtagacggaaagccaagaagaagtggcgcaaggactccccctgggtgaaaccgtctagaaaacgcagaaagcgcgagccccctcgcgcaaaggaacctagaggcgtcagcaacgacactagttccttagaaacagagagaggatttgaggaattacccctgtgctcatgcagaatggaggcccctaaaatagataggatttccgagagggccggacacaaatgcatggctaccgaatctgttgacggtgagctctccggttgcaacgctgctatactgaagcgcgaaaccatgcggccaagcagcagagtcgcactgatggtgctctgtgaaactcatcgtgccagaatggtgaagcatcattgctgtcctggatgcggatacttttgtactgccggaacttttctagagtgtcaccctgactttcgcgtagcccaccgattccacaaggcttgcgtctcgcagctgaatggcatggtcttttgccctcactgcggagaagatgcttccgaggcccaagaggtcactattcctcgtggcgatggggtcactccaccggctggcactgctgccccagccccacctccactatctcaggatgtgccaggtagagccgatacatctcagccatccgctcggatgaggggacatggtgaaccccgacggccaccttgcgaccccttggcggatactattgattcgtccggtccatccctaacgctgcccaacggcggatgcctgtctgccgtggggttgcccttgggtccaggacgcgaagccttggagaaagctctagtcatccaggagagcgaaagacggaagaagctaaggttccatccacgccaactctacctgtctgtcaaacagggtgagctgcagaaggtgatccttatgctgcttgacaacctggacccgaatttccagagcgatcagcagagtaagcggactccactgcacgccgctgcccagaaagggtctgtggagatctgccatgtcctgctccaggccggagccaacattaatgccgtggacaagcaacagcggacaccccttatggaggccgtggtgaacaaccacctcgaagtggcacggtatatggtgcagcgcggaggctgtgtgtactccaaagaagaggacgggtccacatgcctccatcatgctgcaaaaataggcaacctagaaatggtgtcgcttctcctctctacgggccaggttgacgtgaatgcacaggattctggagggtggaccccgatcatttgggcggctgaacataagcatatagaggtgatccgtatgctccttactcgaggggctgatgtcacacttacggataatgaagaaaatatctgcctgcactgggcttcctttactggctccgctgccattgctgaggtcctcctcaatgccagatgcgacttacacgccgtgaactatcacggcgacacacctctgcacatcgccgcaagggagtcctatcatgactgtgttcttctctttttgtcacgtggcgcaaatccagaactgagaaacaaagaaggagatactgcctgggacctcactcccgaaagatctgatgtgtggttcgccctacaactgaataggaaactccgcttgggagtcgggaacagggccatacgcacagagaagataatctgtagagacgtggcccgaggctacgagaatgtgcccatcccctgtgtgaacggtgtggacggtgagccatgtccagaagattataagtacatttctgaaaactgtgaaacatctactatgaacatagacaggaatattacacatttacagcactgcacatgcgtggacgattgtagtagtagtaactgcttgtgtggtcagctctccataagatgttggtatgacaaggacggcaggctgctgcaggaattcaacaagatcgagccaccacttattttcgaatgcaaccaggcctgttcctgttggagaaattgtaaaaatcgcgtggtgcagagcgggattaaggtgcgcttgcagttgtacagaacagccaagatgggttggggcgttagggcactgcagactattccccagggcactttcatctgcgaatacgtgggtgagttgatctcagacgctgaggctgacgtacgcgaggatgactcctacctcttcgacctggacaacaaagatggtgaagtgtattgtattgacgctaggtattacggaaatatcagccggtttataaatcacctgtgcgacccaaacatcattccggtcagggtgtttatgctgcatcaggacttgcgatttcctaggatcgcattcttctccagtagagatataagaaccggggaagaattgggcttcgattacggtgaccgcttctgggatatcaagagcaaatactttacgtgtcagtgtggtagcgagaaatgcaaacactctgcagaggccatcgcccttgaacagtccagattagcccgtctggacccacatcccgaattgctgcctgaattggggagcctgccccctgtgaacacttag

SEQ ID NO: 222378 - DNA, 2667 bp, synthetic construct
  misc_feature 1..2667: note = Description of Artificial Sequence: Synthetic coding sequence
  source 1..2667: mol_type = other DNA
agtgaggtggaagccttgaccgagcagttatccgaagaagaggaggaggaagaggaggaagaggaagaggaggaggaggaggaagaggaggaagaagaggaggaggatgaagagtctggcaaccaatctgacagaagcggatcttcaggcaggaggaaggccaagaagaagtggagaaaagactcgccctgggtgaaacccagcagaaagagaagaaaaagagagcctcccagagctaaggaaccacgcggagtcagtaacgacactagcagtttggagacagaaagggggttcgaggagttacctctttgttcttgcaggatggaggcgcctaaaatagatagaatttccgagcgagccggtcacaagtgcatggctacagagagtgttgacggagagctgtcaggatgcaacgccgctatcctgaagcgggaaacaatgagaccttcctcacgggtggccctcatggtgctgtgtgaaacacacagagccagaatggtcaagcaccattgttgccccggttgtggatacttttgcacagccggtacctttctggaatgccatcccgatttcagagtggcccatagattccacaaggcatgtgtctcacagctgaatggaatggtcttctgcccccactgcggggaagatgcgagtgaagcccaggaggtaaccatcccccgaggagacggcgtcacacccccagcaggtaccgctgccccagccccaccccctctgtcgcaggacgtccctggccgtgcggacacgagccaaccaagcgccaggatgagaggacacggagagcccaggagacccccatgcgaccccttggccgataccatcgatagcagcggacctagcctaacactgcctaacggaggatgtctgtctgcagtgggcttaccactgggccctggtagggaggcgctggaaaaagctttagtaattcaggagtcggagagaaggaagaaactgcgtttccaccccagacaattatacttaagtgtcaagcaaggggagctgcagaaggttatcctgatgctccttgataatttagacccaaattttcagagtgaccagcagtcaaaaaggaccccactgcacgctgctgcacagaagggctccgtggagatctgtcacgtgctgctgcaggcaggcgcaaacattaatgctgtggacaagcagcagcgcacaccgctaatggaggcggtggttaataatcatctggaggtggctcggtatatggtccagagaggcggatgcgtatattctaaagaagaagatgggtccacatgcctccaccacgccgctaagatcgggaacctggaaatggtgtcgctgctgctgtccacaggacaggtggacgtcaatgcgcaggattctgggggatggacccctatcatctgggcagcagagcacaaacacatcgaggtgatcaggatgctactgactagaggcgctgatgtcaccctcaccgacaacgaggaaaacatttgtctgcactgggccagctttaccgggtcagcagctattgcggaagtcctcctcaacgcaaggtgcgacctccatgctgtgaattaccatggagacaccccgctgcatatcgcagccagggagtcataccacgactgcgtccttcttttcctatcacggggtgccaaccctgaattacgtaataaggagggcgatacggcttgggacctgacccctgagagatctgacgtctggttcgctctccaactgaaccgcaagctgaggctgggggtcgggaacagggccatcaggacagaaaagatcatttgtcgtgatgtggcaagggggtacgaaaacgtcccaatcccctgcgttaatggtgtcgatggggagccttgcccggaggactataaatacatctctgagaactgtgaaacaagcaccatgaacatagaccgaaacatcactcatctgcagcattgtacgtgtgtggatgactgctcaagcagcaactgcttgtgtggacaactttctatcagatgttggtatgacaaggatggacggcttttgcaggagttcaataaaattgagccacccctgatttttgagtgtaatcaggcatgcagctgctggagaaattgcaaaaatcgggtcgtgcagtctggcatcaaagttcgactgcagctgtaccgcactgctaaaatgggttggggcgtgagggctctgcagacaattccccagggcactttcatttgtgagtacgtgggagaattgatctcagatgctgaggctgacgtccgcgaagatgactcctacctgttcgaccttgacaataaagatggcgaagtttactgtatagatgcccgatactacgggaacataagtcggtttattaaccacctgtgtgaccccaacatcatcccagtcagagtctttatgctccaccaggatctgaggtttccacgcattgctttcttcagttcacgggatatcaggacgggagaggagctagggtttgattatggagatcgcttctgggacataaaatcgaagtattttacatgtcagtgcggcagcgagaaatgtaagcattcagctgaggccatagccctcgagcagtctcgcctggcccgacttgaccctcaccccgagttgcttcccgagcttgggtcccttcctcccgtcaacacatag

SEQ ID NO: 222379 - DNA, 2769 bp, synthetic construct
  misc_feature 1..2769: note = Description of Artificial Sequence: Synthetic coding sequence
  source 1..2769: mol_type = other DNA
agtgaggttgaggctctgacagagcagttatctgaagaagaagaagaagaagaagaagaggaggaggaggaagaggaggaggaggaagaggaggaagaggaagaagatgaagagagtggaaatcagagcgaccgctccggttcctctggccgtagaaaggcgaagaaaaaatggcgcaaggattctccctgggtaaagccatctcgaaaaaggcgtaagcgggagccccctagggccaaagagcccagaggggtcaacggagttgggagctcgggcccaagtgaatacatggaggttccactgggctcacttgaactcccgtccgaaggcacgctgagtcctaatcatgctggcgtgagcaacgacacaagctccctcgagacggaaagaggcttcgaagagctgcccctttgttcatgtcgaatggaagctcccaagattgataggatctctgagcgtgccggacacaaatgtatggctactgaaagcgtggatggggaactgtctggctgcaatgccgcaattttaaagagggaaaccatgagaccaagctcacgggtcgccctaatggtgctgtgtgagactcatagagctaggatggttaaacaccactgttgtcccggatgtggatacttttgcactgccggtaccttcctcgagtgccaccctgacttccgcgtagcccaccggttccataaggcttgtgttagtcagttaaacggtatggtgttctgccctcattgcggagaggatgccagcgaggcccaggaagttacaatccccaggggtgatggcgtgactccacccgctggtacagctgctccagcacctccacctcttagccaggacgttcccggaagggcggatacaagccagccgtcagcccgtatgcgcggtcatggtgagccacgacgtcccccttgcgatcctcttgcagacacaattgactcctccggcccttcccttactctcccgaatgggggatgtctgtccgcagtgggtctcccgttaggtcccggaagggaggcccttgagaaggccctggtgattcaggagagtgagaggaggaaaaagctcaggttccacccaaggcagctctacctgagtgtgaagcaaggcgagctgcagaaggtgatccttatgctgctggacaacctcgacccaaactttcagtccgaccagcagtctaagcggactccactccacgctgctgctcagaaaggctctgttgagatctgtcatgttttgctacaagcgggagctaacatcaacgcggtggataaacagcaacgcacacccctgatggaggcagtggtgaacaatcatctggaagtggccagatatatggttcagcgaggcggttgcgtgtattctaaagaggaagatgggagcacatgcctccatcatgctgccaaaatcggaaacttggaaatggtgtcacttctgctgtccaccggacaagtggatgtgaacgcccaggattcaggtggctggacacccatcatttgggctgctgagcataaacacatagaggtgataaggatgctcctgactcggggagcggatgtcactctcacagataatgaggaaaatatctgtctacattgggcgagttttactggttcagccgcaatcgccgaagttttgctgaacgccaggtgcgatctacatgcggttaactaccacggggacacccccctccacatcgctgcacgcgaaagctatcatgattgtgttttgctgttcctctctcggggagccaatccagaactacgtaacaaggagggcgataccgcctgggaccttacacccgagcgtagcgatgtgtggttcgccctgcaattgaatcggaaactccgtctcggagtcggaaaccgggctattcgcaccgagaaaatcatttgtagagatgtggcacgaggctacgagaacgtgcccattccctgtgtcaatggcgtggacggcgaaccgtgtcctgaagattataaatatattagtgaaaattgtgaaaccagcacaatgaacatcgaccggaatattactcatttgcagcactgtacatgcgtcgacgactgtagctcttccaattgtctgtgtggccagctgtctattagatgctggtacgacaaagacgggagactactgcaggaattcaacaagattgagcccccacttatctttgagtgtaaccaggcgtgcagctgctggcgcaattgcaagaacagagtcgtgcagtccggcatcaaagtgcggctgcagttgtatcgtacagccaaaatgggttggggcgtgcgggcattgcagacaatcccccaggggaccttcatctgtgagtacgtgggagaactcatatcggatgccgaggccgacgttcgggaagacgatagctacctgtttgatctagacaacaaagatggagaagtctactgtatagacgctagatattacggcaacatttcaagatttatcaatcatttgtgtgacccaaatattataccagttcgggtatttatgctccatcaggacctcagattccctcggattgccttcttctcctctcgagacatccgtacgggcgaagaattgggcttcgattacggagacaggttctgggacattaaatccaagtatttcacttgccagtgtggtagcgagaaatgcaaacactccgccgaagcaatcgcactggaacagtcaaggctggcgaggttggatcctcacccggagttactcccagaactcgggagcctaccgccagtcaacacatag

SEQ ID NO: 222380 - DNA, 3096 bp, synthetic construct
  misc_feature 1..3096: note = Description of Artificial Sequence: Synthetic coding sequence
  source 1..3096: mol_type = other DNA
tcttgtcactgtacaccatctagaccacccgtgcctgagaagcgacctcctgagattcagcatttccgaatgtctgatgatgttcatagcttaggtaaggtgacaagtgacctggcaaagagaaggaaactgaattctggaggcggtttgtctgaggagctaggcagtgccagacgcagtggagaagtcactcttaccaagggtgacccagggtccttggaggaatgggaaacagtggtcggagacgacttttctttgtattatgatagctactcagtggatgagcgtgtggattccgactcaaagtctgaagtggaggccctcacagaacagctctccgaagaggaggaagaagaagaggaggaggaggaggaagaggaagaggaggaagaggaggaagaggaagaagaggacgaagagtcagggaatcagtcggatcgtagtggaagcagcggcaggagaaaagctaaaaaaaaatggaggaaggattcgccctgggtgaagcctagcaggaaacgacggaagcgcgagccccctagggcgaaggagcctaggggcgttaacggggttggcagcagcgggccatcagagtacatggaggttcctctgggctcactcgaactgccctccgaaggcacgttgagtcccaaccacgcgggagtatccaatgacacttcttccctagaaacagagcgtgggttcgaggagctgcccctgtgttcttgtagaatggaggcccctaaaatcgatcgaataagtgagagagccggacacaagtgtatggcgactgagtccgtggatggcgagctttcagggtgcaatgcggctattttgaagcgcgagacaatgcgtccttcctccagggtagctctgatggtcctgtgcgagacccaccgcgctcgcatggtcaaacatcactgttgcccgggttgtgggtatttttgcaccgctggaacattcctggagtgccatcctgattttcgcgttgcccataggttccataaagcatgtgtgagccagctgaacgggatggttttctgccctcactgcggagaggatgcttcggaggctcaggaggtgacaattcctaggggcgacggcgtcacgccccctgccggtacagccgcacccgctcctcctccactgtctcaggatgtgcctggcagagctgacaccagtcaaccatcagcacggatgcggggtcatggtgagcctaggcgtcccccatgcgacccactggctgacactattgatagctccggccctagccttacattaccaaatggaggatgtctatccgccgtgggcctgccccttggcccaggccgagaggcgctcgagaaagctctggtgatccaggaatccgagcggcgtaagaagctgcgtttccaccccaggcagctgtatctgtcagttaaacagggggaattgcagaaagtaattcttatgcttctggataatttagaccccaatttccagtctgaccaacaaagtaagcggacacctctgcacgctgcagcacagaaaggttctgtggagatctgtcacgtgctgctgcaagccggagccaacattaatgcagtggacaagcagcagagaacgccactcatggaggcagttgtgaataatcacctcgaggtggccaggtatatggttcagaggggaggatgcgtctacagcaaagaggaggacggttccacatgtctccaccatgcagcaaaaataggaaatctcgaaatggtgtccctgctcctctcaaccggccaggtcgacgtgaacgcccaagactcaggcggttggacgccaatcatttgggcagcggagcacaaacatattgaggtcatcagaatgttattgactaggggggcagatgtgaccctaactgacaatgttagcgaacgtctggtggaggaggagaatatctgcttacattgggcaagctttaccggatccgctgcgattgctgaagtgctgctaaacgccaggtgcgacctgcatgctgttaactaccatggtgacacgccactacatatcgcggctcgggaatcttatcatgactgcgtcctgttgttcttgtcccgaggcgcaaatccggagttaaggaataaagaaggtgacaccgcctgggacctcacgccagagcgtagcgatgtgtggttcgctctccaactaaatcgtaaactacggctgggtgtaggcaatcgtgccatccgcactgagaaaatcatttgccgggacgtcgcgagaggctatgaaaacgtgcccataccgtgtgtaaacggtgtggacggggagccttgtcccgaggattataaatatatatcggagaactgcgagacgagtacgatgaatatcgatagaaacattacacatctccagcactgtacctgtgtggatgattgcagctcaagtaattgcttgtgtgggcaactctctatacggtgttggtatgataaggatggcagacttctgcaagagttcaataagatcgagccaccactcatctttgagtgtaaccaagcttgttcgtgctggcgaaattgtaagaatagggtggtgcaaagcggaataaaggtccggttgcagctataccggacagccaagatggggtggggggtgagggcactccagacaatccctcagggaacattcatttgcgaatacgttggagagctgatcagtgatgctgaagccgacgttcgcgaagatgatagctacctttttgatctcgataacaaagacggtgaggtctactgcattgacgcccgatactatggtaacatatctcggttcattaatcatctgtgtgaccccaacatcatccccgtgagggtatttatgctgcaccaggatttgaggtttccgaggattgcttttttttctagccgagacatcagaactggggaagaactcgggtttgattacggtgataggttctgggacattaagagcaaatactttacttgccagtgcggttcggaaaaatgcaaacacagtgccgaagcgattgcactcgaacaatcaaggcttgctaggctcgatcctcaccctgagcttcttccggagctcgggtctctgccacctgtgaacacgtag

SEQ ID NO: 222381 - DNA, 3096 bp, synthetic construct
  misc_feature 1..3096: note = Description of Artificial Sequence: Synthetic coding sequence
  source 1..3096: mol_type = other DNA
tcctgccactgtacacctagctggcctcctgtacccgagaaacgacctcctgaaatccagcacttcagaatgtccgatgatgtgcatagcctgggcaaggtgacgtccgatctcgctaagaggaggaagctcaactccgggggtgggcttagcgaagagcttggatccgcacggcgtagtggggaggtgacattgaccaaaggcgatccagggagcctggaagagtgggagactgtagtgggtgatgactttagcctatattatgacagctactccgtggatgagagagtcgactcggactctaagtcagaggtcgaggcactgaccgagcaactatcagaagaagaggaagaagaagaggaggaggaagaggaagaggaggaagaggaggaagaggaagaggaggaagaggatgaggaaagtggtaatcagagcgacaggtctggtagcagcggcaggaggaaggcgaagaagaagtggcgcaaagacagcccatgggtgaaaccatccagaaagaggcgcaaacgtgagccacctcgtgccaaagagccccgtggggtgaatggagtcggctcgagtggtccttcagaatacatggaagtgccactgggatcactggaactaccctctgaaggaacattatcaccaaaccatgccggagtatccaacgatacctcttccctagagacagagagaggctttgaagagctgccactgtgtagttgtcgtatggaggcccctaagattgataggatcagcgaacgcgcaggccacaaatgtatggccacagagtcggtggacggagagctgtctggttgtaacgccgctatactaaaacgcgaaactatgaggccatcatcaagagtggcgctgatggtgctgtgcgagacacatagagctaggatggttaagcaccattgttgtcctgggtgcggctacttctgtacagccggaacctttttagaatgccaccccgatttccgggtcgcacaccgttttcacaaggcttgtgtgagccaactcaatggaatggttttctgcccacactgcggggaggacgcttccgaggcccaggaagtcacaattccgagaggtgatggagtcactccccctgccggaacagcggcaccggcaccgcctccgctgagccaagacgtgccaggacgtgccgatacgtctcaacctagcgccaggatgagaggacacggcgaacctcgcaggccaccctgcgacccgttagccgacactatcgattctagcggcccttcactgaccctcccaaacggcggatgcctcagcgccgttggactgcccttggggccaggtcgcgaggccctagagaaagccctggtgatccaggagtccgaaagaagaaaaaaactcagatttcaccccagacagctgtatctgagcgtgaagcagggagagctacagaaggtgattctgatgctgcttgacaatctcgatcctaatttccagtctgaccagcaaagcaaacgcacccccctgcacgctgccgctcagaaggggtctgtggagatatgtcacgtgttactccaggccggagcaaacatcaacgcggttgacaagcagcaaaggacacccttgatggaggcggtggtgaataaccacctcgaggtggcccgatacatggtccagcgcggaggttgtgtttacagcaaagaggaagatggatccacatgccttcatcatgctgccaagatcggaaaccttgagatggtctcactcctgctgagtactggacaagtcgacgtaaatgcacaagactctgggggttggacaccgattatctgggctgccgagcacaagcatatcgaagtgattcgcatgttgctgactcggggtgccgatgtgacgttaaccgacaatgtctcggagaggctggtggaagaagaaaatatctgtctgcattgggcgtcattcacgggctctgccgcaattgccgaggtactgctcaatgctcggtgtgacctccacgcagtgaattaccacggcgacactcccctccatatcgccgctcgtgaatcctatcatgactgtgtccttctgttcctgtctcgaggcgcaaacccggaattgaggaacaaagagggtgataccgcctgggaccttacccccgaacgctccgacgtttggttcgcactacagctgaataggaagcttcggctgggtgtgggaaacagggcaatacgcactgagaaaatcatttgccgggacgtcgctagggggtatgagaatgtgcctatcccatgcgtgaatggagtagacggagaaccttgtcctgaagactataagtacatctcagagaattgtgagacatctacaatgaacattgatcgtaatatcacgcatctgcagcactgcacatgcgtcgacgactgctccagctccaactgcctgtgcggccagctgtctatcagatgttggtacgacaaggatgggaggctgctccaggagtttaataagattgaaccaccacttatctttgagtgcaaccaggcatgttcctgctggcggaattgtaagaatcgcgtggttcagtcaggcatcaaggtgagattacaactttataggacagccaagatgggatggggggtacgtgctttgcagaccatcccccaagggacctttatttgtgagtatgtcggtgaacttatctctgacgcggaagccgacgtgagggaagatgacagctacctattcgatctggacaataaggacggggaggtgtactgcatagatgctagatactatgggaatatcagccgattcattaatcatctatgtgaccccaatattattccggtgagagtgtttatgctccaccaggatctgcgatttccaaggattgccttcttctcctcccgtgatattcgcactggggaagaactgggctttgattatggggaccggttttgggacatcaagagtaagtatttcacttgccagtgcggctccgaaaagtgcaaacactctgccgaggccatcgcccttgagcagtctcggctggcaaggctcgaccctcaccccgaactcctgcccgagttgggcagcttaccccctgtcaacacctag

SEQ ID NO: 222382 - DNA, 3096 bp, synthetic construct
  misc_feature 1..3096: note = Description of Artificial Sequence: Synthetic coding sequence
  source 1..3096: mol_type = other DNA
tcttgtcactgcactccatcatggccacccgttcctgaaaagaggccccctgagatccagcattttaggatgagtgacgatgttcactctctgggaaaggttacttctgacctggccaaaaggcgcaagttaaattctgggggtggtttgagcgaggagctgggctctgccagacgctcgggagaggtcacacttactaagggtgaccctggctctttagaggagtgggagacagtggtgggtgacgactttagcctgtactacgacagttattccgtggatgaacgagtagacagcgacagcaagagcgaagtagaggcgttgacggaacagctttccgaggaggaagaagaagaggaagaagaggaagaggaagaagaagaagaagaagaagaggaggaagaagaagaggatgaggagtccggcaatcagtcagaccggtccggctcatctggcagacggaaggcgaaaaagaagtggaggaaggattccccttgggtcaagccttcacggaaacgcaggaagagagaacctccacgggcaaaagagccacgaggggtgaacggagtgggatcgagtggcccatccgaatacatggaggtacctctgggctccctcgagcttcctagcgagggaactctgagccctaaccacgccggtgtatccaacgacacttcgtcgctggagacagaaagaggatttgaagaactgcccctttgctcctgtaggatggaggcccctaaaatagaccgaatttctgagagggcagggcacaagtgcatggcaaccgaaagtgtggatggagagcttagtggctgtaacgctgccattctcaaacgcgagacaatgcggccaagctcaagggttgcgctaatggtgctctgcgaaactcacagggcaagaatggtcaaacaccactgctgtccgggatgcggctatttctgcactgccggaacattcctggagtgccaccccgacttccgggtcgctcacagatttcacaaggcgtgcgtaagccagctaaatggaatggtgttctgcccacactgcggcgaggatgcgagcgaggctcaggaggtgaccattccacggggagacggggttactccgcctgctggcactgccgcacctgcccctccacctttgtcacaggacgtgcccggaagagccgacacatctcaaccgtcagcccgtatgagaggccacggagagcctagacgccctccgtgcgacccactcgctgacaccatcgacagttcagggcctagcctgacactacccaacggaggctgcctatccgcggtaggtttgccacttggtcccggtcgggaggctttggaaaaggccctcgtgatccaggaaagcgaacgccgtaaaaagcttagattccatccgagacagctgtatctgtctgtaaagcagggcgagttgcagaaggtgatcctgatgctactcgacaacttggaccccaacttccagtccgaccagcaatccaagagaacccccctgcacgctgccgcacagaagggcagtgtggaaatctgtcacgtactgctacaggccggtgcaaatattaacgccgttgacaagcagcaaagaacacccctcatggaggcagtggtcaacaatcacctggaggttgccagatatatggtgcaacgcggagggtgcgtttactcaaaggaggaagacggcagcacatgcctccatcatgcagccaagataggaaacctggagatggtgtcgttactcttatctaccggccaggtggacgtgaacgcacaggactctggcggatggacaccgattatatgggctgcggagcataagcatattgaggtgattcggatgctcctgactcgtggggctgatgtcacattgacagataacgtaagtgagaggcttgtcgaagaggagaacatatgtctgcactgggcgagcttcaccgggtctgccgctattgccgaggttctgttaaacgcccgttgcgatctgcatgcagtaaattaccacggggacacacctctgcacattgctgcacgagagagttaccacgattgcgttctgctgttcttgagccgcggagccaatccagaattacgcaacaaggaaggcgacacagcctgggatctgactcctgagagatcggacgtgtggtttgcactacagttgaatcgcaagttacgcctgggggtgggaaatcgggctatccggacggagaaaattatctgtagagacgtcgctcggggatacgagaacgtccccatcccttgtgttaacggcgttgacggagaaccctgtcccgaagactacaagtacatttctgaaaactgtgaaacctcaactatgaatattgaccggaacataactcatctccagcactgtacttgtgtagatgattgctccagctccaactgtctttgcggtcagttatcaattagatgttggtatgataaggatggaagactcctgcaggaatttaacaagatagaacccccacttatatttgagtgtaatcaggcatgctcctgctggcgcaactgtaagaaccgggtcgtccagagcggtataaaagtccgactgcagctgtacaggaccgcaaagatgggatggggcgttcgggctctgcagacaatccctcagggaacatttatttgcgaatacgtcggcgagctgatttctgatgcagaggctgatgtaagagaggatgattcttatctattcgacctggacaataaggatggtgaggtgtattgtatcgacgctagatactacggaaatatcagcaggtttattaaccatctttgtgaccctaacatcattcccgtgcgcgtgttcatgctgcaccaggatctgcggttccctcggatcgctttttttagctccagggacatcagaactggagaggagctcggatttgattacggcgaccgcttttgggacatcaagagcaaatatttcacctgtcagtgcggctccgaaaagtgcaagcacagtgcagaggccatagcgctcgaacaaagccgcttagccagactagatccgcacccagagctgctccctgagttgggatccctgccgccagtaaacacgtag

SEQ ID NO: 222383 - DNA, 3096 bp, synthetic construct
  misc_feature 1..3096: note = Description of Artificial Sequence: Synthetic coding sequence
  source 1..3096: mol_type = other DNA
agctgtcactgcacaccatcccggcctcctgtgccggagaaacggcctcctgagatccagcactttaggatgtccgacgatgtccattccctgggcaaagtcacctcggatctggcaaagagaagaaagctgaatagcggaggaggtctcagcgaagagctcggtagtgccagaaggtccggcgaagtaacccttacaaaaggcgatccagggagcctcgaggagtgggagaccgtagtcggcgacgatttctcgctctattacgactcttattctgtggacgagcgggtggactccgatagcaagagtgaagttgaggcccttacggaacagctgagtgaggaggaagaagaagaggaagaagaggaagaggaagaggaagaagaagaggaagaagaagaagaggaggaggacgaagaatccggcaaccaatctgaccgttcagggagttctggacggaggaaagctaagaagaagtggaggaaggattcaccctgggtcaagccgtctcgcaagcgcagaaaacgcgaacctcccagagcgaaggagcctcgaggggtcaacggcgtgggctcctctggccctagtgagtatatggaggtgcctctcggctcattggagttaccatccgagggcactctcagtcctaatcacgctggcgtctccaacgacacctcatccctggaaacagagcggggatttgaagaacttcctttgtgctcttgtcgtatggaagctcctaagattgaccggatctccgagagggctggccacaagtgcatggccaccgagagtgtggacggcgaactatccggctgcaatgctgccatactgaagcgcgagacaatgcgcccttctagcagggttgcattgatggtcctgtgcgagacccacagggctcggatggttaaacatcactgttgcccgggatgcgggtatttctgtaccgcagggactttcctagaatgccaccccgactttcgggtggcgcacaggttccataaggcttgcgtgtcacagttaaatggaatggtattttgtccacattgtggagaggatgccagcgaagctcaggaggtgacaattcctcgaggggatggcgtcacacctcccgctggtactgctgcgccagctccaccaccattgagccaggatgtgcccggtcgagcagatactagtcagccatctgcgcgtatgagagggcacggcgaaccacggaggccgccatgcgatccactggcagacaccatcgattcctccggaccatctctgacacttccgaatggtggatgtctgtcggctgttgggctgcctctggggccaggacgcgaagccttagagaaggccttagtaatccaggaaagtgaaagaaggaagaagctgagatttcatccacgacagctatatctgtcggtaaaacagggcgaacttcaaaaagttatcttgatgctgctggacaatctggacccaaatttccagtcagaccagcaatcaaagagaacacccctccacgccgctgcacagaaaggatctgtcgaaatctgccatgtgctgctgcaggccggagccaacataaatgcagtagataagcagcagcggacgccattgatggaggcagtggttaataaccacctagaggtggcacggtacatggtccagcggggaggttgtgtgtatagcaaggaggaagacgggtcaacctgcttacatcatgcggcaaaaattggcaacctggagatggtctccttattactgtctactggacaagtggatgtcaacgctcaggacagcggtgggtggacccctattatttgggctgctgaacacaagcatatcgaagtgataaggatgctattaacgcgaggcgctgacgtgacactgactgacaacgtctcggagcggttggtggaggaggaaaatatctgtttacactgggctagctttacaggtagcgccgcaatcgcagaagtgctgctcaatgccagatgcgacttgcatgccgtgaactaccatggagatacacccttgcatatcgctgcgagagaatcctaccacgactgtgtgctgctgtttttatcccgtggcgctaacccagaactccggaacaaagagggcgacaccgcatgggatctcacaccagaaagatcagacgtctggtttgctcttcagttgaaccgaaaattacgcctcggggtcggcaatagagctatacgaactgagaagatcatttgcagggatgttgccaggggctacgaaaatgtcccgattccgtgcgtcaacggggttgatggtgagccatgcccagaagactataagtacatctccgagaattgcgagaccagtacaatgaacattgaccgtaatatcacccacctgcagcactgcacgtgtgtggacgactgtagctccagtaactgcctgtgcggccagctgagcattcgctgctggtacgataaagatgggaggctgctgcaggaattcaataaaatcgagccgcctttaattttcgagtgcaaccaggcctgcagttgctggagaaactgcaagaatagggtcgtgcagtccgggattaaggtcaggctccaactgtaccgcacagcaaagatgggctggggggtgcgggctctacagaccattccccagggaacctttatctgcgaatacgtgggtgagctcataagcgatgccgaagctgatgtgagagaagacgacagttacttattcgacttagataataaagatggggaggtctactgcattgacgcaaggtattacggcaatatttcacgttttatcaaccatttatgcgatcccaatatcattccagtcagggtttttatgctccatcaggacctgcgattcccgagaatcgccttcttcagcagtagggacatccgcaccggtgaagagctgggctttgactacggagaccgcttttgggatattaaaagcaagtattttacttgccaatgcggatccgaaaaatgtaaacatagcgcagaggccatcgcactggagcagtcccggttagcccgtctggacccacaccccgagctcctccctgagctggggagcctccctcctgtgaatacttag

SEQ ID NO: 222384 - DNA, 3096 bp, synthetic construct
  misc_feature 1..3096: note = Description of Artificial Sequence: Synthetic coding sequence
  source 1..3096: mol_type = other DNA
tcgtgccattgcactccaagctggccacctgttccagagaaacggcctccggaaatccaacactttagaatgagcgatgacgtgcatagcctgggaaaagtgacctctgatctggccaaaagacgcaagctgaatagtggcggaggactgtccgaggaactgggttccgcaagacggagtggagaagtaacccttaccaagggggatcctggcagcttggaagaatgggaaacagtggtgggcgacgactttagcctgtattacgattcttactctgtagacgagcgcgtcgactccgactctaagagtgaggtagaagccttgacagaacagttgagcgaagaagaagaagaagaggaggaggaagaggaggaggaagaagaggaagaagaagaagaagaggaggaagaggacgaggagtccggcaaccagagtgatcggtctgggtcaagtggcaggcgcaaagccaagaagaagtggcggaaggattcaccatgggttaaacccagcagaaaaaggcgcaagcgggagccaccccgagcaaaagagccaagaggtgtcaacggcgtgggcagctctggtccttcagagtatatggaagtccctttgggcagcttggaacttccctcggaggggaccctgagtccaaaccacgccggagttagtaacgataccagctccctggagaccgagcgaggattcgaagagcttcctctatgttcctgtaggatggaggctccgaaaatcgaccgaatttcggaaagagcgggacataagtgcatggctacagagagtgttgacggggagctgagcggatgcaatgccgcaatcctgaagagagagacaatgaggccttctagccgtgtagcgctaatggttttgtgcgagacacatcgggcaaggatggtcaaacatcactgctgtcctggttgcggatacttctgtacagccggaacatttcttgaatgtcaccccgacttccgggtggcccacaggtttcacaaagcgtgtgtctcccagctgaatgggatggtgttctgtcctcattgcggagaagatgctagtgaggcacaagaagtcacaatccccagaggcgatggggtgactcctccagccggaacggctgctcccgctccacctccactaagccaggacgtccctggcagggctgacacatctcaaccaagcgcccgtatgcgaggacatggcgagccaaggcggcctccctgcgatcccctggctgataccatagattccagcggcccatcacttactttgcctaatggcggatgcttgagcgctgtggggctgcccctgggcccaggaagggaggccctggaaaaggcactggtgattcaggagtccgagaggcgcaagaaactccggttccatcctaggcagctgtatctcagcgttaaacagggggagttgcagaaagtaatccttatgttgcttgataatctagaccctaacttccagagtgatcagcagagtaagcgcacacccctccatgctgccgcacaaaaggggagcgtggaaatttgccacgtccttctgcaagcgggtgctaacataaacgccgtggataaacaacagcgaactcccctaatggaagctgttgtgaacaatcacctagaggtggcgagatacatggtccaaaggggcggatgtgtgtattcgaaagaggaggatggcagcacctgtctgcaccacgccgctaaaatcggcaatctggagatggtttccctactgcttagtacgggtcaggttgacgtgaacgctcaggactctgggggatggacaccgattatctgggccgcagaacacaaacacattgaggtcatcaggatgttgctgaccagaggggctgatgttacattaaccgataacgtgagcgaaagactggtggaagaggagaacatttgcctccattgggcttctttcacaggctctgccgcaatcgcagaggtcctgctgaacgccaggtgtgaccttcacgccgtaaactaccatggagacacgcctctgcatattgctgccagagagtcttatcacgactgtgtgctactctttttgtcaaggggtgccaatcctgagctccgaaataaggaaggtgacactgcctgggacctaactccagagagatcagatgtgtggttcgccctgcagctcaacaggaaacttaggctcggggtgggcaatcgagctatccgcacagagaaaatcatctgcagagatgtggccagaggatacgagaatgtacccataccatgtgtgaacggtgtggatggggagccctgccccgaagattacaagtatatctccgaaaattgtgaaactagcaccatgaatatcgacaggaacatcacccacttacagcactgtacctgtgtggacgactgcagctctagcaattgtctttgtggacagctgtccatccgctgttggtacgacaaggatggcaggctgctgcaagagtttaataagattgagcccccactcatttttgagtgtaatcaggcctgcagctgttggcgcaactgtaaaaatagggtcgtccaatctggcattaaggtaaggctgcagctttaccggacggcaaagatgggatggggagtcagggcccttcaaacgattccccagggcaccttcatctgcgagtatgttggcgagcttataagcgacgccgaggccgatgttagggaagacgacagttatctgttcgacctagataacaaggatggagaggtgtattgcatcgatgcacgatattatgggaacatttcacgcttcatcaatcatctatgtgatcctaacatcattcccgtgagagtatttatgctgcaccaggacctgcgcttccctaggatcgcgttcttttcctcccgcgatattagaaccggagaggagctgggcttcgactacggcgaccgtttttgggatataaagtctaaatacttcacatgccagtgtggcagtgagaaatgtaagcacagtgctgaagccattgccctggaacaaagtcgcctggctcggctggacccccaccccgagctgctccctgagctgggtagcctgcctcccgtcaatacatag

SEQ ID NO: 222385 - DNA, 2178 bp, synthetic construct
  misc_feature 1..2178: note = Description of Artificial Sequence: Synthetic coding sequence
  source 1..2178: mol_type = other DNA
atggcagatgaagacctgatttttagattggagggtgtggatggaggccagagccctagagccggacatgatggagactccgacggcgattctgatgacgaggaggggtatttcatttgtcctataactgatgatccaagcagtaaccagaatgttaactccaaggtgaacaagtattattccaacttgaccaaatcagagcggtacagtagtagtggttcacccgctaatagctttcactttaaggaagcatggaagcatgctatccagaaggccaaacatatgccggacccctgggcagaattccacctcgaggacatcgccactgagagagcaacaaggcatcgctataatgccgtgactggggagtggctggacgatgaagtcctgataaaaatggcttcacaaccttttggaaggggcgctatgcgcgaatgttttcggacaaagaagctgtcaaattttttgcatgctcagcagtggaagggtgccagcaactacgtagccaagcgatacatcgagcctgtggatcgcgacgtgtactttgaggatgttaggctgcagatggaggcaaagctgtggggagaggagtacaatcggcataaaccaccaaaacaggttgacatcatgcagatgtgtatcatcgagttaaaagatagacctggcaaacccctcttccacctcgagcattatatcgaaggaaagtatataaagtacaacagcaactcgggctttgtacgagacgacaatatccggttgacaccccaggcgttctcccactttacgttcgaaagaagtgggcaccagctcatagtagtcgacatccagggtgtaggggatctctacactgatcctcagatacacaccgaaacaggcactgacttcggcgatggtaacttgggggtgaggggtatggctctcttcttttacagtcacgcttgtaatagaatctgcgagtcgatgggactggctccctttgacctttctcccagggagagagatgccgtcaatcaaaacacgaagcttctgcagtcagccaaaaccatcctccgtggtacagaggaaaaatgtggctccccacaggtgcgcactctcagtgggagcagaccccctctgctccggcctctctctgagaattcaggagatgaaaacatgtctgatgtgacatttgactctctgccatctagtccatcctcagcgacacctcactcacagaagctagaccacctgcactggccagtattctccgacctagacaatatggcgtctagggatcatgaccacctagataatcatagggaatcggaaaactccggtgacagtggctatccttccgagaaacgaggcgaactagatgaccccgagccgagagagcatggccactcttactcgaacaggaagtacgaatctgatgaagattcactgggctcaagtgggcgagtctgtgtggagaagtggaatctgctgaacagtagcagattgcatctgcctagagcttctgctgtggctctcgaggtgcagagactgaacgccttggacctggagaaaaaaataggaaagtccattcttggaaaggtgcaccttgcaatggtgcgttaccatgagggtggacgattttgcgaaaaaggcgaggaatgggaccaggaatcagcagtgtttcacttagaacatgccgctaatctaggcgaactcgaggcgattgtgggacttgggcttatgtactcccaattgcctcaccacatccttgccgatgtttcccttaaggagacggaggagaataaaacaaaagggttcgattatctgctcaaggcagccgaagcaggggacaggcaatccatgatacttgtggcaagagccttcgactccggacagaatttgtctcccgatagatgtcaggattggcttgaagcactccattggtataatactgcactggaaatgaccgactgtgacgaaggcggtgaatacgatggcatgcaagacgaacctcgatatatgatgcttgccagggaggcagagatgctcttcaccggcggatacggtttggaaaaggacccccagaggagcggcgatctgtatactcaggcggcagaggcagctatggaggcaatgaaaggcaggctcgcgaatcaatactaccagaaagccgaggaagcttgggctcaaatggaggagtag

SEQ ID NO: 222386 - DNA, 1389 bp, synthetic construct
  misc_feature 1..1389: note = Description of Artificial Sequence: Synthetic coding sequence
  source 1..1389: mol_type = other DNA
atgggaaaggaaaagacacacatcaatatcgtcgtcatcggccatgttgactcagggaagtcaaccactactgggcacctcatctacaaatgtgggggtatcgataaacgtaccattgaaaaattcgaaaaagaggccgctgaaatgggcaaaggcagctttaagtatgcctgggtgctggataaacttaaggctgagcgggagcggggaatcactattgacataagcctatggaagtttgagacttcgaagtattacgtcacgataattgatgcaccgggacacagggactttataaagaatatgataacaggaacttcccaggcagattgcgccgtgttaattgtggctgccggagtgggggaatttgaagctggcatctccaagaatggacagacgagagaacatgctctgctagcttataccctcggggtgaagcaactaatcgtcggggtgaacaagatggacagcactgaaccaccttatagccagaagaggtacgaagaaatcgtgaaagaagtgtctacttatatcaagaaaatcggatacaatccagacaccgtagcattcgttcccatctctggctggaatggggacaacatgctagaaccatcggccaacatgccttggtttaaagggtggaaagtgacacggaaggatgggaatgcttccggcacaactctccttgaggccctcgactgtatactacctccgaccagaccaacagataagccacttaggctccccctacaagacgtgtataagatcggtggaatcgggacagtccctgtaggccgtgtcgaaacaggggtcctgaagccaggaatggtcgtgacgtttgcccctgtgaacgtcactactgaagtgaagagtgtagagatgcaccacgaagctctgagtgaagccctccccggtgacaatgtaggctttaatgtgaagaatgtgtctgtaaaggacgtaaggcgcggtaacgttgcaggcgacagtaagaacgatccccctatggaagccgctgggttcactgcccaggtgatcatccttaatcatcccggacagatctccgccggttatgctcctgttctggattgtcatactgctcatatcgcatgtaagtttgctgagctcaaagagaagatcgaccgcagatcaggcaagaagttggaggacggccctaaattcttgaagtctggtgatgctgctattgtggacatggttcctgggaaaccaatgtgcgtcgaatcctttagcgattacccccctttagggcgatttgcagtccgcgacatgcgccagactgttgctgttggagttattaaagcagttgataagaaggcagccggtgcaggtaaagtgaccaagagcgcccaaaaggcacagaaggctaaatag

SEQ ID NO: 222387 - DNA, 1389 bp, synthetic construct
  misc_feature 1..1389: note = Description of Artificial Sequence: Synthetic coding sequence
  source 1..1389: mol_type = other DNA
atgggtaaagaaaagacccatatcaacatcgtcgtaatcggacatgtcgatagcggtaagagcacgacaaccggtcacctgatatacaagtgtgggggaatcgataagaggacgattgagaaattcgaaaaggaggctgcagagatgggcaagggctcatttaaatacgcctgggtgctggataagctgaaggccgagcgggagcgcggtatcacaatcgacatctctctttggaaatttgaaacatccaagtactatgtgactatcatagatgcacccggacatagagacttcatcaagaacatgattaccggtacaagccaagctgactgtgcagtcttaatcgtagcagcaggtgttggagagttcgaggccggaataagtaagaatgggcagacaagagagcatgctctccttgcctacaccctgggtgttaaacagctcattgtgggtgtgaataagatggattcaacggagcccccttacagtcagaagaggtacgaggagatcgttaaagaagtgagtacttatataaaaaagataggctataatcccgacacagtggcatttgtgcccattagcggatggaatggggataacatgttagaaccttccgcgaacatgccttggttcaagggatggaaggtgaccagaaaggacggaaacgcatctggaactactctacttgaggccctggactgtatactcccacccaccagacccaccgacaagcccttacgtctccctctccaggatgtctacaaaattggtggaattggcaccgtaccagtgggtcgggtggaaactggtgtgctgaagcccggaatggtagtgacattcgctcctgtgaacgtcacaacagaggtgaagtccgtggaaatgcaccatgaggcgctgagcgaagctctgccaggggacaatgttggcttcaacgtcaagaatgtgagcgttaaggacgtgcgccgagggaacgttgctggcgattctaagaatgatcctcccatggaagcagctggctttaccgcccaggtcattatcctgaaccaccctggccaaattagcgcagggtatgcacccgtgttagattgccatacagcgcacatcgcctgtaagtttgctgagcttaaggagaaaatcgataggcggtccggcaaaaagctggaagatggacctaagttcttaaagtcgggagacgctgccatcgtggacatggtgcccggaaaaccaatgtgcgtggaatcattttccgactatcccccacttggtaggtttgcggtgagagatatgcgccagacggtcgcggtcggagtcatcaaagctgtcgataaaaaagctgccggagccggtaaggtgaccaagtctgcccagaaggcacaaaaagccaagtag

SEQ ID NO: 222388 - DNA, 1389 bp, synthetic construct
  misc_feature 1..1389: note = Description of Artificial Sequence: Synthetic coding sequence
  source 1..1389: mol_type = other DNA
atgggaaaagaaaaaactcatatcaatattgtcgtaatcgggcatgttgattccggcaaaagcactactaccggtcacctaatatataaatgtggtggtatcgacaaaaggaccatcgaaaagttcgagaaagaagcggcagaaatgggcaagggttcttttaagtacgcctgggtactggataaattaaaagctgagagagaaaggggtattactatcgatatttcattatggaagttcgagacttctaagtattatgtgacaatcatagatgccccaggccaccgagatttcataaagaacatgatcaccggcacgagtcaggctgactgcgctgtgctgatagtcgccgcaggtgtcggcgaattcgaggctggcatcagcaagaatggccagacgagggaacacgccctcttggcatacacactgggcgtcaaacaactgatcgtgggcgtgaataaaatggattccacagagccaccctattcccagaaaagatacgaggagatcgtcaaggaagtatctacatacataaaaaagattggctacaaccctgatacagtggcatttgtgcctatctctgggtggaacggcgataacatgctggaaccttctgccaatatgccttggttcaaagggtggaaggtcactaggaaagacggaaacgcttctggaactacactgctcgaggcactggactgtatcctcccccctactaggccgacagataaacccttgcgcctccctttgcaggacgtgtataagatcgggggtattggaaccgtgcctgttggcagagttgagaccggcgtcctgaagcccggaatggtggtgacattcgcgcctgtcaacgtaactactgaggttaaatcagtggagatgcatcacgaggccctgtccgaggccctacctggtgacaatgtgggcttcaatgtgaagaacgtgtccgtcaaagatgtgcggagagggaacgtagccggagattcaaagaacgaccctccaatggaggccgctggatttaccgcccaggtgatcattttgaaccacccaggacaaatctccgccggttatgcccctgtacttgattgccatacagcccacatagcatgcaagtttgccgagcttaaagagaaaatagatagacggagcggtaagaaacttgaggatgggccaaagttcctcaaatcgggtgacgccgctatcgtagatatggtgcccggtaagcctatgtgcgttgaatccttttccgattatcctccactcggaaggtttgcagttagagatatgaggcaaaccgtagcagtcggggtcataaaagctgtggataagaaggctgcgggagcaggcaaggtgactaagagtgcacagaaagcacagaaggccaagtag

SEQ ID NO: 222389 - DNA, 438 bp, synthetic construct
  misc_feature 1..438: note = Description of Artificial Sequence: Synthetic coding sequence
  source 1..438: mol_type = other DNA
atgggcaaagaaaaaacacatatcaatatcgtggttataggacatgtggacagcggcaagtctacaacgactggtcacttaatctataaatgcggtggtattgataagcgaaccatcgagaagttcgaaaaggaagctgccgagatgggcaaaggatcgttcaaatacgcatgggtcctggacaaactgaaagctgaaagggaacgagggatcactatcgacataagcctgtggaagtttgaaaccagcaaatactatgttaccattattgatgctcccggtcatagagacttcatcaagaatatgattactggaaccagccaggccgattgtgccgttctgatcgttgcggcaggagttggagagttcgaggcagggatttcgaagaacgggcagactcgcgagcacgcattgctagcctatactctgggggtctag

SEQ ID NO: 222390 - DNA, 1281 bp, synthetic construct
  misc_feature 1..1281: note = Description of Artificial Sequence: Synthetic coding sequence
  source 1..1281: mol_type = other DNA
atgggtaaggagaagacacacatcaacattgtcgtgatcgggcatgtggatagtgggaagtcaacaacaacagggcacctcatatacaaatgtggcggaatcgataagaggacaatcgagaaattcgagaaagaagcggcagagatggggaagggaagctttaaatacgcctgggtattggacaagcttaaagccgaaagagagcgtggcatcacgattgacatttcgctctggaaatttgaaacgtcaaaatattatgtgaccatcatcgatgcccctgggcaccgtgactttatcaaaaacatgattaccggcaccagccaggccgactgcgcagtgcttatcgtagcagccggagtgggtgagttcgaagccggtatctcgaagaatggtcagacacgggagcatgcccttctggcatacaccctgggcgtgaaacagttaatcgtaggcgtgaataaaatggactcgactgagcccccatattctcagaagcggtatgaggagatcgtcaaggaggtctccacctatatcaaaaagatcggttacaacccagatactgtagccttcgtcccgatcagtggctggaacggagataatatgttagagcccagtgccaatatgccatggttcaaggggtggaaagtcactcggaaggacggaaatgcttctggaaccaccctgttggaggcattggactgcatattaccacctactcgccctacagacaaaccccttcgcctgccactgcaagatgtctacaagatagggggtattggaaccgtccccgtacctagcggagattggtgttcccctggaatggttgtgacgttcgcaccggttaatgtaaccactgaggtcaaatctgtggaaatgcaccacgaagctcttagtgaggccctcccaggcgataatgttggcttcaacgtcaagaatgtaagcgtgaaggatgtgagacgcggaaatgtagctggcgactctaagaatgacccccctatggaagccgcaggcttcactgcgcaggtgattatcctgaaccatccgggacagatatcagccggatatgctcccgtactggactgtcacaccgcccacatagcctgcaaattcgctgagttgaaggaaaagattgatcggagaagtggcaagaagctggaggatggcccaaagttccttaaatccggtgacgccgcaattgttgacatggtccccggaaagcccatgtgtgtggagagcttttccgattacccacctcttgggaaaagtttatgttgttcctag

SEQ ID NO: 222391 - DNA, 1326 bp, synthetic construct
  misc_feature 1..1326: note = Description of Artificial Sequence: Synthetic coding sequence
  source 1..1326: mol_type = other DNA
atgggtaaagagaagactcacatcaacatcgtggtcatcggtcatgtggactctggcaagtctacgaccaccggccacttaatatacaagtgcggtggcatagataagcgcaccattgaaaagttcgaaaaggaagcggcagagatgggcaagggcagctttaagtacgcctgggttcttgataagttgaaggcagagcgtgaacggggtattactatcgatatatctctctggaaattcgaaacctccaaatattacgttaccattattgatgcccctggccacagggatttcataaagaacatgataaccggaactagccaggccgactgtgctgtattgatcgttgcagccggagtcggcgagtttgaggcagggatctcaaaaaatggtcagacgagggaacatgcgttactggcttatagccagaaacgttatgaagagatcgttaaggaggtttccacctacattaaaaaaattgggtataatcctgatactgtggcctttgtccccataagtggctggaacggtgacaatatgctcgagccaagcgccaacatgccctggttcaagggctggaaggtcacacgcaaggacggtaacgcatctggcaccacactacttgaggcgctggattgtattttacctcccactcgacctacagacaaaccgctgcgcctccctcttcaggatgtgtataagattggcggaattggcacagtgcccgttgggcgtgtggagaccggcgtactgaagcctggtatggtagtaaccttcgctcctgttaacgtgactacagaggtcaaatcagtggagatgcaccacgaggccctgtccgaggcgctccccggagacaatgtgggcttcaatgtgaaaaacgtcagtgttaaggatgttcgaagaggcaatgtggctggcgattccaagaacgacccacccatggaggctgcaggcttcactgcgcaggttattatcctcaatcatccgggacagatctcagcaggctacgccccagtgctggactgccacacggcccatatcgcctgcaaattcgctgagctgaaagagaaaattgaccggagatccgggaaaaaattagaagacggacctaagttcttgaagagcggtgacgccgcaatcgtcgatatggttccgggtaaaccaatgtgcgttgagtccttttccgactatccgcctttgggcagattcgcagtaagagatatgagacaaactgtggctgtaggagtgattaaggccgtcgacaagaaggccgctggggctggaaaggtgacaaagtctgcgcagaaggcacaaaaagcaaaatag

SEQ ID NO: 222392 - DNA, 324 bp, synthetic construct
  misc_feature 1..324: note = Description of Artificial Sequence: Synthetic coding sequence
  source 1..324: mol_type = other DNA
atgggcaaggagaagactcacataaacatagtggtgatagggcacgtggatagtggcaagtccaccaccaccggtcacctaatatataaatgtgggggtatcgacaaaaggaccattgaaaagtttgaaaaggaggcagcggaaatggggaaaggatcctttaagtatgcctgggtcctggataagctgaaagccgaacgcgagcgtggtattacaatcgatatctcattatggaagtttgagacctctaaatactatgtcaccatcattgatgcgcctggacatcgcgacttcataaaaaatatgattactggcacgagctag

SEQ ID NO: 222393 - DNA, 336 bp, synthetic construct
  misc_feature 1..336: note = Description of Artificial Sequence: Synthetic coding sequence
  source 1..336: mol_type = other DNA
atgggcaaagaaaaaacccatattaacatcgtggttattgggcacgttgacagcggcaagtctacaactacgggtcatctaatctataaatgcggcggaatagataagcgcaccatcgaaaaatttgagaaggaagccgcagagatgggcaaaggaagcttcaagtacgcgtgggtcctggacaagttgaaagctgaaagagaaagggggattacaattgacatcagcctttggaagtttgaaaccactaaacagtggaccagacggctgctggaactggctaggagcccaagtctccctcgcaagttgcgaaggctgaatgagtattacccgtag

SEQ ID NO: 222394 - DNA, 1626 bp, synthetic construct
  misc_feature 1..1626: note = Description of Artificial Sequence: Synthetic coding sequence
  source 1..1626: mol_type = other DNA
atggtcatcaatctgtgcctgccccagttccggccaaggattcactgtaataaaattagcgctgacggctacgaggtagagaatctgataagcgaagatcttacgaaaaggagtcacggttttcgaaccgaatattttattaaaccacccgtgtacgtgacagtcagtttcccatttaacgtagagatttgtagaatcaacatcgatttgacagccggtggcggacagaatgtgactggcttggaaatgtatacgagtgcatcgtctagccgggtcagctggaataccccacagtgccgaactttggggccagccgaaccttccgtaccagacaaagaagcatttaccctcgtcggtaaagtgctcctgaagaatcagtcccaggtggtgtttagtcaccggggattcaaggcgagacctcccttcggggctatggaggccaccctcccaagcccagcagtcgtagcacaggagctgtggaataaaggagccctgtctctgtcccacgtggcccaccttcggatctgtataacccatgtcacaggcggtggaatcccctgcattaagagactggaggtttggggccagccagctaagacgtgttctcaggaggtgatcgattccattttgttggtgacatctgagaacctgcctcaggatgtggctttgcaggcaccagcgcttcctatggaatccgattgtgatcccggagatcagccagagagccagcaagctccatcttcccttcaaaagctagctgaaatcattcaagatgtgcccgaggagtttctggatccaattacattagagattatgccttgccctatgctgctgccctccggaaaagtgatagatcagtctaccctggagaagtgcaacagaagtgaagctacctgggggagagtgccttccgatccctttacaggggttgctttcacaccgcatagtcagcctttgccacatccctcactaaaggccagaattgatcactttctgctgcagcattcgataccaggctgtcacctgctgggacgcgctcagaccgcactcgctgtgatacctagttccatcgttctgcccagccagaaacgcaaaatcgaacaggccgaacacgtgccagatagcaatttcggcgtgaacgcctcatgcttttcagcaacctcacccctcgttttgcctacaacgtcagaacacaccgcaaagaagatgaaagctactaacgagccttcccttacacatatggactgctccaccggcccactcagccacgaacagaaactgtcccagtctcttgagattgccctggccagcaccttaggttctatgccatcgtttaccgcccgtctcacccggggacagctgcagcacctgggcactcggggatcgaatacctcatggcggccaggtaccggctctgagcaaccgggaagcatactgggacccgagtgtgcttcatgtaaacgtgtatttagcccctattttaagaaggaacccgtgtatcagttgccatgcgggcatctgctctgtcgcccatgcctcggcgagaaacagcggagcctccctatgacttgtacagcatgccagagacctgtagcctcccaagatgtgctgagagtccatttttag

SEQ ID NO: 222395 - DNA, 1392 bp, synthetic construct
  misc_feature 1..1392: note = Description of Artificial Sequence: Synthetic coding sequence
  source 1..1392: mol_type = other DNA
atgggcaaagaaaagacccacattaacatagttgtgattggccacgtcgacagtggcaaatctaccaccacagggcatcttatctacaagtgcggagggattgataaaaggaccatcgagaaatttgagaaagaggcagcagagatggggaagggttccttcaagtatgcttgggtgctggataagctcaaggctgagagggaaaggggcatcaccattgatatttcactatggaagtttgaaaccaccaaatactacattactattattgatgcacccggtcatcgcgactttattaagaacatgataactggcacaagtcaagccgattgtgctgttttgatcgtcgctgcaggcgtgggggaatttgaagctggcataagcaaaaacggtcagactagggagcacgcccttctggcctacacccttggggtgaagcaactgattgtaggcgtaaacaaaatggattctacagagcctgcgtatagcgagaaacgctacgacgaaatagttaaggaggtgagtgcctacattaagaaaattggttataatccggctaccgtcccttttgttccgatttcggggtggcatggcgacaacatgctggaaccatcacctaacatgccttggttcaaaggctggaaagtggagcggaaagagggcaacgcctcgggcgtctcactgttagaggccttggacaccatacttcctccgacaaggcccacggataagccactcagattgccactgcaggatgtgtacaagataggaggcattggaaccgtccccgttggaagagtggagaccgggatactgagaccagggatggtggtaacatttgctcccgtgaatatcactacggaggtgaagagcgtcgagatgcaccacgaggcactgagtgaggctcttcccggagacaacgtaggatttaatgtgaaaaacgtgagcgtgaaggatatccggagaggaaatgtgtgcggcgacagcaagtccgacccccctcaagaggccgctcagtttacttctcaggttattattctgaaccatcctggccagataagtgcagggtactcacccgtgatcgattgtcacacagcccacattgcatgtaagttcgctgagctgaaggagaaaatcgataggcgttctgggaagaagctggaagacaatcctaaaagcctgaaaagcggcgatgctgcgattgtggagatggtacctggcaaacctatgtgtgtcgagtcctttagtcagtacccccctctcggtcgatttgcggttagagacatgagacagacagtggctgtcggcgtcattaaaaacgttgagaaaaagagcggtggagctggaaaagtgaccaaaagcgcacaaaaggcacagaaggccggaaagtag

SEQ ID NO: 222396 - DNA, 678 bp, synthetic construct
  misc_feature 1..678: note = Description of Artificial Sequence: Synthetic coding sequence
  source 1..678: mol_type = other DNA
atgggtttcggcgacctgaagtcccctgcaggacttcaggtccttaatgactatctcgctgataagagttatatcgaagggtacgtgcccagtcaagccgatgtggcagtgtttgaggccgtgtcgagcccacctccagctgatctatgtcacgctcttagatggtataaccatataaaaagttacgaaaaggagaaggcctctctccccggagtcaaaaaagccttggggaaatatggacccgctgatgtggaggatacaaccggcagtggcgctacagattcgaaggatgacgacgacattgatttatttggatctgatgatgaagaagaatcagaagaggccaagcgtctgagggaagagaggcttgctcagtatgagtctaagaaagcgaaaaagcctgcactggtggctaagtcctctatactattggacgtcaagccctgggacgacgagaccgacatggcaaagctggaagaatgtgtccggtcaattcaggcagatggactagtctggggttcgtctaagctcgtgccagtcggttacggtattaaaaagctccaaattcagtgcgttgtggaggacgataaagtgggaacggacatgctggaagaacagatcactgcatttgaggactacgtacagtcaatggatgtggccgcttttaataagatatag

SEQ ID NO: 222397 - DNA, 678 bp, synthetic construct
  misc_feature 1..678: note = Description of Artificial Sequence: Synthetic coding sequence
  source 1..678: mol_type = other DNA
atgggattcggggatctaaagagtccagccggtttgcaggtgctgaatgattacctggcggataagagttacattgaaggctacgtaccctctcaggcagacgtcgccgtcttcgaagctgtgagctcgccccctcccgctgatctgtgtcatgcactccgctggtacaatcacataaaatcttacgagaaggaaaaagccagcttgccaggcgtgaaaaaagccctgggcaagtatggccctgccgatgtggaagataccaccggttctggggcaacagattccaaggacgacgatgatatcgacttgtttggctctgacgacgaagaagagtctgaggaagccaagcgcctcagggaggagaggcttgcccagtacgaatccaagaaagcaaagaagccggcactagttgcaaagagttccattctcttggacgtgaagccatgggacgatgaaaccgatatggccaagctggaagagtgtgttagatccatacaagccgacggccttgtgtgggggtcttcaaagctcgtaccagtggggtacggcatcaaaaagcttcagatccagtgcgtggtggaagatgataaggtggggacagacatgctggaagaacagattacagcctttgaggattatgtgcaatctatggacgttgcagcatttaacaaaatctag

SEQ ID NO: 222398 - DNA, 678 bp, synthetic construct
  misc_feature 1..678: note = Description of Artificial Sequence: Synthetic coding sequence
  source 1..678: mol_type = other DNA
atgggtttcggggaccttaagtctcctgcaggcctccaagtacttaatgattacctggcagataagtcttacatcgaaggctatgtgccttcgcaggctgatgtcgctgtgtttgaggcagtgagcagccctcctccggcagacctgtgtcatgcccttagatggtacaatcacattaagtcctacgagaaggagaaggcatctctacccggtgtcaaaaaggccttgggaaaatatgggcctgcagacgtggaagataccacaggctccggggcaaccgatagtaaggacgatgacgatatcgatctgtttggatcagacgatgaagaagagtctgaagaggcaaaacggctgcgggaggagagactggcacagtatgagagcaagaaggctaaaaagcccgctctggttgctaagagcagtatcctgctggacgttaagccatgggacgacgaaaccgacatggcaaagttagaagagtgtgtcagatctatccaagccgacgggctcgtctggggcagctccaaattagtgcccgttggatacggtatcaaaaaattgcagatccagtgcgtggtggaggacgacaaggtaggaacagacatgctggaggaacaaattactgccttcgaggactacgtccaatcaatggacgtggccgctttcaataagatctag

SEQ ID NO: 222399 - DNA, 372 bp, synthetic construct
  misc_feature 1..372: note = Description of Artificial Sequence: Synthetic coding sequence
  source 1..372: mol_type = other DNA
atgggcttcggcgacctgaagtcccccgcaggtcttcaagtactgaatgattacctggccgacaaaagctatattgagggctatgtcccatcccaagcggacgtcgccgtcttcgaagccgtctcgagccccccacctgccgacctctgccatgccctgcgttggtacaatcacatcaagtcttacgaaaaagaaaaggcctcactccccggagtaaagaaggcactgggtaagtacggccctgcagatgttgaagatactacagggtctggggctactgacagcaaggacgacgatgacatagacctatttggcagtgacgacgaggaagaatccgaggaggcaaagcgcctcagggaggagcgcttgtag

SEQ ID NO: 222400 - DNA, 846 bp, synthetic construct
  misc_feature 1..846: note = Description of Artificial Sequence: Synthetic coding sequence
  source 1..846: mol_type = other DNA
atggcgactaatttccttgcacatgagaagatctggtttgacaaattcaagtatgacgacgctgagaggagattctatgagcagatgaacggccctgtggccggtgcctcacggcaggagaacggagcctctgtgatacttagggacattgcccgtgctagagaaaatattcagaagtctctcgccggaagtagcggccctggggctagctcgggtacgagcggagaccatggcgaattggtcgtccggatagcatctttggaggtggagaaccagtctttacggggtgtggttcaagagctgcaacaagctatttcaaagctggaggcacgtctcaacgttctggagaaatcatccccaggccaccgggctacagcacctcagacacagcatgtctccccaatgagacaagtagaaccaccagctaagaaacccgctacgccagccgaggatgatgaggatgacgatatcgacttgttcggaagcgataacgaggaggaagacaaggaggccgcacagctcagagaagaaagactgcgacaatacgcagagaagaaggctaagaaaccagcgctggtggcgaagagctcgatactgctggacgtgaagccgtgggatgatgaaaccgatatggcacagctggaggcctgcgtgcgtagtattcagctggacggtttggtttggggagcctccaagctggtgccagttggttatgggatccgtaagttacagatacagtgcgtggtggaagatgacaaagtcggtacagacctcttagaggaggaaatcacaaagttcgaggaacacgtgcaatcagtagatatagcagccttcaacaaaatctag

SEQ ID NO: 222401 - DNA, 1896 bp, synthetic construct
  misc_feature 1..1896: note = Description of Artificial Sequence: Synthetic coding sequence
  source 1..1896: mol_type = other DNA
atgcgcagtggaaaggcctcctgtacactagagactgtatgggaggacaagcacaaatatgaagaggctgagcgcagattttatgaacacgaagccacacaagcagccgcatctgcccagcaattaccggcagagggaccggctatgaacgggccagggcaggatgaccccgaggacgccgatgaggccgaggcgccagacggcggaagccgaagagatcctagaaaatcacaagacagtcgcaaaccactgcagaaaaaacggaagcgttccccaaagtcaggcctgggacctgccgatctggcactccttggcctgagcgcggagcgggtgtggctcgataagagtctcttcgatcaggctgagagctcctatcgccaaaaactggctgatgtggctgctcaagccgcatggccaccagctctcgccccatggggtctgtgcactcacggaaatcaggtggcctgccaccatgtcacttggggcatttgggttaataagtccagtttcgatcaggccgagcgagcttttgtcgagtggagccaagcattgctcctcgcccctgatggcagccgcagacaggggactccgaacacagggcagcaagtggcggttcctgatttagcgcaccagccttcacctccagtgaatgggcagccaccgttgggctccctccaggcgttggtcagagaagtgtggcttgaaaaaccaagatacgatgccgctgagcgcggtttctatgaggccctgtttgacggtcaccctcctggtaaagtacgacttcaggagagagccggattggcagagggggcacgcaggggacgcagggaccgacggggacgcaacattctcgggaataagagggcaggattgcgccgagctgacggagaagcgcctagcgctctcccttactgttatttcctccaaaaggatgcagaagctccctggctgtcaaagcctgcgtacgacagcgcagagtgccgccaccacgctgccgaagcactgagggtggcgtggtgcctggaggcggcttcactaagccacaggcccggacctaggtcaggactgagtgtgagcagtcttagaccaaatcggaagatggccacaaatttcctggcccatgagaaaatatggttcgacaagttcaagtacgatgatgctgaaaggcgattttacgaacagatgaacgggccagtggctggagcatctagacaagaaaacggcgcttccgtgattctcagagacattgctagagcccgtgagaacatccagaaatccctcgctggttcttccgggcctggggcatcctcgggcacgagcggcgatcatggcgagttggttgttagaatcgccagcctcgaggtcgaaaaccaatctctgcggggtgtcgtccaggagctccaacaagctatctcaaaacttgaggccagactcaatgtcctagaaaagtctagcccgggtcaccgagccactgcccctcaaacccagcacgtgtctcccatgagacaggttgaacccccagctaagaagcctgccacgcctgcagaggacgatgaggatgacgatattgatctgttcggtagtgataatgaggaggaagacaaggaggctgctcagcttagagaggagagacttcgacagtatgcagaaaagaaggctaagaaacctgccctggttgcaaagtcgtccatacttctcgacgtcaagccatgggacgatgaaactgacatggctcagctggaagcatgtgtgcggtcaatccaactggatgggttagtctggggcgcttccaaactggttccggtaggttacggcattagaaagctgcagattcaatgcgtaggcggaaggcagggaggcgaccgtctggccggaggcggtgatcatcaggtctag

SEQ ID NO: 222402 - DNA, 1728 bp, synthetic construct
  misc_feature 1..1728: note = Description of Artificial Sequence: Synthetic coding sequence
  source 1..1728: mol_type = other DNA
atgaatggcccagggcaggatgatcctgaagacgcggacgaagcagaagcccctgacggcggaagccgcagagacccgcgaaagtcccaggatagccgcaaaccgctgcagaaaaagaggaagaggagtcctaagtccggcctgggccctgccgacctcgctctgctggggttgagcgccgagagagtatggctcgataaatctttgtttgatcaagcagagtcttcctatcgacagaaactggcagacgtggcagcacaggctgcttggccgcctgctctcgcgccatggggcctgtgcacccacggaaatcaggtggcttgtcaccatgttacttggggtatatgggtgaacaagtcaagtttcgaccaagctgaacgcgcttttgtagaatggtcacaagccctcctcctggccccagatggctctaggcggcaaggtacccccaatactgggcagcaggtcgccgtgccggatttagcccatcagccctctcccccagtaaacggccagcctcctctcggcagcctccaggccctggtcagagaagtatggctcgagaagcccagatacgatgctgccgagcgaggcttctatgaggccctttttgatggccaccctccagggaaggtaagactgcaggaacgtgccggactggccgaaggcgctcggaggggcaggagggatcgacgcggaaggaacattctcggaaacaagcgggcagggctgcgtagggcagacggtgaggcacctagtgctctcccatactgttactttttgcagaaggacgctgaagctccctggttatccaaacctgcctacgacagcgcagaatgccggcatcacgctgctgaagcactgagagttgcttggtgtctggaggccgcttctcttagtcatcgccctggtcctcgcagcggcctcagtgtgtcctctctgagacccaacaggaagatggctaccaattttctggcccatgagaaaatatggttcgataaattcaaatatgacgatgcagagcggagattttacgaacaaatgaacggcccagtcgctggcgcttctagacagtctagtggccctggtgcctcctcgggcacctctggcgaccatggagaactggtggtgcggattgcctccctcgaggtggaaaaccagtcactgcgtggagtcgtgcaagaattacagcaggccatctctaaactggaggcgaggctgaacgtgctcgaaaagtcttctccaggccaccgggcaacagcaccacaaacccaacacgtgagcccgatgcggcaagttgagccacccgcaaagaagccagccacccccgctgaggatgacgaagatgacgatattgacctgtttggctcagacaacgaagaagaggataaggaagccgcacaacttagagaagagcggttgaggcagtatgccgagaagaaagctaagaagcctgcattagtggccaaaagctccatattacttgatgtcaagccctgggatgatgaaacagatatggcacaattggaggcgtgcgtgcgtagcatccaattggacggtttggtgtggggggcttccaaacttgttccggttggttacggcattcggaaacttcagatccagtgtgtggtggaggatgacaaggtggggacggatttactcgaggaagagattaccaaatttgaggagcacgttcagagcgttgatatcgccgctttcaacaaaatctag

SEQ ID NO: 222403 - DNA, 846 bp, synthetic construct
  misc_feature 1..846: note = Description of Artificial Sequence: Synthetic coding sequence
  source 1..846: mol_type = other DNA
atggcgacaaacttcctggctcatgaaaagatatggtttgacaagttcaagtacgacgacgcagagagaagattttacgaacagatgaatgggccagtggcaggcgcatcccgccaggagaacggagcaagcgtaattctgcgtgatatagcaagggctagggagaatattcagaagtcactggcgggaagttctggtccaggagccagtagtggtacatctggggatcacggcgaactcgtcgtgaggatcgcgagtttggaggtagagaatcagagtctccgtggggtggtgcaggagctgcaacaggcaatctctaaactggaagccagactgaatgtgctggaaaagtcctctcctggccaccgcgctactgcgcctcagacccagcacgttagccctatgcggcaggtagaaccacctgcaaagaagccggcaacaccagctgaggacgacgaggacgatgatatagatttgttcggttccgacaatgaggaagaggacaaggaagctgctcaacttcgtgaggagcgcctgagacagtacgcagaaaaaaaagctaaaaaaccagcactggtagccaagtcatccatcctgttagatgtcaagccgtgggatgacgaaaccgatatggcacaactggaagcttgtgtccgctcgatacagctggacggcctagtgtggggcgcatctaaactggtaccagtagggtacggcataagaaagttacagatacagtgtgttgtcgaggatgacaaggtaggcaccgatcttttagaagaagagataaccaaattcgaagaacacgtccaaagcgttgacatagcagccttcaacaaaatctag

SEQ ID NO: 222404 - DNA, 846 bp, synthetic construct
  misc_feature 1..846: note = Description of Artificial Sequence: Synthetic coding sequence
  source 1..846: mol_type = other DNA
atggcaacaaactttctcgcccacgaaaagatctggtttgataagtttaaatatgatgatgccgaaaggagattctatgagcaaatgaatggcccagtcgcaggagcctctcgccaggaaaacggcgctagtgtaattctgcgagacatcgctagagctcgagagaatattcagaagtccctagcagggagctcaggtccaggtgcaagctctggcacttccggagaccacggggagctggtggtgagaattgcctcactagaagtagaaaatcaaagtctgagaggcgtggtacaggaactccagcaggccatcagcaagctcgaagcgagactcaatgtgctggagaaatcttccccagggcacagagcgactgctccacagacacagcacgtgagcccaatgagacaggtggagccacccgcaaaaaagcccgcaacgcccgcagaagacgatgaggacgatgacatcgacctgttcggtagcgacaatgaggaagaagataaggaggccgctcaactgcgcgaggagaggttgcgccagtacgcagagaagaaggccaagaagcccgctctggttgccaagagctccattctgctagacgtgaagccatgggacgacgaaaccgatatggcgcagctggaagcctgcgtccggagtatccaattggatggcctcgtgtggggtgcttccaaactggtacctgtgggttatggcattcgcaaattacaaattcagtgtgttgtggaggacgataaagtggggaccgacttgcttgaggaggagattacaaaatttgaagaacacgtccagtctgtggatatcgcggctttcaacaaaatctag

SEQ ID NO: 222405 - DNA, 1944 bp, synthetic construct
  misc_feature 1..1944: note = Description of Artificial Sequence: Synthetic coding sequence
  source 1..1944: mol_type = other DNA
atgcgcagcggaaaggcctcatgcacactggaaactgtgtgggaagataaacacaaatacgaggaggcagagcgcaggttttacgagcacgaggctactcaagccgcagcaagtgctcagcagttgccagctgagggccctgcaatgaatggtcccggacaggatgacccagaagacgccgacgaggctgaagctccagatggaggtagtcgccgagatccacgaaagtcccaggattcccgtaaacccctgcaaaagaaacggaagaggtcgcctaaaagcggattgggccctgccgatttggctctgctgggactgagtgctgaacgtgtctggctggacaaatccctgtttgaccaagcagaaagctcataccggcaaaaacttgccgatgtcgctgcccaggcggcttggccccctgccctcgccccttggggattgtgtactcacggcaaccaggtggcgtgccatcacgtaacatgggggatatgggttaacaagagtagctttgaccaggcggagcgtgcctttgtagaatggagtcaggctctactgctggctccagacggatcccgacgacagggcacgcccaatacgggtcaacaagtggcagtccctgatcttgcccaccagccttcaccccctgtgaatggccagcccccactggggtcactgcaagccctcgtcagggaagtatggctggagaagcctagatatgacgctgcagagagaggtttttacgaagcactctttgacgggcaccctcccggaaaggtgcggttgcaggagagagctggtctggccgagggggcacgtcgaggtcgacgcgatcgaagaggcaggaacatcctgggtaataagcgggcaggcctgaggagagccgatggggaggcaccctcggctcttccatattgctactttctgcagaaggatgcagaggccccatggctgtcaaaacccgcttacgacagtgcagagtgcagacaccacgctgccgaggctctccgagtcgcctggtgcctagaagccgcttccttaagccaccgaccagggccaagatctgggctgagcgtgagcagcctgcggccaaataggaaaatggctacaaacttcctggcccacgagaaaatttggtttgataagtttaaatacgacgatgctgagcggaggttttacgaacagatgaacggccctgtggcgggagcgagccgccaggagaatggggcatcggtgatattgagggacatcgcacgggcacgcgagaacattcagaaaagtttggctggatcttccggcccaggtgcgtccagtgggactagtggggaccacggcgagctggtcgttcgtatagcctccctggaggttgaaaaccagagcttacggggtgttgtgcaagaactccagcaggctattagcaagctggaggcacgtttgaacgtgttagaaaaatcaagtcctggccacagggcaaccgctccccaaactcagcatgtgtcacctatgcgacaagttgaaccccctgctaagaaacctgctacacccgcagaggatgatgaggacgacgacattgatcttttcggctctgataatgaagaagaagacaaagaggcagcacagctgagggaagaaaggctccgccagtacgccgagaaaaaggcaaagaagcccgctttggtggccaagtcttccatcctcctagacgtaaaaccgtgggacgatgaaacagacatggcccagctagaagcatgtgtgcggagcatacagctggacgggcttgtgtggggagcctccaagctggtgcccgtgggatatggaattagaaagctacagattcagtgcgtggtggaggacgacaaggttggaactgaccttctggaggaggagattacaaaatttgaagaacatgtacaatctgtggatattgccgcttttaacaaaatatag

SEQ ID NO: 222406 - DNA, 1944 bp, synthetic construct
  misc_feature 1..1944: note = Description of Artificial Sequence: Synthetic coding sequence
  source 1..1944: mol_type = other DNA
atgcgctccggtaaggcctcctgtactctcgagaccgtgtgggaagacaagcataagtacgaggaggccgaacggagattctacgaacacgaggcaactcaagcggctgctagcgctcagcagctgcctgctgaaggacccgcaatgaatggcccaggacaggacgatccagaggatgccgacgaagctgaagctcccgacgggggaagcaggcgagacccccgtaaatcccaggacagtagaaagccgctgcaaaagaagaggaaaagaagccccaagtccggcctgggacccgctgacctcgctttactggggctttctgctgagagagtatggttggataaaagtttgttcgaccaggcagaaagctcataccgacagaaacttgcagacgtcgcagctcaggcggcatggcctcctgccctcgctccttgggggctgtgcacgcatgggaaccaagtcgcatgccatcacgtcacttggggcatctgggtgaacaagtcaagtttcgaccaggcagagcgtgcctttgttgaatggtctcaggcgctgctgcttgcccctgacggatcaagacggcaaggtacacccaacaccggtcagcaggttgccgtcccagatctggctcaccaaccctctccccctgtcaatggacagccacccttaggcagtctgcaggcgctagtgagagaggtgtggctcgagaagccaaggtacgatgccgcagagcggggtttttatgaagcactttttgatggtcacccacccggaaaggttaggctacaagagcgcgcaggacttgcggagggcgcacgcaggggaagacgggacaggcggggtagaaatattctgggaaacaaacgagccggactgcggagagctgacggcgaagccccttccgctcttccatactgctacttcttgcagaaagatgcagaggcaccctggctatcaaagcccgcatacgacagcgccgagtgtcgtcatcatgccgctgaggccctgcgcgttgcctggtgcctggaagccgcttctctgagccacagaccaggccctcgcagcggcctctcagtgtcaagtttgcgtccgaacaggaaaatggcaactaattttctagctcacgaaaagatatggttcgacaaatttaagtatgatgacgcagagcgccgattttatgaacagatgaatgggcctgttgcaggagcctcccggcaagagaacggggcttccgtgatcctccgggacatagcacgcgcacgggagaatatccaaaagtcgctggccggatcatccggccctggggcttcgtcaggcactagcggtgaccacggggagctggtggtccggatagccagcctcgaggtggagaaccagtccctcaggggcgtcgtgcaagaactgcagcaggccatcagtaagttggaggcccgactgaacgtgctagaaaaatcttcacctgggcatcgtgctacagcccctcagacgcaacacgtgagccccatgcgtcaggtcgaacctcccgctaagaaaccagctacccccgcagaggatgatgaagacgacgatattgatctgtttgggagcgataacgaggaagaggacaaagaggccgcacagctgcgagaggagcggttacggcagtatgcagagaagaaggccaagaagcccgcactagtcgccaagagttctattctgttggacgtcaaaccctgggacgacgagactgacatggctcagcttgaagcctgcgtccgctccattcagctcgacggcctcgtatggggggcatcaaaacttgtccctgtggggtacggcattcgcaagctgcagattcagtgcgtcgttgaagatgataaagtgggaaccgatcttctggaggaggagatcaccaagttcgaagagcacgtgcagtcagtggatatcgcagccttcaataagatctag

SEQ ID NO: 222407 - DNA, 774 bp, synthetic construct
  misc_feature 1..774: note = Description of Artificial Sequence: Synthetic coding sequence
  source 1..774: mol_type = other DNA
atggcaaccaacttcctggcacacgaaaaaatttggttcgataagtttaagtatgatgatgctgagaggcggttttatgagcagatgaacggcccagtggccggagccagccgacagtcttccggcccaggagccagcagtggtacaagcggcgaccacggagaattggtggtgcggatcgccagtctggaagtcgaaaatcaatcactgagaggggtggtccaggagctccagcaagcgatatcaaaattggaggcaagactgaatgtcttggagaagtcctcaccaggccaccgggctaccgcgcctcagacccagcacgtgtcaccgatgagacaagtcgagcctcccgctaagaagcccgctacccccgctgaggacgacgaggacgacgatatcgacctgtttggctctgacaatgaggaggaagacaaagaggccgctcagctccgcgaggaacgcctcaggcagtatgcagagaaaaaggcaaagaagcccgctctggtagcaaaatctagtattcttctggatgttaaaccatgggacgacgagacggacatggcgcagcttgaggcatgcgttcggagcatccagctggacggtctcgtttggggtgcctccaaacttgttcctgtgggctacggcatccgcaaactgcagatacagtgtgtagtggaagatgacaaagtgggtactgatttgcttgaggaggaaattaccaagtttgaagagcacgtgcagagtgtagatattgcggcttttaacaagatctag

SEQ ID NO: 222408 - DNA, 546 bp, synthetic construct
  misc_feature 1..546: note = Description of Artificial Sequence: Synthetic coding sequence
  source 1..546: mol_type = other DNA
atgcggtctggtaaagcctcatgtaccttagaaacagtctgggaagacaaacacaagtacgaagaggccgaaagaagattctatgagcatgaagcaacgcaggccgcagcttcagcacaacagttaccagcagaggggcctgcaatgaacgggcctggacaggatgacccagaggatgcagacgaagcagaggctcccgacggcggaagcaggagagaccctagaaagagccaggattctagaaagcccctgcagaaaaaacgtaagcgctcccctaagtctggtctaggtcccgctgatctggcactactgggtctctcagcagagagggtgtggctagataaaagcctgttcgaccaggccgagagctcctacaggcagaagctggctgacgtagctgctcaggccgcatggccacctgcactcgccccttggggactctgtactcatggcaaccaggtcgcatgccaccacgtgacgtggggcatctgggtcaacaagagttctttcgaccaggccgagagagcttttgtggaatggagctag

SEQ ID NO: 222409 - DNA, 192 bp, synthetic construct
  misc_feature 1..192: note = Description of Artificial Sequence: Synthetic coding sequence
  source 1..192: mol_type = other DNA
atgcgaagtgggaaagccagctgtacactggagacagtgtgggaggacaagcacaaatacgaggaggcagagaggcgtttttacgaacacgaggctacccaggctgccgctagcgcacagcagctaccagccgaaggcccagccatgaacggcccaggccaggatgatcccgaagatgccgatgaagcctag

SEQ ID NO: 222410 - DNA, 120 bp, synthetic construct
  misc_feature 1..120: note = Description of Artificial Sequence: Synthetic coding sequence
  source 1..120: mol_type = other DNA
atggccaccaatttcttagcgcacgaaaagatttggttcgacaagtttaagtatgacgatgcggaacggaggttttacgaacaaatgaacggtccagtggccggtgccagccgccagtag

SEQ ID NO: 222411 - DNA, 246 bp, synthetic construct
  misc_feature 1..246: note = Description of Artificial Sequence: Synthetic coding sequence
  source 1..246: mol_type = other DNA
atgaggtcaggtaaagccagctgcacactcgagacagtttgggaggataaacataagtacgaagaggctgagaggcgattctacgagcatgaagctacccaggccgctgcatccgctcaacagctgcctgcagagggaccagccatgaacgggcctggtcaggatgatcccgaagacgccgatgaggcagaagccccagacggtgggtccagaagagatccgcgtaagagccaggacagcaggtag

SEQ ID NO: 222412 - DNA, 114 bp, synthetic construct
  misc_feature 1..114: note = Description of Artificial Sequence: Synthetic coding sequence
  source 1..114: mol_type = other DNA
atgaggtcaggaaaagcatcctgcaccctcgagacggtttgggaagacaagcataagtacgaagaagccgagcgtcggttttacgagcatgaggctacacaggcagcagcctag

SEQ ID NO: 222413 - DNA, 162 bp, synthetic construct
  misc_feature 1..162: note = Description of Artificial Sequence: Synthetic coding sequence
  source 1..162: mol_type = other DNA
atgagaagcggcaaggcgtcttgcacgctcgaaacagtttgggaggacaaacataagtatgaggaagcagaacgcaggttttacgagcacgaagccactcaggctgctgctagcgcgcagcaactccctgctgaaggccctgccatgaacggccctggatag

SEQ ID NO: 222414 - DNA, 192 bp, synthetic construct
  misc_feature 1..192: note = Description of Artificial Sequence: Synthetic coding sequence
  source 1..192: mol_type = other DNA
atggccaccaatttcctagcccacgagaaaatctggttcgataaattcaagtacgacgatgctgaacggaggttctacgagcagatgaacgggccagtggctggcgcttctagacaggagaatggcgctagtgttatactgagggatatagcaagagccagagaaaacattcagaagagccttgcagggtag

SEQ ID NO: 222415 - DNA, 903 bp, synthetic construct
  misc_feature 1..903: note = Description of Artificial Sequence: Synthetic coding sequence
  source 1..903: mol_type = other DNA
atgagatctggcaaggcgtcctgcaccctggaaaccgtgtgggaagacaaacacaagtacgaagaagcagagcgacgcttctatgaacatgaagcaacccaggctgccgcatcagctcagcagctgcccgctgaggggccagccatgaatgggcctggccaggacgatccagaggatgctgatgaggctgaggccccagacgggggttcacgcagggacccacggaagagtcaggatagccggaaaccgctgcagaagaagagaaaaaggagtcctaagtctggcctcggacccgcagatctcgctctgcttggtctttccgcggagcgggtgtggttagataaatctctctttgatcaggctgaatccagctataggcagaaactggcagacgtggcagctcaggccgcatggcccccagctcttgctccttggggcctctgcacacacggtaaccaagtcgcgtgtcaccatgtgacgtggggcatctgggtgaataagagttcatttgatcaggccgagagggcttttgtggaatggagccaggcgctcctcttggctccggacggctcgcgacggcagggcactcccaataccggccaacaggtcgctgtgcctgatctggcccatcagccctccccaccagtgaatggccagccaccgctcggctcactacaggcattggtgagagaggtgtggctggaaaaaccgcgatacgacgccgcagaaaggggcttttacgaagccctgttcgatgggcacccccctggcaaggttaggctccaagaaagggccggactcgccgaaggggctagaaggggcagacgtgacaggcggggaaggaacatcctcggcaataaacgtgccggactgaggcgggcagatggcgaagctccatcttag

SEQ ID NO: 222416 - DNA, 66 bp, synthetic construct
  misc_feature 1..66: note = Description of Artificial Sequence: Synthetic coding sequence
  source 1..66: mol_type = other DNA
atgaggtctggcaaagcatcctgtaccctcgaaaccgtctgggaagataaacataagtatgagtag

SEQ ID NO: 222417 - DNA, 474 bp, synthetic construct
  misc_feature 1..474: note = Description of Artificial Sequence: Synthetic coding sequence
  source 1..474: mol_type = other DNA
atgaggtcaggcaaggccagctgtactttagaaacagtctgggaagacaagcacaaatatgaggaagccgagcggcgattctacgagcatgaggcaacccaggcagcagcttcagcacagcagctgcctgcagaaggcccagccatgaatggtccgggacaggacgaccctgaggacgcagacgaggctgaggctcctgacgggggaagtcggagagacccacggaagtcccaggactcacgcaagccactgcaaaaaaaacgaaaaagatctccaaagtccgggctgggccctgctgatttggccctgctgggactgtctgctgagagagtttggctcgacaaaagcctattcgaccaggcagagtcttcataccgtcaaaagctggccgacgtagccgctcaggcagcatggcccccagctctagcgccttggggcttgtgtacgcatggtaatcaggttgcctgtcattag

SEQ ID NO: 222418 - DNA, 774 bp, synthetic construct
  misc_feature 1..774: note = Description of Artificial Sequence: Synthetic coding sequence
  source 1..774: mol_type = other DNA
atggccaccaatttcctcgcccacgagaagatttggtttgataagtttaagtacgacgacgcagaacgtagattctatgagcaaatgaacggccctgttgccggagcgagtcgccagtccagcggtcctggcgctagctcaggtacgagcggcgaccatggcgagttggtcgtgcgcatcgctagccttgaagtggagaaccaaagtctccggggtgttgtacaggagctgcaacaagccatcagcaaactcgaggctaggctcaacgtcctggaaaaaagttctcccggacaccgtgccactgccccacaaacccaacatgtgagccctatgagacaagtagaacccccagctaagaaacctgccacaccagccgaggatgacgaagacgatgacattgaccttttcggatccgataatgaggaggaggataaggaggccgctcagttaagagaagaaaggctccgccagtatgcagaaaagaaagccaagaagccagccctggtggcaaagtcctctattttgctcgatgtgaagccttgggacgacgagacggatatggcccagctcgaggcttgcgtgcgtagtatacagcttgatggcctggtttggggggcttcgaagcttgtacctgtgggttatggcattcgcaagctgcagatacaatgcgtagtggaggacgataaggtaggtaccgacctccttgaagaagagatcaccaagtttgaggagcacgtgcagagcgtcgacatcgccgcttttaataaaatatag

SEQ ID NO: 222419 - DNA, 846 bp, synthetic construct
  misc_feature 1..846: note = Description of Artificial Sequence: Synthetic coding sequence
  source 1..846: mol_type = other DNA
atggctacaaacttccttgctcatgaaaaaatttggttcgataagttcaagtacgacgacgccgagcgcagattttatgaacaaatgaatggccctgtcgccggagcttcacgccaagaaaatggggctagtgtgattctaagggacattgccagagcacgcgagaacattcagaaatccctggccggaagtagcggtccgggtgcatcatccggcactagtggcgaccacggagagctggtcgttaggatcgcatcactggaggtcgaaaatcagtccctccgcggagtagtccaagaactccagcaggcgatctctaagctcgaagctagactgaatgtcctggaaaagtcctcacccggacatcgggcaacagctccccaaactcagcatgtgtcacccatgcgacaggttgagcctcccgcaaaaaaaccagcgacccccgcagaagacgacgaggacgatgatatagatctgttcgggtcagacaatgaagaggaggataaggaggccgctcagctaagggaagagcggctgaggcagtacgctgaaaagaaagctaagaaacctgcactggtggctaagagctctatactgctcgacgttaagccttgggacgacgaaacagatatggcccagctggaggcctgtgtgcgttcaatccagttagatggccttgtgtggggagccagcaagctggtaccagtgggatacgggatccggaaactccagatccagtgtgtggtcgaagacgataaagtcgggacagacttgctggaggaggaaattacaaaattcgaggagcacgtgcaatccgttgacatcgctgctttcaataaaatctag

SEQ ID NO: 222420 - DNA, 441 bp, synthetic construct
  misc_feature 1..441: note = Description of Artificial Sequence: Synthetic coding sequence
  source 1..441: mol_type = other DNA
atgcgatcaggtaaggccagctgtactcttgagaccgtatgggaggataaacacaagtacgaggaagcggagcgcagattttatgaacatgaggctacacaggcagctgctagcgcccagcagctacctgccgagggtccggctatgaatggccctggacaagacgaccctgaggatgctgacgaggcagaggccccagatggagggagcaggagagacccacgtaaaagccaggactcgcgcaaaccactacaaaaaaaacggaaaagatctccaaagtcaggccttgggcctgccgacctagcgctgcttggactctctgcagagagagtttggctggataaatctctctttgatcaggccgagtcctcatacagacagaaactggccgacgtcgcggcacaggcagcctggccacccgcactagcgccatggggttag

SEQ ID NO: 222421 - DNA, 615 bp, synthetic construct
  misc_feature 1..615: note = Description of Artificial Sequence: Synthetic coding sequence
  source 1..615: mol_type = other DNA
atggcaactaattttcttgctcacgaaaagatttggttcgacaaattcaaatatgacgatgccgaaagaagattttacgagcagatgaacggacccgtcgcaggggcttctcgccaggaaaatggagcttccgtgattttacgtgatattgcacgcgctagagagaatattcagaaaagtctagcaggcagcagcggacccggtgcatcatcaggtacctcaggggatcacggcgaattggtggtccggatcgccagcctagaagtggagaaccagagtctcaggggcgttgttcaggagctgcagcaggccatttccaagctggaggcaaggctaaatgtcctggagaagagttcccccggacaccgagccacggccccacagacccaacatgtcagtcccatgcgccaagtggaaccgcctgccaagaaacccgctaccccagctgaagacgacgaggatgacgatattgatctatttggctcagacaacgaagaagaagacaaagaggctgcccaactgagagaagagcgactcagacagtatgctgagaaaaaggcaaagaagcccgcactagtcgccaagtctagcatccttcttgacgtgaaaccttag

SEQ ID NO: 222422 - DNA, 390 bp, synthetic construct
  misc_feature 1..390: note = Description of Artificial Sequence: Synthetic coding sequence
  source 1..390: mol_type = other DNA
atgcgctctggtaaggccagttgcactctcgagacagtctgggaagacaaacacaaatacgaggaagctgaaaggcgcttctacgaacacgaggctacgcaggcagcagctagcgcccagcaactgcctgctgagggtcctgctatgaatgggccaggacaggatgacccagaggacgccgacgaagccgaggcccctgacggaggcagtcgtcgcgatccccgtaagtctcaggatagccgaaaaccacttcagaaaaagcggaagcgcagtcccaaaagcggtctaggaccagccgacctggctctgttggggctgtccgcagaacgggtttggcttgataaatctttgttcgaccaggccgagagctcttaccggcaaaagctttag

SEQ ID NO: 222423 - DNA, 501 bp, synthetic construct
  misc_feature 1..501: note = Description of Artificial Sequence: Synthetic coding sequence
  source 1..501: mol_type = other DNA
atggcgacgaacttcctggctcacgaaaagatttggtttgataaatttaagtatgacgacgctgagcgacggttttacgagcagatgaatgggcctgtcgctggcgcaagccggcaagagaatggggcatctgtgatcttacgcgacattgcacgagcaagggagaatatacagaagtccttggctggatcttctgggccaggcgcaagcagcggaaccagcggggaccacggggagttggttgtacgtattgcatcactggaggtcgagaaccagagtttgagaggggtggtgcaggaactccagcaggcaattagtaaactcgaggctcgcctcaacgtgttagaaaagtccagccctggccacagagctacggccccacaaacccagcacgtgtcccctatgcggcaagtggaaccacccgctaagaaaccagcaacgcctgcagaagacgacgaggacgacgacattgacctctttggttcagacaatgaagaatag

SEQ ID NO: 222424 - DNA, 255 bp, synthetic construct
  misc_feature 1..255: note = Description of Artificial Sequence: Synthetic coding sequence
  source 1..255: mol_type = other DNA
atgcggtcgggtaaggcgagctgcacactggaaaccgtttgggaggacaagcacaaatatgaagaggccgaacgaaggttctacgaacatgaagctacacaagccgcagcatcagcacagcaactgcccgcagaaggaccagccatgaacgggccaggccaggatgacccggaggacgccgacgaggctgaggcccctgatggtggaagccgaagagatccccgaaaatctcaggatagtcggaagcccctgtag

SEQ ID NO: 222425 - DNA, 600 bp, synthetic construct
  misc_feature 1..600: note = Description of Artificial Sequence: Synthetic coding sequence
  source 1..600: mol_type = other DNA
atggcaaccaactttttggcacatgaaaagatatggtttgataagttcaagtatgatgatgctgagaggcgattttatgaacaaatgaatggccctgtggctggtgccagccgccaagaaaacggggctagcgtgattctacgcgacattgctcgcgcacgtgagaatatccaaaaatcactggctggctcgtctggacctggcgctagctccgggacgtctggtgaccacggcgagctggttgtgagaatcgcgagcctcgaagtggaaaatcaatcactgcgcggagtcgttcaagagctacagcaagccatctccaagctggaggccaggctgaatgtgctggagaagagctcccctggtcacagagctactgcaccacagactcagcatgtttcccccatgaggcaggtggagcctcccgctaaaaaacctgccactcccgctgaagacgacgaagacgacgatattgatttgtttggaagcgacaacgaggaagaagataaggaggccgcacaactacgagaggagaggctgcgccagtatgctgaaaagaaggccaagaagccagcccttgtggccaaatcctctatcctgtag

SEQ ID NO: 222426 - DNA, 774 bp, synthetic construct
  misc_feature 1..774: note = Description of Artificial Sequence: Synthetic coding sequence
  source 1..774: mol_type = other DNA
atgcgctctggtaaggccagctgcacactggagacagtgtgggaagacaagcataagtatgaggaagcagagcgcagattctatgaacacgaggccacccaagccgctgcatccgctcaacagctgccggctgaaggacctgctatgaatgggcctggacaggatgaccccgaggatgccgatgaagcagaggctcccgatggcggttctagacgagaccccaggaagtcccaggactcccgcaagccgttgcagaagaaaagaaagaggagccctaagagcggcctaggcccagccgatctggcgctgctaggcctgagcgcggagagagtatggctggacaaaagcctttttgaccaggcagagtcctcatacagacaaaagctggccgacgttgccgcacaggcggcttggcctcctgctctggcgccatggggcctgtgtacccatggtaaccaggttgcatgtcatcatgtgacttgggggatttgggttaacaagtcttcttttgatcaggccgaaagggccttcgtcgagtggtcccaggccctcctgttggcacctgacggcagccggaggcaaggcactccaaataccggccagcaagtcgctgtgcccgatctcgcacaccagccatcccctcccgtcaatgggcagccacccctaggctctcttcaagcactggttagagaggtctggttagaaaagccaaggtacgacgccgcagaaagaggtttttatgaagctttgtttgatggccatcccccagggtag

SEQ ID NO: 222427 - DNA, 540 bp, synthetic construct
  misc_feature 1..540: note = Description of Artificial Sequence: Synthetic coding sequence
  source 1..540: mol_type = other DNA
atgcgttcaggaaaggcatcgtgcaccctggaaaccgtgtgggaagacaaacataaatacgaggaggccgagaggcgcttttacgaacatgaagccacccaggccgctgcatcagcccagcaactgccagcagagggacccgctatgaacggtcccggtcaagatgatccagaggacgcagatgaagctgaagctccagatggagggtctagacgggaccctcggaaaagtcaagacagccgcaaaccactccagaaaaagaggaagcgatctccgaagtcaggtctcggacccgcagatctggctctgctgggactgtccgccgaaagagtatggctggacaaatccttgttcgatcaggccgaatcctcgtatcgtcaaaagctcgcagatgtggccgcacaggccgcatggccaccagcactagctccctggggtttgtgcacacacggtaatcaagtagcatgtcaccacgttacttggggcatttgggttaacaagagcagttttgaccaggccgagcgcgctttcgtggaatag

SEQ ID NO: 222428 - DNA, 108 bp, synthetic construct
  misc_feature 1..108: note = Description of Artificial Sequence: Synthetic coding sequence
  source 1..108: mol_type = other DNA
atggccactaactttctggcacatgaaaagatttggttcgacaagttcaagtatgacgatgccgagaggaggttttacgaacagatgaatggtccagtggccggatag

SEQ ID NO: 222429 - DNA, 150 bp, synthetic construct
  misc_feature 1..150: note = Description of Artificial Sequence: Synthetic coding sequence
  source 1..150: mol_type = other DNA
atgcgttctgggaaagcaagctgcacattagaaaccgtgtgggaagataagcacaagtatgaggaggcagaacgcaggttttacgaacacgaggctactcaggccgctgcatcggcccagcaacttcctgcagagggccctgccatgtag

SEQ ID NO: 222430 - DNA, 120 bp, synthetic construct
  misc_feature 1..120: note = Description of Artificial Sequence: Synthetic coding sequence
  source 1..120: mol_type = other DNA
atggccacaaatttcttggcccatgagaaaatctggtttgataagtttaagtacgatgatgccgagagaaggttttatgagcaaatgaacggcccagttgctggcgcatctagacagtag

SEQ ID NO: 222431 - DNA, 573 bp, synthetic construct
  misc_feature 1..573: note = Description of Artificial Sequence: Synthetic coding sequence
  source 1..573: mol_type = other DNA
atgcggtctggcaaggcgagctgtacgctggagaccgtgtgggaagacaagcataagtacgaagaagcagaacgtcgattttatgaacacgaggcaacccaagccgctgccagcgcccagcagttgcccgcagaaggtcctgcgatgaatggtcctggacaggacgacccagaggacgctgatgaggcggaagcgccagatggagggagtcgtagggatcccaggaagagccaggattcacgcaagccgcttcaaaagaaaaggaaaaggagcccaaagagtggacttggcccagcagacctggctcttcttggcctcagtgcagaacgagtctggctcgataaaagtctcttcgatcaggcggaatcgtcttatcggcagaagttggcagatgtcgcagcacaggctgcctggccacccgctctggccccttggggcctgtgcacacacgggaaccaggtggcgtgccatcatgtgacatggggaatttgggtgaacaaatcaagctttgaccaggccgaacgcgcattcgtggaatggagccaagcactcctccttgcgccagacgggtag

SEQ ID NO: 222432 - DNA, 2094 bp, synthetic construct
  misc_feature 1..2094: note = Description of Artificial Sequence: Synthetic coding sequence
  source 1..2094: mol_type = other DNA
atggaggcacctcttgggagcattctgagcccttgtccaggtcgcgcagcaaccggccgtgccggtaccggaagagtcggaaccggcctgagaccaccagcagtgctgcagctgtgccctctcctcgccttctatagatgtgtccgcaaaatgcgctcgggaaaggcatcttgcacattagagaccgtctgggaggacaaacataagtatgaggaagctgagaggcgcttttacgaacacgaggcaactcaggctgctgcctctgctcaacagctgccagccgaggggccagcgatgaatggccctggtcaagacgatcccgaagatgcagacgaggcagaggctcccgatggaggctcaaggcgagatcctcgcaagtctcaggattctcgtaaaccactgcagaaaaagagaaaacggtcccctaaaagcgggctcgggcctgccgatctggcattgctcggcctcagcgcagagagagtttggcttgataagagcctgttcgatcaagctgaaagctcctaccgacagaaactcgctgacgtggccgcacaggccgcatggccgccagcactagccccatgggggctctgcactcacgggaaccaagtcgcatgtcatcatgtgacctggggcatctgggtcaataagagtagctttgatcaggctgaaagggccttcgtggagtggagccaggccctgctcctggcgcctgatggctcccgacgtcaaggcacacccaacaccggccaacaggtcgctgtccccgatcttgcacaccaaccatcaccgccagtgaatggccagccccctctggggagcctccaggccctggtgagggaggtttggctcgaaaaacctcggtatgatgccgctgagcgagggttctacgaagccctctttgacggccacccccctggtaaagtgagacttcaagagcgggctgggttggctgaaggagccagacgcggacggagggacagacgaggaagaaatatcttaggaaataagagagccggtctgagacgagcagacggggaagcaccgtccgcattgccttattgctacttcctgcaaaaagacgctgaggcaccgtggctcagcaagcctgcctacgattccgccgaatgcagacatcacgcagcagaagctctgcgcgtagcgtggtgtctcgaggccgctagtttaagtcatagaccgggaccacggtccggtctcagtgtgagcagcctcaggccaaatcgcaaaatggcaaccaacttcctagctcatgaaaaaatatggtttgacaagttcaagtatgacgacgctgaacgaagattctacgaacaaatgaacggcccagtagccggagcgtctcgccaggagaatggagcctccgtgattctccgtgatatcgctcgcgcacgggagaacatacagaagtcactggccggatccagcggaccgggagcaagttccggcacaagcggtgatcacggagagctggtagtgagaattgccagcttagaggtcgaaaaccagtccttgcgcggagttgtacaagaactacaacaggcaatctcaaaactggaagcacggctgaacgtgctcgagaagtcctcgcccggtcaccgcgctactgccccacagacccagcacgtgagcccgatgcgccaggtcgagcctccagctaaaaagcccgctacacccgcagaggacgatgaagacgacgacattgacctgttcggaagcgacaacgaagaggaagacaaagaggcagctcagctgagagaggaacggctccggcagtacgccgaaaaaaaggccaaaaaacccgctctggtggctaagtcttctattctgctggacgtaaagccttgggacgacgaaaccgatatggcccagctggaggcctgtgtgaggtctatacaattggacgggcttgtctggggggcatctaaactggttcccgtggggtatgggatcaggaaattgcagatccagtgcgtagtggaagatgataaagttgggaccgatctattagaggaggaaatcacaaagtttgaagagcatgtgcagtccgtggacatagctgcctttaataaaatctag

SEQ ID NO: 222433 - DNA, 615 bp, synthetic construct
  misc_feature 1..615: note = Description of Artificial Sequence: Synthetic coding sequence
  source 1..615: mol_type = other DNA
atggcaacaaattttctggcccacgagaaaatctggttcgacaaattcaagtatgacgacgctgagcgaaggttttatgaacaaatgaacggtcctgtggctggggcatctcgccaggaaaacggggctagcgtgatccttagagatattgcaagagcccgagagaatatccagaaatctctagccggttccagcggtcccggtgcttccagtggaacctctggagaccacggagagttggtggtccgcatcgcttccctggaggtcgagaatcagagcctgcggggagtcgtgcaggaactacaacaagccatctctaaattagaggccaggctgaatgttctagaaaaaagctccccgggacacagggccaccgccccacagacccaacatgttagccctatgagacaggtggaaccgcctgcaaagaagcccgctactcccgcagaagacgatgaagacgatgacattgacctcttcggcagcgataacgaggaggaggacaaggaagcagcacagctgagagaggagagattaaggcaatatgccgaaaagaaagccaaaaaacctgccctcgtggcaaagtcctccatattactcgacgttaaaccatag

SEQ ID NO: 222434 - DNA, 507 bp, synthetic construct
  misc_feature 1..507: note = Description of Artificial Sequence: Synthetic coding sequence
  source 1..507: mol_type = other DNA
atggccactaattttttggcacacgagaaaatttggtttgataagtttaagtatgatgatgccgagcgcagattctacgaacagatgaacggtccagtcgccggtgcttcacgtcaagaaaatggcgctagcgttatactccgggatattgccagggccagagagaacatacagaagagcctggcagggagttcagggccaggtgccagttcgggcacaagcggggaccatggcgagctggtggtgcgcatcgcctccctggaagtcgagaatcagtctctgagaggcgttgtgcaggagttgcaacaggccattagtaagctggaggcacgtctgaatgtactagagaagagttcacccggtcatcgcgcaacagcccctcaaacccagcatgtcagtcccatgaggcaggtggagcctcccgctaagaagccagccactcccgctgaagatgatgaagacgatgacatagatttgtttgggagtgacaacgaggaagaggactag

SEQ ID NO: 222435 - DNA, 786 bp, synthetic construct
  misc_feature 1..786: note = Description of Artificial Sequence: Synthetic coding sequence
  source 1..786: mol_type = other DNA
atggcgaccaattttctggcgcacgagaagatttggtttgacaaattcaagtacgacgatgcagaaagaagattttatgaacagatgaacgggcctgtcgcaggggcatccagacaagagaacggcgctagcgtgatattgcgtgatatcgctagagcccgagagaacatccaaaaaagcctcgccggaagtagtggcccaggagccagctccgggacttcaggggaccatggagaattggtggtgcgtatcgcgagcctagaggtggaaaaccaaagtctgcgtggcgtggtgcaagagcttcagcaagctattagcaaactggaggctagattgaatgttcttgaaaagagtagtcctggtcacagggccacagcgccacaaacgcagcatgtcagtcccatgcggcaggtggagccccctgctaagaagcctgctactcccgcagaggacgacgaagacgacgacatcgatctcttcggctccgacaatgaggaggaagataaagaagccgcacaactaagggaagagagactacgacagtacgccgaaaagaaagccaagaagcctgccctggtggcaaaatctagcattctactggatgtcaagccctgggatgacgagacagatatggcacagctggaagcatgcgttcggtccatccagctggatggcctggtgtggggtgcatcgaaattggtcccagtggggtacggcattaggaaactccagatacagtgtgtggtggaagatgataaggtaggaaccgatctccttgaagagtag

SEQ ID NO: 222436 - DNA, 96 bp, synthetic construct
  misc_feature 1..96: note = Description of Artificial Sequence: Synthetic coding sequence
  source 1..96: mol_type = other DNA
atgcggtccggaaaggcctcatgtaccctggagacagtctgggaagataaacacaagtacgaagaggcagaaagaagattctatgaacatgagtag

SEQ ID NO: 222437 - DNA, 207 bp, synthetic construct
  misc_feature 1..207: note = Description of Artificial Sequence: Synthetic coding sequence
  source 1..207: mol_type = other DNA
atgcgttctggcaaggcatcatgtaccctggagaccgtgtgggaggacaaacacaagtatgaggaggctgaacgcaggttttacgagcacgaggccacacaggcagctgcctcagctcaacagctgcctgccgaaggacctgccatgaatggcccagggcaggatgaccccgaagacgcagatgaagctgaggcccctgacggttag

SEQ ID NO: 222438 - DNA, 789 bp, synthetic construct
  misc_feature 1..789: note = Description of Artificial Sequence: Synthetic coding sequence
  source 1..789: mol_type = other DNA
atggccaccaatttcttggctcacgaaaaaatttggttcgacaaattcaaatatgacgacgccgagcggaggttctatgagcagatgaacggtccggtggctggtgcttcccgacaggagaacggcgcatcggtcatcttgcgtgacatcgcgcgagccagagaaaacattcagaaaagccttgccggttcttctggacctggagcatctagcggaacaagcggtgaccatgtggttcaagagctccaacaggcaatttccaagctggaggctcggcttaatgtgttagaaaaaagtagccccggacacagggctacagcgccacagacacagcacgtgtccccaatgagacaggtggagccacccgctaaaaagccagccacgcccgcagaggacgacgaggacgatgacattgatctgttcggctctgataacgaagaggaagacaaagaggcagctcagctccgggaggagcgcctccgacagtacgccgagaagaaagccaagaaaccagctctggtggctaaatcctcaattttgctggacgtgaagccttgggatgatgagacggacatggcgcagttagaggcatgcgtgcggtcaatccagcttgatggactcgtttggggtgctagcaaacttgtccccgtgggttacggaatcaggaagctgcaaattcagtgcgtggttgaagacgacaaagtcggcacagacctacttgaagaggagatcaccaagtttgaagaacacgttcagagtgtggatatagccgcattcaataagatttag

SEQ ID NO: 222439 - DNA, 525 bp, synthetic construct
  misc_feature 1..525: note = Description of Artificial Sequence: Synthetic coding sequence
  source 1..525: mol_type = other DNA
atggccgctgccgctgaactgtcactcttggagaagtccctggggttgagtaaaggcaataaatactctgcccagggcgagagacagataccggtgctccagaccaacaacggcccttccctgaccgggctgacaactatagctgcccatctggtcaagcaggccaataaggaataccttctgggtagtacagccgaggagaaagcgatcgtgcaacagtggctggagtatagggtaacccaggttgatggacacagctcgaagaatgacatccacacactgcttaaagacctgaatagttatctggaagacaaggtatatctcacaggctacaacttcaccttggctgacattttactgtactacggactgcacaggttcatcgttgacttaacagtacaggagaaggagaaatacttgaacgttagcagatggttttgtcacatccagcattaccctggaatccgtcagcatctttcgtcagtggtgttcattaagaaccgtctgtacaccaatagccactag

SEQ ID NO: 222440 - DNA, 420 bp, synthetic construct
  misc_feature 1..420: note = Description of Artificial Sequence: Synthetic coding sequence
  source 1..420: mol_type = other DNA
atggcagcggcagctgagcttagcctgcttgaaaagtctcttggcctctctaagggaaacaagtactcagcacaaggcgaaaggcagattccggtgttgcaaaccaacaacggaccaagtcttacaggcctgactactatagctgctcatcttgtcaagcaggccaacaaagagtatctattggggagtacagctgaggagaaagccatcgttcagcagtggcttgagtatagagtgactcaagttgatgggcactcaagcaaaaacgacatccacacgctgcttaaggacctgaatagctatctagaggataaagtctatctgaccgggtacaattttacattggccgatatcctgctctactacggactgcaccgtttcatcatcagaaaattaaggcacacggaggtcggcaactag

SEQ ID NO: 222441 - DNA, 1314 bp, synthetic construct
  misc_feature 1..1314: note = Description of Artificial Sequence: Synthetic coding sequence
  source 1..1314: mol_type = other DNA
atggctgccggtaccctgtatacttacccggaaaactggagagcttttaaagcattaattgccgctcaatactcaggtgcacaggtccgtgtgctgtcagctcccccacacttccattttggccagacaaaccgcacccctgaattcctcaggaaatttcccgctggcaaggtaccagccttcgaaggtgatgatggcttttgtgtgttcgaatcgaacgccatcgcctattatgtgtctaacgaagaacttcgtggctccactcctgaggccgcagcccaagtggtgcagtgggtctctttcgccgattctgacatcgtgccacctgcgtccacctgggttttccccactctcggcattatgcaccacaacaagcaggcaaccgagaatgccaaagaggaagtgcggagaatcctcggcctgttagatgcctatctgaaaacaagaaccttcttagtaggtgagcgggtcacccttgccgatattaccgtcgtatgtacactgttgtggttgtataaacaagtcctcgagccgtcctttcgtcaggctttccccaatactaatagatggtttctcacgtgcataaatcagcctcagtttagggcagtacttggtgaagtgaagctgtgtgaaaagatggcacagtttgacgctaagaaattcgcggaaacccagcctaaaaaagatacgccaagaaaagagaagggttcccgcgaagaaaagcagaaaccccaggcagagcgcaaagaagagaagaaggcggcagcccctgcacctgaggaggaaatggacgaatgcgaacaagctctagccgctgagccaaaagcaaaggatccattcgcccacctcccaaaaagtacattcgtccttgatgagttcaagcgtaagtactccaatgaagatactcttagcgtcgctcttccttatttctgggagcactttgacaaggatggttggagtttgtggtattccgagtatcgtttccctgaagagctgacacaaacctttatgtcctgcaaccttatcaccgggatgttccagcggctcgacaaactcaggaaaaatgccttcgctagcgtgatattgtttgggactaataacagtagcagcatatcaggagtttgggtctttcggggacaagagttggctttccctctgtcacccgactggcaagtggattacgagagttacacatggcggaagctggatcctggatctgaggagactcagactttggttcgggaatactttagttgggagggggcttttcaacacgtgggtaaagctttcaatcagggcaagatctttaagtag

SEQ ID NO: 222442 - DNA, 1464 bp, synthetic construct
  misc_feature 1..1464: note = Description of Artificial Sequence: Synthetic coding sequence
  source 1..1464: mol_type = other DNA
atggccgaaaggtgggtggccccagcagtgttaagacgagccagattcgcctcaaccttcttcctgagcccgcagatatacgctcacaaggatggcgacttgcgttcggccttttttatccttagcttcaaacgcggagagtttatcccctttctgaactggacactatacacataccctgaaaattggagggcttttaaggccctgatcgccgcacagtattccggagcgcaggtgcgggtgctgtctgctccaccacacttccatttcgggcagaccaatagaactcccgaattcctcaggaagtttcccgctggcaaggtaccagccttcgagggagacgacggtttctgcgtgttcgagagcaacgcaattgcgtactacgtgtctaacgaggaactgagaggcagcacccccgaagccgctgctcaggtggttcagtgggtgagctttgctgattcggatattgtcccgccagcgtcaacctgggtctttccaacgctgggcatcatgcaccacaacaaacaggctaccgaaaacgcaaaagaggaagtccgtagaatcctggggctcttggacgcttacctgaaaactcggacgttcttggtcggagagcgagtcactctggccgatatcacagtagtgtgtacactactgtggctgtacaaacaagtgctggaaccaagctttagacaggccttcccaaacaccaacaggtggttcctcacctgtataaaccagcctcaatttagggctgttttaggggaagtgaagctctgcgaaaagatggcccaatttgacgccaaaaagttcgccgaaacccaaccgaagaaagacacccccaggaaggagaaggggagtagagaagagaagcaaaaaccgcaggcagagagaaaagaagaaaaaaaggcggctgccccagctccggaagaagaaatggatgaatgcgagcaggcactggctgctgaacctaaggcaaaggatcccttcgcccacctgcccaaatcaacctttgtcctcgacgagtttaaaagaaaatatagtaacgaagatacgctgtccgtcgcattgccctatttctgggagcactttgataaggatgggtggtccctgtggtacagcgaatacagattccctgaggagttaacacagaccttcatgtcctgtaacctcattacaggaatgtttcagcgtctggataagctccgcaagaacgccttcgcaagcgtgatcttgttcggtactaataacagtagctctatctccggagtatgggtcttcaggggacaggagctggcctttcctctgtcccccgattggcaggtggactatgaaagctacacctggagaaagctggatcccggatctgaggagacacagaccctcgttagagagtatttcagctgggagggggcattccagcacgttggcaaggcttttaaccaggggaaaatttttaagtag

SEQ ID NO: 222443 - DNA, 621 bp, synthetic construct
  misc_feature 1..621: note = Description of Artificial Sequence: Synthetic coding sequence
  source 1..621: mol_type = other DNA
atgcaccacaacaaacaggccacagagaatgctaaagaggaggtaaggcgcatcttaggcctgctggatgcctacctgaagaccagaaccttcctggtgggggagagggtcacactggccgcagagcctaaggccaaggaccccttcgcccacttacccaaatcgacattcgtgctagacgaatttaagcgcaaatactcaaacgaagacaccctctccgtagctttgccttatttctgggagcacttcgacaaggacggctggtcactgtggtactccgagtacagattccccgaggaacttacacaaacgttcatgagctgcaatttgatcacagggatgtttcaacgactggataagttaaggaagaacgccttcgctagcgtgattctattcggtactaataattcttcttccatctctggcgtctgggtatttagaggacaggagctggcattcccactttctcccgattggcaagtggattacgaaagctacacctggcgaaagttagacccaggatctgaagagactcagaccttagtgcgcgagtacttctcatgggagggggcatttcagcatgtcgggaaagccttcaatcaagggaaaatttttaagtag

SEQ ID NO: 222444 - DNA, 2577 bp, synthetic construct
  misc_feature 1..2577: note = Description of Artificial Sequence: Synthetic coding sequence
  source 1..2577: mol_type = other DNA
atggtaaactttactgtagaccagatccgtgccatcatggataagaaagccaacatcaggaacatgagcgtcatagctcatgtcgatcacggcaagagcaccctgaccgacagtctcgtgtgcaaagcgggtatcatagccagcgctcgcgctggcgagaccagatttaccgacacgcgtaaagacgaacaggagagatgcataactattaaaagtactgccatttcattgttttacgaactcagcgaaaacgacttgaacttcatcaaacagagcaaagacggagccggatttttgattaacctgattgattcccccggacacgttgattttagcagcgaggtcactgcagccctccgggtgaccgacggagcactggtggtcgtggattgcgtgagcggcgtgtgcgttcagactgaaacagttcttagacaggcaattgcggagagaatcaagcctgtgctaatgatgaacaaaatggaccgagcactgttagaacttcagctggagcccgaggagctctaccaaacctttcagcgcattgtagaaaacgtgaatgtgatcattagtacttatggagagggggagagtggacctatgggaaacatcatgatagacccagtgctggggacagtgggctttgggagtggtctgcacggttgggcgtttaccctgaagcaattcgccgaaatgtacgtggccaagtttgccgcaaagggcgagggacagttaggcccagccgagcgcgctaaaaaagtcgaggacatgatgaagaaactgtggggggatagatactttgatcccgcaaacggcaaattttccaaaagtgccacaagtcctgaggggaagaagctgccaagaaccttttgccagctgattctagatcccattttcaaggtgttcgacgcaattatgaacttcaaaaaggaagagacagctaagcttatcgaaaagctagatatcaaattggacagcgaggacaaagacaaagagggtaagccacttcttaaagccgtgatgagacgctggctgcccgctggagacgctttactgcagatgataaccatccacctgccttccccagttacggctcagaagtacaggtgtgaactcttgtacgaagggccaccagatgacgaggccgcaatggggatcaaatcttgcgaccctaaaggccctctgatgatgtacattagcaaaatggtgcctaccagtgataagggtcgtttctacgccttcggaagggtcttttctggcctggtctcgaccggcctgaaggtccggatcatgggtcccaactatacacctgggaagaaggaggacctgtatctgaaacctattcagcgtactatacttatgatggggcgatatgtcgaacccattgaggatgtaccttgtggaaatattgtggggctcgttggagtcgaccagttcctcgtgaaaactggcaccataaccacatttgagcacgcccacaatatgcgagtcatgaaattttccgtcagtccggtggtccgcgttgccgttgaggcaaaaaatcctgcagatcttcccaagctggtggagggactcaagcgactggcgaaatctgaccctatggtccaatgtataatcgaagagtcgggagagcacatcatcgccggagctggagaactccacctggaaatttgcctgaaagatctggaagaagaccacgcatgcatccctattaaaaagtccgacccagttgtgagctatcgggagaccgtctccgaagagtccaacgtgctctgtctgtccaaatcaccaaataagcataataggctttacatgaaggccagaccctttcccgatggcttagcagaagatatagataagggagaggttagtgcaaggcaggaactgaaacagcgcgctcgctatttagcggaaaaatacgagtgggacgttgccgaggccaggaaaatatggtgctttggaccagacggaacaggacccaatattttgacagacatcacgaagggagtgcagtacctgaacgagattaaggacagtgtcgttgccggtttccagtgggctaccaaagaaggggcactgtgcgaggaaaatatgcgtggggtcaggtttgatgtgcatgatgtgactctgcacgcggacgcaattcaccgcggaggcggtcagatcattcccacagctagacggtgcctgtatgcgtccgtacttaccgcccaacccagactgatggaaccgatctaccttgtggaaattcagtgtcccgaacaggtggtgggagggatttacggtgtcctgaatcgaaaaagggggcacgtgttcgaggagagtcaggtggctgggactccaatgttcgtggtcaaggcctacctcccagtgaacgagtccttcggtttcaccgccgatctcaggagtaacactggtggacaggctttccctcagtgcgtattcgaccactggcaaattctgccaggcgatccattcgacaactcttcaagaccttcacaggtagtggcagagacaaggaagcgtaaggggctaaaagaaggaatccctgcactcgataacttcctcgacaaactctag

SEQ ID NO: 222445 - DNA, 1752 bp, synthetic construct
  misc_feature 1..1752: note = Description of Artificial Sequence: Synthetic coding sequence
  source 1..1752: mol_type = other DNA
atggtcaacttcacggtggaccaaattcgcgctattatggacaaaaaggcaaatataaggaatatgtccgtcatcgcgcatgtagaccacggaaagagcactcttaccgatagcctggtctgtaaggcagggattatcgcttcggctcgagcaggagagaccaggttcactgacacacggaaggacgaacaagagcgctgcatcactattaaaagcactgccatttctctgttttatgagctctctgaaaatgacttgaactttattaagcagtcaaaggacggcgctggattcttgataaatctcatagattcgccaggtcacgtcgactttagctccgaggtaaccgcagccctccgggtcacagatggtgcactggtggtcgtggattgcgtgtcaggcgtgtgtgtccaaactgaaactgtgcttcggcaggcgatcgctgagcggattaaaccagtgctcatgatgaacaaaatggacagagctctgctagagctgcagctggaacccgaggagttgtaccaaacctttcagagaatcgtggaaaacgtaaatgtgattatcagtacctacggggagggtgaatcagggccaatgggtaatatcatgattgatccagtccttggcactgtcggttttggttccggtctgcatggctgggctttcactcttaaacaattcgctgagatgtatgttgctaaatttgccgcaaagggcgagggccagctcgggcctgccgaacgcgcaaaaaaagttgaggacatgatgaaaaagctctggggagacaggtacttcgaccctgccaatggtaaattctcgaagagtgcaacgtcccctgagggtaaaaagcttccccgaaccttctgccagcttatcctagaccccatttttaaggtgtttgatgccattatgaactttaaaaaagaagaaaccgctaagttgattgagaagctcgatataaagctggatagcgaagataaggataaggaaggcaagcctcttctgaaggccgtaatgcgcaggtggctgcccgctggagatgcccttctccaaatgattacaatccacctgcccagccccgtcacagctcagaaataccgctgtgaactgttgtatgaggggcctccggatgacgaggcggctatgggtataaagtcctgcgaccctaaagggcctctgatgatgtacatttcgaagatggtgcctaccagtgataaaggccgtttttacgcattcggcagggtgttcagtggtctggtgtccacagggttaaaagtgcgcatcatgggccctaactatacccctggaaaaaaggaagacctgtacctaaagccaattcaaaggaccatccttatgatgggaagatacgtggaacccatcgaggatgtgccttgtggaaacatcgtcggactagttggagtggaccagtttctggtgaagacaggtaccatcacaacttttgagcatgcccacaacatgagagtgatgaaattctctgtgtcacctgtggtcagggtcgccgtagaggcaaagaatcccgcagacctgccaaagcttgtagaaggccttaaacggctggctaagtctgaccccatggtgcagtgcataatcgaagaaagcggtgagcatatcatcgcaggggctggggagcttcatctcgagatctgtctcaaagatctagaagaggaccacgcgtgtatccctatcaaaaaagaaaccgtcagtaaaaagaaaaaaaaaaaaaaatag

SEQ ID NO: 222446 - DNA, 351 bp, synthetic construct
  misc_feature 1..351: note = Description of Artificial Sequence: Synthetic coding sequence
  source 1..351: mol_type = other DNA
atgcccaagaataaagagtatgctcaggtgattaaaatgttagggaatggaaggctcgaagcgatgtgctttgacggtgtgaaacggttatgccacattcgcggaaaattgagaaagaaagtctggatcaacacatccgacattattctggtcggcctacgggattaccaagacaataaggcagacgtcattctcaaatataatgcggacgaagcacggtcccttaaggcatatggggaactgcctgagcacgcaaaaatcaatgaaacggacactttcggcccaggggatgacgatgaaatccagttcgacgacataggcgacgacgatgaagatatagacgacatctag

SEQ ID NO: 222447 - DNA, 435 bp, synthetic construct
  misc_feature 1..435: note = Description of Artificial Sequence: Synthetic coding sequence
  source 1..435: mol_type = other DNA
atgcccaagaacaaagggaaaggtggaaaaaaccgcaggaggggtaagaacgaaaatgagagtgagaaacgtgaactggtgttcaaggaagacggacaggaatacgcacaggtcattaagatgctgggaaatgggcgactggaggctatgtgcttcgatggggtcaaaagactctgccacataagagggaaattacggaaaaaagtctggattaatacaagcgatattattttagtcgggcttcgcgactatcaggacaacaaggcggacgtgattctgaagtataatgccgatgaagcaaggtcactaaaagcatacggagagctgcccgagcacgctaaaattaatgagactgacaccttcggacctggcgatgatgatgagatccagtttgacgatataggcgacgacgacgaggatatcgatgacatttag

SEQ ID NO: 222448 - DNA, 435 bp, synthetic construct
  misc_feature 1..435: note = Description of Artificial Sequence: Synthetic coding sequence
  source 1..435: mol_type = other DNA
atgccaaagaacaagggcaaagggggtaagaatcgcagaagaggaaagaatgagaatgaaagcgaaaaacgagaactggtgttcaaagaagatggtcaggaatatgcccaggtcattaaaatgctggggaatggtcggctggaggccttatgcttcgatggcgtgaagcgcttgtgtcatattcggggaaaactgcgtaagaaagtctggatcaatactagtgatatcattctggtaggactgcgggattaccaagataataaggcagacgtcatcctgaaatacaacgccgacgaagctagaagtctgaaggcatatggagaattgccggaacacgcaaagattaatgagacagacaccttcggccctggagacgatgacgagatccagtttgacgacatcggggacgacgatgaggatattgatgatatctag

SEQ ID NO: 222449 - DNA, 384 bp, synthetic construct
  misc_feature 1..384: note = Description of Artificial Sequence: Synthetic coding sequence
  source 1..384: mol_type = other DNA
atgcctaagaataagggcaagggcggaaagaatcgcagaagggggaagaatgagaatgaaagtgaaaaacgagaactagtcttcaaggaggacggtcaggaatacgctcaagtgattaagatgctgggtaatgggcgactcgaagccttgtgtttcgatggggtgaagcgactgtgtcacatccgcggaaaacttcgaaagaaagataacaaggctgacgttatcttaaagtataatgccgacgaggcccgttccctcaaggcatatggtgaattaccagaacacgccaagatcaatgagaccgatacgtttggacccggagatgacgacgagatacaatttgacgacatcggggatgacgatgaggatattgacgatatttag

SEQ ID NO: 222450 - DNA, 1419 bp, synthetic construct
  misc_feature 1..1419: note = Description of Artificial Sequence: Synthetic coding sequence
  source 1..1419: mol_type = other DNA
atggccggtggagaagcaggcgtgacacttggccagccccacctctcacggcaggatcttactacactcgacgtgacaaaactgacgccactttcacacgaggtcatttcccggcaagccaccattaatataggaactataggtcatgtggcccacggtaagtcgacggtagtcaaagcaatttctggtgtccatacagttagatttaaaaatgaactcgagcgcaatatcacaataaagctgggctatgctaatgcgaagatctataaactcgatgatccatcttgcccgcgtcccgaatgctatcgatcttgtggctcttccacacctgatgaattcccgaccgatatccccggtaccaagggcaactttaagctcgtgaggcacgtgtccttcgttgattgccccggtcacgacatcttgatggctaccatgctcaacggcgctgcagtgatggacgctgcactgctgttaattgctgggaatgagtcatgtccccagccgcaaacctcggagcatctcgccgcaatcgaaatcatgaagttgaagcatatcctgatcttacaaaacaagattgatctcgttaaggaatctcaggcaaaggagcaatatgagcagattcttgccttcgtgcagggtacagttgcagaaggcgcaccgataatcccaattagcgctcaattaaagtataacatcgaagtggtttgtgagtatatcgtgaaaaagattcctgtgccgcctcgagatttcacatccgagcctcggctgattgtgatccgcagcttcgacgtcaacaaaccgggatgcgaagttgacgatctaaagggaggagtagccggtggttctatcctgaaaggggtgctgaaggttggccaggaaatcgaggtgcggccaggaattgtaagtaaagactcagaaggcaaacttatgtgcaaaccgatcttctccaaaatcgtgtctctttttgctgagcataacgacttacagtacgcagctcctgggggactgatcggggtgggtacaaaaatcgaccccaccctgtgccgggcagatcggatggtgggccaggtgttgggcgctgttggcgcattacctgagatctttacagaactggaaattagttatttccttctgcgacgcctgctcggagttagaactgagggcgataagaaggcggctaaggtgcagaaactaagcaaaaatgaagtgctgatggtgaatattggctccttgtctacgggaggccgtgtgtcggccgttaaggcggacctcggcaaaatcgtgctcaccaatcccgtgtgtaccgaggtgggggagaaaatcgccctaagtagaagggtggagaaacattggaggttgatcggatgggggcagatccgaaggggcgttaccattaagcctaccgtggatgacgactag

SEQ ID NO: 222451 - DNA, 552 bp, synthetic construct
  misc_feature 1..552: note = Description of Artificial Sequence: Synthetic coding sequence
  source 1..552: mol_type = other DNA
taagctggaggcgaggcaggtgtgacgcttggccaaccacacctctctaggcaggacctgactacactggatgtaaccaaactgactcctctgtcccatgaggtcatttcccggcaggctacaatcaatattggcaccataggccatgtcgctcacggcaagagtactgtcgtgaaggcaatatccggggtgcacaccgtgaggttcaaaaacgaattagagcgcaatatcacgatcaaactggggtacgcaaacgccaagatctacaaactggacgatccatcctgtccaaggcccgagtgctatcggagctgtggctccagcaccccagacgaatttcccaccgatattccagggacgaagggcaactttaagctggtgcgacacgtgtcatttgtggattgcccaggacacgatattctgatggccaccatgttaaacggggcagcagttatggacgccgcactgctgctgatcggcaaatacctcactatcggtctggacaaatccatgtggaacaagagcaagatgaaatatctaaaaggaaattag

SEQ ID NO: 222452 - DNA, 1116 bp, synthetic construct
  misc_feature 1..1116: note = Description of Artificial Sequence: Synthetic coding sequence
  source 1..1116: mol_type = other DNA
atgtttcaggaagtcaaagctgacaaggtgactatgctatggaataaaaaagcaaccgctgtgcttgtcattgcgtccactgatgtcgacaagacaggagcatcttattacggcgagcagacccttcactatatcgccactaacggtgagagtgctgttgtgcagttgcccaaaaatggacctatctatgatgttgtatggaactcctcaagcactgaattttgtgccgtgtacggcttcatgccagccaaggccactatcttcaaccttaagtgtgatccagttttcgactttggcactggacccaggaacgccgcttactactcacctcacgggcatattctggtcctggcgggtttcgggaaccttaggggacagatggaggtgtgggacgtaaaaaactacaaactcatctctaagccagtggcaagcgactccacctacttcgcctggtgtcccgacggggagcatatacttaccgccacgtgtgcacctaggcttagagtgaacaatggttacaaaatctggcattacacgggctcaattctgcataaatacgatgtaccttccaacgcggaactttggcaggtgtcctggcagcccttcctcgatggcatcttccctgcaaagacgatcacataccaggctgtcccatccgaggtccccaacgaggaacccaaagtagccaccgcttaccggccaccagctcttagaaataaacccatcacaaattcaaaactacatgaggaggaaccccctcaaaacatgaagcctcagagcggaaacgataaaccattgtctaaaacggccctaaaaaaccagcggaagcacgaggctaaaaaagcggctaagcaggaggctcgatccgacaagtcccctgatctggctccaactcccgctccacagtccacgcctaggaatactgtcagccagtccattagcggcgacccagaaattgacaagaaaattaaaaatctcaaaaaaaagctgaaggccatagagcagctgaaggagcaagccgcaaccggaaagcagctggaaaagaatcagcttgagaaaatacaaaaggagactgccctgctgcaggagctcgaagacttagagctcggcatctag

SEQ ID NO: 222453 - DNA, 1758 bp, synthetic construct
  misc_feature 1..1758: note = Description of Artificial Sequence: Synthetic coding sequence
  source 1..1758: mol_type = other DNA
atggccccttcaactccactgctgacggtcaggggatccgagggactgtacatggttaacggtccacctcatttcacggaaagcacagtgtttccaagggaaagtggtaagaactgcaaagtgtgcattttttctaaagacggaaccctatttgcctggggcaacggtgagaaagtgaatattatctccgttacgaataagggtcttctgcacagtttcgaccttctgaaggccgtttgcctggaattttcccctaaaaacaccgttctggccacttggcagccatacacgacctcaaaggatggcacagcaggtatccccaatctccagctgtatgatgtgaaaaccggcacctgtttaaagagcttcatccagaagaagatgcagaactggtgccctagctggtctgaggacgaaacattgtgtgccaggaatgtgaataacgaggtgcatttcttcgagaacaacaatttcaataccatcgcaaacaagttgcatttgcaaaaaattaatgattttgttctatcccctgggcctcagccttataaagtcgccgtttacgtgccagggtctaaaggagcaccatcatttgtccgcctgtaccagtaccctaacttcgctggcccacatgccgctttagcaaataagtccttctttaaagccgacaaagtcacaatgctgtggaacaaaaaggcgacagcagtactagttatagccagcaccgatgtggataaaactggagctagctactatggcgaacagaccctacactacatcgcgaccaacggtgagtcagctgtggtgcagctgcctaagaatggccctatttacgacgtggtgtggaatagcagcagcaccgagttctgtgcggtttacggttttatgcccgctaaagccaccatcttcaacctgaagtgcgatccagtgtttgacttcggcactggaccacgcaacgccgcatactacagcccgcacgggcacatcttggtcttggctggctttggcaacctccgtggccaaatggaagtttgggatgttaaaaattataaactgatcagcaaacccgttgcatccgatagtacctactttgcatggtgtccagacggtgaacatatcctgactgccacctgcgcacctcggcttagagttaataacggctacaaaatctggcattataccgggagtatcctgcataaatatgacgtgccaagcaacgcagaactttggcaggtgtcctggcagccatttctggatggcatctttccagccaagacaatcacgtaccaggctgtacctagcgaagttcccaatgaggagccaaaagtcgctacggcttatcgccctccagccctccggaacaagcctattaccaattctaagctgcatgaggaggagccgccacaaaacatgaaaccacagagcggcaatgataaacctttgagcaagaccgctttaaaaaaccagagaaagcacgaagctaaaaaggccgctaaacaggaggcgagaagcgacaagagccctgacctggctccaacccccgcaccgcaaagcactcctcgcaataccgtttcccagtccatatccggcgatcccgagatagacaagaagatcaagaatctgaaaaaaaaactgaaggctattgaacagttgaaggagcaggctgccaccggaaaacagttggagaagaaccagcttgaaaaaatccagaaggaaaccgccttgctgcaagaattggaagatctcgaacttggaatatag

SEQ ID NO: 222454 - DNA, 1893 bp, synthetic construct
  misc_feature 1..1893: note = Description of Artificial Sequence: Synthetic coding sequence
  source 1..1893: mol_type = other DNA
atgcagggtgggaattcaggcgtccgtaagcgtgaagaggaaggtgacggtgccggagctgtggccgcacctcctgcgattgattttccagctgagggacctgacccagaatatgatgagtccgacgtcccagctgagatccaagtgttaaaagagccactccagcagccaaccttcccatttgctgtcgccaaccagctcctgctggtgtctctcctcgaacacctgagccacgtccacgaacccaaccccttacggtctcggcaagtcttcaagctgctgtgccagacgtttattaagatggggctactctcttccttcacatgtagcgacgagttttcatccctgcgcctgcaccacaacagagcaattactcatctgatgcggagtgccaaggagcgcgtgagacaggatccatgcgaggacatttccagaattcagaagatacgctctagggaggtagccctagaggcacagacttcacggtacctcaacgaattcgaggaattggccatcctgggaaagggcggatatgggagagtttataaagtaaggaacaaactggacgggcagtattatgcaatcaaaaaaatcctgataaagggcgctacaaaaaccgtgtgtatgaaggtgcttagggaagtcaaggtgctcgccggactacagcaccctaatattgtgggctatcatacagcttggatcgaacatgtccatgtaatccagcctagagctgaccgcgcagcaatcgaactgccttctctagaagtacttagtgatcaagaggaagacagggaacagtgtggcgtcaagaatgacgaatcttcaagctcatccatcatcttcgccgagcccacccccgaaaaagaaaagagatttggggagtcagacactgagaaccagaataataagtctgtaaagtataccacaaatcttgtgatacgcgagagcggggaactagagtctacactagagctccaggaaaacggattggccggactgagtgcttcctccattgtggagcaacaattaccattaaggcggaactctcatctggaggaatcctttacctcgacagaagagagctccgaagaaaatgtcaacttcctgggccagaccgaggctcaatatcacttaatgctgcacattcaaatgcagttgtgcgaactatccctatgggactggatcgttgagcgcaataagcgtggaagggagtatgtcgatgagtctgcctgcccctatgtgatggccaacgttgcaaccaagatcttccaggaactggttgaaggagtgttttacattcataacatgggaatcgtgcaccgcgatcttaagccgaggaacatctttcttcacgggccagaccagcaagtgaagatcggtgatttcgggctggcttgtaccgacatcctgcagaaaaacacagattggactaatagaaacggcaaaaggacccccacgcacacctctcgcgtgggcacttgtttgtatgcgagccctgagcagctagaaggatcggagtacgacgctaaatctgatatgtacagtcttggggtagtgctattagagctctttcaaccgtttggcactgagatggagagagccgaagtcctgactggccttaggaccggacagcttcccgagagtctccgcaaaagatgcccagtgcaggcaaagtacatccaacacctcactaggagaaattcatctcagaggccatccgccatacagttgctccaatccgaactgtttcaaaattcaggcaacgtcaatttgacccttcagatgaaaatcattgagcaagagaaggagattgccgagctgaaaaaacagctcaacctattgagccaagacaagggagttcgggacgacggaaaagacggcggagttggctag

SEQ ID NO: 222455 - DNA, 1734 bp, synthetic construct
  misc_feature 1..1734: note = Description of Artificial Sequence: Synthetic coding sequence
  source 1..1734: mol_type = other DNA
atgaaccagacgcatttcgtacaggaccggtgcttgagtgatccttgcgaggatatttctagaatccaaaaaatccggtctcgcgaagtggccctcgaggcacaaacatcccgctatcttaacgagttcgaggagctggctattttgggaaagggcggatatgggagagtgtacaaggtgagaaacaaactcgacggccagtactacgccatcaagaaaatcttaataaaaggagctactaagaccgtgtgtatgaaggtcctgcgggaagttaaggtcttggctggccttcagcacccaaatatcgtgggctatcacaccgcgtggatcgagcacgtgcacgttattcaacccagagccgatagggcggcaatcgagctgccttccttagaagttttgagcgatcaagaagaagaccgcgaacagtgcggtgtaaagaatgacgaatctagcagctcttcaatcattttcgctgagcctactccggagaaagaaaagcgctttggagaaagcgacactgagaatcagaataataaatctgtgaagtacacaactaaccttgtcatacgggagtcaggagaactggagagtaccctagagttgcaggagaacggccttgccggactttccgcctcaagcattgtcgagcagcaactgcctctgcggagaaatagccacttggaagagagtttcacatcaacagaggagtcttcagaagaaaatgtgaattttctgggacagaccgaagctcagtaccatctgatgctgcacattcagatgcagctatgtgagctgtccctctgggactggatagtggaacggaataagcggggtcgcgagtatgtggatgagtccgcttgcccttacgtcatggcgaatgtcgcaacaaagatcttccaggagttggtggaaggtgtgttctacatccacaacatgggtatcgtccatagagatctcaaaccgagaaacatcttcttgcacgggccagatcagcaagtgaagatcggcgacttcgggctcgcatgcacagacatcctccagaagaataccgactggaccaaccgaaacgggaaacggacgcccactcacacgagcagggtcggcacctgtttgtacgcctctcccgaacaactcgaagggagcgaatacgatgcaaagtctgacatgtactccctgggcgttgtcttgctcgagcttttccagcctttcggtactgaaatggagagggcagaggtcctgacaggattgcgtactggacaactgccggaaagcctccggaagcggtgcccagttcaggcaaaatacatacaacacctgacccgacggaacagttcccaacgcccttcagcaatccagctgcttcagtcagagttattccagaactccggaaatgtcaatttgactctgcagatgaagattatcgagcaggagaaggaaattgctgagcttaaaaagcagctgaacctcctgagtcaagataagggtttcagcgttatcccaaaaccccacccttgcaaagcgctgtactctgcaccccagatgatttctcggcagctaagatccctcagctgcctctgtcccgctctgttccccggtacttcctcattcatcgttgccttgtcttcccctgccaatctgtacattccccagcggcagaggagtgatgagctggtgttcgagtcccaaaaaggatctgccatggagctggctgtgattactgtagacggggtctag

SEQ ID NO: 222456 - DNA, 3351 bp, synthetic construct
  misc_feature 1..3351: note = Description of Artificial Sequence: Synthetic coding sequence
  source 1..3351: mol_type = other DNA
atggaacgagccatttctccgggacttctggtccgggcactgctgctcctgttgcttctccttggacttgccgcacgtaccgtagccgctggcagagctcgcggtcttcccgcaccgaccgccgaagccgcatttggccttggagcggctgccgctccaacgagcgcaacaagagttccagcagcaggcgcagtggctgctgccgaagtgaccgtcgaggatgccgaggccttgccagccgctgccggagagcaagagccaagaggcccagaacctgacgatgagaccgaacttaggccgagaggcaggagcctcgtcatcatatcaaccctcgacggaagaatcgctgctctcgacccagagaaccatggcaaaaagcagtgggacttagatgttggatcaggatccttggtgagcagctccctgagtaagcctgaggtcttcggcaacaagatgattatcccctctcttgacggagctctgttccagtgggatcaagatagggaatccatggagactgtacccttcacagtagaatctctcctggaatcgtcatacaagttcggagatgatgtggtgctagtaggcggtaagtcactgactacatatggactgtctgcctattccggaaaagtccgctacatttgctcagctctggggtgccggcaatgggacagtgatgaaatggaacaggaggaagacattcttttgctgcagaggacccagaagaccgttagggcagtcggacccagatctggcaacgaaaagtggaatttctcagtgggtcactttgaactgcgctatatccccgatatggagaccagggcgggtttcatcgaaagtactttcaagccaaacgagaacacagaggaaagtaagataattagcgacgttgaggaacaggaggcagcgatcatggatatcgtgatcaaagtgtcagtagctgactggaaggttatggcttttagcaagaagggcggacatctggagtgggaataccagttctgcacacctatcgctagcgcgtggctgcttaaggatgggaaggttatacctatttcgttgttcgacgacacatcgtatacaagcaacgacgatgtgctcgaagacgaggaggatatcgtggaagctgccagaggagcaacagagaactccgtctacctagggatgtacaggggccaactctacctgcaatccagtgtaagaatttctgaaaagttcccatcttccccgaaggcactggagtccgtaaccaatgagaatgcaattattcctctcccaacaatcaagtggaaaccactgatccattccccctccagaaccccggtgctggtgggatctgacgaatttgataagtgcttatctaatgacaaattttcccacgaggagtactcaaacggggctctctccatcctgcagtacccatacgataacgggtactacctgccgtattacaagcgtgagagaaacaagagatccacccagattacagttcgattcctggacaatccacattataataagaatattcgaaagaaagatcccgtgctgctgctgcattggtggaaggaaatcgtcgcaacaatactgttctgtatcatcgccaccacattcatagtgaggcggctctttcatcctcacccacaccgacagagaaaggagtccgaaacacagtgccagacagagaataaatacgatagtgttagtggagaagctaacgattcaagctggaacgacatcaagaatagtgggtacatatcccgctacttaactgatttcgagcctatacagtgtctgggaagaggcggtttcggtgttgtgttcgaagcgaaaaacaaagttgacgactgtaactacgcaatcaaaagaatccggctgcctaatagagagctcgcaagagagaaagtaatgagggaggtcaaggccctggcaaagctcgaacacccaggtatagtgcgttattttaacgcgtggctggaggccccacccgagaaatggcaggaaaagatggatgagatatggctgaaggatgaatctaccgattggcccctgtcgtcaccaagtcccatggatgccccttctgtgaagattcgcagaatggatcctttcgccactaaagagcatatagagatcatcgcaccctccccacagaggtcaagaagttttagcgtagggatcagttgtgatcagacaagctccagtgagagtcagttctcaccgctcgagttctccgggatggaccacgaggacatctctgaatcagtggatgctgcctataatctccaggatagttgtctcacagactgtgatgtggaggatggcactatggacggaaacgacgagggccattcttttgagctgtgcccaagcgaagctagtccatacgtgcgtagccgcgagagaacttcttcatccattgtgttcgaagacagcgggtgcgataatgccagctctaaggaggaacctaaaaccaaccgtcttcatattggcaaccattgcgcgaataagctgactgccttcaagcccaccagctccaagagctcatctgaggccactctcagcatctcgcccccacgtcctaccacattgtccctcgaccttacaaagaacacgaccgagaaactccaacctagctcccccaaagtgtacctttacatacaaatgcagctttgcaggaaagagaatctgaaggactggatgaatggtagatgcactatagaggagcgcgaacggagcgtgtgcctccacatcttcctacagattgcagaggccgtcgaattcctgcactctaagggactgatgcaccgcgatcttaagcccagcaacatcttcttcacaatggatgatgtcgtaaaagtgggtgatttcggcctcgtgacagccatggatcaagacgaggaagaacagacagtcctgacccctatgcctgcgtacgcacggcacacggggcaggtgggaacgaagctctacatgtctcctgaacagatacatggcaattcgtacagtcataaggtggatatcttttccctgggactgatactctttgagctgttatatcccttcagtacccaaatggagcgcgtgcgtacattgacagacgtcagaaatctgaaattccccccattgtttacccagaagtatccatgtgagtatgtgatggtgcaggatatgttatccccctcacctatggagcgacccgaggccattaacatcattgaaaacgccgtgttcgaggatttggattttcctgggaaaacggttctgagacagagatcccgaagtctgtccagctctggaactaagcactcgaggcagagtaacaactcccatagcccgctgccgtctaattag

SEQ ID NO: 222457 - DNA, 2898 bp, synthetic construct
  misc_feature 1..2898: note = Description of Artificial Sequence: Synthetic coding sequence
  source 1..2898: mol_type = other DNA
atgattataccttctctggatggcgctcttttccaatgggaccaagatagagagagcatggaaactgtacctttcacggtagagagtctcctagaatcctcttacaaattcggggacgacgtggttctggtcggcggtaagagtctgacaacctacggtctctccgcctacagcgggaaggtgcgttacatttgctcagctctaggatgtaggcagtgggactcggatgagatggaacaagaggaggacattctcttgttgcagcgaacccagaagacagttagagcggtgggcccaaggtccggaaatgaaaaatggaatttctcagtcgggcattttgagctgaggtatatacccgatatggaaactagggctggtttcattgaaagcacttttaagccaaacgaaaacaccgaagagtcgaagatcattagtgacgtagaagagcaggaggcggctattatggacatcgtgatcaaggtctctgtagccgactggaaggtcatggcgttcagtaagaagggcggtcaccttgagtgggagtaccagttctgtaccccaattgcgtcagcctggctgctgaaggacggaaaggtgatccctatcagcctgtttgatgacacctcttacacaagcaatgatgacgtgttagaagacgaggaggacatagtggaggccgctagaggagcaaccgagaactccgtatacttaggcatgtacagaggtcagctctatctccagagttcggtaaggatttctgaaaaatttccatctagtcctaaggctctcgaatcagttaccaatgagaacgcgattatcccactgccaacgataaaatggaagccactaatccactctccaagtaggacaccggtgctagtaggatctgacgaattcgacaagtgcctaagcaatgacaagttttcgcatgaggagtactctaacggcgctctgtccatattgcagtatccatacgacaacggttactatctgccttactacaagcgggaacggaacaagagatcaactcagatcactgtccggttcttggataacccacactataacaagaatatcaggaagaaagacccagtgctgctgctccattggtggaaagagatcgtggccacaatacttttctgtatcatcgcaactacttttattgtgcggcgactgttccatccgcacccacatcgccagcgaaaagaatccgagacccagtgtcagactgagaacaaatacgactccgtatcaggcgaggccaatgactcctcttggaacgacataaagaattctggatacatcagcaggtacctgaccgattttgaaccgattcaatgcctaggccgtggagggtttggggtggtctttgaagccaaaaataaagttgatgactgtaattatgccattaagaggatccgcctgccaaatagggaactggcaagagagaaagtaatgagggaagtgaaggccctggccaaacttgagcatccaggcattgttcgttactttaacgcctggctcgaggctccaccagagaagtggcaagagaagatggacgagatctggttaaaagacgagtcaactgattggcccctctctagtcctagcccaatggatgccccttccgtaaaaattcgaaggatggatccctttgctacaaaggaacacattgagataatcgctcccagcccgcagcggtcccgctcatttagcgtgggtatctcatgtgaccagactagctcaagcgaaagtcaattttccccgctggaattcagcggcatggatcatgaagatataagcgagtcagtggacgccgcttacaatttacaggatagctgtctgactgactgcgatgttgaagatggaaccatggacggtaacgatgaaggtcactccttcgaactttgcccaagtgaggcctccccctatgtgaggtccagggaacggacctcctccagtatagtcttcgaggactccggttgtgacaacgcatccagcaaagaagagcccaaaactaatcgcctgcacatcgggaaccactgtgccaataaacttaccgctttcaagcccacttcctccaagagctcctcagaggccacactgagcattagcccgcctcgccctactactctgtcacttgacctgacaaagaacaccaccgagaaactgcagcctagttctccgaaagtgtatttatacattcaaatgcagttgtgtcggaaggagaacctgaaagattggatgaatggcaggtgcactattgaggagcgagagaggagcgtgtgtcttcatattttcctgcagattgctgaggccgttgagtttctgcacagcaaagggttgatgcaccgggatcttaaaccctcaaacattttctttacgatggacgatgtggtgaaggtgggcgactttggactggtcaccgcgatggaccaggacgaggaagaacaaaccgtgctaacgcccatgcccgcttatgcacgacatactggacaagttgggaccaagctgtacatgagccctgaacagatccatggaaatagctatagccataaggttgacatctttagcttgggcttaatccttttcgagctattgtatccattttcaacccagatggagcgtgtgcgcaccctgaccgatgtccgcaatctgaaattcccccctctcttcacacagaagtacccttgcgaatatgtgatggtgcaggacatgctatcgccatcaccaatggaacgcccagaggccataaacattatcgaaaatgccgtctttgaggatctcgatttccccggtaaaaccgtgctccggcagaggagtagaagtctgtcctcttccggcaccaagcactcacgccaaagcaataatagtcacagccctttaccaagcaattag

SEQ ID NO: 222458 - DNA, 1569 bp, synthetic construct
  misc_feature 1..1569: note = Description of Artificial Sequence: Synthetic coding sequence
  source 1..1569: mol_type = other DNA
atggccgcagttgccgtggctgtgcgagaagatagtggtagtggcatgaaagcagagctgccaccaggcccaggagccgttggaagagagatgacaaaagaggagaaattacagctcagaaaagagaaaaaacagcagaaaaagaaacgcaaggaagaaaagggcgcagagccagagacaggctccgccgttagcgctgcgcagtgtcagggacccacacgcgagcttcccgagagcggcatccagctgggaactcctagagaaaaagttcccgctgggcgatcaaaagctgagttgcgggctgagagacgtgccaagcaagaggcagagagagcactgaaacaggctagaaagggggagcagggcggtccacccccaaaggcctcaccatccaccgctggtgagaccccaagtggcgtgaaaagactgccagagtaccctcaagttgatgacctgctcttaagaagattggtgaaaaagcctgagaggcagcaagtacccacgcgcaaggattacggttccaaagtgagcctatttagtcacctgccccagtacagcagacagaattctcttacccagttcatgtctatcccatccagcgtgattcaccctgcaatggtccgtttggggcttcagtactcgcagggactcgtatctgggtctaatgcacggtgtatcgcattgctgcgggctttgcagcaggtaattcaggattacacaaccccgcctaacgaggagctctctcgggacctagtgaacaagctcaaaccctacatgtcctttttgacccaatgccgacccctgagcgcctccatgcacaacgctattaagttcctgaataaagaaatcacatctgttggctccagcaagcgcgaagaagaagcaaagtccgaactgcgtgccgctatcgacagatatgttcaggaaaaaatcgtgctggccgctcaggctatttcgcggtttgcctaccaaaagatttccaatggagacgtgatcttggtgtatggttgtagttctttagtgtccagaattctgcaagaggcatggactgagggcagacgcttcagagtcgtggtggtggactcacgaccctggctggagggcagacacaccttgcgcagcctcgtgcacgctggggtaccagcatcatacttgctcataccggcagcttcctacgtgctgcctgaggtgtcaaaagtgcttctcggagcccacgccctgcttgcaaacggttctgtgatgtctcgggtgggtacagcgcagctggctctcgtggctcgggctcacaatgtgcctgtgttggtatgctgtgagacttacaagttttgcgaaagggttcagacagacgctttcgtgtcaaacgagcttgacgatccagacgatttgcagtgcaagagaggagagcacgtcgctttggcaaattggcagaatcacgcctcccttcgactgcttaatttggtctatgatgtgactcctcctgaactggtagatctcgtgattaccgagctgggcatgattccatgttcttctgtcccagtggtgctccgggttaaatcgagcgatcaatag

SEQ ID NO: 222459 - DNA, 1632 bp, synthetic construct
  misc_feature 1..1632: note = Description of Artificial Sequence: Synthetic coding sequence
  source 1..1632: mol_type = other DNA
atgccgactcagcagccagccgcaccatccactcgtgcccctaagccatcgaggagtctgtctggctccctgtgtgctttgttttctgatgcagattctggctccggcatgaaggccgagctcccccctgggcctggagctgtcggtcgagaaatgactaaggaggaaaagctgcagctccgcaaggagaaaaaacagcaaaagaagaaaagaaaagaagagaaaggggctgaacccgagacgggttctgccgtttcagctgcacagtgccagggccctactcgagaactgcctgagtctggcattcaactggggacacccagagagaaagtgcccgctgggagaagtaaagccgaactgagagccgaacgcagggccaagcaagaagccgagagagcgctgaagcaggcgaggaaaggcgaacagggcggacccccaccaaaggcgagcccatccacagcaggggaaactccctccggagttaaacgcttgcccgaatatccgcaggttgacgatctgctcctccgacgactcgtcaaaaagcccgagcgccagcaggttccaacacggaaagattacgggagtaaggtgagtctcttttcccatctgccgcagtattctcggcagaactcactgactcagtttatgtccattccctcatctgtgattcacccagccatggttcggctgggcctgcagtatagtcagggactggtctcagggagcaacgccaggtgcattgccctgctgcgcgctctgcagcaggttatccaggactacacaacacccccaaatgaggagctaagcagagacctagtgaacaaactgaagccctatatgtctttcttgactcagtgccggccactgtcagcatctatgcacaatgccattaaattccttaacaaggaaataacgagtgtgggcagttctaagagggaagaggaagccaagagcgaactacgcgcagccattgaccgctatgtgcaggagaagatagttctggccgcacaggcaatctccaggtttgcttaccaaaaaatttcgaatggggatgtgattctggtgtatgggtgttctagcctggtgtccagaattcttcaggaagcctggactgaaggcaggcggttcagagtagtggtggttgatagcaggccctggctggaaggccgtcacacattaaggagcctggtgcacgcgggtgtaccagcaagctatctgctgatcccagccgcttcctatgtgctgccggaggtgagcaaggtcctgctgggtgcccacgcactgcttgcgaacgggagcgttatgtctcgggtcggtactgctcagctggccttggtggcacgggcacacaacgtgcctgtcctggtgtgttgcgaaacatacaaattctgcgaacgagttcagacagacgcattcgtgagcaacgagctggacgatcccgacgatctacagtgtaaacgcggagagcacgtcgcacttgccaattggcagaatcacgcctctcttaggctactgaacctcgtctacgatgtaactccgcctgaacttgtggaccttgttatcacagagttgggaatgattccctgttcaagtgttcctgtggttcttcgggtgaaaagcagcgatcagtag

SEQ ID NO: 222460 - DNA, 918 bp, synthetic construct
  misc_feature 1..918: note = Description of Artificial Sequence: Synthetic coding sequence
  source 1..918: mol_type = other DNA
atggacgataaagagctgattgaatatttcaaatcccagatgaaagaggatccggatatggcttctgccgttgctgcaatccggactttactagaattccttaagagagataaaggtgaaaccatccagggcctccgcgcaaacctgacgtcggccatcgagactctttgtggcgtggatagcagcgtcgccgtgagcagtgggggtgaactgttcctgaggttcatctcacttgctagtctcgagtattcagactatagcaaatgcaaaaaaataatgattgagaggggtgaactgttcttacgaagaatcagcctatcaagaaacaagattgccgatttgtgccatacctttattaaggacggggcaaccatcctgacccatgcgtactctagagtcgtcctgcgagtgctggaggctgcggtggcagcaaagaagcgcttttcggtgtatgtgaccgagtctcagcctgacctttccggaaaaaaaatggctaaggcgttgtgccacttaaatgtgccagtgaccgtcgtcctcgacgcagcagtggggtatattatggaaaaagctgatctcgtcattgtgggcgcagaaggagtggtagagaacggcggtatcatcaataaaattggaacgaaccagatggcagtgtgcgcaaaggcccagaataagcctttctatgtcgttgctgagagttttaaatttgtcaggttattccccttgaatcagcaggacgtgcccgacaaatttaagtataaagctgatacgcttaaggtcgcacagactggccaggaccttaaagaggagcacccatgggtggattatacagccccaagtctgataacactactattcaccgacctgggcgtccttactccaagtgccgtatctgacgagttgattaagttgtacctgtag

SEQ ID NO: 222461 - DNA, 1056 bp, synthetic construct
  misc_feature 1..1056: note = Description of Artificial Sequence: Synthetic coding sequence
  source 1..1056: mol_type = other DNA
atgcccggatctgcggcaaaaggctcagaactgtccgagcgaatagagtcgtttgtagagaccctgaaacgaggtgggggaccccgttcaagcgaggaaatggcccgtgagaccctcggtctgctgaggcagatcatcactgatcataggtggagcaatgcgggagagctgatggagttgatacgcagagagggaaggagaatgaccgccgctcagccctcggagacaaccgtgggcaacatggtcaggcgggtgctcaagatcatacgggaagaatacggaaggctgcatggacgctctgacgaaagcgatcagcaggagtcactacacaagctgctaacgtcgggagggctgaacgaagactttagctttcactatgctcaattgcaaagcaatattatcgaggccatcaatgagcttctggtcgagctggaggggactatggaaaacattgccgcacaggccttggagcatatccactccaatgaagtcatcatgactattgggttttctagaacagtggaggcattcctaaaggaagctgccaggaaacgcaagtttcatgtaatcgtggccgaatgtgcccctttctgccaggggcacgagatggcagttaatttgtctaaggcaggcatcgagacgacagtgatgaccgacgccgcaatttttgcagtaatgagtcgtgtgaacaaggtcatcatcgggactaagactatactggccaacggagctttgcgagccgtgacagggacccacacgctcgctcttgccgcaaagcaccactcaacaccactgatagtctgtgctcctatgttcaagctatctccccagttccccaatgaggaagatagttttcataagtttgtagctcccgaggaggtcttgccattcactgagggagacattctggaaaaagtcagcgtgcactgtccagttttcgattatgtcccccctgaattgatcactctctttatttccaacataggaggaaatgcaccatcctacatctacaggctgatgagcgagctctaccatccagacgatcatgtactgtag

SEQ ID NO: 222462 - DNA, 1359 bp, synthetic construct
  misc_feature 1..1359: note = Description of Artificial Sequence: Synthetic coding sequence
  source 1..1359: mol_type = other DNA
atggagtttcaggctgtggttatggccgtaggcggagggtcccggatgacggatctgaccagctctatcccaaaaccgctgctgccagtgggcaataagccactaatatggtatccccttaacctgctggagcgggtgggatttgaggaggtcattgtggtgacaaccagggatgtgcagaaggctttgtgcgccgagtttaagatgaagatgaaacctgacatcgtgtgtatccctgatgacgccgacatgggtaccgccgacagccttcgctacatctaccctaagctgaaaactgacgtgctcgttctgtcttgcgacctaatcaccgatgtggccctgcacgaagtggttgatttattccgagcctatgacgcaagcctggccatgctgatgcggaaaggccaggacagtatcgagcctgtccccggtcaaaaggggaagaagaaggccgtggagcagagggattttattggcgtggatagcactggaaagcgtttgttgtttatggcgaacgaggctgacctggatgaggaactggttataaagggtagtatcctgcagaagcaccctcgcatcaggttccatacagggctcgtcgacgctcacctgtactgtctcaaaaagtatatcgtggactttctgatggagaacggcagtataacaagtattcgcagcgaattaataccttatctggtccgtaagcagttctcctcggcgtcttctcaacagggccaggaggaaaaagaggaggacctaaaaaagaaggagctgaaatccctagacatctatagctttatcaaggaggccaacaccctaaacctagccccttacgatgcgtgttggaacgcttgcagaggagacagatgggaagacttgagtaggagccaggtaaggtgctacgtgcatatcatgaaggagggcctttgttcacgcgtgtccactttaggactgtacatggaagccaatagacaagttcccaagctcctgtcagctctgtgccctgaagaaccgcctgtccactcctcagcgcagattgtctccaaacacttagtgggcgttgattctctgatcgggccagagacccaaatcggagagaagtcttctattaagagatctgtgataggctcctcttgcctaattaaagatcgggtcaccatcaccaattgcttgctcatgaactcggtcacggtggaggagggcagcaatattcaaggctctgttatctgcaacaacgcggtcatcgagaagggcgctgacattaaggactgtctgattggttctggccaaaggatcgaggccaaggccaaacgagtcaatgaagtgattgtcggcaacgaccagctgatggaaatttag

SEQ ID NO: 222463 - DNA, 594 bp, synthetic construct
  misc_feature 1..594: note = Description of Artificial Sequence: Synthetic coding sequence
  source 1..594: mol_type = other DNA
atggaatttcaggccgttgtgatggcggtgggtgggggttccagaatgacagatttaaccagctctatcccaaaaccactattgcctgtgggcaacaagcctctgatatggtaccctctgaacctactggaaagagttgggttcgaagaggttatagtggtcacaaccagagatgtgcagaaggctttgtgcgccgaatttaagatgaagatgaagcccgacattgtgtgtatccccgatgacgctgatatgggcacagccgatagcctcagatacatctatccgaagttgaagactgacgtgcttgtcttgagttgcgacttgatcactgatgttgcccttcacgaggtggtggatctgtttcgggcttatgacgcttccctggcgatgcttatgaggaaaggccaggacagtatcgagccagtgccaggacagaagggaaagaaaaaggccgacggcgactcactttgctgtcaggcaggcgtgcagtggcaccacttgggatcccttcagtctcccccacccggattcaagcatttcacatgcctgtccttgccttcatcttgggattacatgcatatgccaccccactag

SEQ ID NO: 222464 - DNA, 1239 bp, synthetic construct
  misc_feature 1..1239: note = Description of Artificial Sequence: Synthetic coding sequence
  source 1..1239: mol_type = other DNA
atggaattccaagcagtggtaatggccgtgggcggaggctcccggatgactgatttaacctcatctatccctaaaccacttctccctgtcggaaataaacccctcatctggtaccctcttaatctccttgaacgggtgggctttgaagaggtcatcgtggtcaccacaagagatgtccaaaaagcactgtgtgccgaatttaagatgaagatgaagcccgatatcgtttgcatcccagacgatgcggatatgggaacagctgatagtctgagatatatctaccccaagctgaagactgacgtgcttgtgctctcttgcgatctgattaccgatgttgccctccacgaagtcgtagatctatttagggcctatgacgcaagtttggcgatgctgatgcgcaaaggccaggacagcattgagcctgtgcctgggcagaagggaaaaaaaaaagccgtcgagcaaagagattttatcggagtagatagtactggaaagaggctcctgtttatggctaatgaggccgatctggatgaagaactcgtgatcaaagggtccattttgcagaaacaccccagaatcaggtttcacacgggtctcgtagacgcccatctttactgtctgaagaaatatatcgtcgattttctgatggagaatgggagcatcacatctattcggtccgagctgatcccctatttggtgcgtaagcagttttcgtcagcctcttcccagcagggccaggaggaaaaagaagaggacctgaaaaagaaggagctgaaaagcctggacatctactccttcataaaggaggctaacacactgaatcttgctccatatgatgcctgctggaacgcctgtcgaggggacagatgggaagatctttctcggagtcaggtccggtgctacgtgcacattatgaaggagggcctctgttctcgcgtttccacactcggattatacatggaagctaatcgccaggtgcccaagttattgtcagcactctgcccggaagaacctccagtgcactcgtccgcccagatcgtgtccaaacatctggtcggcgtggactctctgattgggcctgagacccagatcggtgaaaaatcttctatcaaacgctctgtgattggcagctcatgtctaatcaaagaccgtgtgaccattaccaactgtctgctgatgaattcagtcactgtagaggagggctacgtcagcccgtgtacccacctgaggcagagatag

SEQ ID NO: 222465 - DNA, 669 bp, synthetic construct
  misc_feature 1..669: note = Description of Artificial Sequence: Synthetic coding sequence
  source 1..669: mol_type = other DNA
taggtgatcaaaggctctattctgcagaaacatccacggattaggttccacacaggtctagtggacgcccacctgtattgcctcaaaaaatacatcgtggacttccttatggagaatggctccatcacttcaatcagaagcgaactgatcccttatctggttcgaaagcagttctcgagtgcatcctcccagcagggacaggaggagaaggaggaggacctcaagaagaaagaactcaagtccctggacatatacagttttataaaggaagcaaatacactgaatctggctccatatgatgcctgctggaacgcctgtcgtggggatagatgggaagacttgtcaagatctcaggtgaggtgctacgtccatataatgaaggaaggcctctgcagtagggtttcaacgctgggcctgtatatggaggctaatcgccaagtgccaaagctgctcagcgccctgtgtcccgaggagcctcccgtccactctagtgcccagatcgtctccaagcacctcgtgggcgtggacagtctaattggccctgaaacccagatcggtgagaagtcaagcattaagcgaagtgtgattgggtcctcctgcctgatcaaggacagagtcaccatcaccaactgtctcttaatgaactccgtgacggtggaagaaggatag

SEQ ID NO: 222466 - DNA, 1572 bp, synthetic construct
  misc_feature 1..1572: note = Description of Artificial Sequence: Synthetic coding sequence
  source 1..1572: mol_type = other DNA
atggctgccgtagctgtggctgtgagagaggattctggctctgggatgaaagcagagctcccgccaggtcctggagccgttggtagagaaatgaccaaggaagagaaactccagctgcgcaaggagaaaaagcagcagaagaaaaaacgcaaagaggaaaaaggggctgaacctgagaccggctcagctgtttccgccgcacagtgccaggtgggtcccacacgtgaacttcccgagtctggtatccaactgggaacacccagggaaaaggtacccgctgggaggtccaaagctgagcttagagcagaacgacgtgccaaacaggaggcagagcgggctctgaaacaggcccgtaagggtgaacagggaggcccacctccgaaggcctcccccagcacagctggtgagaccccttctggggtgaaacgcttgccagagtatccccaagtagacgacttattgttaagacgcctggtaaagaaacccgagagacagcaggtcccaacccggaaggattacgggagcaaagtgtctttatttagccacctcccgcagtacagtcgacagaactcccttacacagtttatgtctatccccagctcggtgatccacccggcaatggttcgcctgggactgcagtactctcagggattggtgtctgggtcaaacgccaggtgcatcgccctgctacgcgcactgcagcaggtgatccaggactatactacaccacccaatgaggaattgtcaagggatttggtaaataagcttaagccatacatgtccttcctcacccagtgcagacccctctccgcctcgatgcataatgcaatcaaatttttaaataaggaaataacatctgtgggttcatccaaacgcgaggaagaagccaagtctgagctccgcgcagccatcgataggtacgtgcaggagaagatcgtcttagctgctcaggccatctcccgattcgcataccagaaaatctccaacggagacgtaattctggtttacgggtgtagcagccttgtgtctaggattctacaggaagcatggaccgagggacgaagatttagagtggttgttgtagactcacggccttggttggagggtcgacacacactcagatcattagttcatgctggagtgcccgcatcatatctcctaattccagccgcatcttacgtattaccagaagtcagcaaggtcttactcggggcacatgctctactcgcgaatggatcagtcatgtcgcgggtggggacagcccagctggcactggtggcccgagctcataacgtaccagtgctggtctgctgtgagacttataaattttgtgagcgcgttcagacagatgcattcgttagtaacgaactggacgacccagatgacctgcaatgtaaacggggtgagcacgtagctctggctaattggcaaaatcacgcatcactgagacttctgaatttggtgtacgacgtgacacctcccgaactagtcgatctagtgattactgagctaggcatgatcccatgtagttcagtccccgttgtgttgagggttaaatctagcgatcagtag

SEQ ID NO: 222467 - DNA, 1563 bp, synthetic construct
  misc_feature 1..1563: note = Description of Artificial Sequence: Synthetic coding sequence
  source 1..1563: mol_type = other DNA
atggccgctgtagctgtcgcagtaagagaggatagcggctccggcatgaaagctgagtcgccgtgggcctgggttggccgagagatgacaaaggaggagaagctccagctgcggaaagagaagaagcagcagaagaaaaagaggaaagaagagaagggagctgagcccgagaccggctctgccgtgagcgctgctcaatgtcagggaccgactagggaactgcctgagtccggcatccagttgggcactcccagggagaaagtgcctgcaggccgatctaaagccgagctgcgggctgagaggagggctaaacaggaggccgagcgcgctctgaagcaggcaaggaagggtgaacagggcggaccccctcctaaggcctcgccctccacagccggagaaactccttctggagtgaagaggctccccgaatatcctcaggttgacgatctactgctacggagattggttaagaagcctgagaggcagcaggtgcctactcgcaaggattatggcagtaaggtgtctctgttctctcacctcccccagtacagcagacagaattctctgacccagttcatgtctatacccagttcagtcattcatcctgcaatggtgcggctgggattacagtactcccaggggttggtctcaggctctaatgccaggtgcatcgccctgctccgcgcactgcagcaggtcattcaggattacacgacacctccgaacgaagaactgtctagagatctggtaaacaagctgaagccgtacatgagctttttaacgcagtgcagaccgctgtcagcgtctatgcataatgcaattaaattcctcaacaaagagatcaccagtgtagggtcctcaaaacgtgaagaagaagccaaatccgaattgcgtgcggcaatagataggtatgttcaggagaagatagtgttggccgctcaggccatatcaagattcgcctaccaaaagattagtaacggggacgtaattctcgtctatggctgtagcagtctggtgtcgcggattctgcaggaagcctggaccgaaggcaggaggttccgcgtggtcgtggtcgatagccggccttggctggagggccgtcacaccctgcggtctttggtgcacgcgggtgttcccgcatcttatcttttgataccagctgcttcttacgttttgccagaagtttcaaaggtgctgttaggtgctcacgccctgctcgccaacggtagcgtcatgagccgggtcggaacagcccaattggccttggtcgctcgggcacacaacgttccagtgctagtgtgttgcgaaacttacaaattctgcgagagagtgcaaactgacgcgttcgtgtcgaatgaacttgacgaccccgacgacttacagtgcaaacgtggtgagcacgtggcactggcaaattggcagaaccacgcttctctcagattattgaacctggtgtatgatgtgacaccccctgaacttgttgatttggtgataacagaactagggatgatcccttgctcatctgtgcctgtagtgctcagagtgaagtctagcgatcaatag

SEQ ID NO: 222468 - DNA, 2166 bp, synthetic construct
  misc_feature 1..2166: note = Description of Artificial Sequence: Synthetic coding sequence
  source 1..2166: mol_type = other DNA
atggccgcacccgttgtggccccacccggagtggtggtgtccagggcaaacaagcgatctggcgcaggacctgggggatccggcggaggcggtgccagaggcgcagaagaggagccaccgcctccattgcaagctgtgctcgtggcggacagttttgacagacgtttcttcccaatctcgaaagatcaaccaagggtgctccttccactagccaatgtggccctgattgactacaccctggaattccttacagctacaggcgtgcaggagacatttgtcttttgttgctggaaggctgcccagatcaaggagcatttgctgaagtcgaagtggtgccgtccaacttctctgaacgtcgttaggatcatcacctccgagttatataggagcttgggagacgtgctccgggacgtggatgccaaagctttggtgaggtcagactttctgctggtgtatggagacgtcattagtaacattaacatcacccgggctttagaggagcaccggctgagacggaaacttgagaaaaacgtctccgtgatgactatgatctttaaggagtcgtctccatctcaccccactcgttgtcacgaggacaacgtggtcgtggcagtcgactctaccaccaatcgggtgttgcattttcagaagactcaggggcttcgcagattcgccttcccattgtcactgttccagggcagcagtgatggcgtggaggtccgctatgacttgttggactgccatatctcaatctgttcaccccaagtggctcaactgttcaccgataactttgactaccagacacgcgatgattttgtgagaggactcctggtgaatgaggagatccttggaaaccagatccatatgcatgtgaccgccaaggaatatggggctcgggtgtccaatcttcatatgtattcagcagtgtgcgcagacgtcattagacggtgggtgtatccgctgacacctgaggccaacttcacggatagcactactcagtcatgtacgcacagtcgtcacaatatctatcgaggcccagaggtttccctgggtcacggaagcatcttggaggagaatgttcttctgggtagcggcactgtaataggttccaattgttttataacaaacagcgtaattggccctggctgccacataggggataacgtggtgctggatcagacctacctatggcagggagtgagagtggccgctggcgcacagattcatcagagcctgttgtgcgataatgccgaagtgaaagaacgcgtaactctcaagcccagatctgttctgacatcacaggttgtggtcggacccaacatcacactgccagagggttctgttatatcacttcacccacctgatgcggaggaagatgaggacgatggggaattctctgacgattccggcgctgaccaggagaaagacaaggtcaagatgaaagggtacaatccggcagaggtcggtgctgccggtaagggttacctgtggaaagctgccggaatgaacatggaggaggaggaggagcttcagcagaatctctggggcctgaagatcaacatggaggaagagtccgagagtgaatcagagcagtctatggacagcgaggagccagacagcagaggtgggtcgcctcagatggacgatattaaggtttttcagaacgaggtactggggacattacagaggggcaaagaggagaacatctcatgcgacaatttggtgctggaaatcaattctctgaagtatgcctacaatatttcactgaaagaggtcatgcaggtgctttctcatgttgttctcgagtttcccctccaacagatggacagtcctttagattctagtcggtattgcgctttgctgctgccacttctgaaggcttggagcccagtgtttcgcaactacataaagcgtgcagccgatcacctggaagcactcgccgctatcgaagatttctttcttgagcacgaggctttagggatttctatggccaaggtcctgatggctttctaccagctggagatccttgcagaagagacgattctttcatggttcagtcagcgggataccacagataaggggcagcagctcaggaaaaaccagcaactccaacgcttcatccagtggctcaaggaggccgaggaggagagtagcgaagacgattag

SEQ ID NO: 222469 - DNA, 1014 bp, synthetic construct
  misc_feature 1..1014: note = Description of Artificial Sequence: Synthetic coding sequence
  source 1..1014: mol_type = other DNA
cccccacagccaagtaagatgctgggacttcaggtagcccagctcttcacggacaactttgattatcagacgagagatgacttcgtcagaggcctgctcgtgaatgaggagatccttggcaatcagattcacatgcacgtcactgcaaaggagtacggcgctcgtgtgtctaatttgcatatgtatagcgccgtgtgtgcagacgtgataagaaggtgggtctaccctctgactccagaggccaatttcactgattctaccactcagtcatgtacacattctcggcataacatttaccgcggacctgaagtgtctttgggtcacggcagtatactcgaagagaacgttctcctgggtagcggcaccgtaatagggagcaactgctttatcacaaattctgtgattgggcctgggtgtcatatcggggacaatgtggtgctcgaccaaacctatctatggcagggagtgagggtcgccgctggcgctcaaatccatcaatctctgctgtgtgataacgccgaagtgaaagaacgcgttacactgaagccgagaagtgtgttaactagtcaagtcgtggtgggcccaaacatcaccctgcctgagggcagcgtgatttctctgcaccccccagacgccgaggaggatgaggacgatggagaattctccgacgactccggcgcagaccaagaaaaagataaggtaaaaatgaagggatacaatcctgccgaggttggcgcagcagggaagggatacctgtggaaagccgcaggaatgaacatggaagaggaagaagaactccagcagaacttatggggccttaagataaacatggaagaggaatctgagtccgagtctgaacagagcatggactccgaagaacctgattctaggggtgggtctccacagatggacgacatcaaggtgtttcagaatgaggtcttgggcactctacaaaggggcaaggaggaaaacatctcctgtgataacttggtcttagagatcaacagcctgtag

SEQ ID NO: 222470 - DNA, 2574 bp, synthetic construct
  misc_feature 1..2574: note = Description of Artificial Sequence: Synthetic coding sequence
  source 1..2574: mol_type = other DNA
atggaagcgggtccgtccggggcagccgctggagcctacctgccccctctccagcaagtgttccaggcacctagacgaccaggtatcggaaccgtcggaaagccaattaagctactggcgaactacttcgaggtggacatacctaagattgacgtgtaccactacgaggttgacatcaaacctgacaagtgcccacggcgagtgaatcgtgaggtcgtggagtacatggtgcagcatttcaagccgcagatctttggggaccgcaaacctgtatacgacggaaagaaaaatatctacaccgttacggctcttcccataggaaatgaacgcgtagattttgaggtgacaattccgggagagggaaaagaccgcatatttaaggttagtatcaagtggctggcgatcgtgtcatggagaatgctccacgaagccctggtgtccggccagatccctgtgccccttgagtccgtgcaggctcttgatgtggcaatgcgccacctagcatccatgcgatacaccccagtgggccgtagcttttttagtccccctgagggatattaccatcccctgggcggaggaagggaggtctggtttggctttcaccagtcagtcaggcctgcaatgtggaagatgatgctgaacattgacgtgagtgcaaccgctttctataaggcccagcctgttatagagttcatgtgtgaagtcctggatattagaaacatagatgagcagcccaaacccctgacagattcccagagagtgcggtttacaaaagagataaagggtcttaaagtggaagtaacgcactgtggccagatgaaacggaagtaccgagtttgcaatgttacccgaagaccagccagccaccagaccttccctcttcaacttgaaagcgggcaaacagtggagtgcacggtggcccagtactttaaacagaaatacaacctgcaactgaaatacccgcaccttccttgcttgcaggtgggccaggaacaaaaacatacctatctgcctctggaagtgtgcaatatcgtggcgggtcagcgatgcataaagaagctgaccgacaaccaaacctctaccatgattaaggcgacggctaggtccgcgccagatcgtcaagaggagattagtcgcttaatgaagaatgcctcctataatctggatccctacatccaggaattcggaatcaaggtcaaggatgacatgaccgaagttaccgggagggtcctccctgccccaatccttcaatatgggggacggaatcgtgccattgcaaccccgaatcagggagtctgggacatgagaggaaaacagttctataacggtatcgagatcaaggtgtgggcaatcgcgtgctttgcgcctcagaagcagtgccgtgaggaggtgctgaagaattttacagatcagctgagaaagatttcaaaagatgccggtatgcctatccaggggcaaccttgcttctgcaagtatgcacaaggggctgattccgtggagcccatgttcagacacctcaagaacacctattctggcctgcagttgatcattgttattctgcccggtaaaaccccggtatacgccgaggttaaacgggtgggtgacaccctgctgggcatggccacacagtgtgttcaagtgaaaaacgttgttaaaacctctccgcaaacactgtccaacctgtgcctgaagataaacgtgaaactgggcggaatcaataacattttggtgccacatcagcggagcgcggtgttccagcagcctgtcattttccttggcgctgatgttacacatcctcccgctggtgatggaaagaagccttccataactgcagtggtcggctccatggatgctcaccctagtcgttactgcgctactgtacgggtccagagaccgagacaagaaattatcgaggacctgagctatatggtgcgtgaactcctgattcagttttacaaatccacaagattcaaaccaacccggatcattttctacagagacggagtgccggaagggcagctgccacaaattttgcactatgagctgctggccatccgggatgcctgtatcaagcttgagaaagactatcagcctgggatcacctacatcgtggtgcaaaagcgccaccacactagattattctgtgcagataaaaatgagcgtattggtaagagcggaaacatacccgctggaactaccgtggacacaaatattacacaccctttcgagttcgatttctacctgtgcagtcacgctgggatccaggggacctctcggcctagtcattactacgtcttatgggacgataacaggttcacggccgatgagttgcagatcctgacgtatcaactgtgtcatacgtatgtgaggtgcactcggtcggtgagtatccctgccccagcctactatgctcgccttgttgcattccgggctcgatatcatctggtggataaagagcatgattccggtgaaggctcgcatataagcggtcagagcaacggacgtgatccccaggctcttgccaaagcagttcaggtgcaccaagacactttgcggactatgtacttcgcctag

SEQ ID NO: 222471 - DNA, 2349 bp, synthetic construct
  misc_feature 1..2349: note = Description of Artificial Sequence: Synthetic coding sequence
  source 1..2349: mol_type = other DNA
atggtgcagcattttaaacctcaaatttttggagatcggaagcccgtgtatgatggtaagaagaatatttatacagtgacggccctccccatcgggaacgaacgcgtggacttcgaggtgactattccgggagagggaaaagaccggatttttaaggtaagcataaagtggctggctatagtcagctggaggatgctgcacgaagctctggtgtcaggacagattccagtcccgcttgagtcagttcaggccctggacgtggcaatgcgtcatctggcatcgatgcgctacactcccgttggcaggagctttttttctcccccagaagggtactatcacccgcttgggggtggcagggaggtctggttcggctttcaccagtcagtgcggccagccatgtggaaaatgatgctcaatattgatgtctctgccacagctttctataaagctcagccagtaatcgaatttatgtgcgaggtgctggacataagaaatatcgatgaacagcctaaacctctgaccgactctcagagagtgcggttcaccaaggaaataaaaggtcttaaagtggaagttacccactgcggacagatgaaaaggaagtaccgtgtctgcaatgtcactcgcaggccggcaagccatcagacttttcctctgcagctagagagcggccagacagtcgagtgtacggtagctcagtactttaaacagaagtacaacctgcaactgaagtacccgcacctgccctgcttgcaggtagggcaggagcagaaacacacttacttgccactagaggtctgcaacatcgtcgcgggacagcggtgtattaagaagttgaccgacaaccagacttctacgatgatcaaagccacggcacgttctgcgccagaccgacaggaagaaatatctaggcttatgaagaacgctagctataacctggatccctatatacaggaatttggcatcaaggttaaagatgatatgaccgaggtgaccggcagagtgctaccagctcctatcctccagtatggaggccgaaatcgggctatcgctacccccaatcagggtgtatgggacatgcggggtaaacaattctacaacggtatcgaaatcaaggtgtgggccattgcctgctttgccccacagaagcagtgccgcgaagaggtacttaaaaacttcacagatcagctgcgtaagatttccaaggatgccggaatgccgattcaaggccagccctgtttttgtaagtacgctcagggtgctgatagcgtcgaacccatgttccggcatctgaaaaacacatacagtggtctgcagctgattatcgttatcctgccaggcaagaccccagtctatgctgaagtaaaacgtgtaggggacactctgctgggtatggccacccagtgcgtacaggtcaaaaacgtggtcaagacatccccgcagaccctgtcaaacctgtgcctgaagatcaacgtcaaattaggcggtatcaacaacattctggtgcctcatcagcgatccgcggttttccagcagccggtgatatttctcggcgctgatgtcacccacccacctgctggggacggtaaaaaaccttctatcactgcagtggtgggctccatggatgcccacccgagcaggtactgtgctaccgtgcgagtgcagaggccacgtcaagaaattatcgaggacctcagttatatggtcagagagctgttaatccagttttataagagcacccgctttaaacccacacggatcatattttaccgtgacggcgtgcccgagggacaactgccgcaaatcctccattatgagctgctcgccatccgcgacgcctgcatcaaactcgaaaaggattaccagcctgggatcacatacatagtcgtccagaaacggcaccacactaggcttttttgcgccgataagaacgagcgcatcgggaaaagcggtaatatcccagccggaacaaccgtggacacaaacataactcatcccttcgaattcgatttttacctgtgcagccatgcaggcattcaggggacctcacggcctagtcactattatgtactgtgggatgataaccggtttacagccgatgagttgcagattctgacatatcagttatgccacacgtatgttcgatgcacacggtctgttagtatcccagccccagcctactatgcccgattagttgccttcagggctcggtaccatttggtggataaagaacacgactccggcgagggaagtcacattagtggacaaagcaacggtcgtgacccgcaggctctggcaaaagctgtgcaagtccaccaggacactctccgtacaatgtactttgcctag

SEQ ID NO: 222472 - DNA, 1254 bp, synthetic construct
  misc_feature 1..1254: note = Description of Artificial Sequence: Synthetic coding sequence
  source 1..1254: mol_type = other DNA
atggagttcgtcaagtgcctgggtcaccccgaagaattttacaatctagtgaggttccgcataggaggaaagcggaaagtaatgccgaaaatggaccaagactcgctatcgagtagcctgaagacatgctacaaatacctgaatcaaacttcccggtcgtttgccgcagttatccaggctttagacggagagatgagaaacgccgtgtgtatcttttaccttgtactgagagccctcgacacgctggaggatgatatgaccattagcgtggagaaaaaggtccccctgttgcataactttcactcctttctttatcagcccgactggcggttcatggaatccaaggagaaagatcgccaggtgctggaggattttcctaccattagcttggagttcagaaacttggctgagaaatatcaaacagtgatcgccgacatttgtcggaggatgggaataggaatggccgagtttctggacaagcacgtgaccagcgaacaagagtgggacaagtattgccactatgtcgccggtttagtgggtattggcctgtccaggctgttctccgcttcagagtttgaagaccctctggtgggcgaagacacagagagggccaatagtatgggcttgttcctccagaagacaaacattatacgggactatttggaggatcagcaaggcggacgggaattctggcctcaggaggtatggagccggtatgtgaaaaagcttggagactttgccaaacctgagaatatcgatttggctgtacagtgcttgaacgaactaatcaccaatgcactgcaccacataccggacgtaattacatacctgagccggctgagaaaccagtcagtgtttaacttctgcgctatccctcaggttatggccatagcaacgcttgccgcttgttataataaccagcaggtgtttaagggcgctgtgaagatccggaagggtcaggctgtaacacttatgatggacgcaaccaacatgcctgcagtgaaggctattatctatcagtacatggaggagatctaccacaggatccctgacagtgatccctctagctcaaagacccgacagataatatccactataagaacccagaacctgcccaattgtcaactgattagccgcagccactactcacccatctatctgtcattcgtcatgctgctggctgccctctcgtggcagtacctgactacgctgtcgcaggtgaccgaagactacgtgcaaaccggggagcactag

SEQ ID NO: 222473 - DNA, 2478 bp, synthetic construct
  misc_feature 1..2478: note = Description of Artificial Sequence: Synthetic coding sequence
  source 1..2478: mol_type = other DNA
atgtacagcggagccggtcctgctctggcccctcccgctccaccgccacccattcagggatatgcattcaaaccccctccacgcccagacttcggtacttcaggcagaaccatcaagctccaggcaaacttttttgaaatggacattccaaaaattgatatttatcactatgaactcgatattaagcccgagaagtgtccccgtagagtgaatcgggagattgtggaacatatggtgcagcacttcaaaacacagatcttcggggatcgtaagccagtatttgatggccgaaaaaatctgtacaccgcgatgccactgccaatcggacgtgacaaggtggagctggaggtcactctgcccggtgagggaaaggacagaattttcaaagtaagtattaagtgggtctcgtgtgtttctttgcaggcactgcatgatgctctgagcggaaggctgccgagcgtgccattcgaaaccatccaggcattagacgttgtaatgagacatctgcctagtatgcggtacacaccagtgggtaggagctttttcaccgctagtgagggttgtagtaacccactcggcggagggagggaggtctggtttggattccatcagtcggtgagaccttcgctttggaagatgatgttaaacattgacgtgtctgccacagcgttctataaggcccagcctgtaatcgagtttgtttgtgaggtcctggacttcaaatccatcgaggagcagcaaaaaccccttacagactctcaacgagttaaatttaccaaggagattaagggactgaaagtcgagattacccactgcggccagatgaagaggaaataccgcgtctgcaacgtgacccgacgcccagcttctcatcagacttttccattgcaacaggaatctgggcaaaccgttgagtgcacagttgcccagtattttaaggacagacacaagctggtgctacgctacccacatctgccttgtttacaagtaggccaggagcaaaagcatacttaccttcccctggaggtgtgcaacattgtagccggtcaacgatgcatcaagaagcttaccgacaatcagacttccaccatgattcgagccacagctcggagcgccccagacaggcaagaggaaatcagcaaactcatgcgatctgcgagctttaacacagatccctatgtgcgggagttcgggattatggtgaaggatgaaatgaccgatgtcacaggacgagtgttgcagccaccaagcatattgtacggcggacggaataaggctatcgccacacccgtacagggcgtgtgggatatgcggaacaaacaatttcataccggaattgagataaaagtgtgggccatcgcttgtttcgctccccagcgccaatgcactgaggtgcatctgaaaagttttacagagcagttgcggaaaatctcccgggacgctggcatgcctatccagggtcagccttgtttctgcaagtacgcccagggtgccgacagtgtggaaccgatgttccgccatctgaagaatacatacgccggtttgcagctagttgttgtgatccttccaggaaagacaccagtttatgcagaagtgaaaagggttggcgatactgtgttaggcatggcaacacagtgcgtgcagatgaagaacgtgcaacgcacaaccccccagacactttcaaatctctgtttaaaaattaacgtaaaactgggtggggttaacaatattcttctgccacagggtcgccctcctgtcttccagcagccagtaattttcttgggcgctgatgttacccatcctcctgccggagatggcaaaaaacctagtatcgccgctgtggtgggtagtatggacgcgcacccaaatcgctattgtgctacagtgagagtacagcagcaccgtcaggagattatccaggatctggccgctatggttagggagctgctgatccagttttataaatccacccgcttcaaacctactaggatcatcttctacagagacggtgtgtcagaggggcaatttcagcaggtcctccatcacgaactgctggcaatcagagaggcctgcattaagttggagaaggactatcagcccggaattacctttatcgtggtgcaaaaacgtcaccacactcggctgttctgtacggacaaaaatgaacggggaacatcgcgcccaagccactatcacgtcctatgggatgataacaggtttagctcggacgagctgcagatcctcacatatcaactgtgccacacatatgttcgctgtacacggtccgtgagcattcccgcaccagcatattacgctcacctggtggcgtttagagcgaggtaccaccttgtcgataaggaacacgactcagccgagggctctcacaccagcggacagtccaatggacgagatcaccaagcccttgctaaagccgtgcaggtgcaccaggacacattgcggacaatgtacttcgcctag

SEQ ID NO: 222474 - DNA, 1881 bp, synthetic construct
  misc_feature 1..1881: note = Description of Artificial Sequence: Synthetic coding sequence
  source 1..1881: mol_type = other DNA
atgtgtgaggttttggatatccataatatcgacgaacagcctcggccattgacagactctcacagggtgaaattcaccaaagagatcaaaggtctgaaggtcgaggtcacacattgcggcactatgagaagaaaatacagagtctgcaacgtaactagacggccagcttcacaccagacatttcccctgcagcttgagaatggccaaaccgtcgaacggaccgttgcgcagtactttcgggagaagtatactctgcagctcaagtaccctcatctgccatgtctccaggtggggcaggaacagaaacatacctatttacccctagaggtttgcaacatcgtagctggccagcggtgtatcaagaagctgactgataatcagaccagtaccatgattaaggcaacagccaggagcgcccctgaccggcaggaggaaatttctcgtctggttaggagcgcaaattatgagactgatccatttgtgcaggagtttcagttcaaagttcgagatgagatggctcatgtgaccgggagagtgctgccagcacctatgcttcagtacgggggacggaatcgcactgttgccacgcccagtcacggggtctgggacatgaggggaaagcagttccacactggtgtggaaatcaaaatgtgggccatagcatgctttgcgacccagcggcagtgccgcgaggaaattctgaagggcttcacagaccaactccggaagatctcaaaggacgcgggtatgccgattcagggacagccttgcttttgtaagtatgcgcaaggcgcagacagcgtggaacctatgtttcgccatttaaaaaacacctattcagggttgcagctgatcatagtaattctacccggaaagacaccagtctacgcagaagtcaaaagagtcggcgacaccttgcttggcatggcaacccaatgcgtgcaggtgaagaatgtcatcaagacttctcctcagacactttcaaatctgtgcctcaagattaatgtgaagttaggaggaatcaacaacattctggtgcctcaccaacgccctagcgtgtttcagcagcctgttatattccttggggctgatgtcactcacccacccgcaggagatggtaagaaaccatccattgcagctgtggtgggctcaatggacgcacatcccagccggtattgtgccaccgtcagggtccagcgcccaagacaggagattatccaagacctggctagtatggttagagagctactaatccaattttacaaatctactcggttcaagccaactcgcattattttctacagggacggtgttagtgaggggcagtttcgacaagtactgtattacgagctgctggccattcgcgaggcctgtatcagtctcgaaaaagattaccagccaggaataacctacattgtggttcagaaacggcatcacaccagactgttctgtgctgaccggacagagcgcgtcgggagatcaggtaatattccggcaggtactactgtggatactgatattactcacccctacgagtttgatttctacttatgtagccacgctgggatccagggtactagcaggcccagtcactatcacgtattgtgggacgacaattgtttcaccgcagatgaacttcagctgttaacttaccagctctgccacacctacgttaggtgcacaaggagcgtttccatccccgctcccgcttattacgcacatctcgtggcatttagagcacggtaccaccttgtagacaaagaacacgactccgccgagggttcacatgttagtggacagagtaacggtagagatccgcaggccctcgctaaagccgttcagattcaccaggatacattacggaccatgtacttcgcctag

SEQ ID NO: 222475 - DNA, 690 bp, synthetic construct
  misc_feature 1..690: note = Description of Artificial Sequence: Synthetic coding sequence
  source 1..690: mol_type = other DNA
atggaaatcggctcagccggacccgctggggctcaaccactgttaatggtccctagaagacccggatacggaactatgggaaagcccattaagttgctcgctaactgcttccaagttgagatccctaaaattgacgtgtatctgtacgaagttgacatcaaaccagacaaatgccccaggcgagtgaaccgtgaggtggtcgatagcatggtgcagcactttaaggtgacaatctttggcgatagaaggcccgtatatgatggcaaacgttcgctgtacaccgctaaccctttacccgtggccacaaccggcgttgaccttgatgtgacgcttccaggcgagggaggtaaggataggccattcaaggtctctattaagtttgtctcccgcgtgagttggcaccttttgcacgaagtgttaacaggacgcacactgcctgagcctctggagttagataaaccgatttctaccaaccctgtgcacgctgtggatgtagtgctgcgccatctgccgtctatgaagtacactcccgtggggcgttcttttttctctgcgccagagggatacgatcacccattagggggtggtagagaggtctggtttggattccatcagagtgttcgaccggcaatgtggaagatgatgctaaatatcgatgagcgggacctctggcagcagtgtggggaatag

SEQ ID NO: 222476 - DNA, 2583 bp, synthetic construct
  misc_feature 1..2583: note = Description of Artificial Sequence: Synthetic coding sequence
  source 1..2583: mol_type = other DNA
atggaaatcggctccgccggacctgctggagcccaaccgctgttgatggttccgaggcgacctggttacggtaccatggggaagccaatcaagctgctggcaaattgctttcaggtggaaatcccaaagatcgacgtttatctgtatgaagttgatatcaagccagataagtgtccacgcagggtcaatagggaggtggtggattccatggtccaacattttaaggttaccatcttcggggatagacgtcccgtgtacgatgggaagcgtagtctttacaccgctaatccactccctgtcgctactactggcgtggatcttgatgttactctcccgggagaggggggtaaagaccgtccttttaaggtcagtatcaaattcgtctctagggtaagctggcacctactgcacgaggtgttaacaggacgaaccctgcctgagcccctggagctggataagccaatctcgacgaacccggtgcacgcagtggacgtcgtgctccgacatctgccctccatgaagtacacgcctgtgggtagatccttcttttccgctcctgagggttatgatcatccccttggcggagggagggaggtatggttcggtttccaccaatccgttcgccctgccatgtggaagatgatgctgaacatagatgtgagtgcaactgcattctataaagctcagcctgtgatacagtttatgtgtgaggtgctggacatccataacatcgacgaacagccacgaccactgaccgactcacacagagtcaagttcacgaaggaaataaagggactgaaggtagaggttactcactgcggtaccatgcgccgtaagtatagagtctgtaacgttactaggcggccagcatcgcatcagacatttcctcttcagctagagaacggtcagaccgttgagagaacagtggcccagtacttccgtgagaaatatactctacaactgaaatacccacacttgccatgcttacaagtagggcaggagcagaagcacacttatctccccctggaagtgtgtaacattgttgctggccagcggtgtatcaaaaaactgactgacaaccagacttctactatgatcaaggcaactgcgcgatctgccccagaccgacaggaggagattagtcggttagtaaggagcgccaattacgagaccgatccctttgtgcaagagtttcaattcaaggtccgggacgagatggcccatgtgacagggagagtgctgcctgctcccatgcttcagtatggtggaagaaatcgcacagtcgctacaccaagccatggcgtctgggatatgcggggtaaacagttccacacaggggtggaaattaagatgtgggcgattgcatgctttgcaactcaaagacagtgccgagaagaaatcttgaaggggtttacagatcagttgcgcaagatttccaaagacgctggcatgccaattcagggtcaaccatgtttctgcaaatacgcccagggagcagattcggttgagccgatgtttcgacacctcaagaacacatacagcgggctacagctcatcatagtgattctcccgggaaagacaccagtctacgcagaagtgaagagggttggggacactctcctgggtatggcgactcagtgtgttcaggtgaaaaacgtcatcaagacctcaccacagaccttatccaacctgtgccttaaaatcaacgtgaaattgggcggaatcaacaacattctagtgcctcaccagcgccctagtgtgtttcaacagccagttatatttctgggagcagacgtcacccacccacctgctggggacggcaagaagcccagtatcgcagcagtcgtggggtccatggacgcacatccgtcccgttactgcgccactgtgcgcgtccagcgtcctcggcaggaaataatccaggatttggcatcaatggtgcgagaactgcttatacaattttataaaagcaccaggttcaaaccgacacgcatcatcttttaccgcgatggggtttccgagggacaatttagacaggtgctgtactatgagctcctggcaatcagagaagcttgtataagcctagagaaagactaccaacccggaatcacctatatagtggtgcagaagaggcatcacacgaggctgttctgcgctgatcgcaccgaaagagtgggaaggtctggaaacatcccagccggaactaccgtggacactgatatcacccatccatatgagtttgacttctatctgtgcagccacgcgggaattcagggtacttcccgtcccagccattaccacgtcctgtgggatgacaactgtttcacggccgacgaattgcaactactcacttatcagctctgtcatacctatgtgcgctgcacgaggtctgttagcataccagcccctgcctactatgcgcatcttgtcgccttccgcgcacgttaccatctcgtcgataaagaacatgacagcgccgaaggcagccatgtttcaggccagagtaatgggcgtgaccctcaggctcttgccaaagcagtgcagattcaccaagatacattacggaccatgtattttgcatag

SEQ ID NO: 222477 - DNA, 690 bp, synthetic construct
  misc_feature 1..690: note = Description of Artificial Sequence: Synthetic coding sequence
  source 1..690: mol_type = other DNA
atggaaattggatccgcagggcctgctggtgcccagccactgctgatggtgccgagacggccagggtacgggaccatgggcaagcccattaaattgttggccaattgtttccaggtagagatccccaaaattgatgtttacctatatgaggtggacataaaaccagacaaatgcccgaggcgggttaaccgggaggtagtggattcaatggtccagcacttcaaggtgacgatattcggggacagacggccagtgtatgacggtaaaagatcactgtatacagcaaacccgctgccagtagccacgacaggcgtggatctggacgtcaccttgccgggagaggggggaaaggacagaccctttaaagtctctataaagtttgtgtccagggtgtcatggcacctccttcacgaagtgctcaccgggcgaacactcccggagcccctcgagctggataaacccattagcaccaatcccgttcacgccgtagatgttgtcctgcggcatctgccctctatgaagtatacaccagtgggcagaagttttttcagcgctcccgaaggttacgatcacccactgggtggaggcagggaagtttggttcgggttccatcaatccgtccgcccagccatgtggaaaatgatgttgaacattgacgagagagacctgtggcagcagtgcggtgaatag

SEQ ID NO: 222478 - DNA, 2586 bp, synthetic construct
  misc_feature 1..2586: note = Description of Artificial Sequence: Synthetic coding sequence
  source 1..2586: mol_type = other DNA
atggaggcactgggacctggaccccctgcctccctttttcagcccccacgaaggcctggcctcggaacagtcggaaagcccatcaggctgctagcgaaccacttccaggtgcaaatacctaagatcgatgtttaccactatgacgtcgatattaagcctgagaagcgacctagacgcgtgaaccgggaggtggtggataccatggtgagacatttcaagatgcaaatcttcggagacagacagcctgggtacgatgggaaacgcaacatgtatacagcccacccactgccaattggtagggatcgggtggatatggaagtgacattgcctggcgaagggaaagaccagaccttcaaggtgtccgtgcagtgggtttccgttgtatcgctgcagctccttttggaagctctggcgggtcacctgaatgaagttcctgacgacagtgttcaggccctggacgtgatcacacgtcatttaccaagcatgcggtataccccagtgggaaggtcctttttttccccgcctgagggttattatcatccgttaggaggcggtcgcgaagtctggtttggatttcaccagagcgtgagacccgctatgtggaacatgatgctgaatattgatgtctctgccacagccttttacagggcccaaccaatcattgagttcatgtgtgaggtcctcgacatccagaacatcaatgaacagactaagcctcttacggattcccagcgggtaaagttcacaaaggaaattcgtggacttaaggtagaagtgacacattgcggacaaatgaagcgcaaataccgggtgtgcaatgtgacccggcgtcctgcctcccaccagacattccccttgcaactcgaaaacggccaggcaatggaatgtaccgtcgctcaatactttaagcagaagtattccttacaactaaaatacccccacctcccctgcctgcaagttggacaggaacagaaacacacctatcttccattagaggtgtgcaatattgtcgccggtcaacgctgtattaaaaagcttacagataatcaaacgagcacaatgatcaaggctactgcccgttcggcccctgatcgccaagaagaaatttcccgtctggtgaagtctaatagcatggtgggcggacccgacccctatttgaaagagtttgggatcgtggttcacaacgagatgactgagctgaccggccgagtgctgcctgccccaatgcttcagtacggcggtcggaacaaaactgttgccactccaaaccaaggggtctgggacatgcgcggaaagcagttctacgcgggaatcgaaattaaagtttgggctgtggcctgttttgctcctcagaagcagtgccgcgaagatttactaaagtccttcaccgatcagctgcggaaaataagtaaggacgccggaatgcctatccaggggcagccatgcttctgtaaatacgcccaaggggctgacagtgttgagcctatgttcaaacacttaaagatgacttatgttggcctacagctgattgtggtcatactcccaggcaaaacccctgtttacgctgaggtcaagagggtgggagacaccttactgggaatggcgacccagtgtgtgcaggtcaagaacgtggtcaagacgagcccgcaaaccctcagcaatctttgcctgaaaataaatgccaaacttggcggaattaacaatgtgctcgtacctcatcagagaccatctgttttccagcaacccgtgatcttcctgggggcagatgttacccacccacccgcaggggacggtaaaaaacctagcatcgccgctgtggtaggaagcatggacgggcatccttcgagatattgtgctacagtccgtgtccagacttctcgccaggaaatcagccaggaacttttatattcccaagaagttatccaggatctgacaaatatggtgagggagctgctgatccagttttataagtcgacacggtttaaacccaccaggattatctattaccgtggtggcgtttccgagggacagatgaaacaggtggcgtggcccgaactgatcgcaattcgcaaggcctgcattagcctcgaagaagattaccgcccagggattacctatattgtggtgcaaaaacggcatcacacaagactgttctgcgccgataagacagaaagggtgggcaaatcggggaacgtgcctgcaggcacgacagtggacagcacgatcacccacccatcagagttcgacttctatctgtgcagccacgccggtatccaggggacctctcgtccttcccattaccaggtgttatgggatgacaattgctttactgcagacgaactccaacttctgacctaccagctgtgtcatacctacgtgagatgtacccggtccgtctccatccccgctccagcctactatgcgagactggtagcttttcgtgcaagatatcacctagtggacaaagaccacgactcggctgaggggtctcacgtgagcggacagtccaacggtcgggacccccaggcgttggcaaaagcggtgcagattcaccacgacacccagcacactatgtatttcgcgtag

SEQ ID NO: 222479 - DNA, 1755 bp, synthetic construct
  misc_feature 1..1755: note = Description of Artificial Sequence: Synthetic coding sequence
  source 1..1755: mol_type = other DNA
atgttcgccaaggcttttagagttaaaagcaataccgccatcaagggaagcgataggcgtaaactcagagccgatgtgaccacagccttccccaccctgggaaccgatcaggtgtctgaactggtcccgggtaaagaggaactgaatatcgtcaagctctacgcgcacaaaggcgatgccgtgactgtttacgtcagcggcggaaacccaatactgtttgagctggaaaaaaacctgtacccgacagtttataccctttggtcctacccggacctacttcccacttttaccacctggccgctggtcctcgagaagctggtcgggggagctgacctcatgttgccagggctggtgatgcctcctgctggccttcctcaggtgcagaaaggcgatctctgcgcgatatccctggttggcaatagagcacctgttgccattggtgtcgctgccatgagcaccgccgagatgctaacaagtggtcttaagggtaggggattcagtgtgcttcacacatatcaagatcacttgtggcgtagcggcaataaatccagcccccctagcatagctcctctggcgcttgacagtgccgatctgagcgaggaaaaaggctcggtacagatggattctacactccagggggacatgcggcacatgacgttagaaggggaggaagagaacggagaggtccaccaggctcgggaagataaatcattgtctgaagcacccgaggatacaagtacgcgtggactgaaccaggattcaacggactccaagacccttcaggaacagatggacgagctattgcagcagtgttttctgcacgctcttaagtgcagagttaagaaagccgacctgcctctgcttacctctaccttccttggttctcacatgttcagttgctgtcctgaaggacgtcaactggatataaagaagtccagctacaagaagttaagcaagtttttacaacaaatgcaacaggagcaaatcatccaggtgaaagaactgagtaaaggtgtggaatcaattgtagctgtggactggaaacaccccaggatcacatcatttgttatccctgagccatcaccgacctcccaaaccattcaggagggctctcgcgagcagccataccatccacccgacattaaacctctgtactgcgtcccagctagtatgactctcttgtttcaggagagtgggcataaaaaaggatccttcctcgaagggagtgaagtgcgcactatcgtcattaactacgcaaaaaagaacgatttggtggacgccgataacaaaaacctggttcggttggatcctatcttgtgcgactgtatcctggagaagaatgagcagcacaccgtgatgaaattaccttgggatagcttactgacgagatgccttgaaaaactgcagccagcctaccaggtgacactgcctgggcaggagccaattgtaaaaaagggacgtatctgtccaattgatatcacactcgctcaacgcgcatctaacaagaaggtcaccgtggtgcggaatctggaggcttacgggttggatccatattccgtggcagctatacttcagcagagatgtcaggcctcgacaactgtgaacccagcccctggcgctaaagatagtctgcaggttcagatccaagggaatcaggtgcaccatctgggatggctcctcctggaagaataccaactgccccgtaaacacatccagggtctggagaaagctttgaaaccaggaaagaagaaatag

SEQ ID NO: 222480 - DNA, 816 bp, synthetic construct
  misc_feature 1..816: note = Description of Artificial Sequence: Synthetic coding sequence
  source 1..816: mol_type = other DNA
atgtttgccaaagcattccgggttaagtcaaacacggcgatcaagggttccgaccgccgaaaattgcgcgctgacgtgacaactgccttccctaccttggggacagatcaagttagtgagctggtacctggcaaggaggagctcaacatcgtgaagttgtatgcccacaaaggcgacgctgtgactgtgtatgttagcgggggaaatcctatcctctttgagctggagaagaacctgtatcccactgatctgatgctgccaggtctggtgatgccaccagccggactgccccaggtgcagaaaggtgacctatgcgctatcagccttgtaggaaaccgggcacctgtggccatcggggtggctgccatgagcactgcagaaatgcttacttcggggctgaagggaaggggcttttctgttttgcatacttatcaagaccatctctggagaagcggtaataaatcctcaccaccgagcattgcacctcttgcactcgacagcgctgatctatccgaggaaaaagggtctgtccagatggattcaaccctccaaggggacatgagacatatgaccttggagggcgaagaagagaatggggaggtgcaccaggcgagagaagacaaaagcctcagcgaagcccctgaggacacaagcactcgaggcttaaaccaggactccacagacagcaaaactttgcaggagcagatggacgagctgttacagcaatgctttctacacgctctgaagtgtagggtgaaaaaggcagacctcccacttctgacatctacattcctgggatctcacatgttcagttag

SEQ ID NO: 222481 - DNA, 1383 bp, synthetic construct
  misc_feature 1..1383: note = Description of Artificial Sequence: Synthetic coding sequence
  source 1..1383: mol_type = other DNA
atgtttgcaaaggcgtttagggtcaagtcgaataccgccattaagggctctgatcggcgtaaactgcgcgcagatgttactacggcttttccaacacttggtacggatcaggtgtccgagctggtgcccggtaaggaagagctgaatatcgtcaagctctatgcgcacaagggcgacgccgtcactgtgtacgtgtcaggcggaaaccctatcctatttgaactcgagaaaaatctctatcccaccgtctatacactgtggtcgtaccctgatttgctgcccacttttacaacctggcccctagtgctcgagaaattagtaggtggagcagatctgatgctgcctggtttagtgatgcctcctgcaggcctgccgcaggttcagaagggagatctgtgtgccattagtttagttggcaaccgcgcaccagtagctatcggagtggccgcaatgtccacagccgagatgctgacgtcaggacttaaaggtcgcggattcagtgttcttcacacgtaccaggatcatctgtgccctgaaggacgtcagctcgatataaaaaagtcttcgtacaaaaagctcagcaagttcctgcaacagatgcagcaggaacagatcattcaggtcaaggagttgagcaagggggtggaatccatcgtcgccgttgactggaagcatccgagaattacaagctttgtgattcccgagccgtccccaaccagccagaccatccaggaaggatcccgagaacagccctatcaccctcctgacattaagcctctctactgcgtacctgcctccatgacactacttttccaggagtctggtcataaaaaaggatcctttctagagggaagcgaagttcggaccatcgttattaactatgcgaaaaagaacgacctcgtcgatgccgacaacaaaaacctcgtgcggctcgatccgattttgtgtgattgtattctggagaaaaatgagcagcacaccgttatgaaactgccgtgggacagcttgctcactagatgccttgagaagctgcagcccgcatatcaggtgacgcttccaggccaggagccaattgtcaagaaggggcgaatctgtcccatcgacataaccctggcacagcgagcatccaataagaaggttactgtcgttcgtaacctagaggcatacgggctggacccctatagtgtggctgctattctacagcagcgctgtcaggcatctacaactgtgaaccctgcccctggtgctaaggactctcttcaagtgcagatccaagggaaccaagtccatcacctgggctggcttctcctggaggagtaccagttaccccgtaagcacatccaggggctcgaaaaagcactcaaaccagggaaaaaaaagtag

SEQ ID NO: 222482 - DNA, 816 bp, synthetic construct
  misc_feature 1..816: note = Description of Artificial Sequence: Synthetic coding sequence
  source 1..816: mol_type = other DNA
atgttcgccaaagccttccgagtgaagtctaatacggcgattaagggatcggaccgacgcaagttgcgtgcggacgtcaccacagctttccccactcttggcacagatcaagtaagtgagctggtcccaggcaaagaggagcttaatatcgtaaaactctacgcccacaaaggggatgccgtgacagtctatgtctcgggaggaaaccccatcctgttcgagttggagaagaatctgtaccccaccgatctgatgctccctggcttggtgatgccaccagccggactcccacaggtccaaaagggggatctctgcgccatcagcctggtgggtaaccgcgcacccgtcgctattggggtagctgccatgtctactgctgaaatgctgacatctggacttaagggaagaggattttccgtcttacatacataccaggatcacctgtggcgtagcggcaataaaagctctcctccgagcatcgctccactggcccttgactctgccgacctctccgaggagaaaggcagtgtacaaatggacagtactcttcaaggtgatatgaggcacatgaccctagagggggaagaagaaaatggcgaggttcaccaggccagagaggataagagcctgagcgaagccccagaagacactagtaccaggggactgaatcaggactccaccgacagtaaaaccctgcaagaacagatggacgaattattacagcagtgtttcctgcacgcgcttaagtgtcgcgtcaaaaaagcggacctgcctctgctgacctccacattcctaggctcgcacatgttctcatag

SEQ ID NO: 222483 - DNA, 2742 bp, synthetic construct
  misc_feature 1..2742: note = Description of Artificial Sequence: Synthetic coding sequence
  source 1..2742: mol_type = other DNA
atgagcagattctttactacgggcagcgattccgagagtgagtcgtccctgagcggcgaagagttggtcaccaaacctgtcggcggaaactatggtaagcagccccttctgctcagtgaggacgaagaagacactaaaagagttgttagatcagctaaggacaagcggttcgaggaacttaccaacctgatcagaaccattaggaacgccatgaagatcagagacgtaacgaagtgcctcgaagagttcgaactgctcggaaaagcctacgggaaggccaaaagcatagtggacaaagaaggggttccaaggttctacatcaggattctggcagacttagaagactatctgaacgagttatgggaggataaggagggcaaaaagaaaatgaataagaataacgcaaaggcattaagtacacttcggcagaagatccgcaagtataacagggactttgaatcacacattactagctacaaacagaatcctgagcagagtgccgatgaggatgccgaaaaaaatgaagaggactcagaaggcagctccgacgaagacgaggatgaggatggggtgtcggctgcaacttttcttaaaaaaaaatcggaggctccctctggcgaatcccgaaagttccttaagaaaatggatgatgaggacgaagactccgaggatagcgaagatgacgaggattgggataccggctcaacatctagcgacagcgactcagaggaagaagagggcaagcagaccgccctcgcttcaaggttcctgaaaaaagctcccacgactgacgaggataagaaggccgctgaaaaaaaaagggaggataaggcaaaaaagaagcacgaccgcaagtctaaaagactggatgaggaggaggaggacaatgagggcggtgagtgggaaagagtgcgtgggggtgtgcccctcgtgaaggagaagcccaaaatgtttgctaaggggacggaaatcacccacgcagtggtgatcaaaaagctgaatgagattttacaggcccgaggcaagaagggtactgaccgcgctgctcaaatcgaattgctgcagctccttgtgcagattgccgctgagaacaatctgggcgaaggagtgattgttaaaatcaagtttaacatcatcgccagtctgtacgactataatcctaatctggccacgtatatgaagccggaaatgtggggcaagtgtctggattgcataaacgagctcatggatatcctcttcgccaaccccaacatctttgtgggcgagaacattttggaagagagtgagaatctgcataatgcagatcagcctctcagggtgagaggctgtatccttacactcgtagaaagaatggacgaggagtttacaaaaatcatgcagaacaccgatcctcatagccaggagtacgtggaacaccttaaagatgaggcccaagtttgcgccatcatcgagcgcgtgcagcgttatcttgaagagaaaggaactacggaagaagtgtgccgcatttacttgctgagaattctgcatacttattacaaattcgactataaggcccatcagagacagttaacgcccccagaggggtcttcgaaatctgagcaggaccaagcagagaatgagggagaggatagcgcagtgctaatggaacgcttgtgtaagtacatctacgctaaggataggacggataggatacggacatgtgcaatcttgtgccatatttatcaccacgctcttcatagccggtggtatcaagcaagggatcttatgttgatgtctcaccttcaggacaacattcagcacgcagacccacctgtgcagatactttataaccgaaccatggttcagctgggcatctgcgcattcagacaaggactcacaaaggacgctcataacgcactcttagacattcagagtagcggacgggcaaaagaactgctgggtcaagggctgttgttgagatcacttcaggaacgcaatcaggagcaagaaaaggtggagagacgacggcaggtgccatttcacctgcatataaacttagaattgctggagtgtgtgtaccttgtgagcgccatgctgctggagatcccctacatggctgcccatgagtctgatgcgaggcgtcgtatgatatcaaaacagttccaccatcagctgagggtcggagaacgccaacctctgctcggaccacccgaatcaatgagagaacatgttgtagccgcatctaaagctatgaagatgggggactggaaaacctgccattcctttattatcaatgaaaagatgaacggcaaggtgtgggatctatttcccgaagctgacaaagttcgcaccatgctggtgcggaaaatacaggaagagtcactgagaacttatctgtttacatattccagcgtctatgacagcatatcaatggagactctgagcgacatgttcgaactagacctccccacggtgcactccataattagtaagatgataattaacgaggagctgatggccagcttggaccagcccactcagaccgtcgtgatgcaccgcactgagcctacagcccagcaaaacctggccttgcagctagcagagaaattgggaagtttggtggaaaacaatgagagagtcttcgatcataagcagggcacgtacggcggatatttcagagatcagaaggatggatacagaaagaatgaggggtacatgaggagggggggttataggcagcagcaaagccagaccgcgtattag

SEQ ID NO: 222484 - DNA, 4149 bp, synthetic construct
  misc_feature 1..4149: note = Description of Artificial Sequence: Synthetic coding sequence
  source 1..4149: mol_type = other DNA
atgccggcttacttccaacggccagagaatgccctcaaaagggctaacgagttcctcgaggtcggcaagaagcagccagccctcgacgttctatatgatgtaatgaaatctaagaagcatcgtacatggcagaagattcacgagccaattatgctgaaatacctggaactgtgtgtggatctccggaaatcacacctcgcaaaggagggtctgtatcagtataaaaatatatgccagcaggtgaacatcaagagtctggaggatgttgtgagagcttacctgaaaatggcggaggagaagaccgaggctgccaaggaggaatcacaacagatggtactggacatcgaagatttggacaatatccaaactccagagagcgttctcctgtctgccgttagcggtgaggatacacaggatcgcaccgatcgcctactcctcaccccctgggttaaattcctgtgggaatcctacaggcagtgtctagatctgcttcgcaacaactctcgcgtcgagcgcctgtaccacgacatagcccagcaagcgttcaagttttgcctccagtatacacgcaaggccgagttcagaaagttgtgtgacaacctgcgcatgcacttaagccagatccagcgacaccacaaccagagcaccgctatcaacctcaacaacccagagtcacagtctatgcatcttgagacgcgtctggtgcaactggattccgctatctccatggaattgtggcaggaagcctttaaggcagtcgaagacattcacggcttgttttccctgtcgaagaagcccccaaagccgcagctcatggctaactactacaacaaagtgagtactgtattttggaaatccggaaatgccctcttccacgcatccactctgcaccggttataccacctgagcagggaaatgcggaagaatctgacgcaagacgaaatgcagaggatgagtacacgggttctgctcgccacgttaagcatcccaatcaccccagaaagaaccgacatcgctaggctgctggacatggacggcataatcgtcgagaagcagcgtaggctggcaactttgcttggcttacaggcccctcccacccgcatcggcctcatcaatgatatggttaggttcaacgttctgcagtacgtcgtgccagaggttaaggatctctataactggctagaagtagagtttaatcctctgaaactgtgtgagagggtcactaaggtgctcaactgggtgagagagcagcccgagaaagagcccgagctgcagcagtacgtcccgcaattgcagaataatactatcctccgcctgctgcaacaggtgtcccagatataccagagcatcgagtttagccgactaacatccctggtgccattcgtagacgctttccagctggagcgcgctatcgtcgatgcggcaagacattgtgacctacaggttcggatcgatcatacgtcacggactctgtcttttggaagtgacctgaactatgctacgcgggaggacgcgcctatcggacctcacctgcaatctatgccgtcagagcagattaggaatcagctgaccgccatgagcagcgttctggccaaggctctcgaggtgatcaagcccgctcacattctgcaggaaaaggaagaacaacaccagctggctgtgaccgcatatcttaagaattctcggaaggagcaccagaggatcctcgcaaggcgtcagaccattgaagaacggaaagaaagactcgaatctctgaatattcagcgagagaaggaagagttggagcagcgtgaggctgaactgcagaaggtgcgaaaagccgaggaggagagactaagacaggaagctaaagaaagagaaaaggaacgtattctgcaggagcatgaacagattaaaaaaaagaccgtgcgagagcgcctggagcagattaagaaaacagagttgggagctaaggctttcaaagatatcgatatcgaggatctcgaggaactggatcctgatttcataatggctaagcaggtggaacagctggagaaggaaaaaaaagagctccaggaacgccttaagaatcaagaaaagaaaattgactattttgagagggcgaaacggctagaggagatccccctgattaaaagtgcctatgaggagcagcgcattaaggatatggacctatgggagcagcaggaagaagagagaataactacaatgcagttggagcgcgaaaaggcccttgagcacaaaaatagaatgtcgagaatgctggaggaccgggatctgtttgtgatgcggttgaaagccgctcggcagtcagtgtacgaagagaagctgaaacaattcgaagaaagacttgcggaggaaagacataaccgcctcgaagagagaaaaagacagcgcaaggaggaaaggcggatcacttactaccgggagaaggaagaggaagagcagaggcgggcagaagaacagatgctcaaggagcgggaggagagggagagggctgaaagagccaagcgcgaggaggagttgcgtgagtaccaggaacgcgttaagaagttggaagaggtggaacgcaagaagcgacagcgcgagctagagatcgaagaaagagagcgaagaagggaggaggagaggaggctgggggattcttctctctcccgtaaggatagccggtggggggaccgtgattccgagggtacgtggcggaagggcccagaagccgacagcgagtggaggagggggcctccagaaaaagaatggcgcagaggggaagggagagatgaggatcgctctcacagacgcgacgaagagaggcccaggcgtctgggcgacgatgaggatagagagccctcccttcggccagacgatgatcgcgtgccacggagaggcatggacgacgaccgagggcctcggagaggcccagaggaggacagattctctcgacggggagctgacgatgatcgaccaagttggagaaatactgatgacgacagacctccacgacggattgcagacgaggatagaggcaattggcgccacgcagacgacgaccgtccaccacgaagaggcctggatgaggacagaggttcatggcgaaccgcagacgaggatcgagggcctcgcaggggcatggacgatgatcgcggtccaagacgaggtggggcagatgatgaacggagttcctggagaaacgctgacgatgacagaggccctcggcgaggtctggatgacgatcggggaccgcgaagaggcatggacgatgaccgagggcctcgcagaggaatggacgatgatcgaggcccacggcgaggcatggatgacgatcggggaccgagaagaggcctggatgatgatcgcggaccttggaggaacgccgacgacgacaggatccctagacgaggagcagaggacgaccgaggcccatggagaaacatggacgatgacagactcagtagacgagccgatgatgaccgctttccaagaaggggtgatgattctagacccggaccatggaggcccctggtcaagcccggaggctggcgtgaaaaagagaaggcaagggaggagtcttggggccctcccagggaatcccgcccttctgaggagcgtgagtgggaccgcgaaaaggaaagagatcgcgataaccaggaccgagaagagaacgataaagatcctgaacgtgaacgggacagagaaagggacgtggacagagaggataggttccgtcgcccacgtgacgaaggtggttggcgaagagggcctgccgaagagagctcaagctggcgagattcgtcgcgccgtgacgaccgggatagagacgatcgcaggcgggaacgtgacgaccggagagacttgcgtgagagacgggatctgagggacgatcgggacagacgcggaccccctcttcggtcggagcgtgaagaggtttcctcatggaggcgcgctgacgaccggaaagatgaccgcgtggaagagagagacccaccacggcgtgtgccacccccagccctatccagagaccgcgagagggatcgtgatagggaacgcgaaggggagaaggaaaaggcgtcatggagggccgaaaaggaccgagagtccctgcgaaggaccaagaacgagaccgatgaagatggctggaccacagtgagacgttag

SEQ ID NO: 222485 - DNA, 4047 bp, synthetic construct
  misc_feature 1..4047: note = Description of Artificial Sequence: Synthetic coding sequence
  source 1..4047: mol_type = other DNA
atgaaatcgaaaaagcacagaacatggcaaaaaatccatgaacccatcatgctaaagtacctcgagttgtgtgtggacttgcggaagagccacctcgccaaggaaggtctctaccagtacaagaacatatgtcagcaggttaatatcaagtcactagaagatgttgtgcgagcttacctgaaaatggcggaagagaaaactgaagcggctaaagaagagagccagcagatggtgctagatatcgaggaccttgataacatccagacccctgaatcagtacttctttccgctgtgagcggtgaggacacccaggacagaactgatagactgctactcacaccatgggttaagttcctgtgggagtcatatcggcagtgcctggatctgctgagaaacaattctagggttgaacgcctgtaccatgacattgctcagcaggccttcaagttttgcctgcagtatacccgaaaggccgaattcaggaaactctgcgataatctgagaatgcatctgtcgcaaattcaaagacatcataaccagagcaccgctattaacctgaataaccctgaaagccagtccatgcaccttgaaacacgtttggtccaactcgactccgcaatttctatggagctttggcaggaggcattcaaagcagtggaggacattcacggcctgttttcattgtccaaaaagcctcccaaaccacagcttatggccaactactacaataaggtctctaccgtgttttggaaaagcggcaacgctttatttcatgcaagtactctgcaccgcctctatcacctgagtagagagatgcgtaagaatctgactcaggacgaaatgcaacgtatgagcacgcgggtgcttctggcgacccttagcattcctatcaccccagagagaaccgacatagcgcgactgctagatatggacggaattatcgtagagaaacagcgtcgactggccaccttgctgggactgcaagccccaccgactcggatcggccttatcaatgatatggtgcgatttaacgttcttcagtatgtggtgcccgaagttaaagatctctacaactggctcgaagttgaattcaaccctctgaaattatgcgagagggttaccaaagtcctgaattgggtgcgcgagcagcccgagaaggagcccgagttgcagcagtatgttccccagctacagaacaatacaatcctcagactcctgcagcaggttagtcagatataccaaagtatcgagtttagtcggctgacaagtctggtccccttcgtggatgcttttcagctggagcgcgcaattgtcgatgccgcacgtcattgcgatctccaggtccgtatcgaccacacatcgaggacactgtctttcggcagcgatctgaattatgcaacacgtgaagacgccccaatcggcccacatcttcagagtatgccttccgaacagatccgtaaccagcttacagcgatgtcttccgtgctcgcaaaggccctggaagtgataaaaccggctcacattcttcaggaaaaggaggagcaacaccaattggccgtgaccgcttacctgaaaaatagtcggaaggaacaccaaaggatactcgccaggaggcagaccatagaagagcgtaaagaacgactggagagcctcaacatacagcgagaaaaggaagaacttgaacagcgcgaggctgaattacagaaagttaggaaagcagaggaagagcgactgcgtcaggaggccaaagaacgggagaaggaaagaattctccaggaacatgaacagatcaaaaagaaaactgtgcgggagagactggaacagataaaaaagactgaacttggggcaaaggcctttaaggatattgacattgaggatctcgaagaactagatcccgatttcattatggctaagcaagtggagcagttggaaaaggagaagaaggagttacaggagcgactgaagaaccaagaaaagaagatagattacttcgaaagggcaaagcgactagaagagatccccctgattaaatcggcttacgaagagcaaagaattaaggatatggatctatgggaacagcaagaggaggagaggataacgacaatgcagctggagagagagaaggcattggaacataaaaatagaatgtctcggatgcttgaagaccgcgatctgtttgtgatgcggctcaaggctgctagacaaagcgtttacgaagaaaaacttaaacagtttgaggagcgcctggccgaggagcgccataaccgtctggaagagcgcaaacggcagaggaaggaggaaagaagaatcacttattaccgagagaaggaagaagaagaacagagacgcgcagaggagcaaatgctcaaggaaagggaggagcgggaacgagcagagcgcgctaaaagagaggaggaactgagagagtaccaagaacgcgtaaagaagctggaggaagttgagcgtaaaaagcggcagcgtgagctagaaattgaggagcgcgagaggcgcagggaggaggaaaggcgcctgggagacagctccctgagccgaaaggactcaagatggggtgaccgggattctgaaggaacgtggcgaaagggccctgaagcagatagcgagtggcggaggggcccacccgagaaagagtggcgacgcggtgagggcagagatgaagacaggagccatcggagagatgaggagcggccacggcgtctcggcgacgatgaagatcgggagccctcattgagacccgacgacgatcgggtaccacggagaggaatggacgatgaccgcggtccaaggagaggccctgaagaggatcggttctctcggaggggagcagacgacgatcgtccctcttggcgtaatactgacgatgacaggcctccacggaggatcgccgatgaagatagagggaattggaggcacgccgacgatgaccgacccccaagacgcggactggatgaagatagaggctcctggagaacagccgacgaagatcgtggtcctcgacgtggcatggatgacgatagaggacccaggcgcggtggtgctgacgacgaacgatcctcatggaggaatgccgacgacgataggggacctcggagaggtctggatgatgataggggccctcgtcgtggaatggatgatgatcgaggacccaggaggggaatggacgatgaccgcggtcccagacgtggcatggacgacgaccggggaccgcgacggggattagatgatgacaggggcccatggcgaaatgccgacgatgacagaattcctagacgaggcgctgaggacgaccgtgggccttggcgtaacatggacgatgaccgcttatccagacgcgctgacgacgatcggtttccaagaaggggcgatgactcccgacctggaccgtggcggccactggtgaaacccggtgggtggcgagaaaaagagaaggccagggaggagtcctgggggccacctcgggagtcgcggccaagtgaggagcgcgagtgggatagagaaaaggagcgcgatagggacaatcaagaccgtgaagagaacgataaagaccctgagagagagagggatcgtgaaagggatgtcgacagagaggataggtttcggcgtcctcgcgacgagggagggtggcggcgagggcctgctgaagagagcagttcatggcgcgactctagccgcagagacgaccgggaccgcgacgatagacggcgtgaaagggacgatcggagagatctgcgcgaaaggagggatcttagagatgacagggacaggcgcggaccccctttacgcagcgaacgggaagaagtgagttcatggcgccgtgcagacgatcgcaaagacgacagagtcgaagagagagaccccccacggagggttccacctcccgcactcagccgtgaccgtgagagggatagggacagggaaagagaaggcgagaaagagaaggcttcctggagagccgaaaaggaccgagagagcctgagaagaaccaagaacgaaaccgatgaagatggctggaccacggtgaggcggtag

SEQ ID NO: 222486 - DNA, 2619 bp, synthetic construct
  misc_feature 1..2619: note = Description of Artificial Sequence: Synthetic coding sequence
  source 1..2619: mol_type = other DNA
atgcaggacgcagagaatgttgccgtccccgaagccgcagaggaacgtgccgagcctgggcagcagcaaccagccgcagaaccccctccagcagagggattgctacggccagctgggccaggcgctcccgaagcagccggtaccgaggcgagttctgaggaggtaggtatcgctgaggcaggacctgagagtgaagtgcgaaccgagccggctgctgaagcagaagccgcttccggtccatcagaatccccaagtcccccagccgctgaggagctgcctggttcacacgccgagccacctgtccccgctcagggagaggctccaggcgaacaggccagagacgagcggtcagacagcagggcgcaggctgtctcagaagatgctggtggcaatgaaggcagagcagcagaggcagaaccaagagccctggagaatggagacgcagacgaaccttccttcagtgaccccgaagatttcgtggatgacgtcagcgaagaggagttgctcggggacgtgctcaaagataggccacaggaggctgatggcattgactcagtgattgtggttgataacgtgcctcaggtggggccagacaggctggagaaactgaaaaacgtgatccacaaaattttttctaagttcggaaagataaccaacgatttctatccggaggaagatgggaaaacaaaggggtacatcttcctggaatatgcgagtccagctcacgcggtcgacgccgttaagaatgccgacgggtacaaactggataaacagcatacgtttagggtaaatctctttacggacttcgacaagtatatgaccataagcgacgaatgggatatccccgaaaaacagccattcaaagatctgggaaatctgcggtactggctggaggaagccgagtgtagagaccaatactccgtgattttcgagtctggcgatcggactagcatcttttggaacgatgtgaaggatcccgtgagcatcgaggaaagggcaagatggaccgagacctacgtcagatggtcacccaaggggacatatctcgctacttttcatcagcggggaatcgcactatggggaggcgagaaatttaagcaaatccagcgattcagtcaccagggtgtgcagctgatcgatttctctccctgtgaaagatacctggtgacgtttagtccccttatggatactcaggacgaccctcaagctataatcatctgggatattctaacggggcataagaagcggggattccactgcgaaagttccgcccactggcccattttcaagtggtcccatgatggcaagttctttgcccgaatgacattggataccctttccatctacgagacaccttccatgggcctgcttgacaagaaatcccttaagatctccggcatcaaagatttttcatggagtcctggagggaatatcattgcattctgggtccctgaggacaaagacatccctgccagagtcaccctgatgcaattacccacaagacaagagatccgggtgcggaacctgtttaacgttgtcgactgcaagcttcattggcaaaagaatggggactacctgtgtgtgaaagtcgacagaaccccgaaggggactcaaggcgtggtgaccaacttcgagatcttcagaatgcgggagaagcaggtgcctgtagacgtggtggagatgaaggagacaattattgctttcgcttgggaaccaaacggcagcaaatttgcagttctccacggggaggccccacggatcagtgtgtccttctatcatgtgaaaaacaatggcaaaatagaactaattaaaatgtttgacaaacagcaggccaacaccattttctggagcccacaaggacagttcgtggtcctcgcaggtctgagatccatgaatggcgctcttgcctttgtagataccagcgattgtacagttatgaatatcgccgaacactacatggctagtgatgtagagtgggaccccacgggtcgctacgtcgtaacaagcgtctcttggtggtctcacaaagttgacaacgcatattggttgtggacttttcagggaaggttgctgcagaagaacaacaaggatcggttttgtcaattgctctggcggcctaggccccctactctgctgtcacaagaacagataaaacagatcaaaaaggacctgaagaagtactcaaagatcttcgagcagaaagatcgcctctctcagtccaaggcatcaaaagaactggtcgaaagacggaggaccatgatggaagatttcaggaagtacaggaaaatggctcaagaactttacatggaacagaaaaatgagagactggaactgcgcggaggggtggatactgatgagctggacagcaatgtcgacgattgggaagaagaaacaatcgagttctttgtcacggaagaaattatcccaggaatacggtccgacctggaacattgcgcccagccctgcgtgctttggagtagaggacggcctgcagggtctcgggtcacacctgcatccagcctgtgctccctggccctagattgcgattgcgcttggatcctcccactgaggcacatctttgtcccattcagtccgtggtgtctgcagtggggcatttag

SEQ ID NO: 222487 - DNA, 2445 bp, synthetic construct
  misc_feature 1..2445: note = Description of Artificial Sequence: Synthetic coding sequence
  source 1..2445: mol_type = other DNA
atgcaggatgccgagaacgtggctgtacccgaggcagcggaagagagagctgagcctggtcagcagcagcccgcagcagagccccctcctgccgaaggcctcctgagaccagcaggtcccggtgcccctgaagccgcaggaactgaagcaagttctgaagaagtggggatcgcggaggccggtcccgagagcgaagtcagaactgaacccgcagctgaagctgaggccgcatctgggccttcagagagcccctcccctccggctgcagaggaactccctgggtcacacgcagagcctccggttcccgctcagggagaagcccctggggaacaggcacgagatgagaggtcagatagtagggcgcaagccgtgtctgaagatgcagggggtaacgaagggagagccgcagaggccgaacctcgtgcattagaaaacggagatgccgatgaacctagtttcagtgatcctgaggacttcgtggatgatgtgagcgaggaagagttactcggggatgtgttaaaggaccggcctcaagaagcagacggaattgactctgtcattgtcgtagacaatgtcccacaggtcgggccagatagactcgaaaaactcaaaaacgtcatccataagattttctcaaaatttggtaagattacaaatgatttttatcccgaagaggacgggaaaacaaagggatacatctttcttgaatacgcttcgccggctcatgctgtggatgctgtgaagaacgcagatggttacaagttagataagcaacacacattcagggttaaccttttcacggactttgacaaatatatgaccatctccgatgaatgggatataccagaaaaacaaccctttaaggacctaggcaacttgagatactggctcgaagaggctgagtgtcgggaccagtacagcgtgatcttcgagagtggtgaccggacaagcatcttctggaacgatgtgaaagacccggtgtcaattgaagagagggccaggtggacagagacttatgtgcggtggagcccaaagggaacctaccttgcaacattccatcagcgcggaatcgccctgtggggtggcgaaaagttcaagcagatacagaggttttcgcaccagggagttcagcttatcgacttttcaccatgtgagaggtatctggtcacattcagcccattgatggacacccaggacgacccccaagcgatcatcatatgggacattcttaccgggcacaagaaaagagggttccactgtgagtcgagtgcccattggcccattttcaagtggtcccatgacggcaagttttttgcccgtatgactctagataccctgtcaatttacgagacaccatctatggggttattagacaagaaaagtttgaagatctccggaattaaagattttagctggagtccaggcggaaatatcattgccttttgggtgcctgaagataaagatatccctgcccgagtgaccctgatgcaacttcctactcggcaggaaattagagttcgcaatctgtttaatgttgtggattgtaaactccattggcagaaaaacggtgattacctgtgtgtcaaggtggaccgcaccccgaagggtactcagggcgtggttacgaacttcgagatttttcgaatgagggaaaagcaagtgcctgtggacgtggttgagatgaaagagactattattgcgtttgcatgggaaccgaatggttccaagtttgcagtcctccacggagaagccccacggatctctgtttctttttatcatgtgaagaacaacgggaaaatcgagctgataaaaatgtttgacaaacaacaagcgaataccattttctggtctcctcagggtcagttcgtggtgctggcgggactgcgcagcatgaatggagctttggccttcgtcgacacatcggactgtacagtgatgaatatagcagaacattatatggcctcagacgtcgagtgggatccaaccggcagatacgtcgtaacatcagtctcttggtggtctcacaaggtagataacgcatattggctgtggacatttcaaggaaggctcctgcagaagaataataaggaccgattttgccagctcctgtggaggcctaggccccctactctcctgtctcaagagcagatcaagcagatcaagaaggatcttaaaaaatattccaagatatttgagcagaaggaccgccttagtcaaagtaaagcctctaaggagcttgtggaaagaagaagaactatgatggaggactttcggaaatacagaaagatggctcaggagctgtacatggagcagaaaaatgagcggctcgaacttcggggaggcgtggacacggacgagctggactctaatgtggatgattgggaggaggagactattgagttctttgtcaccgaggagattattcccttaggcaaccaagagtag

SEQ ID NO: 222488 - DNA, 2445 bp, synthetic construct
  misc_feature 1..2445: note = Description of Artificial Sequence: Synthetic coding sequence
  source 1..2445: mol_type = other DNA
atgcaggatgccgaaaacgtggcagtgcccgaggctgcagaggaacgggcagagcccggacagcagcagcccgcagctgagcctcccccagcagagggactcttgcggcctgcaggacccggagcccctgaagctgctgggactgaggcctcaagtgaagaggtagggatcgcagaggcaggacccgagagcgaggtgcggaccgagcccgcagccgaagccgaggccgcttcaggcccatcagagagtccttcacccccagcagccgaggagctgcccggatcccacgctgagccgccagtgccagcacagggcgaagccccaggagagcaagcaagagacgagcgttctgactcccgcgctcaagctgtctccgaggatgccggtggcaacgagggtagggcggctgaggcagagccacgcgctctagaaaacggagacgccgacgagccaagcttttctgacccagaggacttcgtggatgatgtatcggaagaagaattgctgggcgacgtactgaaggaccgaccccaggaggcagacggcatcgacagtgtgatagttgttgataacgtcccacaggtggggccagacaggctggagaaactcaaaaatgtgattcacaagatctttagcaaattcgggaagattacaaacgatttctaccccgaagaggacggaaagaccaaagggtatatttttctggaatatgcctccccagctcatgccgtagatgcagtcaagaacgctgacggatataagctggacaagcaacacacttttcgcgtaaatctgttcactgatttcgacaaatacatgacgattagcgatgaatgggacatcccagagaagcagccctttaaagacctgggaaacctgcgatactggctagaggaggcagagtgccgtgatcagtactccgtcatcttcgaaagcggtgataggacaagcatcttctggaatgacgtcaaggaccctgtttcaattgaggagcgcgctagatggaccgagacttatgtaagatggagccccaaagggacctatcttgctacctttcaccagagaggcatcgcactctggggcggtgaaaagttcaagcaaattcagcggttcagtcaccagggggtgcagttaatagacttcagcccttgtgagcgctacctggtcacatttagccctctgatggacacccaggatgaccctcaggcaatcatcatctgggacatattaaccgggcataagaagaggggctttcattgtgaatcttccgcccactggcctatcttcaaatggagccatgatggcaagttcttcgccaggatgaccctagataccttatccatttacgagacaccatcaatgggtctgctggacaaaaaatccctgaagatatcaggcattaaagatttctcctggtccccagggggaaatatcatagccttttgggtgccagaagacaaagatataccagccagagtgacgctaatgcagctgccaacaagacaggagatccgagtgcggaatctgttcaacgttgtggactgcaaactgcattggcagaagaacggagattacctgtgcgtgaaggtagatagaacgcctaagggcacacagggggttgtgaccaactttgagatatttaggatgagggaaaagcaggtgcccgttgacgttgtggagatgaaagaaacaatcatcgccttcgcgtgggagcccaatgggtcaaagttcgccgtcctacatggcgaagctccccgtatatcagtatccttttaccacgtaaaaaacaatggcaagatagagttaattaaaatgtttgacaagcagcaggccaataccattttttggtcacctcagggccagttcgtggtgctggctggcctgcgtagtatgaatggagcactggcattcgtggacacctccgattgcacagtgatgaatatagctgagcattatatggcaagcgatgttgagtgggaccctaccggaagatacgtggtgacaagtgtgtcctggtggtctcataaagtagacaacgcctactggttatggactttccagggtagacttctccagaaaaacaacaaggatcgcttttgtcaactcttatggaggccccgacctcctaccctgttgtcacaggagcagattaagcagatcaaaaaagatctgaagaagtacagcaagatttttgagcagaaggataggctgtcccagagtaaagcctctaaagaattggttgagcggaggcgtacaatgatggaagacttccgcaagtacagaaaaatggcacaggagctttatatggaacagaaaaatgaacgtctcgagttgcgcggtggagtggacactgacgagttggactccaacgtggacgactgggaggaggaaactatcgaatttttcgtgaccgaagagatcatccccctggggaatcaggagtag

SEQ ID NO: 222489 - DNA, 2217 bp, synthetic construct
  misc_feature 1..2217: note = Description of Artificial Sequence: Synthetic coding sequence
  source 1..2217: mol_type = other DNA
atgcaggatgccgagaatgtggctgtgcccgaggccgcagaggaacgtgcagggagccacgccgaacccccagtgccagcgcagggcgaggcccctggagagcaggcacgcgatgagaggtctgattctcgggcacaggctgtgagcgaggacgcaggaggcaatgagggccgagcagccgaagccgagcctagagcactggaaaacggagacgccgatgaaccgtcattcagtgacccggaggacttcgtggacgatgtttcagaagaggagctgctgggcgatgtgctgaaagacaggccacaggaggcagatgggatcgactccgttattgtcgtggacaacgtcccacaggtgggaccagataggcttgaaaaattaaaaaatgtcattcacaagattttttctaagttcggcaagattaccaatgatttctatccagaggaggacgggaagacgaagggatatatcttcctggagtacgctagcccagctcatgccgtagatgccgttaagaacgctgacggttacaagttggacaagcagcacaccttcagggtgaatctgtttaccgacttcgacaaatacatgaccatctccgatgagtgggatatccccgagaagcagccttttaaggacctcgggaatctgaggtattggctggaagaagcagaatgcagagatcagtacagtgtgatttttgaatccggcgacaggacctcaatcttctggaacgatgtaaaggatccggttagtatagaggagcgggctcgctggaccgaaacatatgtgagatggagcccaaaggggacctacctcgcaacattccaccagcgcggaattgctttatggggcggagagaagttcaaacagattcaaaggttcagccaccagggtgttcagctgatcgacttttctccctgtgaaagatacctggtgaccttctccccactcatggatactcaggatgacccgcaggctattattatatgggatattctgacaggccacaaaaaacgcggatttcactgtgaatcctcagctcactggcctatctttaaatggtcacacgatggcaaattcttcgctcggatgaccctggacactctttctatatacgagaccccctccatgggcctcctagataagaaatccctgaaaatcagtggcattaaggacttcagctggagtccaggcggtaacattatcgctttctgggtccctgaggacaaagacatcccagccagagtaaccttgatgcagctgccaacaagacaggaaatcagagtccggaacctgttcaatgtggtcgattgcaaattacactggcagaagaatggcgattatttgtgcgtcaaggttgatcgaaccccaaagggtacacaaggtgttgttacaaattttgaaatttttaggatgagggagaagcaggtgccagtggacgtggtagagatgaaagagactattatagcgtttgcttgggagcccaatgggagtaaatttgctgttctgcatggagaggctcctagaatcagcgtctcattttatcacgtgaagaacaatgggaaaattgagctcatcaaaatgttcgacaagcagcaagccaacaccatcttctggagtccccagggtcaatttgtggtgctggcaggtcttagaagtatgaatggggcactggcatttgtagacacctcggactgtactgtcatgaatattgcagaacactatatggccagcgatgtggagtgggaccctaccggcagatatgtggtaacgagtgttagttggtggtctcacaaagttgacaatgcctattggctgtggacatttcaaggcaggttactgcaaaagaataacaaggaccgcttttgtcaactgctgtggcggccaaggcctcccacacttctgagccaagagcagatcaagcagatcaaaaaggacctcaaaaagtactcaaagatctttgaacagaaagaccgactgagccagagcaaggctagcaaagaactggttgagcgaagacggaccatgatggaggatttcagaaagtatcgtaaaatggcccaggagctgtacatggagcaaaagaatgaacgcttagagctccgtggcggagtggacacagatgagctcgactcgaatgtcgatgactgggaggaggaaacaatcgaattctttgtcaccgaagaaattatacccctgggaaaccaggagtag

SEQ ID NO: 222490 - DNA, 2742 bp, synthetic construct
  misc_feature 1..2742: note = Description of Artificial Sequence: Synthetic coding sequence
  source 1..2742: mol_type = other DNA
atgagcaggttcttcacgactgggtcggattcagagagtgagagctcactgtctggggaagagctggtaaccaaacctgtgggaggtaactatgggaaacagccactcttgttgtcagaggatgaagaagatacaaaacgggtcgttcgaagcgctaaagataagaggtttgaggaactaactaaccttattcgcaccatcagaaacgctatgaagatacgcgacgtcaccaagtgcctggaagaatttgagctcttgggaaaggcgtatgggaaagccaaaagcattgttgataaagagggagtgccacgcttctacatacggattttggccgacctggaagactacctgaacgagctgtgggaagacaaggagggcaaaaagaaaatgaacaagaacaacgctaaggccctaagtaccttgcggcagaagatacggaagtacaaccgagattttgaaagtcatattacgtcttataagcaaaaccctgaacagtccgctgatgaggacgcagagaagaacgaggaagactcagaagggtcatccgacgaggacgaggatgaggacggagtttctgcggcaacattcttgaaaaagaaatctgaagccccatccggggagtcccgcaaattcctcaagaagatggatgacgaggacgaggactcagaagattccgaggacgatgaagactgggacactggaagtacatcctcggacagcgattcagaggaagaagaagggaaacagaccgccctcgccagtcgatttctgaaaaaggcccctactacagatgaagataaaaaggccgcagaaaagaagagagaggataaggcgaaaaagaagcatgataggaagagtaaacggctggacgaagaggaggaagacaacgaaggtggagagtgggagagagtgagaggcggtgtaccgctagtgaaagagaagccaaagatgtttgctaaggggactgaaattacccacgctgtcgtgattaaaaaacttaatgagattctccaggccagagggaagaagggaaccgacagggcagctcagattgaactgctgcagctgctcgtacagattgccgctgagaataatttaggagagggcgtgatcgtcaagataaagtttaacattatagccagtctgtatgattacaatcctaacttggctacatatatgaagcccgagatgtggggcaagtgcctggattgtattaacgaacttatggatattctgtttgccaaccccaacatatttgttggtgagaatattttggaagaatctgaaaacctgcacaacgctgaccagcctctccgtgtcagaggctgcatcctcaccctggttgagcggatggacgaggagttcactaagattatgcagaacacagatccccattctcaggagtatgtggagcatctcaaagacgaggctcaggtctgcgcgattatcgagcgcgtacagaggtatctggaagagaagggtacaactgaggaggtttgcagaatatatctgctccgcatcctgcatacatattataagttcgactataaggcccatcagaggcagctcacgccacccgagggatcctctaagagcgaacaggaccaggctgagaatgagggcgaggactctgctgtattaatggagaggctatgcaagtatatctacgccaaggacagaaccgacagaatcaggacctgtgcgattctatgtcatatataccaccatgccctccacagtaggtggtaccaagccagagatttgatgttgatgagccatctgcaagataacatccagcatgccgatccccctgtgcagatcctctacaaccgcaccatggttcagctgggaatatgcgccttccgccaaggactgaccaaggacgcgcataatgcattgcttgacattcaatccagcggtcgggcaaaggagctcctgggccaggggctcctcctgcgatcacttcaagaacgaaatcaagaacaggagaaggtggaaaggcgtcgtcaagtgccctttcacctgcacatcaacctcgaacttctagagtgcgtctatctggtgtcggcgatgctgctggaaatcccgtatatggcagcacacgaaagtgatgcgaggagacggatgatctccaagcagtttcatcaccagctacgggtgggcgagcgccagccgttactgggccctccagagagcatgcgggaacacgtagtcgccgcttctaaggcaatgaagatgggtgactggaagacatgccactccttcattattaacgagaaaatgaacggaaaggtctgggacttattcccggaagccgacaaggttagaacgatgttggtgcgaaagatccaagaagagagtctgcgcacttatctgtttacttattcatccgtttacgatagtattagcatggagaccctatcagatatgtttgaacttgacctgccaaccgtccactcaatcatcagtaagatgattataaacgaagagcttatggcctctctggaccagccgacacaaaccgtggtgatgcaccgaactgagcctaccgcccaacagaatctggcccttcagttggccgaaaagcttggcagcctggtggagaacaacgagagagtttttgatcataaacaggggacatacggcggttatttcagagaccaaaaagatggctatcggaagaatgaaggatatatgcgacgaggagggtatagacagcagcagtcgcaaactgcatattag

SEQ ID NO: 222491 - DNA, 2286 bp, synthetic construct
  misc_feature 1..2286: note = Description of Artificial Sequence: Synthetic coding sequence
  source 1..2286: mol_type = other DNA
atgtcgagattcttcaccactggaagtgattctgagtcagaatcttctctctctggagaagagctggtcaccaaacccgttgggggaaattatggcaaacaacctttgctcctgtctgaagacgaagaggacacaaagcgcgtggttagatccgcgaaagacaagagatttgaggaactgactaatctaatcagaaccatccggaatgcaatgaagatcagagacgtgacaaaatgtctcgaggaatttgagctgctgggcaaggcctacggtaaagctaaaagtatcgtggataaagaaggggtgccccgattttatattcggatcctcgcggacttagaagactacctgaacgagctgtgggaagacaaggaaggcaagaagaaacacgatcggaagtccaagcgtctcgatgaggaggaggaggataacgagggcggagagtgggagagggtgcgcggaggcgtgccattggtgaaagagaagccaaaaatgtttgcaaaaggcaccgagatcactcatgctgtggtgataaagaaacttaacgagattctgcaggctcggggaaaaaaagggacggatcgtgccgctcagatcgaactgctccagttgctcgtccagatcgcagcagagaacaacttaggagaaggggtgattgtgaaaattaaattcaacattatcgcttcattatatgactacaacccaaatttggctacttatatgaaaccagagatgtggggcaaatgcctcgactgcatcaacgagctaatggacatccttttcgccaaccctaatatttttgtgggggagaatattctggaagagagcgaaaacctgcacaacgccgatcagcccctccgagttcggggttgtattctcactctggtggaacgcatggacgaggagttcaccaagattatgcagaatacagatccgcactctcaggagtacgtggagcatctgaaggatgaagcccaggtctgcgcgatcatcgaaagggtgcagaggtacttggaagaaaaaggcacaactgaggaggtttgccgcatttatctgttgaggatcttgcacacctattataaattcgattacaaggcacatcaacgccagctcactccacctgagggatcgtcgaagtccgagcaggaccaggccgaaaacgagggcgaagatagcgccgttctgatggagcggctgtgtaagtacatctatgctaaggaccggaccgaccggattcgcacgtgcgcaattctgtgtcatatctatcaccacgcccttcacagcagatggtaccaagcaagagatcttatgctgatgagtcacctccaggacaatatccagcacgccgacccacctgtacagattctatacaacaggaccatggtccagctcggcatctgtgccttcagacagggtttaactaaggatgctcataatgccctgctggatattcagagcagcggaagggccaaggagctactgggacaggggctgctgctgcggtctctgcaggagcgaaatcaagaacaggagaaagtcgagcgaaggcgccaggtaccattccacctccacatcaaccttgagttgctggaatgcgtgtacctggtgtcggcaatgttactggaaattccatacatggcggcacacgaaagtgatgcgagaaggaggatgattagcaagcagttccaccaccagctgcgggtcggggaaagacagcccctgctcggacccccagagagcatgagagagcatgtcgttgctgcttcaaaagcgatgaagatgggagattggaagacttgtcattcgttcattatcaatgagaagatgaacggcaaggtgtgggacctctttccagaggcggacaaggtgcggaccatgctcgtgcggaaaatacaggaggagagtctaaggacatatctgtttacctactcatctgtttatgatagtatttcgatggagacgctatccgatatgttcgagcttgacctgcccactgtacatagcatcatcagcaagatgataattaatgaggagcttatggcctccctcgaccagcccactcaaacggttgtaatgcatcggactgagcccacagcccaacagaacttggccctccagctcgcggaaaagctcgggtctctggtcgagaacaacgagcgcgtttttgaccataagcagggcacatacggaggctactttagagatcaaaaagatggataccgtaaaaacgagggctatatgagaagaggaggctaccggcagcagcagagccaaaccgcctactag

SEQ ID NO: 222492 - DNA, 2742 bp, synthetic construct
  misc_feature 1..2742: note = Description of Artificial Sequence: Synthetic coding sequence
  source 1..2742: mol_type = other DNA
atgtctcgcttctttaccaccggttcagacagtgagtctgagtcatctctttcaggggaagagctggtgaccaagcctgttggcggaaactacggaaaacagccactgctcctgtctgaggacgaggaagatacgaagagagtagtacgttccgccaaggataaacgttttgaggaactaacaaatctgatccgcacaatacgaaacgccatgaaaattcgagatgtcacaaagtgtctggaagagtttgagctactgggaaaggcatacgggaaagcgaagagcatcgtggacaaagaaggtgtgcctcggttttacatccgcatcctggccgacttagaggattacctcaacgaattgtgggaagacaaggaaggtaagaaaaaaatgaataagaataacgcaaaagcattgtccacactcagacaaaaaattcggaagtacaatcgagattttgagtcacacattacctcctataagcagaatcctgagcaatcggccgacgaagacgctgagaagaatgaggaggattctgaaggaagctcagatgaggatgaggacgaggacggggtgagcgctgccacctttctgaagaaaaagtctgaggcaccaagtggggaaagccgcaagttcctgaagaagatggacgacgaggacgaagacagcgaggatagcgaagatgatgaggattgggacaccggcagcacttcttcagacagcgattccgaggaggaagagggcaagcagaccgctttagctagtcgttttttaaaaaaggcgccaacgacggacgaggacaaaaaagccgcagagaagaagcgggaagacaaggccaagaagaagcatgataggaaatcaaaaaggctggacgaggaagaagaagataacgagggtggggaatgggagcgggttagaggcggagtaccactggtgaaggagaaacccaagatgttcgctaaggggacggagatcacacatgcggtagtgattaagaagctgaacgaaatacttcaggctcgtggtaagaaaggtactgatcgggctgcacagatcgagctcttgcagcttctggtgcagattgccgctgaaaacaatctgggggaaggagtgatcgtgaaaataaaattcaacattatagcttccctatatgattacaaccccaacctggcgacctatatgaagcccgagatgtggggaaagtgcctggattgtattaacgaactcatggacattctcttcgcgaatcccaacatctttgtcggagaaaacattctcgaggagtcagaaaatctccataatgcagaccagccactgagggttagaggatgcatactgacgttagtggagcggatggacgaggaattcacgaaaattatgcagaacacggatcctcacagccaggaatacgtggaacatctcaaggacgaggcccaggtgtgcgccatcattgagcgagtgcagagatatctggaggaaaaaggtaccaccgaggaggtgtgtcgaatctacctgctcagaatccttcatacgtattacaaattcgactacaaggctcatcagcgacagttgacccctccggagggatcatctaagagtgagcaggaccaggccgagaatgagggagaagattcagctgtgctgatggagcggctttgtaagtacatctatgctaaagatcgaacagaccggatccgaacttgcgctattctgtgccatatttaccaccacgctctgcatagccggtggtaccaagctagggatctgatgctaatgtcccacctccaggacaatattcagcacgccgaccctccagttcagatcctgtacaatcggactatggtgcagctcggcatctgtgcctttcgccagggcctgacgaaagatgcccacaacgctctcctagacatccagtcctccggtcgggctaaggaactgcttggacagggcttactcctccgaagcctgcaagagaggaatcaggagcaggagaaagtggaaagacgcagacaggttccttttcatctgcacattaacctcgaactgctggaatgcgtgtatcttgtatcagccatgttactggagattccatacatggccgctcacgaatctgacgccagacgcaggatgatctccaaacagttccaccatcagctgagagtgggcgagcggcagccgctgctcggacctcccgagagcatgcgcgaacacgtggtggcggcaagcaaggctatgaagatgggtgactggaaaacttgtcattcttttataattaatgaaaagatgaacggcaaagtctgggatctgttcccagaagcagataaggtcaggactatgctcgttagaaagatccaggaggagagtctcaggacttatttgttcacctattcatctgtgtatgattcaattagcatggagacactgagcgacatgttcgaactggatctgccaactgtgcattcaatcatcagcaagatgatcatcaatgaggaactcatggcaagcctggaccagcctacacagacagttgtaatgcaccggacggaacctacagcacagcagaacctggctttgcaactcgcggagaaactagggagtctcgtggagaataatgagcgtgtcttcgaccacaaacagggtacctacgggggttactttcgagatcagaaagacggataccgcaagaacgaaggatatatgcgacgcggaggatacagacagcagcagagtcagactgcctattag

SEQ ID NO: 222493 - DNA, 2208 bp, synthetic construct
  misc_feature 1..2208: note = Description of Artificial Sequence: Synthetic coding sequence
  source 1..2208: mol_type = other DNA
atgagtcggttctttactacagggtccgattccgaatccgagtcaagtcttagtggggaagaactggttaccaagcctgtggggggtaactatggaaagcagccactgcttctttcagaagatgaagaagatactaaacgtgtggtgaggagcgccaaggacaaacgattcgaagaattgacaaatctgatacgtacaattcgcaacgcaatgaaaattcgcgatgtgaccaagtgcttggaagagtttgagctgcttggaaaagcttatggaaaggccaagtccatagtggataaggcgaaaaagaagcatgacagaaaatctaagagactagatgaagaagaagaggacaatgagggtggtgagtgggaaagagtgcggggaggcgttcccctagtgaaggaaaagccaaagatgttcgccaagggtacagaaatcacccatgccgtggtgatcaagaagttgaacgaaatcctacaagccagaggcaagaaaggaaccgatcgggctgctcagatcgaattactgcagctgctggtgcaaattgcagccgagaacaacctaggcgagggcgtgatcgttaagataaagttcaacatcattgcaagcctctacgactacaaccctaatctggccacatatatgaagccagagatgtggggcaaatgcttagactgcataaatgagcttatggacattctattcgctaaccccaatatttttgtgggtgaaaacatactggaggagtccgaaaatcttcacaacgcagatcaacctctgcgagtgcgcggatgtattttgaccctggtggagcggatggacgaggagttcacaaagatcatgcagaacaccgatcctcactcccaggaatatgttgaacaccttaaggacgaggcgcaggtgtgcgctattattgagcgggtccaaagatacctggaagaaaagggcactacggaagaggtgtgtaggatttatctgctgagaatactgcatacatattacaagttcgactacaaggcacatcagcgacaactcacaccgccagagggctcctcgaagagtgagcaagaccaggctgaaaacgagggtgaggatagcgcagtacttatggagcgcttgtgcaagtacatctatgcaaaagaccgtacggacaggatccggacatgcgcaattctgtgtcacatataccatcatgctctgcacagcaggtggtatcaggcacgcgatctcatgttaatgtcccaccttcaggataatatccaacatgccgatccaccggtgcaaatactgtacaatcgtaccatggttcagctggggatctgtgctttcagacaaggattgaccaaggacgcccacaacgcccttctggacatacagtcatcagggagggctaaggaactactgggacaagggttgctcctgagaagtctgcaagaacggaaccaagagcaggagaaggtggagcgcaggcggcaagtccctttccatttgcacatcaacttggaacttcttgagtgcgtatacctggtatccgcaatgttgcttgagatcccatacatggcggctcacgagagcgatgcacgaaggagaatgatttctaaacagttccatcatcagttgcgcgtgggtgagcgccaaccacttctgggccctccggagtctatgcgagagcatgtggtggcagcatcaaaagccatgaaaatgggcgactggaagacctgtcattctttcataatcaatgaaaaaatgaatggaaaggtgtgggatctttttcccgaagccgataaagtgagaaccatgctggtgcgaaagattcaagaagagagtctcagaacatacctgttcacctacagctctgtgtatgactccatctccatggaaaccctatccgacatgttcgagttggacctgccaacagttcatagcatcatttctaagatgataatcaatgaggagctgatggcttcactggatcaacccacacagaccgtcgtaatgcatcgcactgagcctacagcacaacagaatctggcactccagttagcagagaaactaggatcactggtggagaacaatgaaagagtgtttgatcacaaacaggggacttacggcggttatttcagggatcaaaaagacggctaccgcaagaatgaagggtacatgcgcaggggcggttatcgacagcagcagtctcagacagcatactag

SEQ ID NO: 222494 - DNA, 2697 bp, synthetic construct
  misc_feature 1..2697: note = Description of Artificial Sequence: Synthetic coding sequence
  source 1..2697: mol_type = other DNA
atgtcccggttttttactaccgggtcagacagcgagagcgaaagtagcctgtctggagaggagctggtgacgaagcctgtgggaggcaactatggcaagcaaccactattgttgtccgaggacgaagaggacacaaagcgagttgtcagatctgcgaaggataagagatttgaggagcttacaaatttgatcaggaccataagaaatgccatgaagattcgcgacgtgaccaagtgtctggaagaatttgagctcctggggaaggcatacggcaaggccaaatccatcgtggataaggaaggcgtgccaaggttttacatcaggatattggcagatctcgaggattatctcaatgaactttgggaagacaaagagggaaaaaagaagatccgcaaatacaaccgcgatttcgaatcccatatcaccagctacaaacagaatccagagcagagtgcagacgaggacgccgaaaagaatgaagaagactccgaagggtcttccgacgaggacgaggatgaggatggtgtaagcgccgctacattcttgaagaaaaaatccgaggcaccatctggtgagtccagaaagttcttaaagaagatggacgacgaagacgaggactccgaagactccgaggatgacgaggactgggacactggttctacctccagtgactcagactcagaggaggaggaagggaagcagactgccctcgcctctcggttcttgaaaaaagcgcctacaacagacgaggacaaaaaagcagctgaaaaaaagcgcgaggataaagctaagaaaaagcacgaccgaaagtcaaaaagacttgacgaggaagaggaagataacgaaggaggagagtgggagagggttcgcggaggggttcctttggtaaaggaaaaacctaaaatgttcgccaagggaacagagatcacacacgcagttgtgatcaagaagttgaacgagatacttcaggcccgtggaaagaagggcaccgatagagccgctcagatcgagttgctgcaacttctggtgcagattgcagccgagaacaatctgggcgaaggcgtgattgtcaagatcaagtttaatattattgcaagcctctacgattataaccctaatttggcaacttacatgaagccagaaatgtgggggaagtgtctggattgcatcaatgagctcatggatatcttgttcgccaaccctaatatcttcgtcggcgagaacattctggaagaaagcgaaaatttgcacaatgccgatcaaccattacgagttcgcggatgtattttgactcttgtggagaggatggatgaggagttcacaaagataatgcaaaacacagatccgcacagtcaagagtatgtcgagcaccttaaagacgaagcccaagtttgtgctattatcgagagagtgcagcggtacttggaggagaaaggcactactgaggaggtgtgtagaatctacttgctgcggattctccacacctactacaagtttgactataaggctcaccagagacagttgacgccccctgaaggatcttccaagtctgaacaggaccaagcagaaaacgagggcgaagactctgcagttctgatggaaagactgtgcaagtatatctacgcaaaagatagaaccgacagaatcaggacctgcgctatactttgccacatctatcaccatgctcttcactcccggtggtatcaggcaagggacctgatgctaatgagccatctgcaggataatattcagcacgctgatccaccagttcagatattgtataatcgcactatggtgcagctgggtatctgcgccttcaggcaagggctgacgaaggacgctcacaacgcactcttggacatccagagttcaggaagagccaaggagctgctcgggcaaggactgctcttgcgctctctgcaagaaagaaatcaggaacaggagaaggtcgaacggcgacgccaggtgccttttcacctgcatattaatttggaactgcttgagtgtgtgtaccttgtgagtgctatgctccttgagataccctacatggcggctcacgagagtgacgcacgcagacgcatgatctccaaacagttccaccatcagttgcgggtaggtgagaggcagcccctgctggggcctccagagtccatgcgcgaacacgtagtagctgcttctaaggcgatgaaaatgggtgattggaaaacatgtcatagcttcataatcaatgagaaaatgaacggaaaggtctgggacttgtttccagaggcagataaggtgagaactatgctggtccggaaaattcaagaagagtcccttcggacttacctgttcacatattctagtgtgtacgactccatttcaatggaaaccctgtctgatatgtttgaactcgatctgcccacagttcacagcattattagcaagatgatcataaatgaagagctgatggctagcctggaccaaccaacccaaacagtggttatgcatcgcaccgaacctaccgctcagcaaaacttggcccttcagctggccgaaaaactagggtcactggtagagaacaatgaacgcgttttcgatcacaagcagggaacgtatggaggatactttcgcgaccagaaggacggttaccgaaaaaacgagggatatatgcggaggggagggtatcgacagcagcagtcacagaccgcgtattag

SEQ ID NO: 222495 - DNA, 2055 bp, synthetic construct
  misc_feature 1..2055: note = Description of Artificial Sequence: Synthetic coding sequence
  source 1..2055: mol_type = other DNA
atgggcctgtcagccgctgcgcctctgtggggcccaccgggtttacttttggcaatcgcgctgcaccctgctttgtcagtgccacccaggcgcgactactgtgtcctaggtgcgggtcctgccggtctgcagatggcatacttcctgcagagggccggtagggactatgcagtcttcgaacgcgcacctaggccaggctctttctttacacgataccccaggcacaggaagttgatcagcatcaacaagcggtataccgggaaggccaatgccgaattcaaccttcggcatgactggaattcactgctgagtcatgaccctagattgctgttccggcactacagtcgcgcttactttcccgatgccagagacatggtgcgatacctgggcgacttcgctgatacactgggactgcgcgtgcaatacaacacgaccatcgcacatgtgacacttgataaagatcgtcaggcctggaatgggcactactttatacttactgatcagaaaggccaggtccatcaatgcagcgtgttgtttgtggccacgggactgagcgtacctaatcaagtggatttcccaggaagtgagtacgcagagggttacgagtccgtttcagttgaccctgaggattttgtcggtcaaaacgtgctgatactcggtaggggcaatagcgcctttgaaactgccgaaaacattctcggcgtgaccaatttcattcatatgttgagccgcagtcgggtgagactgagctgggcaactcactatgtcggtgatttgcgagccatcaataatggcttgctagacacctaccagctgaagagcctggacggcctgctggaaagcgacctgaccgatctggctatccttaaggattccaaagggaaatttcatgtgaccccaaaattttttctggaagaagcaaatactaaccagagcgcagactcgataaccctacctcaagatgacaatgacaatttcgccatgagagtgccatacgatcgtgtgatacgttgtctggggtggaactttgatttctccattttcaataagtccctcagattaaactctggaaatgccttcggtaagaaataccctttaattcgggcttcctatgagagcaaggggtcgcggggattgttcatcttgggaactgccagtcactcggttgactatcgcaaatctgccggaggctttattcatggtttcagatatactgtcagggcagtccaccgcctgttggaacacagacatcatagtgtgacatggcccgctactgagctgccaatcacacaactgacctcttcgattgtaagaagagtaaatgaggcaagtggactctaccagatgtttggggtactcgcagacgtgatcctactcaaagaaaatagcaccgcctttgagtacctggaggagttccctatacaaatgctagcccagctggagactctcacgggcagaaaagctaagcacggcctgtttgtcatcaatatggagtatgggagaaacttctccggtcccgataaggatgttttttttgatgacaggagcgtgggccacacagaggatgcatggcagtccaatttcctgcaccccgtgatctactactaccggtatctgccaaccgagcaggaggtcagatttcggccagcccactggcccctacccagacccaccgccattcaccatattgtcgaggatttccttactgactggacagcacccataggacatatactgccgctccgcaggtttctggaaaactgtctggataccgacctgcgaagcttctatgcggagtcctgctttttgtttgccctgaccagacaaaaactacctccgttctgccagcagggatatctgaggatgcagggactggtgagtactgagtcactgtggcagcacagggtagaatcaaggttgctgcgcgactacgctcccaccggcaggagactggaagatagctcccagcagctgggcgaccaggaaccactaggcagtccgctggctcccggacctctggcccagagcgtggacagtaataaggaggagctatag

SEQ ID NO: 222496 - DNA, 1602 bp, synthetic construct
  misc_feature 1..1602: note = Description of Artificial Sequence: Synthetic coding sequence
  source 1..1602: mol_type = other DNA
atggccaaattcatgaccccagttatccaggataacccgagcggctgggggccatgtgccgtgcccgagcagtttcgcgacatgccttaccagccattttccaagggggacagactgggcaaagtggccgattggacaggggctacctaccaagacaagcgttacaccaacaagtactcttcccagtttgggggtggatctcagtatgcatactttcatgaagaggatgagtcttcgtttcagttggtggacaccgcccgtacacagaagacagcctaccagcggaaccgcatgcgcttcgctcagcgcaacctcaggcgagacaaagatcggagaaacatgttacagttcaatctgcaaattttgccaaagagcgcaaagcagaaggaacgggagaggattaggttacagaaatcccaaaagcccagagattcaagtgtggaagtgcggtccgattgggaggttaaggaggagatggacttcccacagttgatgaaaatgagatacttggaagtatccgagccacaggatatcgagtgttgtggcgctttggaatattacgataaagccttcgacaggatcaccacacgttcagagaaacccctccggagtattaaacggatcttccataccgtgactacaaccgatgatccggtgatcaggaagcttgcaaaaacacaggggaacgttttcgcaaccgatgctatcttggctacacttatgtcgtgcacgcggagtgtctacagctgggatatcgtggtccagcgggtgggatcaaagctgttcttcgacaaaagggacaactctgatttcgatctgttaacggtctctgaaactgctaacgagcctccgcaggatgagggaaacagctttaattctccacgtaacctcgcaatggaagcgacatatatcaaccataacttttcacagcagtgcctgcgcatgggtaaggaacgatacaactttcccaacccgaaccctttcgtcgaagatgatatggacaagaatgagatcgccagtgttgcctatagatatcggagatggaagctgggcgatgatattgatctcatagtgagatgcgaacatgatggagtgatgacaggagccaatggcgaagtcagcttcattaatatcaagactctgaatgagtgggatagccgccactgcaacggagtcgattggcggcagaagctggactctcagcgaggcgctgtcattgctactgagctgaagaacaatagttacaagctggcccgatggacgtgttgtgcgctcttagcgggatcagaatacttaaagctaggctacgtgagtagatatcacgtgaaggatagttcaaggcacgtcattctggggacccagcagtttaaacctaacgagtttgcaagtcagatcaatctaagtgtcgaaaacgcctggggaatcctgaggtgtgtgattgacatttgtatgaagcttgaggagggcaagtatctgatccttaaggaccctaataaacaggtcatccgggtgtacagtctgcccgatggcacattttccagtgatgaggatgaggaggaggaagaggaagaggaggaagaagaggaggaggaggaaacctag

SEQ ID NO: 222497 - DNA, 372 bp, synthetic construct
  misc_feature 1..372: note = Description of Artificial Sequence: Synthetic coding sequence
  source 1..372: mol_type = other DNA
atggctaagttcatgactccggtgattcaggataacccatccggttggggtccatgcgcagtcccagagcaattccgtgacatgccataccagccgttttccaaaggggaccgcctaggcaaagttgcagactggactggggctacataccaggacaagcgctacacaaataaatactcctcacagttcgggggagggtcccagtacgcctacttccacgaagaggacgagtctagcttccagctggtggacactgcacgcacccaaaagaccgcttatcaaaggaaccggatgcgattcgctcagcggaacctgaggagagataaggataggcggaatatgctccagtttaacctgcagattctcccttag

SEQ ID NO: 222498 - DNA, 1647 bp, synthetic construct
  misc_feature 1..1647: note = Description of Artificial Sequence: Synthetic coding sequence
  source 1..1647: mol_type = other DNA
atggccaagtttatgactcccgtgatacaggacaacccatcagggtggggcccatgcgccgtgcctgagcagttcagggatatgccttatcaacccttctcaaagggcgaccgccttggcaaagtcgcggactggaccggagccacctaccaagacaagagatataccaacaagtacagcagtcaattcgggggtgggagccagtacgcctacttccacgaagaagatgaaagcagtttccagctggtggatacagctcgcacccagaagaccgcgtaccagcggaacagaatgcgattcgcgcaacggaatctccggagagataaggatcggaggaatatgcttcaatttaatctgcagatcctgcccaaatctgctaaacaaaaagaacgggagagaattcggctccagaaaaaattccagaagcagtttggcgttaggcaaaagtgggaccaaaagtcccagaagcccagagactcctctgtcgaagtgcggagcgactgggaagttaaagaggaaatggatttccctcagttgatgaagatgcgatatctggaggtttcagaacctcaagatattgagtgttgcggggctctagagtactacgacaaggctttcgatagaataacaacaagatcagaaaagcccctgcgatcgattaaaagaatcttccacactgtgacaacaaccgatgatccagtcatccgcaaactggccaaaactcaggggaacgtctttgccaccgacgcgatactggcaacgctcatgtcctgtaccaggagcgtgtatagctgggatatcgtcgtgcagcgagtgggatcgaagttgttctttgacaagcgcgacaatagcgattttgacctcctcaccgtgtccgaaacggccaacgaacctccacaggatgaaggcaatagtttcaactcccccaggaatctggccatggaagcaacctacatcaatcacaatttcagccagcaatgtctgaggatgggtaaggagcgctacaatttcccaaaccccaatccatttgttgaagacgatatggacaaaaacgaaattgcaagtgtggcctaccggtacagaaggtggaagctgggcgacgacatagacttgatcgtaaggtgtgagcacgacggcgtgatgacgggggctaacggagaggtcagctttataaatatcaagactttgaacgagtgggattctagacactgcaacggcgtggactggcgacagaaactcgatagccaaagaggcgctgtcatcgctacggagctgaaaaacaactcctacaaattggccagatggacttgttgtgctctcttagcagggtccgaatatctgaaactcggttacgtgagtcgctaccacgtgaaagattcctcacggcatgttatcctcggtacccaacagttcaaacctaatgaattcgcaagtcaaattaatctgtccgttgagaatgcatgggggatcctacggtgcgtgattgatatatgtatgaaattagaagagggaaaataccttatcctgaaggaccctaacaaacaagttattagagtctactcgttgccagatggcaccttcagtagcgacgaggatgaggaggaagaggaggaagaagaagaagaagaggaagaagaagagacctag

SEQ ID NO: 222499 - DNA, 519 bp, synthetic construct
  misc_feature 1..519: note = Description of Artificial Sequence: Synthetic coding sequence
  source 1..519: mol_type = other DNA
atggacaagaacgagattgcctccgtagcataccggtatcgcagatggaaactgggggacgacattgatctgatagtccgctgtgaacacgacggagttatgaccggagctaatggagaagtcagcttcattaatataaagacgctgaacgagtgggatagccgacactgtaatggggttgattggagacagaagctcgactctcagcgaggagcagtcatcgccaccgagcttaagaacaactcctacaaactggccaggtggacttgttgcgcacttctggccggatcagaatatctcaaactgggttatgtgtcccgctatcacgtgaaagactccagcagacatgtgatcctcggcacacagcaatttaagcctaacgaatttgcatctcagattaatctgagcgtggagaacgcctggggtatactccgctgtgtcatcgacatttgcatgaagctggaggaaggtaagtatttgattttaaaggatccaaataagcaggttatccgggtgtag

SEQ ID NO: 222500 - DNA, 561 bp, synthetic construct
  misc_feature 1..561: note = Description of Artificial Sequence: Synthetic coding sequence
  source 1..561: mol_type = other DNA
atggcaaagttcatgacccctgtgatccaagacaatccttcaggttggggcccatgcgccgttcctgaacaattccgggatatgccctatcagcccttctcaaaaggggatcgccttggaaaggtggccgattggacaggcgctacttatcaggataagcggtataccaacaagtatagtagccagttcggcggagggtcgcaatacgcttactttcatgaagaggacgagtcgagctttcagcttgtggacaccgccaggacgcagaagacggcctaccaacgaaaccggatgcgattcgctcagcggaatctgagacgggacaaagatagacgcaacatgctgcagtttaatcttcaaatccttcccaaatccgctaagcagaaagagcgggagcgtatccgcctgcagaagaagttccagaagcagttcggtgttaggcaaaagtgggaccaaaagtcccaagtgatgtacttgtaccaaaatagcgcgctggagtttggaagcgtgtacctggtggtgtttatcaatagcctggacgagatatacttcacttattag

SEQ ID NO: 222501 - DNA, 810 bp, synthetic construct
  misc_feature 1..810: note = Description of Artificial Sequence: Synthetic coding sequence
  source 1..810: mol_type = other DNA
atggcaaaattcatgaccccagtgatccaggacaacccctccggctggggcccttgcgccgtgccagaacagtttcgggacatgccgtaccagccgttttccaaaggggatcgcctgggtaaggtcgcagattggacaggggctacataccaggataagagatacaccaacaagtattcctctcaattcggtggagggtctcaatacgcttatttccatgaggaagacgaatctagtttccagctggttgatacggcccgtacccagaagacggcgtaccagagaaaccggatgagatttgcacagcgcaatttgcgacgcgacaaggacaggcggaatatgcttcagtttaatctgcagatcctgccgaaatctgccaagcagaaagaaagagaacgcatcaggttgcagaaaaaattccagaaacagtttggtgttagacagaagtgggaccagaagagccagaagcccagagacagcagcgttgaagtgcgtagtgactgggaggtgaaggaggaaatggactttccacaattgatgaaaatgcgctacttagaggtctccgaaccccaagatattgaatgctgtggagcactggaatattatgataaggcgttcgaccgcatcaccacgcgatccgaaaagccgctccggtctattaaaagaattttccacactgttacaacaaccgatgatccagtgatcagaaaactggcaaagactcaggggaatgtgtttgccacggacgccatcctcgcgacactaatgagctgtacacgatctgtgtacagctgggatattgtggtctag

SEQ ID NO: 222502 - DNA, 522 bp, synthetic construct
  misc_feature 1..522: note = Description of Artificial Sequence: Synthetic coding sequence
  source 1..522: mol_type = other DNA
atggctaagtttatgactcccgttatccaggacaatcctagcggatggggcccttgtgctgtgcctgaacagttcagagacatgccctatcagccctttagcaagggggacagactcggcaaggtggctgactggactggtgccacctatcaggacaaaagatacactaataagtattcctcccagttcgggggagggtctcagtatgcttatttccacgaggaggatgaaagtagctttcagttggtggacactgcccgaactcagaagacggcctatcaaagaaacagaatgcgtttcgcgcagcgcaatcttaggagggacaaggatagaagaaatatgcttcaattcaacttacagatactgccaaaatcagctaagcagaaagaacgtgaaaggatacgcctacagaaaaaatttcagaagcaattcggcgtgaggcagaaatgggatcagaagtcgcagaagccaagagacagcagtgtggaggttaggtctgactgggaggttaaagaggagtag

SEQ ID NO: 222503 - DNA, 498 bp, synthetic construct
  misc_feature 1..498: note = Description of Artificial Sequence: Synthetic coding sequence
  source 1..498: mol_type = other DNA
atggaggcaacctatattaaccacaactttagccagcagtgtctcaggatgggcaaagagaggtacaactttcctaatccaaatcctttcgtagaagacgacatggataaaaacgagattgcctcagtggcgtatcggtatagacgctggaagttgggtgacgatatcgatctgattgtgcggtgcgaacatgacggcgttatgacaggagctaatggcgaagtatcttttataaacattaagacactcaatgaatgggacagtcgccactgcaacggcgtggactggcgccagaaactggactctcagcgaggagctgttatcgctacggaactcaagaataactcttacaagctcgctcgctggacctgttgcgcgctgctcgccggaagtgagtatctgaaactgggctatgtttccagatatcatgtgaaggactctagtcgccacgttattctgggaacccagcaatttaagccaaatgaatttgcctcttag

SEQ ID NO: 222504 - DNA, 1500 bp, synthetic construct
  misc_feature 1..1500: note = Description of Artificial Sequence: Synthetic coding sequence
  source 1..1500: mol_type = other DNA
atggccaaatttatgacaccagtcatccaagataatccctctgggtggggaccatgtgcagtgcctgaacagttccgggacatgccataccagccctttagcaagggagatcggctcgggaaagtagccgattggaccggtgctacttatcaggacaagcggaatttaaggcgggacaaggatcggagaaatatgctccagttcaacctgcaaatcctgccaaaaagcgccaagcaaaaagaacgagagcggattaggctgcagaaaaaatttcagaagcagttcggagtgagacagaagtgggatcaaaaatcccagaagcctcgggactctagtgtggaggtgcggagtgactgggaagttaaagaagagatggatttcccacaattaatgaagatgaggtacttagaggtgtcagagccacaagatattgagtgttgtggggcactggagtattacgacaaggcgtttgatcgcatcactacccggagcgaaaagcccctacggagcatcaagcgtatattccatactgttacgaccaccgatgaccccgttatccgcaaactcgctaaaacgcagggcaacgtttttgctacagatgccatcctggctaccctgatgtcttgcacacggtctgtgtatagctgggacattgttgtgcaacgcgtcggctccaaactgttcttcgataagcgcgataattccgacttcgacctgctcactgtgagcgaaacggccaatgagcccccacaggatgagggtaactccttcaacagtccacgcaacttggccatggaggccacctatattaaccataacttttctcagcaatgcctcaggatgggaaaagaacggtataacttcccaaatccaaatccctttgttgaagacgacatggacaaaaatgaaatagcttccgtggcgtaccgctaccgcagatggaaactgggagatgatattgacctgatagtgcgatgcgaacacgatggtgttatgacgggcgcaaatggggaagtgagtttcattaatattaaaaccctcaatgagtgggacagtaggcactgtaacggtgtggactggcgccagaaactggattcgcagcgaggagctgtgatagccaccgagcttaaaaacaattcctataagcttgctcgctggacttgctgcgcacttctcgcgggttcagaatatcttaagcttggctacgtatcccgatatcatgtcaaggacagttcgaggcacgtgattctcggcactcaacagtttaaaccaaacgagttcgcttcccagatcaacctgtctgtggagaacgcttggggaatcctccggtgcgtgatagacatttgcatgaagctcgaggagggcaagtacctgattctgaaggacccaaacaagcaagttattagagtatattctctgcctgacggaacatttagcagtgacgaggacgaggaggaagaagaggaggaagaggaggaagaagaagaagaagaaacctag

SEQ ID NO: 222505 - DNA, 1215 bp, synthetic construct
  misc_feature 1..1215: note = Description of Artificial Sequence: Synthetic coding sequence
  source 1..1215: mol_type = other DNA
atgttcaccgagaagacaactacttaccagtacccacgtgcaattttgagtgtagacctgtccggagaaaatctttctgacgtggattttctggacgactctagtactgaaagcctgctgctgtcaggagatgagtacaaccaggactttgactcaacaaactttgaagaaagccaagacgaagatgatgccctgaacgaaattgtgaggtgcatatgcgagatggacgaggaaaacggctttatgatccagtgtgaggagtgtctgtgctggcagcacagtgtgtgcatggggctcttagaggagtccatcccagagcagtatatatgctacatatgtcgggatcctccgggacagaggtggtctgctaaatatcgctacgacaaagaatggctgaacaatggtcgcatgtgcggcctgagcttttttaaagagaactactcgcacttgaatgccaagaaaatagtatctactcaccatctcctggcagatgtgtatggagttaccgaagtcctgcacggcctccaacttaagattggaatcctcaagaataagcaccatcctgatctacatctgtgggcctgctccgggaagagaaaggatcaggatcaaataatcgccggagtggagaaaaaaattgcccaagacactgtgaaccgcgaggaaaagaagtatgttcagaaccataaagagcctccaagactacctcttaaaatggagggtacgtatatcacctctgaacactcataccaaaagccgcagtcttttgggcaggactgcaagagcctagcagaccccggttcctctgatgatgatgacgtctcgagtttggaagaggaacaagagtttcacatgaggtcgaagaattcactgcagtatagcgctaaagaacacgggatgcctgaaaaaaatccagccgagggcaacaccgtgttcgtgtataacgataaaaaagggactgaggaccctggcgattcacatcttcagtggcaactgaacctgctgacacatatcgagaatgtccagaacgaggttacttcgaggatggatttaatcgagaaagaggtcgatgtactggagtcttggttagacttcacaggtgaactggagcctcccgatccattggccagacttccgcagctgaagagacatatcaagcagctgctgattgacatgggaaaggtgcagcaaattgctacgctgtgcagtgtgtag

SEQ ID NO: 222506 - DNA, 1074 bp, synthetic construct
  misc_feature 1..1074: note = Description of Artificial Sequence: Synthetic coding sequence
  source 1..1074: mol_type = other DNA
atggcaacacctgctgtgcccgtgagcgcacccccagccacaccaaccccagtgcccgctgcagccccagcatcggtgcctgcacctacgcctgctccggctgccgcaccagtgccggctgcagcacccgcttcgagttctgatcctgcagcagctgctgctgcaactgccgctcccggtcagactcctgctagcgcacaggccccagcccagacaccagcacctgcccttcccggaccagccctgcccggacctttccccggtggccgagtggtgcggttgcaccccgtgatattagcctcaatagtggattcttatgaacgcagaaacgagggcgctgctagggtcattgggaccttgctagggacagttgacaagcactctgtggaggtaaccaattgcttttccgtgccccacaatgagagtgaggacgaggtggcagtagacatggagtttgccaagaacatgtacgagttgcacaaaaaggtgagtccgaacgagctgatccttgggtggtatgcaaccgggcatgatattacagagcattccgttctcatccacgagtactacagcagagaagcgcctaaccccatccacctcaccgtcgacacgagcctacaaaacggaaggatgtcgatcaaggcctacgtcagcacactgatgggtgtcccaggcaggaccatgggcgttatgtttactccccttaccgtgaaatacgcctactacgacacggaaaggatcggtgtcgatcttatcatgaagacatgcttcagccccaatagggttattggcctttcttctgacctccaacaggttggtggggctagtgctcgcattcaggatgccctaagcaccgttcttcagtatgccgaggatgtcctgagtggaaaggtctctgccgataacaccgtggggcgattcctgatgtcgctcgtgaaccaggtccccaagatcgtccctgatgactttgagactatgctaaactccaatatcaacgacctgctgatggtgacctacctggccaacctgacacagagccaaattgctctgaacgaaaagctggtaaacctctag

SEQ ID NO: 222507 - DNA, 627 bp, synthetic construct
  misc_feature 1..627: note = Description of Artificial Sequence: Synthetic coding sequence
  source 1..627: mol_type = other DNA
atggaatttgcaaaaaacatgtatgagcttcacaaaaaagtgagtcctaatgagctcatcttaggatggtacgccaccggtcatgacatcacagagcactccgtcttgattcacgagtattattctagagaggccccaaatcccatccacctcaccgtggatactagtttacagaacggaaggatgtctataaaggcatacgtgagcacattgatgggggttcctggacgaacaatgggtgttatgttcactcccctcactgtcaagtacgcttactacgacaccgagagaattggcgtggaccttatcatgaagacttgtttctctccaaatagggtcataggcctcagctcggacctgcagcaggtgggcggtgcctccgccaggatacaggatgcactcagcacggtgctgcagtacgcagaagatgtcttaagcggaaaggtgtctgcggataacaccgtggggagatttctaatgtcactggtgaatcaggtgccaaaaatcgttcctgatgactttgaaactatgttaaattccaatattaatgatcttcttatggtcacctatctcgccaacttgacgcagagccagattgcgctcaatgaaaagctggttaacttgtag

SEQ ID NO: 222508 - DNA, 1074 bp, synthetic construct
  misc_feature 1..1074: note = Description of Artificial Sequence: Synthetic coding sequence
  source 1..1074: mol_type = other DNA
atggcaacaccagcagtgcccgtgtctgccccacccgcaacccctactcctgttcctgcagctgctcctgccagtgttccggctcccacaccagctcctgctgccgcaccagtacctgcggcagctccagcttctagttccgatcctgccgctgcagctgccgctacagccgcacccggacaaacaccagcgtctgcacaggcacccgctcagacacccgctcccgcattacccggaccagctctgccaggtcctttccctggaggccgtgtcgtccgtctacaccccgtgatacttgcctccatcgtggacagttacgaacgcagaaatgaaggagccgcacgcgttattggaacattacttgggacggtggacaagcattccgtcgaggtcaccaattgtttctcagtgcctcacaatgaatcggaagatgaagtcgccgttgatatggagtttgcaaagaatatgtacgaactgcacaaaaaagtctcccctaacgagctcattctgggctggtacgcaacggggcacgatattaccgagcatagtgtgttaattcacgaatattatagtcgcgaagcacctaatcccatccacttgactgtggacacttccctgcagaatggccgaatgagcataaaagcctacgtgtcaacccttatgggcgtgcccggaagaacaatgggggtgatgtttacgcccctgactgtgaagtatgcctactatgatacagaacgaattggagtggatctcataatgaagacttgcttctccccaaacagggtcatcgggcttagttcagatctgcaacaggtcggaggcgcatcagccaggatacaggacgctttatccactgttctgcagtacgcggaagatgttctgagtgggaaggtctctgccgataatacagtaggtcgatttctgatgtctttagttaaccaagtgccgaagatcgtccctgatgacttcgaaacaatgctgaacagcaatatcaacgacctgctcatggtgacatacctggctaatctcacacagagccagattgcacttaacgaaaaactggttaacctttag

SEQ ID NO: 222509 - DNA, 1119 bp, synthetic construct
  misc_feature 1..1119: note = Description of Artificial Sequence: Synthetic coding sequence
  source 1..1119: mol_type = other DNA
atgaatgcagtgatttccgcatctgccagcttctttcttgacaaaatggctactcctgctgtgccagtgtctgccccaccagctacccctacgcctgtacccgctgctgccccagcttctgtgcctgccccaactccagccccagccgcagctcctgtgccagcagccgctcccgcttcaagctccgatcctgcagccgcagccgctgccactgccgctcccggacaaacgccagccagcgcgcaggccccagctcagactcctgcaccggctctgccgggacccgcacttccaggcccattccctggtggaagagtggtccgtctgcacccagttatcctggcatccatcgtggattcttatgagcgcaggaatgaaggtgctgctagagtcatcgggactctgcttgggaccgtcgacaaacattccgtcgaggtgaccaattgtttttcagtgccccacaatgagtctgaagatgaggttgcagtggatatggagtttgccaagaatatgtacgagctgcacaaaaaggtctcccctaacgagctgatcctcggatggtacgcaactgggcacgatataacggaacacagcgtcttaattcacgagtactactctcgcgaggcaccgaacccaatccacctcactgtcgatacatccctccagaatggtcgaatgtctattaaagcctacgtttcaaccttaatgggagtacctggacggactatgggggtcatgttcactcccttaaccgtgaaatatgcatattatgataccgagaggatcggagtggacctgataatgaaaacctgcttctccccaaatcgagtgattggcttgtccagcgacttgcaacaggttggaggcgcaagcgctcgcattcaggatgcactaagcacggtcctgcaatatgccgaagatgtcttaagtgggaaagttagcgccgataacaccgtgggcaggtttttaatgtccttagttaatcaagtaccgaagatcgtgcccgatgactttgaaacgatgctaaatagtaatatcaacgacctgctgatggtgacctatctcgctaatcttacacagtctcagattgcactgaatgagaaactcgttaacctgtag

SEQ ID NO: 222510 - DNA, 924 bp, synthetic construct
  misc_feature 1..924: note = Description of Artificial Sequence: Synthetic coding sequence
  source 1..924: mol_type = other DNA
atggccacgccagctgtgccggtgtctgcccctcctgccactccaacccccgtaccagccgctgctcctgctcccgcactacctggcccagccttacctggtccattccctgggggaagagtcgttaggttacacccggtcattttagcttctatcgtcgactcttatgagagaagaaacgagggtgctgcacgcgtaataggaacactgctcggcactgtagataaacattcagtagaggtgacgaactgtttctcggttcctcacaatgagtccgaagacgaagttgccgtagacatggagtttgcgaagaacatgtacgagctccataaaaaagtgtctccaaatgaattaattctgggttggtatgcgaccggtcacgacatcactgagcatagtgtgcttattcacgaatactatagccgcgaagcccctaaccctatacatcttaccgtcgacacgtccctgcaaaacggacgaatgtccatcaaggcctacgttagcacactgatgggagtcccaggacgcactatgggagtgatgtttacaccacttactgtgaagtatgcatactatgatacggagcgaattggtgtggacctcatcatgaagacatgcttttctcctaatcgagtgataggactgtcttcggacttgcaacaagtgggcggtgccagtgcccgtatccaggacgcgctgtctacggttttacagtatgctgaggatgtacttagtggtaaggtgagcgcagataataccgtcggccgattcttgatgagcctcgtgaaccaagtccccaagattgttccagacgacttcgagaccatgctaaattcgaacattaatgatctgctgatggtgacttatctcgccaacctcacccagagccagatagccctgaatgagaagctggtcaacctgtag

SEQ ID NO: 222511 - DNA, 963 bp, synthetic construct
  misc_feature 1..963: note = Description of Artificial Sequence: Synthetic coding sequence
  source 1..963: mol_type = other DNA
atgcccacaggagacttcgattctaagccatcatgggctgatcaagttgaggaagagggcgaggacgataagtgcgtgacttccgaattgctcaaggggattccactagcaactggagacacaagtcctgagcccgagctcctgccgggagccccacttcctcctcccaaggaggtaatcaacgggaacataaaaaccgtcaccgaatataaaatcgatgaggacggaaagaagtttaaaattgttcgaactttccgtattgagacaagaaaggccagcaaggctgtggcgagacgcaagaactggaagaagtttggtaacagcgagttcgatccacctggtccgaatgtggctactaccactgtatctgatgatgtaagtatgacatttatcaccagtaaggaggatctcaattgccaggaggaggaggatcccatgaataaactcaaaggacagaagattgtgtcatgcaggatctgtaagggcgaccattggaccaccagatgtccatataaggatacacttggcccaatgcagaaggagttagcagagcagttgggtctttcaactggagaaaaggagaagctgcctggagaacttgagccagtacaggcaacgcagaacaagaccgggaaatatgtgcctcccagtctgcgtgacggcgcttcaagaaggggcgaatccatgcagccaaaccgacgtgccgacgataacgctactatccgcgttacgaacctcagcgaggacactagggagaccgacctgcaggagctcttccggccattcggttccatttctcgcatctacttagcgaaagacaaaaccacgggccagtcaaagggatttgcctttatctcatttcatagaagggaggatgcagctcgtgctattgcgggagtatccgggttcggttacgaccacctcattttgaacgtggagtgggcaaagccaagcaccaactag

SEQ ID NO: 222512 - DNA, 1101 bp, synthetic construct
  misc_feature 1..1101: note = Description of Artificial Sequence: Synthetic coding sequence
  source 1..1101: mol_type = other DNA
atgtacagtagacacgctcagcggatcccacccggaaagaagatggccagtcgtaaggagggcaccggatcgacagccacctcgtccagctccacagcaggcgctgcagggaagggaaagggcaaaggaggctccggggattccgcagtgaagcaagtgcagatcgatggtttggtggtcctcaagatcatcaaacactatcaggaagaggggcagggcacagaagtggtgcagggcgtgttgcttggcctggttgttgaagatcggctcgaaatcactaactgtttccctttcccccagcatactgaggacgacgctgactttgatgaggtacagtatcagatggagatgatgagaagtctgcggcacgtgaacatcgaccatctgcacgtagggtggtaccagagtacttattacggttcttttgtaacccgggcattgctggacagccagtttagctaccaacacgctatcgaggagtccgtcgtgctgatttacgatcctattaagactgcccagggtagtctctccctgaaagcctatagactcactccaaagttgatggaggtctgtaaagagaaagacttcagccctgaggcccttaagaaggcaaatatcacattcgagtacatgttcgaggaagtgcccatcgtaatcaaaaatagccacctgattaacgtccttatgtgggagcttgaaaaaaaatctgcagtagccgacaagcacgagttactgtcactggcctcttctaatcatctcggaaagaatctgcagctgctgatggatcgcgtcgacgaaatgtcacaagacattgtaaagtataacacatacatgcggaatacatcaaagcagcaacagcagaagcaccagtatcagcaaagaagacaacaggagaatatgcaacgtcagtctaggggggaaccgcctctcccggaggaggatctcagtaaactttttaaaccccctcagccacctgcccgaatggattcgctcctcatagccggacaaataaacacatactgtcaaaatataaaagagttcactgctcaaaacttaggtaagttgttcatggcgcaggctcttcaggagtacaacaattag

SEQ ID NO: 222513 - DNA, 1059 bp, synthetic construct
  misc_feature 1..1059: note = Description of Artificial Sequence: Synthetic coding sequence
  source 1..1059: mol_type = other DNA
atggcatcccgaaaagaaggcactgggtcaacagctacttctagctcgagcactgctggagccgcagggaagggcaaaggaaaaggcggatccggcgactcagccgtgaaacaggtacagattgatggtttggtagtcctcaagataatcaagcactaccaggaggaaggacaaggtacagaagtagtccagggcgtccttctcggcttagttgtggaggatcgacttgaaatcacgaactgttttcctttcccacagcacaccgaggacgacgctgacttcgacgaggtacagtaccaaatggaaatgatgcggtctctacgccatgtgaacatcgaccatctgcacgtgggctggtaccagtctacttactacggatctttcgtcacccgtgccttactggatagtcagttttcctaccaacatgccatcgaggaatcagtcgttttgatttacgacccaatcaagaccgcccagggttctttgtccctgaaagcctatcggctcactcccaagctcatggaagtgtgcaaggagaaggactttagtccggaagctctgaagaaggccaatatcacattcgagtatatgttcgaagaggtgcccatcgtcataaagaactctcacctcatcaacgtacttatgtgggaactagaaaagaaatctgcagtggccgacaaacatgaactgctgtccctggcttcctcaaaccatcttggaaagaacctacagcttctgatggacagggtggatgagatgtctcaggatattgtgaaatacaatacctatatgaggaacacatccaaacaacagcagcaaaaacaccaataccagcagaggagacagcaggaaaatatgcagcgccaaagtcgtggagaaccaccactccctgaagaagatctgagtaagcttttcaagccgccacaaccacctgcaaggatggattctctgctcatcgcaggacagatcaacacatactgccaaaacatcaaggagtttacggcccagaatctgggcaagctgttcatggctcaggcactgcaggaatacaataattag

SEQ ID NO: 222514 - DNA, 378 bp, synthetic construct
  misc_feature 1..378: note = Description of Artificial Sequence: Synthetic coding sequence
  source 1..378: mol_type = other DNA
atgaaaccaatcctgctgcaagggcacgagcgctccatcacccagatcaagtacaatcgtgagggtgatctcctctttaccgttgccaaggacccgatcgtaaatgtatggtacagcgtcaatggagaacgtttgggcacctacatgggtcacaccggtgctgtgtggtgtgttgacgccgactgggatactaaacatgtcctgacagggtctgcggacaatagttgcaggctgtgggactgtgagactgggaagcaactcgccctgttgaagaccaattctgccgtcaggacatgtggattcgatttcggaggaaacatcataatgttctccactgacaaacaaatgggctatcagtgctttgttagctttttttag

SEQ ID NO: 222515 - DNA, 978 bp, synthetic construct
  misc_feature 1..978: note = Description of Artificial Sequence: Synthetic coding sequence
  source 1..978: mol_type = other DNA
atgaagccaattctgctacagggccacgagcggtctataacgcagatcaagtacaatagggagggcgacctgctgtttaccgtggccaaagatccaattgtgaatgtgtggtattcagtcaacggcgagcggttaggcacgtatatgggccatactggagcagtgtggtgtgtagacgcagactgggatactaaacatgtactcaccggctctgcagacaattcttgtcggttatgggattgcgaaacagggaagcagctggctctgctgaagacaaatagcgcggttcgcacatgcggatttgactttggtggtaacatcatcatgttcagtaccgacaagcaaatgggataccagtgtttcgtgtctttcttcgatttgagagatccatcccaaattgacaataacgaaccatatatgaagattccttgtaacgatagtaaaatcacgtccgccgtgtggggtcctcttggcgaatgcatcatcgcaggccatgaaagcggcgaattgaaccagtattctgccaagtcaggcgaggtcctggtgaacgtcaaggagcatagtagacagatcaacgatatccagctgagccgcgacatgacgatgttcgtgacagcctcaaaggataataccgcaaaactctttgactccacaacacttgaacaccaaaaaacattcagaacagaacggccagttaactccgcagcactctccccaaactacgaccacgtggtgttgggaggtgggcaggaggcaatggatgtaacgaccacttctacccgcatcgggaaattcgaggccagattttttcatctcgccttcgaggaagaatttggtcgggttaaaggacactttggtcctattaactccgtggcgtttcatccagatggtaagtcctattcctccggaggggaggatgggtacgtcaggattcattacttcgacccacagtacttcgagtttgagtttgaggcatag

SEQ ID NO: 222516 - DNA, 777 bp, synthetic construct
  misc_feature 1..777: note = Description of Artificial Sequence: Synthetic coding sequence
  source 1..777: mol_type = other DNA
atggcagctgcagccgctgccgctggcgattcggatagctgggacgcagacgccttcagtgtggaggatccagtgaggaaggtgggcggaggtgggactgcgggaggggaccggtgggaaggagaagacgaggatgaagacgtaaaagataactgggacgacgatgacgatgagaaaaaagaggaagccgaagtaaaacccgaggtgaagatcagtgagaaaaagaaaatcgctgaaaagatcaaggaaaaagagcgccagcaaaaaaagcggcaagaagaaatcaagaaaaggctggaggaacctgaggaacctaaagttctcacacccgaagagcagctcgccgacaaactgaggttaaagaaactccaggaagaatccgatttggaactagctaaggagacatttggagtgaacaacgccgtgtacggcattgatgcaatgaatccgagcagcagagatgattttaccgagttcggaaagttgctgaaagacaaaattacccagtacgagaagtccctctattatgcctcatttctggaagtgttggtcagagatgtatgtattagtctggaaatagatgacttgaagaagattacaaactctctgacagttctgtgtagcgagaaacagaaacaggagaagcagtcaaaggccaagaagaagaagaaaggagttgttcctggaggaggacttaaagccactatgaaggacgacctggctgactacggagggtatgacggaggatatgtgcaagactatgaagatttcatgtag

SEQ ID NO: 222517 - DNA, 657 bp, synthetic construct
  misc_feature 1..657: note = Description of Artificial Sequence: Synthetic coding sequence
  source 1..657: mol_type = other DNA
atggctatgtttgaacagatgcgagcaaatgtggggaagctgttaaagggcatcgaccggtacaatcctgagaacctggccactttggagcgctatgtggagactcaggccaaggagaacgcctatgacttggaggcaaatctagccgtcctgaagctgtatcagttcaaccccgcattcttccagaccactgttacggctcagatcctgctgaaagctctcactaaccttccccataccgattttacactgtgcaaatgtatgatcgatcaggctcaccaagaggagagacccatccggcagatcctctatctgggtgacctgctggagacatgccacttccaagcgttttggcaagcactcgacgagaacatggacctgttggaaggtatcaccggctttgaggacagtgtgcgaaaatttatttgtcacgtggttgggataacgtaccagcacatagacagatggctgttggcggaaatgctgggggacctgtccgattcacaactcaaggtgtggatgtctaaatatgggtggtctgctgatgagtccgggcaaatcttcatttgtagccaggaggagagcataaaacctaaaaatatcgtcgaaaagattgactttgattctgtcagctccataatggccagttcccagtag

SEQ ID NO: 222518 - DNA, 375 bp, synthetic construct
  misc_feature 1..375: note = Description of Artificial Sequence: Synthetic coding sequence
  source 1..375: mol_type = other DNA
atgatcgaccaggcccaccaggaggaacgcccaatcagacaaatcctgtacctcggagatcttctggaaacctgtcactttcaggccttctggcaagccttagacgagaatatggatctactggagggaataaccggttttgaggattcagtccgcaagttcatctgtcacgtggtggggattacctaccagcacatcgatcggtggctgctagcagagatgctgggagatctgagtgacagccagttgaaagtttggatgtctaagtatggatggtctgcggatgagtcaggccagatttttatctgctcccaagaagagagcataaagccaaaaaatatcgtagagaagattgacttcgacagcgaatggtag

SEQ ID NO: 222519 - DNA, 636 bp, synthetic construct
  misc_feature 1..636: note = Description of Artificial Sequence: Synthetic coding sequence
  source 1..636: mol_type = other DNA
atggcaatgtttgagcagatgcgagcaaacgtgggtaaactgctcaaaggtatcgacagatacaatcctgaaaatttagccaccctggagagatacgtggagactcaagccaaggaaaacgcttacgatctcgaagctaatttagccgtgttgaagctttaccagtttaacccagccttctttcagaccacagtgaccgcccagatcctgctgaaggctctgactaatctgccacataccgatttcactctgtgtaagtgcatgattgaccaagctcaccaagaagaacgccctatcagacagatcctgtatcttggtgacttgttggagacatgccacttccaagcattctggcaagcccttgatgagaatatggacctcctagaaggaatcaccggctttgaggactctgtcagaaagttcatctgtcacgtggtcggcattacgtaccagcacatagaccggtggttacttgccgagatgctcggggacctttccgactcgcagttaaaggtgtggatgtctaaatacggatggagcgctgatgaatccggccagattttcatctgttcacaagaggaaagtatcaaacccaaaaacattgttgagaaaattgacttcgattcagagtggtag

SEQ ID NO: 222520 - DNA, 1125 bp, synthetic construct
  misc_feature 1..1125: note = Description of Artificial Sequence: Synthetic coding sequence
  source 1..1125: mol_type = other DNA
atgagtgtgccggcatttatcgatatttctgaagaagatcaggcagccgaactaagagcgtacctgaaatctaagggcgctgagatctcggaggagaacagtgaagggggactgcacgtggatctcgcccagattatcgaagcctgtgacgtgtgcctgaaagaagatgacaaggacgttgaaagtgtcatgaacagcgtggtgtccttactgcttatcttggagccagacaaacaagaagctctgattgagagtctttgcgagaagctggtgaagtttagggaaggagagagaccatccctgaggctgcagctgttatcaaatctctttcacggtatggacaaaaacacccctgttaggtacactgtgtactgctcactaatcaaagtggccgcatcctgcggagctatacagtacatccctactgagcttgaccaggtgcggaaatggatcagtgactggaacttgactaccgaaaagaagcatacacttttgcggctcctctatgaagcgttggtcgattgcaagaagagcgacgctgcctccaaagtgatggtcgaattgctgggaagctatacagaggacaacgcctcacaggcacgcgttgacgctcacaggtgtattgttagagcgttaaaagaccctaacgcatttctgttcgatcatctgctgaccttgaaacctgtgaaatttctagagggagagcttattcatgacttactgacaatctttgtgagcgctaaactggccagctacgtcaagttctaccagaacaataaggattttatcgatagcttgggacttctgcatgaacaaaatatggcaaaaatgagacttctgacttttatgggcatggctgtggagaataaggagataagcttcgataccatgcagcaggagctccagatcggagctgacgatgtggaagccttcgttatcgacgctgtccggactaagatggtgtattgtaaaattgatcagacccaaaggaaggtagtcgtctcacattcaacccatcggacattcggtaaacaacagtggcagcagttgtacgacaccttgaacgcttggaaacagaatttgaataaagtgaaaaactcccttctctctctgtctgatacctag

SEQ ID NO: 222521 - DNA, 2724 bp, synthetic construct
  misc_feature 1..2724: note = Description of Artificial Sequence: Synthetic coding sequence
  source 1..2724: mol_type = other DNA
gtggagtctgctatcgcagaagggggagcaagcaggttttcggcgagttctgggggaggcggtagccggggagcgccacagcattatcctaagacagctggtaactcagaatttctcggaaaaaccccgggacagaatgcccagaagtggattcccgctagatccacgcgccgtgacgataactccgctgcaaacaacagcgccaacgagaaggaacgccacgacgccatattccgtaaggttagagggatcctgaataaattgacaccagagaaatttgacaagctgtgcctcgagcttctgaatgtcggagtcgagtcaaagctgatcctcaagggagtaatcctgttaatcgtcgacaaggcactagaagaacccaagtattctagcttgtacgctcagctgtgcctgagattggccgaggatgccccaaatttcgatggccctgcagcagagggccagcccggtcagaagcagtcaactacgtttcggaggttgttaatctcgaagttgcaggatgaattcgaaaatcggacccgaaatgtggatgtgtacgacaaacgcgagaaccccctgctcccagaggaggaagagcaacgcgcaattgcaaagatcaagatgctcggtaacattaaatttattggcgaactgggcaagctcgatttgatacacgagtctatcctgcataagtgcattaagacgctgctcgaaaaaaagaaacgtgttcaactgaaagatatgggtgaggatctagaatgcctttgccagatcatgaggacagtggggccaagactggatcatgagcgtgccaagtctcttatggaccagtactttgccagaatgtgctcactgatgttgtcaaaagaactgcccgctcgcatccgcttcctactgcaagatacagtagaattgagagagcaccactgggttcccaggaaagccttcctagataacggaccaaagacaataaaccagatccggcaagacgccgtgaaggaccttggagtgttcatccccgctcctatggcgcagggaatgcgcagtgactttttcctggaagggccattcatgccccctcgaatgaagatggacagagatccacttggtggactggctgatatgtttgggcagatgcctggcagtggcattggcaccggccctggggtaattcaggatcggttttctcctaccatgggccgtcacaggtcaaaccagcttttcaacgggcatgggggtcatatcatgcctcccacacagtcacaatttggcgagatgggtggaaagtttatgaagagtcaggggttgtctcagttataccacaaccagtcccaggggttgctgagtcagctgcaaggacaatccaaggatatgcctccgaggtttagtaagaaagggcaactcaacgctgacgagatctccctccggcctgcacagtcctttcttatgaataagaatcaggttcccaaactccagccacagattacaatgattcctccttccgcacagcctccaagaactcagactcctcctctcggtcagacccctcagctaggcctgaaaacaaatccacctctgatccaagaaaaacctgccaaaacttcaaagaagcctcccccttccaaggaagagctgctgaaattgactgaaaccgtggttacagagtacttaaacagcggcaacgctaatgaggcagtgaacggggtgagagagatgcgcgcacccaagcactttctgcctgagatgctgagcaaagttataattcttagcctcgacagatctgatgaggacaaggaaaaggctagttccctgattagcctcctgaaacaggaggggatcgcaacttctgacaatttcatgcaggcgtttcttaatgtgttagatcagtgtcctaagctggaagtggatatcccactggttaagagctacctggcacagtttgccgctagggcaataatttcggagctggtttcaataagcgagctagcacagccgctcgaaagcggaacccacttccctctgttcctgctctgtctgcagcagttggcgaaactgcaggacagagaatggctgaccgaactgtttcaacagtctaaggttaacatgcagaaaatgctgcctgagatcgatcagaataaagacagaatgctggagatcctcgagggtaaggggctctcctttttgtttcccttgctgaaactcgaaaaggagctcctgaagcagattaagctcgacccatcccctcagactatctataagtggatcaaggataatatcagccccaagctccatgttgataaaggattcgtcaacatactgatgaccagtttcctgcagtacatcagtagtgaagtgaatccccctagtgacgagaccgacagttcttctgcaccttccaaggagcaattagaacaggaaaaacagctgcttctgagttttaagccagtcatgcagaaatttctccatgatcatgttgatttgcaggtgtctgccttgtacgcactgcaagtgcattgctacaattcaaacttccctaaaggcatgctcctacggtttttcgttcacttctacgacatggaaatcatcgaggaagaagcgttcctcgcttggaaggaggatataacacaggaatttcccggtaagggcaaggccttgttccaggttaaccagtggttgacgtggctcgaaacagccgaggaggaggagtcagaagaggaagccgactag

SEQ ID NO: 222522 - DNA, 762 bp, synthetic construct
  misc_feature 1..762: note = Description of Artificial Sequence: Synthetic coding sequence
  source 1..762: mol_type = other DNA
atgcaggccttccttaatgtactagatcagtgtccaaaacttgaggtggacattccacttgtcaaatcctatctggctcaatttgcggctagagccatcatatcagagctggtgagcatttctgaattagcgcagcctctcgagtccgggactcattttccactgtttttgctatgtctacaacagctcgccaaactgcaggaccgggagtggttgacagagctgttccagcaaagcaaggtcaatatgcagaagatgttaccggagattgaccagaataaggatcgcatgctagagattttagaggggaagggactgagctttctctttcccttgctgaaactggagaaggaattactgaagcaaatcaagctcgatccgtctccacagacaatttacaagtggattaaggacaatatcagtcctaagctgcacgttgataagggattcgtgaacattctaatgaccagctttcttcaatacatcagcagcgaggtgaacccgccttccgatgaaaccgattcaagttccgcaccaagtaaagagcaactagagcaggagaagcaactgctcctgtcctttaaacccgtgatgcagaagttcctgcacgaccatgtcgacctgcaagtttcggcactctatgccttacaagttcattgttacaatagcaacttccccaagggtatgttgctttttctgtgcacatcaatgacatggaaattgctcaagaagaagctctcttggttgggaaagaaaatctag

SEQ ID NO: 222523 - DNA, 2610 bp, synthetic construct
  misc_feature 1..2610: note = Description of Artificial Sequence: Synthetic coding sequence
  source 1..2610: mol_type = other DNA
gtggagtctgccattgcagagggtggcgctagccggttttccgcctccagcggtggagggggatcacggggagccccacagcactatcctaaaactgctggtaattctgagtttctcggaaaaacaccgggacagaacgcccagaagtggattccagctaggagcacccgacgggacgacaattccgcagcaaacaattccgcaaatgaaaaggaaaggcacgatgcgatttttaggaaggtcaggggaattcttaataaactcactccagagaaattcgacaaattgtgcctggagcttctgaatgtgggagtggaaagtaagcttattctgaagggcgtgatactgcttatcgtagataaagctcttgaggagcctaaatattcctccctttacgctcagttgtgcctcagattggctgaggatgctccaaactttgatggacctgcggcagagggccagcctgggcagaagcagtccacaacattcaggcgactgctcatttctaagctgcaggatgagtttgaaaacaggactcggaacgtcgatgtatatgataagcgcgaaaatcctctgctgcccgaagaggaggagcagcgggcaatagctaaaatcaagatgctaggcaacatcaaatttatcggggaattaggaaaacttgatctaatccacgagtccatcctccataaatgtataaaaacacttctggaaaagaagaaacgggtccaactgaaagacatgggggaagacctggagtgcctgtgccagatcatgcggaccgtcgggcctagactggatcatgaacgggctaagtcactgatggaccaatactttgcgaggatgtgttcccttatgctatctaaagaacttccggcaagaataaggttcctgctacaggacacggtagagctgcgtgaacatcattgggtgccacgcaaggccttcctggataacgggccaaagaccatcaaccagatccgccaggacgctgtgaaggacctcggcgtgttcatcccggctccaatggcccaagggatgagaagcgatttctttttggagggcccatttatgccccctcggatgaagatggaccgggacccattggggggactggccgacatgtttggtcaaatgcccggttcgggcattggtacaggcccaggcgtgatccaggaccgattcagtcccactatgggtcgtcatcgtagtaatcagttgttcaacgggcatggcggacatatcatgcctcctactcagagtcagttcggagagatgggaggaaagttcatgaaatctcagataagtctgaggcctgctcagtcattcctcatgaataaaaaccaagtcccaaaactacagccccaaatcacaatgattccccctagcgcccagcctccaaggacccagacgccacccctgggccagactccacagctgggactgaagactaatcctcccttgattcaggagaagcccgcaaagacatcaaaaaaaccgcctccctctaaggaagagctactcaagttaaccgaaacagtggttactgaatacttaaacagtggcaacgccaatgaagcggtaaacggcgtgcgcgagatgagagcacctaaacactttttacctgaaatgctgtccaaagtaatcattctgagcctggataggtcagatgaggacaaagagaaggcatcgagccttatttctctcctcaaacaagagggcatcgcaacttctgataattttatgcaagcatttctgaacgtgttggaccaatgcccaaaactcgaggtcgacataccgttggtgaagtcttacctcgcccagttcgccgctcgggcaattatttcggaactcgtctcaatctctgagctagctcagccccttgagagcggtactcacttcccactctttctattgtgccttcagcaactcgcgaagttacaagatcgtgagtggttgacagaactgtttcagcaaagcaaggtcaatatgcagaagatgctgccagagatagaccagaacaaagatcgaatgctcgagatactcgagggtaagggactgagcttcctgttccccctgcttaagttagagaaagagttgttaaaacagattaagctggaccctagtcctcagaccatctacaagtggattaaagacaatatctcccccaagcttcatgtggacaagggttttgtgaatattttaatgacttctttcctgcagtacatctcatctgaagtcaacccccctagtgatgagactgatagctcctctgcgccaagtaaagagcaattggagcaggagaagcagcttctgctttcctttaagcccgtgatgcagaagtttctccatgatcatgtagatctgcaggtttctgccctttacgccctgcaagttcactgctacaactccaatttccccaaaggtatgctcttgcgcttctttgtccacttttacgatatggaaatcattgaagaggaggcattcctcgcatggaaggaggacatcacgcaagaattccccggaaaggggaaagccctcttccaagtcaaccagtggttgacatggctggaaaccgctgaggaggaagaaagcgaagaggaagctgattag

SEQ ID NO: 222524 - DNA, 2943 bp, synthetic construct
  misc_feature 1..2943: note = Description of Artificial Sequence: Synthetic coding sequence
  source 1..2943: mol_type = other DNA
atggctggatggcccacccctgccggtaccagaccatggagaacggaggccaggttgtgctctgatggagagggggcatggctgggtcctctagccccttggagggaggcgcgacttgctagtcgccgagggggaatttcctttctcttgtcacccccactgcccaccccgagtatcaacattatcctcttaaagatcctcaggtgccaagcggctaaggtcgagagcgccattgctgagggaggcgcatcccgcttctcagcatctagtggtggagggggaagtaggggagcaccacagcattatcctaagaccgcgggaaacagcgaatttctgggtaaaacccccggacagaatgcgcaaaaatggattcccgcaagatctactagaagagacgataatagcgctgccaataactccgccaatgaaaaggagaggcacgacgcaatttttcgaaaggtgcggggaattctgaataaactaacccctgaaaaatttgacaagctatgcctggagctgcttaacgtgggtgttgaatcaaaactgattctaaaaggcgtgatcctcttaatagtggacaaagctttggaggaacccaagtactcttccctgtacgcccagctgtgtctgcgcttggccgaagatgcacctaactttgacggacccgctgccgaaggtcaaccaggtcagaagcagagcaccacttttaggcgcctattgatctccaagctccaggacgagttcgaaaacagaaccagaaatgtggacgtctatgataagagggaaaatcctctccttccagaagaagaggaacaacgcgcaatcgccaaaattaaaatgttgggcaatattaaatttatcggcgagttgggcaagctagatcttatccacgaatctatcttgcacaaatgcatcaagactctgctggagaagaagaaaagagtgcaacttaaagatatgggggaggatctcgagtgcttatgtcagatcatgaggactgttgggcctcggctggaccacgagcgcgctaaaagcttaatggatcagtacttcgcccgaatgtgttcccttatgctttccaaggaactgcccgcaaggatcaggtttcttctgcaggatacggtagaactccgggaacatcattgggtgcccaggaaggcctttctcgataacgggcctaagacaatcaaccagataagacaggatgctgtcaaagatctgggagtgttcattcctgccccaatggcacagggcatgaggtcggacttcttcctggaggggccttttatgccccctcgaatgaagatggacagggatccccttggaggcttagcagatatgttcggacagatgcctggctccggtattgggacaggtcccggagttatccaagatcggttttctcctaccatggggcgacaccgctctaaccaactctttaacggccatggagggcatataatgccaccgacacaaagccagtttggtgaaatgggtgggaagttcatgaaaagccagggactgtctcagctctatcacaatcagagccaggggttgctctcccaactgcagggacagagtaaggatatgcctcctcgtttttcaaaaaaaggacagctaaacgcagacgaaatcagtctgagacccgcacagtcatttctaatgaacaagaaccaggtcccaaaactccagccccagatcactatgattcctccaagcgcacagccccctcggacacagacaccaccgctaggacagacaccccagcttggactgaagactaatcccccactcattcaggagaagccagctaagacaagcaaaaaaccccctccctccaaggaggagctgctcaagctaacagaaaccgtggtcactgagtatttaaactcaggcaacgcaaatgaggccgtgaacggggtgagggagatgagagctccaaagcattttttacccgagatgctgtcgaaagtgattatcctttctttggaccggtctgacgaggacaaagagaaagcaagtagtttgatcagcctgctgaagcaagaggggatagctaccagcgataactttatgcaggcattcctcaatgtcctcgatcagtgtcctaagctggaggtcgatatacccctggttaagagctatctggcacagttcgccgcacgagctatcatttcggagctcgttagcatctctgagctggctcaaccactggaatcaggcacacatttcccactgttccttctctgcctgcagcaactagctaagttgcaggaccgagagtggctgaccgagctgttccagcagagcaaagttaacatgcagaagatgcttccagagatcgaccagaacaaagacagaatgcttgaaatattagagggaaaggggcttagctttctattccccttactcaagctggagaaggaactgctgaagcagattaagctcgacccctctcctcagacaatatataagtggattaaagacaacatctccccgaagctgcacgtggacaagggtttcgttaatatactcatgacctcattcctacagtacataagcagcgaagtgaacccaccttctgatgagacagactcgtcttcagctccatcaaaagagcagctagaacaggaaaaacaactgctcttgtcatttaaaccggtcatgcaaaagtttctccacgaccacgtcgacctgcaagtgtccgctctctatgccctgcaggtacactgctacaattccaatttccccaaaggcatgttgctcaggttttttgttcacttttacgacatggagatcattgaggaagaggctttcttggcttggaaagaggatatcactcaggagttcccaggcaagggtaaagccctcttccaggttaatcagtggttaacttggctcgaaacagcggaggaggaggagtctgaggaagaagctgactag

SEQ ID NO: 222525 - DNA, 735 bp, synthetic construct
  misc_feature 1..735: note = Description of Artificial Sequence: Synthetic coding sequence
  source 1..735: mol_type = other DNA
gtggagagtgccatcgccgaggggggagcttcacggttcagcgcctcaagtgggggaggtggttccaggggcgctccacagcactatcccaaaacagctggcaactcagagtttcttggtaaaactccgggacagaacgctcagaagtggatccccgctcgctcaacgcgaagagacgacaactctgctgccaataactccgcaaatgaaaaagagagacacgacgctatattccgtaaggtgcggggaatcttaaacaaactgacacctgagaagttcgataagctatgtctggaactgctcaatgttggagtggaaagtaagttaatactcaaaggagtcatcttgctgattgtggataaagccctggaggagccaaagtactcatcattgtatgcccagctgtgcctgaggttggccgaagatgctccaaactttgatggccctgcagctgaggggcagccaggacaaaagcaatccactaccttccgtcgacttctgatcagcaagctgcaggacgagtttgagaatcgcaccaggaacgtcgatgtttatgataagcgggaaaaccctctgttacctgaggaggaagagcagagggccatcgctaagattaagatgttaggcaatatcaagttcattggcgagctgggcaaacttgacctcattcacgaatcaatcctccacaagtgtatcaaaacgctcctggagaagaagaagcgcgtgcagctttag

SEQ ID NO: 222526 - DNA, 2724 bp, synthetic construct
  misc_feature 1..2724: note = Description of Artificial Sequence: Synthetic coding sequence
  source 1..2724: mol_type = other DNA
gtagagtctgcaatcgctgaggggggagctagcagattttctgcttcctcaggaggaggcggatcccgcggtgcgcctcagcactatcccaagactgcgggtaactcggaattcctgggaaaaaccccgggacagaacgcacagaaatggattcccgcacggagtacacgccgagacgacaattccgcggctaacaattcggcaaatgagaaggagaggcatgacgccatcttccggaaagtgcgaggcatcctaaataagctgacgcccgagaagttcgacaaactatgtctggagctgctgaacgtcggcgtggagtcaaaattaatcctgaagggtgtgatactcctgatcgtggataaggctctagaggagccgaaatattccagtctttacgcccaactctgcctgcgtctggctgaggacgcgcctaattttgacgggccagccgcagaaggacagcctggtcagaagcagtccaccaccttccggagactgctgatctccaagcttcaggacgagtttgagaaccgcacccgaaatgtggatgtgtacgacaaaagagagaatcctcttttacccgaggaagaggagcaacgcgcaattgcaaaaattaagatgctcggcaatattaagttcatcggggagctcggcaagcttgatttaatacacgaaagcatcctccacaagtgcattaagaccctcctcgaaaagaaaaagagggtgcaactgaaagatatgggcgaagacctcgagtgcctgtgtcagatcatgcgcaccgtcggtccaaggttggaccatgaaagggccaagtccttgatggaccagtattttgcgaggatgtgttctctcatgctcagtaaggaactgcctgctcggatacggttcctactgcaggataccgtggaacttcgggaacaccactgggtcccacgaaaggcattccttgacaatggtcctaagacgattaatcagattagacaggatgccgtgaaagatctgggtgtgtttatccccgctcccatggcccagggtatgcgctctgatttcttcttagaagggccattcatgcctccgaggatgaagatggaccgcgacccccttgggggtctcgctgatatgttcggccaaatgccaggcagcgggattggcacagggcctggagtaattcaagataggttcagccccactatgggcaggcacaggagtaatcagctatttaacggacacggaggtcatataatgcctcccacgcaaagccagttcggggaaatggggggaaagtttatgaagtcacaagggctatctcagttgtaccataatcagagtcaggggctccttagtcagctgcagggacagtcgaaggacatgccaccaaggttttctaaaaaaggacaactcaacgcagatgaaatcagtttacggcctgcccagtcgttcctgatgaataaaaaccaagtacctaaactgcagccgcagatcacgatgattcctcccagtgctcaaccccctcggacacaaacccctcccctcggccagacccctcagttggggttgaagaccaaccctccactgattcaggagaagcccgctaaaactagcaaaaaacccccaccaagcaaagaggagttgctgaagctgacagaaacggttgtcaccgaatatctaaactccgggaatgcaaatgaagctgtaaatggagttagggaaatgcgagctccgaaacactttcttcctgagatgctcagtaaagtgatcattcttagccttgatcgcagcgatgaggataaagagaaggcctctagccttatctcactgctgaagcaggagggaattgctacctcagataactttatgcaggcattccttaacgttctggaccagtgccccaaactggaggtggacattcccctggtaaagagttatctcgcgcagtttgcagcacgggctattatcagtgagttggtgagtatatccgagcttgcacaaccactggaatcaggaacccactttcccctgtttttattatgtcttcaacaattggcgaaactacaggatagagaatggctgaccgaactgttccagcagagcaaggtgaatatgcagaaaatgctgcctgagatcgaccagaacaaggatcgaatgcttgagatcctcgaggggaaggggctgtccttcctctttcctctcttgaaactcgaaaaggagttactgaaacagattaagctagatccctccccacaaacgatctacaagtggatcaaggacaacatctccccaaagttgcacgttgacaagggattcgtgaacatactgatgacatccttcctccaatatattagcagcgaggtcaacccgcctagtgacgaaaccgacagttcttccgccccatctaaggaacagctcgagcaagaaaaacagctgttgcttagttttaaaccagtgatgcaaaaatttcttcatgaccatgtggatttgcaggtaagtgcactctacgcactgcaggtccactgttacaattccaacttccctaagggcatgctactgcgattcttcgtgcacttttatgacatggagattatcgaagaggaagcttttctggcctggaaggaagatataacgcaggaattccccggaaagggaaaggcgctgtttcaggtcaatcagtggctaacctggctggagaccgccgaagaggaggagtcagaggaggaggcagactag

SEQ ID NO: 222527 - DNA, 2724 bp, synthetic construct
  misc_feature 1..2724: note = Description of Artificial Sequence: Synthetic coding sequence
  source 1..2724: mol_type = other DNA
gtagaatctgcgattgcagagggcggtgctagcagattttcagctagttctggtggaggcggttctaggggcgctccacagcattatcccaagactgccggaaactctgagttcttgggtaagacccccggacagaatgcacaaaagtggattcccgctcgcagtactcgcagggatgacaatagcgccgctaacaattccgccaacgaaaaagaaaggcacgacgctatatttcgcaaagtgagaggcattcttaacaaactcacccctgagaagtttgacaagttgtgtctagaactgctcaacgttggcgtggaaagcaagctcattctcaagggagttatcctgctcattgtggacaaagcattggaagaacctaaatatagcagtctatatgcgcagctgtgtctgagactggctgaggacgcccctaattttgatgggcctgctgccgaggggcagccaggtcagaaacagtctaccactttccgcaggctcctgatcagcaaactccaggatgagttcgagaaccggacacgcaatgttgacgtgtatgacaagagggagaatcccctgctaccagaagaggaggaacagcgggcaatagccaaaattaaaatgctgggaaacatcaaattcatcggggagctcggcaagctggatctgatccacgaatcgattctccacaagtgcattaagaccctccttgagaagaagaagagagtacagttaaaagacatgggcgaggacctagagtgcctttgccagattatgcggaccgtgggaccaaggcttgatcatgaacgggcaaagtctttaatggaccaatactttgcacggatgtgctccttgatgctgagtaaagaactcccagccaggatacggttcttgctgcaggatacagtggaactgagagagcaccattgggtcccaagaaaagctttcctggacaacggtcccaaaacaattaatcagatcagacaggatgctgttaaagacctgggagtcttcatccctgcccctatggctcagggcatgagaagcgacttttttctggagggaccgtttatgcccccacgtatgaagatggatagagaccctctgggaggcctggcagacatgtttggccagatgcccggaagcggaattgggaccggaccaggtgttatccaggacagattcagccccactatgggcaggcatcggagtaatcaactgttcaacggacatggtggccacatcatgccacctacgcagagccaattcggggaaatggggggaaaattcatgaagagccagggtttgtcccaattgtaccacaaccaatcccaggggttgttgagccaactgcagggacagtcaaaagatatgccgcctcgattctctaaaaaagggcagctaaatgctgacgagatttctctccggccagcccagagttttctgatgaacaaaaaccaggtgcccaagctgcagccccaaatcaccatgatacccccttccgcacaacccccaagaacccagaccccccctttaggccaaacgccccagttggggctcaagactaatcctccactcattcaggagaagccggctaagaccagtaaaaaaccccctccctccaaagaagaattgctgaagctgaccgagaccgtggtgaccgagtaccttaattccgggaacgccaatgaggccgtgaatggggtgagggagatgcgggcacctaaacacttcttaccagaaatgctgtccaaagtgatcatcctctccctcgatagatccgacgaagataaggaaaaggcgtcctctctgatctccctattgaagcaagagggcatcgccactagtgacaatttcatgcaggcatttctaaacgtgttggaccagtgccctaagctagaggtggatataccactggtgaagtcgtacctggcacaatttgctgcgagagcaatcatttcagaactggtgtccatcagtgagctggctcagccactggaatccggcacgcacttccccttatttctgctgtgtttacagcaactggcgaaactccaggatcgtgaatggctcacagagttgtttcagcagagtaaagttaatatgcagaagatgttgccagagattgaccagaacaaggacagaatgctcgagattctcgaggggaaaggcttatccttcctcttccccctgctgaagttagagaaagaactcctcaaacagataaagctggatccaagtcctcagacaatttacaagtggattaaggataacattagcccaaagctgcatgttgacaagggatttgtgaacatcctaatgaccagctttctgcaatatatctcaagcgaggtcaatccccctagcgatgagacggatagctccagtgccccatccaaagagcagttagaacaagagaagcagctgctcttgtctttcaaaccagtcatgcaaaagtttctgcacgaccatgtggatctgcaggtgagcgctttgtacgctctccaagtgcattgctataacagcaactttcccaaaggcatgcttttgcgcttctttgtccacttttacgacatggagatcatcgaggaagaggctttcctcgcttggaaagaggatatcactcaagaattccccggtaagggcaaagccctgttccaggtaaaccagtggttaacttggctcgagaccgccgaggaggaagagtccgaagaagaggcagactag

SEQ ID NO: 222528 - DNA, 375 bp, synthetic construct
  misc_feature 1..375: note = Description of Artificial Sequence: Synthetic coding sequence
  source 1..375: mol_type = other DNA
gtggagagcgccatagccgaaggaggagcttctagattcagcgccagtagtggcggaggcggttccaggggtgctccgcagcactaccccaaaaccgccggaaactcagagttcctcggaaagactccaggccagaatgcccagaagtggattccggcaaggtcgactagaagggacgacaacagcgcagcaaacaattcagctaatgagaaagagagacacgacgcaattttccggaaggttagggggatcctgaacaagctgacacctgaaaaattcgacaagctatgcctagagctcctcaacgtaggggtggagagtaagctcatcctgaagggtgtgatccttctgatcgttgacaaagccctggagtag

SEQ ID NO: 222529 - DNA, 339 bp, synthetic construct
  misc_feature 1..339: note = Description of Artificial Sequence: Synthetic coding sequence
  source 1..339: mol_type = other DNA
gttgagtcagcaatagcggaggggggagcatccaggttttctgcaagtagtggcggaggcggatcgagaggggcaccgcagcactaccctaaaaccgccggaaattccgagtttctaggaaagactccaggccagaatgcccagaagtggatccctgcgagatctacgcgccgagatgataatagtgccgcaaacaactcagccaatgagaaggagcggcacgacgccatctttcgaaaagtgcggggaatattgaataaattgacgcctgagaagtttgataagctctgtctggagctgctgaatgttggggtggaatctaagctcattctaaaatag

SEQ ID NO: 222530 - DNA, 351 bp, synthetic construct
  misc_feature 1..351: note = Description of Artificial Sequence: Synthetic coding sequence
  source 1..351: mol_type = other DNA
gtggagagcgcaatcgccgaagggggagcaagtcgattctccgcatctagcgggggtgggggaagtcggggagctccccagcattaccccaaaactgcaggcaatagtgagttcctggggaaaacccccggtcagaatgcacagaagtggattcccgctcgttcaacgaggcgcgacgacaattctgctgccaataattcagccaacgaaaaagagcggcatgatgcgatctttaggaaagtgcggggaattcttaacaaattaacccccgagaagttcgataagctttgcctggagctcttaaacgtcggcgtggagagcaaacttatacttaaaggcgtaatcctgtag

SEQ ID NO: 222531 - DNA, 1335 bp, synthetic construct
  misc_feature 1..1335: note = Description of Artificial Sequence: Synthetic coding sequence
  source 1..1335: mol_type = other DNA
gtagagtctgccatcgccgaagggggagccagccgattttctgccagttccggtgggggaggctctagaggcgcaccccagcattacccgaagactgccggtaattctgagtttctgggcaaaactccaggccagaatgctcagaagtggattcctgccaggtccactagacgtgacgacaattcagccgcaaataactccgcaaacgagaaagaacgccacgatgcaatattccgcaaggtgaggggaattctcaacaagcttacgccggaaaagttcgataagctgtgcctggagctgttaaatgtgggggtggaatccaaattgattctcaagggagtcatactgctgattgtggataaggcactagaggaaccaaagtacagctcactgtacgcacagttatgcctgaggcttgctgaagacgcccctaactttgatggaccggctgcagaaggtcagcctggacagaagcagagcactacctttcgtcgtttactaatttccaagcttcaggacgaattcgagaatcgcacacggaacgtggacgtctacgataaaagggaaaatcctctgctgcctgaagaggaagagcagcgggctatagccaaaatcaagatgttaggaaacattaaattcatcggcgagttgggcaagttagacctcatccacgaaagtatcctacataagtgcatcaaaacactgctggagaagaagaagcgagtccaacttaaggacatgggcgaagatctggagtgtctctgtcagataatgagaactgtggggcctaggctggaccacgaacgcgctaaaagtcttatggatcagtactttgcaagaatgtgcagtctgatgctgtctaaggaattgcctgcacggatcagattccttctgcaggatactgtggaactgagggaacatcactgggtgcctagaaaagcgtttctggacaacggaccaaaaacgatcaaccagattcggcaggatgccgtgaaggatctaggagtcttcatccctgcccctatggctcagggtatgcgatccgactttttcctggaggggccattcatgcctccacgaatgaagatggaccgcgaccctttgggaggcttagctgatatgtttggccaaatgcctggatccggcataggcacgggccctggtgtgattcaggaccgcttttctcctaccatgggccgacaccgttcaaatcaactgtttaacggccatgggggacacataatgccccctactcagtcccaattcggagagatgggcggaaaatttatgaagtcccagatttcactcaggcccgctcaaagttttctgatgtag

SEQ ID NO: 222532 - DNA, 849 bp, synthetic construct
  misc_feature 1..849: note = Description of Artificial Sequence: Synthetic coding sequence
  source 1..849: mol_type = other DNA
gtagaaagtgccatagcagaaggaggagcctcaaggtttagtgcttcttctggcggaggaggatcaaggggtgcccctcaacattaccccaagacggctggcaattccgagttcctcggcaaaacccctggccaaaacgcacagaagtggatccctgctcggtctacccgccgagacgataatagtgccgctaataatagcgccaacgagaaggagcggcacgacgctatcttcagaaaagttcggggaatactgaacaaactgacccccgaaaaattcgataagctctgtcttgaattactgaatgtaggcgttgaatctaagctgattctgaaaggagttatcctgctgatagtggataaggccctcgaggagccgaaatattccagcctatacgcccagttatgtctgcggctggctgaggacgccccaaacttcgatggccctgctgcagagggacagccaggacagaaacaaagcaccacttttcgaaggctgctgatttcaaaactgcaggacgagtttgagaatcgtacccgcaacgtagatgtgtacgacaaaagggaaaacccacttctgcccgaagaagaagagcaaagagctatcgcaaaaatcaaaatgctcggaaacataaagttcattggcgagcttgggaagctggatctcatccacgaatctatcttgcacaaatgtatcaagactttactagagaagaagaagcgcgtgcagcttaaggacatgggagaagacctggagtgcctatgtcaaataatgcggaccgtcggcccaagactggaccacgaaagggccaagagcttgatggaccagtactttgccaggatgtgctag

SEQ ID NO: 222533 - DNA, 393 bp, synthetic construct
  misc_feature 1..393: note = Description of Artificial Sequence: Synthetic coding sequence
  source 1..393: mol_type = other DNA
gtagagtcagcaatcgccgaagggggagcctcccgtttttctgcatccagtggagggggaggatctaggggtgctccacagcattaccctaagaccgccggtaactccgagttccttggcaagactcccggacagaacgctcagaagtggattccagctcgctccacccgcagggatgataattcggccgcaaacaacagcgccaacgagaaagagagacacgatgccattttcaggaaggtgagaggtatccttaataagctcacccccgagaagtttgataagctgtgcctggagttgctgaatgtgggggtcgagtctaagctgattctgaagggcgtaattctgctgattgtagacaaagccctcgaagagcccaaatattcaagctag

SEQ ID NO: 222534 - DNA, 1221 bp, synthetic construct
  misc_feature 1..1221: note = Description of Artificial Sequence: Synthetic coding sequence
  source 1..1221: mol_type = other DNA
atgtctgctagccaagactcgaggagtcgagataacggccctgacgggatggaacccgagggcgttatcgagagcaattggaatgagatcgtggacagcttcgacgacatgaacctgtccgagagtctcttgaggggaatatatgcctacggcttcgagaagccttctgctatccagcaaagagcaattctgccctgcatcaagggatacgacgtcatagctcaagctcagagcgggaccggcaagacagccacttttgctatcagtattctgcagcagattgagcttgatttgaaggcgacgcaggccctggtgctggcaccaacgagagagctcgcccagcagatccagaaggtagtaatggctctgggggactacatgggtgccagctgtcatgcttgtatcggagggaccaatgttagggccgaggtacaaaaactacaaatggaagcaccccacatcatcgtgggaacgcccggacgagtcttcgacatgctgaaccgccgatatctgagtccaaagtacattaaaatgttcgtgctggatgaggcagacgagatgctatccagaggatttaaggaccagatttatgatatttttcagaagctaaattctaatacccaggtggttttgctgtcagccacaatgccaagcgatgtgctggaggtgacaaagaagtttatgagggacccaattcggattctagtcaagaaggaagaactaacactcgagggaatcagacagttttacatcaacgttgagcgagaggaatggaagctggataccttgtgcgatttgtatgagactctgactattacgcaggccgttatattcataaacacccgcagaaaagttgactggctcacggagaagatgcacgctcgggattttaccgtgagcgctatgcatggagatatggaccagaaggagcgggatgttatcatgagggaattcaggagtggtagttcacgggtgttaattaccaccgatcttctcgccagggggattgacgttcagcaggtcagcttggtcatcaactatgatctgccaactaaccgagagaactacatacatcggattgggagggggggacggtttggcagaaaaggcgttgctatcaacatggtaaccgaagaggataaacgaaccctgagagacatcgagactttttacaacacaagcattgaagaaatgcctctaaatgtggccgatctgatatag

SEQ ID NO: 222535 - DNA, 441 bp, synthetic construct
  misc_feature 1..441: note = Description of Artificial Sequence: Synthetic coding sequence
  source 1..441: mol_type = other DNA
atggagcctgagggggtgattgaaagtaattggaatgaaatcgtggattcctttgacgacatgaacctgagcgaatctctgttgcgcggtatttacgcctacggcttcgaaaaacccagtgcgatccaacagagggcaattttaccctgtattaaaggatacgatgtgattgcccaagcacagtcgggtaccgggaagacggccacctttgctattagcatcctgcagcaaattgaactggacctgaaagctacccaggcactggtgctcgcccctacccgggagttggcccagcaggtacgggtagctagcattccaagtttccgggcagacctgggaatgatgagcattatacagggccctgagaagtcctccctgatcactactcttggcggtaggcatggctgtcctaacacactggagacctgttgggtcaactag

SEQ ID NO: 222536 - DNA, 603 bp, synthetic construct
  misc_feature 1..603: note = Description of Artificial Sequence: Synthetic coding sequence
  source 1..603: mol_type = other DNA
atgttcgtgcttgacgaagctgacgagatgcttagcagaggcttcaaggaccagatttatgacatatttcaaaagttaaattccaacacccaggtagtgctgcttagtgcgaccatgccttccgacgtgttggaagtgaccaaaaagttcatgagagatccgatccgtatcctggtgaagaaagaagagcttaccttagaagggatccggcagttttatattaacgtagagcgtgaagagtggaaattggacactctgtgtgacttgtatgaaactctaactatcactcaggccgtgatttttattaacacaaggaggaaagttgactggctcaccgaaaagatgcacgctcgtgactttaccgtttcagcaatggtttgcctgcccgctgcgagcctgttgtgggtgtgtccctccgaggtatcatatctgaaacccggttttctggagcctcgatgcctcccgggattgcttcacatttgtttcttgttccagcatggcgacatggaccaaaaagaaagggatgtaatcatgcgggaattcagatctggaagcagcagggtgctgattacgacagacctactggtttcccgaggcaactag

SEQ ID NO: 222537 - DNA, 1026 bp, synthetic construct
  misc_feature 1..1026: note = Description of Artificial Sequence: Synthetic coding sequence
  source 1..1026: mol_type = other DNA
atgagcgcgagccaagacagtagaagtcgtgataatggccctgacggaatggaacctgaaggcgtcatcgagtctaactggaacgaaatcgtggattcctttgatgatatgaatttgagcgaatcactcctacggggtatatatgcttacggatttgaaaagccatccgcaatccaacagagagccatcctgccatgtattaaggggtatgacgtaatcgcgcaggcccagtccggcacggggaagactgccacgtttgcaatcagcatactacaacagatcgagcttgacctgaaagcgactcaggcactcgtgctcgctccaacgagggaattggctcaacagatccagaaggtggtaatggcgctcggggattacatgggagcatcatgtcatgcatgcataggcggaactaatgtgagagctgaggtgcagaagctgcaaatggaggctccacacatcattgtgggcacacccggacgcgtattcgacatgctgaatcgtcgctatctttcacccaaatacataaagatgttcgtcttagatgaggctgatgagatgctgtcgagaggttttaaggaccaaatttacgacatttttcagaaacttaactcaaacacccaggtcgtgctgctgtcagcaaccatgccttcagacgttctggaagtcacaaaaaagttcatgagagatcccattaggatattggtgaagaaggaggagcttacattggaggggatccgtcagttctatattaatgttgagagggaagagtggaagttggatactctgtgtgacctgtatgagactctgactatcacccaggccgtcatattcataaacacccgtagaaaagttgactggctgactgaaaagatgcatgccagagatttcaccgtctctgcaatgcacggagacatggaccagaaggaacgagacgtcattatgagggagtttcgctcagggtccagcagagtcctgataactaccgatctgctgaacaggagccgatggaccgtgtggccctag

SEQ ID NO: 222538 - DNA, 1224 bp, synthetic construct
  misc_feature 1..1224: note = Description of Artificial Sequence: Synthetic coding sequence
  source 1..1224: mol_type = other DNA
atgtccggcggtagcgctgactataaccgtgaacatggtggacctgagggaatggaccccgacggtgtaatcgaatctaattggaatgagatcgtagataatttcgacgacatgaacttgaaagaatcactccttcgcggaatttacgcttacggatttgagaagccttcagccatccaacagcgcgcaatcataccatgtattaagggctatgacgtgattgcccaggctcagagcggaaccggcaagactgccacttttgcgatatccattctccagcagctggaaattgaatttaaagaaacccaagcccttgttttggcccctacccgcgagcttgcacagcaaattcaaaaggtcattctggctctgggagattatatgggcgctacttgtcacgcctgtatcggaggaactaacgtacgtaacgaaatgcagaagcttcaagcggaagctccgcacatagtggtcggcactccagggagggtgttcgacatgctcaacagaagatacctgagtcccaagtggattaagatgttcgtcctggacgaggctgacgagatgctttcaaggggatttaaggaccagatatatgagatctttcaaaagctgaacaccagcatccaagtggtgctacttagtgccacaatgccgactgacgtgttagaggtcactaaaaaattcatgcgggatcctatccgcatccttgtcaaaaaagaggagcttactctggagggtataaagcaattctacattaacgtggagagggaagagtggaagcttgataccctctgcgacctctatgagacactaaccattacccaggcggtgatctttctgaacactagaagaaaagtggactggctgactgaaaagatgcacgcccgtgatttcacggtctcagctctgcacggggacatggaccagaaagagagggacgtgatcatgagagagttccggagcggctcttcgagggtcctcatcacaaccgacctgcttgctaggggtattgatgttcagcaagtctccctagttatcaattacgatttgcccacaaacagggagaactacattcacagaattggtcgcggagggcgatttgggcgaaagggagttgctatcaactttgttaccgaggaggataagcgtatcctgagggacattgaaacgttttataacaccacggttgaggagatgccaatgaacgtggcagatctcatttag

SEQ ID NO: 222539 - DNA, 939 bp, synthetic construct
  misc_feature 1..939: note = Description of Artificial Sequence: Synthetic coding sequence
  source 1..939: mol_type = other DNA
atgctaacggtgctccggagtctgccattattctcaagggagctcttatttcccgtgctgaaaatccagaaggttatcctggcactgggcgactacatgggtgccacctgccacgcttgtattggaggcactaacgtcaggaatgagatgcagaagttgcaggccgaggcaccccacatcgtagtaggtaccccaggtcgcgtcttcgatatgcttaatagacggtacttgtcccccaagtggattaagatgtttgtgctcgacgaggccgatgaaatgctatcccggggtttcaaggaccagatttacgaaatctttcagaagttgaataccagtatacaggttgtcctcctcagtgccaccatgcccaccgatgttctggaggtcactaagaagtttatgagagacccaataagaatcctggtgaaaaaagaggagctgactctggagggaataaagcagttctatatcaacgttgaaagagaagaatggaagttggacactctctgcgatctgtatgaaactctaacaatcacacaagcagtgatctttctgaacaccagaaggaaggttgactggctgacagagaagatgcacgcacgtgacttcaccgtgagcgccctgcatggcgacatggatcagaaggagcgggacgtgataatgagagagttccgctccggctccagcagggtcctgatcaccaccgatctcttagctagagggattgacgtgcaacaggtttctcttgtcatcaattatgatttaccaacaaacagagaaaactatatacatcgcattggcaggggtgggaggttcgggaggaagggcgtggcaattaattttgtgactgaagaagacaagcgaattctgcgagacattgaaactttttacaacacgacggtggaggaaatgccaatgaacgtggcagatctcatctag

SEQ ID NO: 222540 - DNA, 1227 bp, synthetic construct
  misc_feature 1..1227: note = Description of Artificial Sequence: Synthetic coding sequence
  source 1..1227: mol_type = other DNA
atgagcggagggagcgctgattataatagccgcgagcatggaggacctgagggtatggaccccgacggcgtgattgagtcaaactggaatgagatcgtggacaacttcgatgatatgaatttaaaagagtctttactgcggggaatctatgcctacgggttcgagaagcctagcgctatccaacaacgtgccattatcccctgcatcaaagggtacgatgtgatcgctcaggcgcagagcgggacaggcaagactgccacgtttgctatctctatcctccaacaattagaaatagagtttaaggagacccaagccttggtgttggcccctacgcgcgagcttgctcaacaaatccagaaggttattctcgccctgggggactacatgggcgctacatgccacgcttgtatcggagggacaaacgtccgcaacgagatgcaaaaactgcaagctgaagccccacatattgtggtagggacccccggaagggtattcgatatgctcaatcggcgatatctaagccccaagtggataaagatgttcgtgttagatgaagctgacgagatgctatctcggggtttcaaggatcagatctacgagatcttccagaagctgaatacgtcaatccaggtcgtgttgttgagcgcaactatgcctactgatgtgctggaggtcaccaagaaatttatgagggatcctatccgtatcctagttaagaaagaggagttgactctggaagggattaagcagttctatatcaatgtggagcgcgaggagtggaaactcgacaccctatgtgatctttatgaaacactcacaataacgcaggccgtgatctttttaaacacccgcaggaaagtggattggcttaccgaaaaaatgcatgcccgtgatttcaccgtctccgctctgcacggagacatggaccagaaagaaagagacgtaataatgcgggagtttaggtctggctctagcagggtactaatcaccacagatttgctggctcgcggtatcgatgtccagcaagtgagcctcgttataaactatgacctcccaaccaatcgggaaaactacatccataggatcggccgaggaggcagattcggtagaaaaggagtagccatcaattttgtgactgaggaagacaagcgcattctgcgcgatatagaaacattctacaacaccaccgtggaagaaatgccaatgaacgtggccgatttgatctag

SEQ ID NO: 222541 - DNA, 174 bp, synthetic construct
  misc_feature 1..174: note = Description of Artificial Sequence: Synthetic coding sequence
  source 1..174: mol_type = other DNA
atgagcggcggatctgcggattataatcgtgaacacgggggacctgaagggatggaccctgatggtgtgatcgaatccaattggaacgaaatcgtggataactttgatgatatgaacttaaaagagagtttgttgcggggaatttacgcatacggattcgagaaaccgagttag

SEQ ID NO: 222542 - DNA, 297 bp, synthetic construct
  misc_feature 1..297: note = Description of Artificial Sequence: Synthetic coding sequence
  source 1..297: mol_type = other DNA
atgtcgggagggtccgccgattacaaccgcgaacacggcggtcctgagggcatggacccagatggcgtcatcgaatccaattggaacgagatagtcgacaactttgatgatatgaatcttaaagagtctctgctgcggggaatctacgcctatgggttcgaaaaaccctccgcaattcagcaacgcgcaattatcccttgcatcaaggggtacgatgtgattgcgcaggcccagtccggaaccggcaagacagctacctttgccatctctatactccagcaactggagatcgaatag

SEQ ID NO: 222543 - DNA, 363 bp, synthetic construct
  misc_feature 1..363: note = Description of Artificial Sequence: Synthetic coding sequence
  source 1..363: mol_type = other DNA
atgtcatcatccgcaggctccggccaccagcctagtcagagcagggcaattccaacacggactgtcgccataagtgatgcagcccagctgccacacgactactgtacaaccccgggaggtaccttgttttctactactccgggaggcacaaggataatctatgataggaagttcctcctggataggcggaactcgcccatggcacaaactcccccttgccatttaccgaacattccaggtgtaactagcccaggaacattgatcgaagactccaaggtggaggtcaacaatttgaacaatctgaataaccacgaccggaagcatgccgtgggcgacgacgctcagtttgaaatggatatctag

SEQ ID NO: 222544 - DNA, 738 bp, synthetic construct
  misc_feature 1..738: note = Description of Artificial Sequence: Synthetic coding sequence
  source 1..738: mol_type = other DNA
atgaataataaattcgacgccctgaaagatgacgactcaggggatcacgaccaaaatgaggagaacagcactcagaaagatggcgagaaggagaaaacagaacgcgacaagaaccagtctagctccaagcgcaaagcagtcgtgcctggacccgcagaacaccctctacagtacaactacacgttttggtattcacggcgtacacctggcaggcctaccagttcccaaagctatgagcagaatatcaagcagattgggactttcgccagcgtggagcaattctggagattttactcgcacatggtaagacccggtgatctgactgggcactcagattttcatctcttcaaagaaggcatcaagcccatgtgggaggacgacgccaataaaaacggaggtaaatggataatcagactgaggaagggcttggctagcagatgctgggaaaaccttatcctcgcaatgctaggggaacaatttatggtaggtgaagagatatgtggtgccgttgtaagtgttcggttccaagaagacattatatctatctggaataagacagcctctgatcaggctacaactgcacgaatcagggataccttgaggcgggtcctcaatttgccccctaacaccattatggagtacaagactcataccgatagtataaagatgccaggaagacttggccctcagaggctactcttccagaatctgtggaagcccaggctgaacgtgccttag

SEQ ID NO: 222545 - DNA, 705 bp, synthetic construct
  misc_feature 1..705: note = Description of Artificial Sequence: Synthetic coding sequence
  source 1..705: mol_type = other DNA
atgaataataagtttgacgctttgaaggacgacgattccggcgaccacgaccagaatgaggagaattccacacagaaagatggggagaaagagaagactgagcgcgacaagaaccagtccagcagcaagaggaaggcagtggtacccggtcctgccgaacaccccctgcaatacaactatacgttctggtatagccggagaaccccagggagaccaacctcctcccagtcatacgagcagaacataaagcagatcgggacctttgcctctgtcgagcagttctggcggttttatagccatatggtgcgccctggggacctcactggccactcagacttccacctgttcaaggaggggatcaagccgatgtgggaagacgacgcaaacaagaatggaggaaaatggatcatccgtttgagaaagggtctggcttcgaggtgctgggagaacctgatcctggcgatgctgggtgaacagtttatggtcggtgaggagatctgtggtgctgtcgtgtccgtccggtttcaagaagacattatcagtatttggaataagactgcgagtgaccaggccacaaccgctcgcatccgggacacgcttaggcgagtccttaacttgccaccaaacactataatggagtataagacccacactgacagtattaaagacaattctagtttccgcaacacaaaaatcacgctgtag

SEQ ID NO: 222546 - DNA, 567 bp, synthetic construct
  misc_feature 1..567: note = Description of Artificial Sequence: Synthetic coding sequence
  source 1..567: mol_type = other DNA
atgaataacaaattcgatgcccttaaagacgatgatagtggagaccatgaccaaaacgaagagaatagcacccagaaagacggggaaaaggaaaaaaccgagcgtgacaaaaatcaatcaagttcgaaacggaaagtggagcagttttggcgcttctatagccatatggtgcgcccaggagacttgacaggccactcggattttcatttattcaaagagggcatcaagcctatgtgggaagacgatgctaataaaaacgggggaaagtggataatccgacttcgcaagggtctcgctagtagatgttgggagaaccttatcttagcgatgctgggcgagcagttcatggtgggcgaggaaatctgcggcgcagttgtctccgttagattccaggaggatattatcagcatctggaacaagaccgcaagcgaccaggcgaccacagcaaggattcgtgacaccttgaggcgtgtgttaaacctcccacctaataccatcatggaatacaagactcatacagatagcattaaatacgttcttggagggtatggtcggacgtgcccctag

SEQ ID NO: 222547 - DNA, 357 bp, synthetic construct
  misc_feature 1..357: note = Description of Artificial Sequence: Synthetic coding sequence
  source 1..357: mol_type = other DNA
atgcggggagagcgccgtccactgtgggaggaggaaagtaacgccaaggggggagtgtggaaaatgaaggtccccaaagactcaaccagcacggtatggaaggagctgctgctggcaacaatcggagagcagttcaccgactgcgccgctgcagacgatgaagtgataggggtgagtgtttcagtcagggacagagaggatgttgttcaggtgtggaatgtgaatgctagtcttgtgggtgaggccaccgtcctcgaaaaaatttacgagctgctgcctcatatcaccttcaaggcggtcttttacaaacctcacgaggaacaccacgccttcgaaggagggaggggaaagcactag

SEQ ID NO: 222548 - DNA, 357 bp, synthetic construct
  misc_feature 1..357: note = Description of Artificial Sequence: Synthetic coding sequence
  source 1..357: mol_type = other DNA
atgcgcggagagcggaggcccctgtgggaggaggagtcaaatgcgaaggggggtgtctggaaaatgaaggtgccaaaggatagcaccagcactgtgtggaaggaactgctcctggcaaccatcggtgaacagttcaccgactgcgcggctgcagacgacgaggttatcggggtgagtgtgtctgtccgcgatagagaagacgtggtgcaagtttggaatgtgaatgcttccctcgtgggcgaggctacggtgcttgagaaaatctatgagctgttgcctcatattaccttcaaggcagttttctacaagccccatgaagaacatcatgcctttgagggaggcagaggaaagcattag

SEQ ID NO: 222549 - DNA, 357 bp, synthetic construct
  misc_feature 1..357: note = Description of Artificial Sequence: Synthetic coding sequence
  source 1..357: mol_type = other DNA
atgcgtggcgagcggagacccctgtgggaagaggagtccaatgcgaaagggggtgtgtggaagatgaaagtgcccaaggactcaaccagcactgtctggaaagagctcctgctcgcgacaattggtgaacagtttacagattgtgctgcggcagacgatgaagtcatcggagttagtgtaagcgtgcgggacagggaggacgtcgtacaggtctggaacgtcaatgcttccctggtgggcgaggcaacagttctggagaagatatacgagcttctaccacacatcaccttcaaggcagtcttctataagccgcacgaagagcaccacgcttttgagggcggtcggggaaaacattag

SEQ ID NO: 222550 - DNA, 675 bp, synthetic construct
  misc_feature 1..675: note = Description of Artificial Sequence: Synthetic coding sequence
  source 1..675: mol_type = other DNA
atggctctgcctcccgcagcggctccacctgccggtgctcgggaaccacctggtagcagagctgcagcagctgctgcagctccagagcctccgctcggtctgcaacagctgtctgcgttgcaaccagaacccggaggggtgccactgcattctagttggactttttggcttgaccggagtctgcctggtgcgactgcagcagagtgtgcaagcaacctgaagaagatctacaccgttcagaccgtacagatattttggagcgtatacaataacataccacccgtgacatctctgcccctgaggtgttcttaccacctgatgcgcggagaacggaggcctttgtgggaggaagagagcaacgctaaggggggagtgtggaaaatgaaggtacctaaggattctacttctactgtgtggaaggagctgctcctggctaccattggagagcagttcactgattgtgctgcagccgacgacgaggtcatcggagtaagtgtgtccgttagagatagggaagatgtggtgcaggtctggaatgtcaatgcatcattagtgggcgaggctactgttctcgagaaaatctacgagctgctgccccacataacctttaaggcggttttttataaaccacatgaggaacatcatgcattcgagggagggagaggaaaacactag

SEQ ID NO: 222551 - DNA, 357 bp, synthetic construct
  misc_feature 1..357: note = Description of Artificial Sequence: Synthetic coding sequence
  source 1..357: mol_type = other DNA
atgaggggggaaagacgccctttgtgggaagaggagtccaatgccaaggggggtgtttggaagatgaaggtgcctaaggattccaccagcactgtgtggaaagaactcttgctcgctacaattggggagcagttcaccgactgtgccgctgccgatgatgaggtcattggggtgtcggtatcagttcgtgaccgggaagatgtagtccaggtgtggaatgtgaacgcaagtctagttggcgaagcgaccgtcctggagaaaatttacgagttgctgcctcacattacttttaaggccgtgttttataaaccccacgaagagcaccacgcatttgagggagggagggggaagcactag

SEQ ID NO: 222552 - DNA, 135 bp, synthetic construct
  misc_feature 1..135: note = Description of Artificial Sequence: Synthetic coding sequence
  source 1..135: mol_type = other DNA
atgagaggggagcgtaggcccctatgggaggaggaatccaatgccaagggtggggtctggaaaatgaaggtccccaaagattcaaccagcacagtgtggaaagagctgctcctggcgacaatcggcgagcaatag

SEQ ID NO: 222553 - DNA, 156 bp, synthetic construct
  misc_feature 1..156: note = Description of Artificial Sequence: Synthetic coding sequence
  source 1..156: mol_type = other DNA
atgcgcggagaaaggcgaccactgtgggaagaggaaagtaatgccaagggcggtgtatggaagatgaaggtgcctaaggactccacttccactgtttggaaggagttactactggccacgatcggcgaacagtttaccgactgcgcagcggcttag

SEQ ID NO: 222554 - DNA, 282 bp, synthetic construct
  misc_feature 1..282: note = Description of Artificial Sequence: Synthetic coding sequence
  source 1..282: mol_type = other DNA
atgcgaggggagagaaggcccctgtgggaggaggagagcaacgcaaagggaggggtctggaagatgaaggtgcctaaggattccacctccacggtatggaaggagctgctgttggctacgatcggagagcagttcaccgattgcgccgcagccgacgatgaggtcattggcgtctctgtctcagttcgcgatagggaggatgttgttcaggtgtggaacgtgaatgcttctctcgtgggcgaggctactgtccttgagaagatctatgaactgctgccgtag

SEQ ID NO: 222555 - DNA, 2958 bp, synthetic construct
  misc_feature 1..2958: note = Description of Artificial Sequence: Synthetic coding sequence
  source 1..2958: mol_type = other DNA
atggatcggcgtagtatgggagaaaccgaaagcggggacgccttcctggacctcaagaagcctcccgcttccaaatgccctcataggtacaccaaggaggaactcttggacataaaagaactcccacacagtaaacagagacccagttgtctctcggaaaaatatgactcagacggtgtctgggacccggagaagtggcacgcttcactataccccgcaagtgggagatccagtcctgtggaatccctgaaaaaggaacttgatacggataggcccagccttgtaaggcggatcgtggaccccagggaaagagtgaaggaagacgacctggacgtggtcttgtctcctcaaaggaggagttttggaggcggttgccacgtcactgctgcagtcagttctcgtagaagcgggtctcctctcgagaaggactctgacgggctgcggttattgggaggccgaaggattggcagtggcagaatcatttccgccaggacttttgagaaagatcaccggctatcagacaaagacctgcgtgacctccgggatcgggatcgggaaagagatttcaaggataaaaggttccgcagggagttcggcgactcaaaaagagtgttcggcgaacggcgaagaaatgattcatacaccgaggaggaacctgaatggttctctgccggacccacctctcagagcgagacaatagaactaacaggattcgatgataaaatcttggaggaggaccacaaaggtcggaaaagaacacggagacgtacagcctccgttaaggagggaatcgtagagtgtaacgggggtgtagccgaggaagatgaggttgaggtgattctcgctcaggagccggcagcagaccaggaggtacccagggatgcagtcttgccagaacagagtcccggtgactttgactttaacgagttctttaacctcgacaaggtaccgtgcctggccagcatgatcgaagacgttctgggtgagggatccgtgagcgcttcacggttcagtcgctggttcagcaacccaagtaggtcagggtcaaggagcagctcactgggcagcactccgcatgaggaactagaacgcctcgccggtctcgaacaagcgatcctgtcaccgggacagaattctggcaactattttgctcctatccctttagaggaccacgcagaaaacaaggtagatatccttgagatgttgcaaaaagcaaaggtggacctcaagcccctgttgtcctcactgtctgcgaataaggagaaactgaaagaatctagccactccggcgtggtgttgagtgtggaagaagttgaggctggactgaagggtctcaaagtcgatcagcaggtcaaaaattctaccccctttatggctgagcacctggaagagactctgtccgctgtgactaataatcgccagttgaaaaaagacggtgatatgaccgccttcaacaagttagtgtctaccatgaaggcatcagggaccctgcccagccagcccaaagtaagtcgtaatctggaatctcatctgatgtctccagccgaaatccctggccaacccgttcctaagaacatactgcaagagttacttgggcagcctgtccaacgtcccgctagctccaacttactcagcggattaatgggtagtctggagccaactacatccctgttaggacagcgggctccaagcccacctttgtctcaggtgttccaaacaagggctgcaagtgcggattatcttagacccagaatcccttcgcctatagggttcactcccggaccacagcagcttctcggtgacccattccagggcatgagaaaacctatgtcaccaattaccgcccagatgtctcagttggaattgcagcaggctgccctggagggtttagccctgccgcatgatctggctgttcaggctgccaacttctaccagccaggcttcggaaagccgcaagtggacaggacccgtgacggttttcgcaaccggcaacagcgggtcaccaagagtcccgcacctgtacacaggggcaattcctcttcacctgccccagccgcttctataacttcgatgctgagccctagcttcacacctacctcagtgatacgcaagatgtacgaatccaaagaaaagagcaaagaggagcccgcatctggcaaagcggctttgggagattccaaggaggacactcagaaggcgtctgaagaaaatcttctgtccagcagctcagttccttctgctgatcgagactcatcccctacaaccaactctaaactatccgcccttcaaaggtcaagctgctctacccccctgtctcaggccaaccggtatactaaggagcaggactataggcctaaagccacgggccgaaaaacaccaacactggcatctcccgtaccaactacacccttcctcaggcctgtccaccaggtgcctctagtccctcacgtgcctatggtcaggccagcacatcagctgcacccaggacttgttcagcggatgctggcccagggcgtccacccacagcaccttccttcgctcctgcagacgggagtcctgcccccaggcatggatctgtctcatttgcagggtatctctggacctattctcgggcagcctttctaccccttgccagccgcttcccacccgctgttaaacccccgaccagggactccactgcacctggcgatggttcagcagcagctacagagaagtgtgcttcacccacccggatctggctctcatgcggcagccgtgtctgtgcagaccacgcctcagaatgttccatctcgtagcgggctccctcacatgcacagtcagctagaacataggccttcacagaggagcagcagcccagttggcctcgcaaagtggttcggctccgacgtcttgcaacagcccctcccttcaatgcctgccaaagtgattagtgttgacgaactggaatatcggcagtag

SEQ ID NO: 222556 - DNA, 2436 bp, synthetic construct
  misc_feature 1..2436: note = Description of Artificial Sequence: Synthetic coding sequence
  source 1..2436: mol_type = other DNA
atggatcggcgatcaatgggagagactgaaagcggggacgccttcctggaccttaaaaaaccacctgcttctaagtgcccacacaggtatactaaggaggagttattggacatcaaagagctgccacactccaagcagcggccatcatgtctaagtgaaaaatacgatagtgatggggtgtgggatcctgaaaaatggcacgcttccctatatcccgcatctggccgaagctccccagtggaatccctcaaaaaggaactggataccgacaggcctagccttgttcgaaggattgtgggaattgttgagtgcaatgggggagtggctgaggaggacgaagtagaggtgatcctcgctcaagagccagcagcagatcaggaggtgcctagagacgccgtgctgccagaacaatccccaggcgattttgatttcaacgagttcttcaaccttgacaaggtcccttgtttggctagcatgattgaggacgttcttggggaggggtctgtgtctgcaagccggttttcccggtggttttcaaacccatcccgcagtggatcccgatcctcttctttgggcagcacgccacatgaagagctggaaaggcttgccggtttagaacaggccatcctgagcccaggacagaactccggtaattattttgccccaatccctctcgaagatcacgctgagaacaaggtcgacatcctggagatgctccaaaaagccaaggtggatctaaaacctctactgtctagcttgtctgcgaacaaggagaagctgaaggaatcctcacacagcggggtggtcctgtctgttgaggaggttgaggctggacttaaagggctaaaagtggaccagcaggtcaaaaattctacacctttcatggcagaacacttggaggagaccctgtctgccgtgaccaataatagacagcttaagaaggacggggatatgactgctttcaacaagctggtaagcactatgaaaaggaaccttgaaagccacctgatgagcccagcggaaatccctggtcagcccgtgccaaaaaacattttgcaggagcttttgggccagcctgtgcagcgtcccgcttctagcaacctcctgtccggcctcatgggatctctggagcccacgacatctctattgggacagcgcgctccctccccccctttgtcacaggtgttccagaccagggcggcaagcgccgattacctgcggccaagaatcccctcaccaatcggattcacccctggtccacaacagctgttgggcgacccattccagggtatgcggaagccaatgagccccattacagcccagcagatgagccaactggaactgcaacaggccgcattagagggcctggctcttcctcacgacttagcagtgcaggccgctaacttctaccagccagggtttggcaagccgcaagtggacaggactcgggacggatttcgaaatagacagcaacgagttaccaaatcccctgcgcctgtgcaccgagggaatagcagctccccagcaccggcagcttccatcacaagcatgttgtccccttctttcacgcctacaagcgtgatccggaagatgtatgagtcaaaggaaaaaagcaaagaggagcctgcctccggcaaggccgctctgggagattcaaaagaggacacacagaaagcgagtgaagaaaacttactgagcagctcctccgtgccctccgctgaccgggattctagtcccacgacgaacagtaagttatccgcattacagcggtcctcctgtagcaccccactctcacaagccaatcgctacacaaaagaacaggactaccgaccgaaagccactggtagaaagacaccgaccctggcctctccagtgccaacaacgccttttctgaggccagtacaccaggtgcccctcgtgcctcatgttccgatggttcggccagctcatcagctgcaccctggcctcgtgcagaggatgttggcacagggggtgcaccctcagcacctgccctccctgctgcagacaggagtccttccacctggaatggatctaagccaccttcaaggtatttctggacccatcttagggcagcctttctatcccctgcccgctgccagtcaccctctgctcaaccctcgcccaggcaccccacttcacttggcgatggtgcagcaacagttgcagagaagtgttcttcatccccctgggtccgggtctcatgccgctgccgtttctgtacaaactactcctcagaacgttccgtcgcgttctggcctgcctcatatgcactcccagctggagcacaggcctagtcagcgcagctcaagccccgtgggcctggcgaagtggttcggcagcgatgtcctgcagcagcctctgccgtcaatgcccgctaaggtcatttcagtcgatgaactcgaataccgacagtag

SEQ ID NO: 222557 - DNA, 1923 bp, synthetic construct
  misc_feature 1..1923: note = Description of Artificial Sequence: Synthetic coding sequence
  source 1..1923: mol_type = other DNA
atgatcgaagacgtactaggtgagggctcagtttctgcatccagattttctcggtggtttagtaatccttctagaagcggatcgagaagctcaagtctcggcagcactcctcatgaagaacttgaaagattagctggactggagcaggctattctttctccaggtcagaacagtgggaattatttcgcccctattccacttgaggaccacgccgaaaacaaggtggatatactcgaaatgctgcagaaggccaaagtcgatctgaaacctttactttcttctctcagcgcaaataaggagaagttgaaggaatcctctcactctggcgtggtcctgtcagtcgaggaagtggaggcaggattgaaaggcttaaaagttgaccaacaggtgaagaactctacccctttcatggccgaacacctggaggaaacactttccgccgtgaccaataatagacagctgaaaaaggacggcgatatgactgcatttaataagctggtgtcaacaatgaaggcttcgggtacgctgccatcccagcccaaggtctccgaacttctcggtcagccagtccagagacctgcatcatccaacctgctgagcgggttgatgggtagcctggaacccacaacaagtctactaggacagagggccccatctccacccctgtcacaggtcttccagacacgggctgcctctgcggactacctgcgaccacggattcccagcccgattggatttacccccggaccccaacagctgctgggggacccctttcaaggaatgcgaaagccgatgagtcccatcactgcccagatgtctcagctggagctccagcaggcggctctggaaggccttgctctgcctcatgacttggctgtgcaggctgcgaatttttatcagccagggtttggtaagcctcaggttgaccgcacacgggatggattccggaacaggcagcagcgcgtgactaaaagccctgcccctgtgcatagaggaaactcctccagcccagcccctgccgcaagcatcacctccatgctgtctccttcttttacccctacctccgtgatacgcaagatgtatgaatctaaagagaagtcaaaagaagagcctgcttcgggcaaagctgctctgggcgattcaaaagaggatactcagaaggctagcgaagaaaacctgcttagcagttccagcgtgccctccgcggacagagactcaagcccaaccaccaatagcaagctctcagctctgcagcgctcatcctgtagcacccccctgtcacaggcaaatagatacacaaaggagcaagattaccggccaaaagccactggaagaaaaacacctacactggcttctcccgtccccacaacacccttcttacgccctgtgcaccaggtgccgttggtgccccatgttccgatggtaagacccgcacatcagctgcacccgggactcgtccaaagaatgctggcccaaggtgttcacccccagcacctcccatcattgcttcagacaggagtcctaccccctggcatggatttaagccaccttcagggcatctccgggccaattttgggacagccattctaccccctgccggcagctagtcatccgctgctgaacccgaggcccggaacccctctgcatttggccatggtgcagcaacaactccaaagaagcgttctgcaccctccgggaagcggtagtcacgctgcagccgtgtccgtgcagactactccacagaacgttcccagcagatcaggtctgccgcacatgcactctcaactggagcatcggccttcacagcggagcagttccccagtcggactcgcgaaatggttcggtagcgatgtgctccaacaaccgctgccctccatgccagcgaaagtgataagtgtcgacgaattagagtaccggcagtag

SEQ ID NO: 222558 - DNA, 192 bp, synthetic construct
  misc_feature 1..192: note = Description of Artificial Sequence: Synthetic coding sequence
  source 1..192: mol_type = other DNA
atggaccgcagatccatgggcgaaacagaatccggcgatgcgtttctggacctcaagaaaccaccagcaagcaagtgtccccatcgatacaccaaggaagagctcttagatattaaagaactgccccacagtaagcagcgtccttcctgtctctccgagaaatatgatagtgatggtgtttgggatccctag

SEQ ID NO: 222559 - DNA, 192 bp, synthetic construct
  misc_feature 1..192: note = Description of Artificial Sequence: Synthetic coding sequence
  source 1..192: mol_type = other DNA
atggatcgacgctccatgggagagaccgagtcaggggatgcatttttggacctgaaaaagccacctgcctcgaaatgtccccatagatacacgaaagaagagctcctggacataaaagagctccctcatagtaaacagcgaccctcctgtctgtctgagaagtacgatagtgatggcgtctgggatccctag

SEQ ID NO: 222560 - DNA, 2886 bp, synthetic construct
  misc_feature 1..2886: note = Description of Artificial Sequence: Synthetic coding sequence
  source 1..2886: mol_type = other DNA
atggatcgacgcagcatgggggagactgagtcaggtgacgcttttttagacctgaaaaagccccctgcctcaaaatgccctcatcgttacaccaaggaggaactccttgatatcaaggagctgccccacagtaaacagagaccttcctgtctgagtgagaaatatgactcggacggggtgtgggaccctgagaaatggcacgccagcctgtaccccgcttcaggacgctcttctcccgtagaaagtctgaagaaggagctggacacagatcgaccctcactagtgcggagaatcgtcgaccctcgcgaaagagtcaaggaggatgacctcgacgtcgtgctatcaccccaaaggaggtccttcggaggtgggtgtcacgtcacggccgcagtgtcaagtagacgttctgggtctcctctggagaaggattctgacggcttgaggttgctcggagggagaagaatcggctcagggagaattatttccgccaggacctttgagaaggatcataggttgtctgacaaggacctcagagatctaagggaccgggaccgggagcgtgattttaaagacaagcgattccgtagagagttcggcgatagcaagcgtgtgtttggcgagagaaggcgcaatgactcctacaccgaggaagaacctgaatggttcagcgcgggacccacctcccaatcagagactatcgaactgaccgggttcgatgacaagatcttagaggaagatcacaaaggacgcaagaggacacgcagacgaactgctagcgtcaaggaaggcattgtcgaatgcaacggcggagtggccgaggaggatgaggttgaagttattttggctcaggaaccagcagcagaccaggaggtcccccgagatgcggtgctgcctgagcagagccccggagacttcgactttaacgaattcttcaatctagacaaggttccgtgtctcgctagcatgattgaggacgtgctgggggagggttcagtgtctgcctctaggttctcccgttggtttagcaaccctagtcgtagcggctcccggagcagttcactgggttcaactccgcatgaggaattggaaaggctggcagggctggagcaggccattctgtcgccaggtcagaactctgggaactattttgcaccaatccccctggaggaccacgccgagaataaagtcgatatcttagaaatgctgcagaaagcgaaagtggatctcaaaccactcttgagcagcttgtcagccaataaggagaagctgaaagagagcagccattccggagtcgtgctgagtgtggaggaggttgaggccggtctgaaaggcttaaaagtagaccagcaggtcaagaacagcactcccttcatggctgaacaccttgaagagacattatcggcggttactaataaccgtcagctcaagaaggatggggatatgactgctttcaacaagctcgtctcgactatgaaggcgtcgggaaccctgccttcccagcccaaggtctccgaactgctggggcagcccgttcaacgacctgcttcctctaatttgctctccgggctgatggggagtctggaaccaactacctcactcctgggacaacgtgcaccgtcccccccactgtcacaggtctttcagactcgcgctgcttcagcagactatctgaggccacggattccctctcccattggatttacacctggacctcagcaacttcttggagacccttttcaagggatgaggaaacccatgagcccaatcacggcccagatgtcccagctggaactgcagcaggccgctctcgaagggctcgccctgcctcatgatctggctgtccaagcagccaatttttaccaaccaggcttcgggaaacctcaggtcgatcgtacaagggacggcttcagaaatcgacagcagcgggtgactaagagccccgctcccgtgcatcgtggtaatagcagctctccggcaccagccgcaagtattactagcatgctgagtccctctttcactcctacctcagtgatccgtaagatgtatgagagtaaagagaaatccaaggaggaacctgctagtggcaaggcagctctcggcgacagtaaagaggatactcagaaagccagtgaagagaatctgctctccagctccagcgttcccagcgccgatagagattcctcaccaaccaccaactctaagctgtccgctctccagcgctcatcatgctctacccccctctcccaagctaaccgatataccaaggagcaggactaccgccctaaagccactggcagaaagacaccaaccttggcctctccggttccaaccaccccctttctgagaccagtgcatcaggtgcctcttgtgcctcacgtgccaatggtgcgcccagcccatcagctccaccccggactggttcagcggatgctcgcccagggcgtccatccacaacacctcccgtccctgctccagacaggagtcttaccccctggcatggacttatcacatttacagggaatctccgggcctatcctggggcagcccttctatcctctaccagctgcatcacatcccctgctgaatcctcggcctgggaccccacttcacttggcaatggttcagcagcagcttcagcggagcgtactccacccccctggatctggctctcatgcagcggctgtatctgttcaaacaactccccagaatgttcctagtcgcagtggactacctcacatgcacagccagctcgagcaccggccttctcagcgcagctcttcacctgtgggcctggccaagtggtttggctcggacgttctccagcagcctctgcctagcatgcccgctaaggtgatcagcgtagatgagctggaataccgtcaatag

SEQ ID NO: 222561 - DNA, 2958 bp, synthetic construct
  misc_feature 1..2958: note = Description of Artificial Sequence: Synthetic coding sequence
  source 1..2958: mol_type = other DNA
atggaccggcgaagtatgggggagaccgaatccggggatgctttccttgacttaaagaaacctcctgcatcaaagtgtccacatagatacaccaaggaggagctcctcgatataaaggagctgccgcattcaaagcagcggccaagctgcctcagcgaaaaatacgattccgatggagtgtgggatcctgagaaatggcatgcttcactctatcctgcctcgggcaggtctagtcccgtggaaagtctcaaaaaggaactggatacagacagaccttccctcgtgcgccgaattgtggatccgagagagcgagtgaaagaagatgatcttgatgtcgtgctttccccccagagaaggtcctttgggggaggttgccacgtcaccgccgctgtcagctctaggcggtcaggctctcctctagagaaggactccgatgggttacgtctcctcgggggtagacgcattgggtctggaagaataatctctgccagaacctttgaaaaagatcaccgtctgtcagataaagacctgagagacctgagggatcgagaccgggagcgcgactttaaggataagagatttcgcagagagtttggggattctaagagagtgttcggggaaagaagacggaatgattcctatactgaggaggagcccgagtggttcagtgccggaccaacctcacagagcgaaacgattgagttaactggattcgacgacaaaatactggaggaggaccataaaggcagaaaaaggacacggcgacgcaccgcctccgttaaggaggggattgtggaatgcaatgggggagttgcagaggaggacgaggttgaagtcatcctggcacaggagccagctgcagaccaggaagtgcccagagacgccgtgttacccgagcagtctcctggggactttgattttaatgaattttttaatctggacaaagtcccctgtctggctagcatgatagaggacgtcctcggcgagggatccgtgtccgcctccagattttcacgatggtttagtaatccgtctaggtccgggagccgcagtagctctctgggaagcaccccccatgaagagctcgagagattggccggacttgagcaagccatcctgtcccccggtcaaaattcggggaattactttgccccaatccccctcgaagatcacgccgaaaataaagtggatatcctcgaaatgctgcaaaaggctaaagtcgaccttaagcctctgctaagctccctttcagccaacaaggaaaagctcaaagagtctagccatagtggtgtggtgctgtccgtggaggaagtcgaagctggcctcaagggactcaaggtggaccagcaggtaaagaattccactcctttcatggccgagcacctggaggaaactctgtcggctgttactaacaatcggcagttgaagaaggatggggacatgacagcgtttaacaagctggtgagtactatgaaagccagtgggactcttccttcccagccaaaggtgagtcggaatttagagtctcacttgatgagtcccgctgaaatccctgggcagccagtgccaaagaatattttacaggagctactggggcagcccgtccaacgtcctgccagcagcaacttattgtccggcctgatgggctccctggagcccaccacctccctgttaggccagcgtgcccctagcccacccttgagtcaggttttccaaaccagggccgctagcgcagactacctgaggcccagaatcccatcacccataggtttcacacctggcccacagcagctgctgggtgatccctttcagggcatgcgtaaacctatgtcaccaatcactgcacaaatgtctcagttggagcttcagcaggcggctctggaaggcttggctctcccacacgatttggctgtgcaagcggcaaatttctatcaacccggattcgggaagccccaggtcgataggaccagggacggattccggaaccggcagcagagggtaaccaaatcacccgcaccagtgcacagaggaaacagtagctccccagcaccagctgcgtctattacaagtatgctgagtccctctttcacccctacgagcgtcatcagaaagatgtacgagtctaaagagaagtccaaggaagagcctgccagcggcaaggctgctttgggtgactccaaagaggatacacagaaggcgagtgaggaaaacttactctcatctagcagcgttccatccgcggatagggactcctcccctaccactaactcaaagcttagtgccctgcagcgctctagctgttcaacaccactttcccaagcaaaccgctacaccaaggaacaagactacagaccaaaggccaccggcaggaagactcccacattggcttcaccggtcccaacaaccccttttttgcgacccgtgcaccaagtgccccttgtcccgcatgtgcccatggtgcgccctgctcaccagttgcatcctggtctggtgcagcggatgctggcacaaggggttcacccgcagcacctgccatctctattacagactggggttctccccccaggtatggacctgagccacctgcaggggatctcaggccctatcctggggcaacccttctacccactccccgcagccagccatcctctgcttaaccctcggcctgggacaccattgcatttggcaatggtgcaacagcagctgcaacggtccgtactccatcctcctggatccggctcacacgctgcggctgtctctgtgcaaaccacacctcagaatgtcccctccagaagtggtctccctcacatgcactcccagctggaacacagaccgagccagcgttcttcttcgccagtaggcctcgccaagtggtttggcagcgatgtgctacaacagccactcccatcaatgcctgccaaagtgatcagcgtggacgaactggaatatcggcaatag

SEQ ID NO: 222562 - DNA, 1311 bp, synthetic construct
  misc_feature 1..1311: note = Description of Artificial Sequence: Synthetic coding sequence
  source 1..1311: mol_type = other DNA
atggacaggcgaagcatgggcgagaccgaaagcggagacgccttcttggatctgaaaaaaccaccagccagtaaatgcccccaccggtatactaaggaagaactgctggacatcaaggagctgcctcacagtaaacagaggcccagttgtttgtctgagaagtacgattcggatggggtatgggatcccgagaaatggcacgcaagcctttacccggcttcaggacgttcctcccctgttgaatcactcaagaaggaactcgatacagaccgaccatcactagtgcgcagaatagtggacccgagggagcgggtcaaagaggacgatctcgacgtcgtcttgtccccgcagagaaggagcttcggtggagggtgtcacgtgacagctgccgtgagttcaaggcgatcgggttcgcctctagaaaaagacagtgacggcttaagactgctgggcggacgcagaatcggatctggtaggattattagtgctcgcactttcgagaaggaccatcgcctgagcgacaaagatctgcgggatctgcgcgatagggatcgtgaaagggacttcaaggataagcggtttcgtagagagttcggcgatagtaaacgggtcttcggggagcgcaggaggaatgattcgtacacggaggaggaaccggaatggttttctgcaggcccaacctcccagagcgagaccatcgaactaactggttttgacgataaaatcttagaggaggaccacaagggtaggaaaaggacccgtcgcagaacggcatcagttaaagaaggcatcgtggagtgtaacgggggagttgcagaggaggacgaggtggaggttattctggctcaggagcctgccgctgatcaggaagtacctagggacgccgtcctccccgagcagagcccgggagacttcgatttcaacgaattcttcaatctcgacaaagtgccttgcctggcaagcatgatcgaagatgtgttaggggaagggagtgtgagtgcctcccgatttagccgctggttttcaaacccatcgcgatccgggtctcgatcatcttccttggggagtactccccacgaagaactggagaggttagcaggactcgagcaggctatcctgagccctggacaaaactcaggaaattattttgcccctatccccttggaggatcatgccgagaataaggtggacatcctggagatgctgcagaaggccaaagtggatcttaaaccgctgctgtcctctctgagcgctaataaggaaaaactgaaggagagccttaggttgtcacccaaaaagaagaagaaatag

SEQ ID NO: 222563 - DNA, 567 bp, synthetic construct
  misc_feature 1..567: note = Description of Artificial Sequence: Synthetic coding sequence
  source 1..567: mol_type = other DNA
atggaccgtcggtcaatgggcgagactgaatcgggcgacgcctttttggatctcaaaaaacctcctgccagcaagtgcccacatcgttacaccaaggaagagctcttagacatcaaagaactcccccattctaagcagagacctagctgtctgtcggaaaagtacgacagcgatggggtgtgggaccccgaaaagtggcacgcatcactatacccagcatcaggacgttcaagtccagtggaatcgctgaaaaaggaattagataccgaccgcccatcactggtgcggcgtatcgtggacccaagggaacgtgttaaggaagatgatctggatgtggtgttgtcaccacaacggaggagtttcggcggaggttgtcatgtgacagctgcagtgagctcgagacggtccggaagtcccctagagaaagacagcgacggcttacggttgcttgggggtagacgcatcgggagtggcagaatcataagtgctcggactttcgagaaggaccatagactttctgacaaggaccttagagacctgcgagaccgggatcgcgagagggactag

SEQ ID NO: 222564 - DNA, 747 bp, synthetic construct
  misc_feature 1..747: note = Description of Artificial Sequence: Synthetic coding sequence
  source 1..747: mol_type = other DNA
atggcagatttcgatacttacgatgaccgagcatattcatccttcggcggaggacggggaagcaggggcagtgctggaggtcacgggagtaggtcccaaaaagaactcccaaccgaacccccatacaccgcatatgtcgggaacctgcctttcaatactgtgcagggcgacattgacgcgatctttaaagatcttagcatacggagcgtgaggctcgtgcgcgacaaggatacagacaaatttaaaggcttttgttacgtggagttcgacgaagtggatagtctaaaagaggctttgacttatgacggagcacttttaggggacaggtctctgagggtggacattgccgaaggcagaaagcaggataaagggggattcggcttccgcaaaggcggacccgacgatcgagggatgggcagctctcgagaaagccggggaggctgggactctcgagacgattttaattccggcttccgcgatgatttcctgggaggacggggtggatccagaccaggtgatcgcagaacaggccctcctatgggcagccggtttagggacggaccgcctttaagaggaagcaatatggacttcagggagccaacggaagaggaacgcgcacaaagaccgcgtctgcaattaaagcccaggacagttgccacacccctaaaccaggtggcaaacccaaattccgctatcttcggcggagcccgaccacgagaggaagtcgtccagaaagaacaggagtag

SEQ ID NO: 222565 - DNA, 687 bp, synthetic construct
  misc_feature 1..687: note = Description of Artificial Sequence: Synthetic coding sequence
  source 1..687: mol_type = other DNA
atggccgacttcgatacgtacgatgacagagcgtactcatcttttggcggaggccgaggcagtagaggaagtgccggtgggcacggctctcggtcccagaaggaattacccactgagcctccctacactgcctatgtcggcaatcttcccttcaatacggtccagggcgacatcgatgccatattcaaagatctctccattaggtccgtgcgccttgtgcgcgacaaagacacagacaaattcaagggattctgctacgttgagttcgatgaggtggatagtctcaaagaggctcttacctatgacggggctctgctgggagatcgtagtttacgggtggacatcgccgaaggtcggaagcaagacaaaggcggtttcggctttagaaaggggggacccgatgatcgtggattcagggacgacttcctcggaggtcggggaggctcacggccaggggacaggaggacggggcctcccatgggatcccggttccgagatggccctccactgaggggttcaaacatggattttagagagcccactgaggaggagagagcccagcgccctcggttgcagctgaagccacgtaccgtggctacccctcttaatcaggtcgctaatcctaactcagcaatattcggcggtgctagaccacgcgaggaggttgtgcagaaagaacaggaatag

SEQ ID NO: 222566 - DNA, 1050 bp, synthetic construct
  misc_feature 1..1050: note = Description of Artificial Sequence: Synthetic coding sequence
  source 1..1050: mol_type = other DNA
atggaagctcacaacgcatcagccccattcaactttaccctcccacctaactttggcaagaggccaacagatctggctctttcagtgatccttgtgttcatgttatttttcatcatgctgagtctcgggtgcaccatggagtttagtaagattaaagcccatctctggaagcctaaaggtctagcaatcgcgcttgtggcacagtacggaatcatgcccctcaccgccttcgtgctgggcaaagtgttccggctgaaaaacatagaggctctggctattctggtctgcggatgctcacccggtgggaacctgagcaatgtattctcgctggcaatgaagggtgatatgaatctgtcaatcgtgatgaccacctgcagtactttttgtgccttaggaatgatgcctttgctgttatacatttatagccggggaatttacgacggtgatctaaaggataaagttccatacaagggtatagtgataagcctggtactagtgcttattccctgcacaattggcatcgttctgaagagcaagcgccctcagtacatgaggtacgtgataaagggaggaatgattatcatcctgctgtgtagcgtagccgttactgtgcttagcgcgattaacgtggggaagagtatcatgttcgctatgacacctctgttgatcgcaacctcctcacttatgccctttatcggctttctgcttggatatgtgctcagcgcgctattctgtctgaatggacgctgcaggagaacagtttcaatggagactggctgtcagaatgtacagctgtgctccacgatcctcaacgtcgcttttccacccgaagtcattggacccctttttttcttccccctcttatacatgatttttcagctgggagaaggcttactcctcatcgccattttctggtgctatgagaagttcaaaacccccaaagacaaaaccaagatgatctacactgctgccactacagaagagacaatcccaggcgcattaggaaacgggacatacaagggggaggattgcagcccttgcaccgcttag

SEQ ID NO: 222567 - DNA, 1296 bp, synthetic construct
  misc_feature 1..1296: note = Description of Artificial Sequence: Synthetic coding sequence
  source 1..1296: mol_type = other DNA
atgtctgtgaatgtaaatagatctgtaagcgatcagttctaccgttacaaaatgccaagactgatcgccaaagtggagggtaagggcaatgggattaagacggtgattgtgaacatggtagacgtcgcgaaagcccttaaccgacctcctacctatcctactaaatacttcggttgcgagctgggtgcccagacacaatttgacgtcaaaaacgatcgctatatcgtgaacggctcccatgaagctaacaaattgcaggacatgctggacggttttataaagaagttcgtgctgtgccctgaatgcgagaacccagaaaccgatttgcacgttaatccaaaaaaacagaccataggaaactcctgcaaggcctgtggttatagagggatgttagatacccaccacaaattgtgcacattcattctgaagaaccccccagaaaatagcgattctggcaccgggaagaaggaaaaagaaaaaaagaaccgaaaaggtaaagacaaagagaatggatccgtgtcatcctccgagacccctccgcctccccctccccctaatgaaataaaccccccaccacacacaatggaagaggaagaggatgatgactggggggaagacacgactgaggaagcccaaagacgacgaatggacgagatctcggatcacgccaaggtgttgaccttgagcgacgacctggagaggacgattgaggagagggtcaacattctgtttgactttgttaagaagaagaaggaagagggcgtcatcgattcttcggataaggaaatcgtggcagaagctgagcgccttgacgtcaaggccatgggccctcttgtgctaacggaggtgctgtttaacgagaaaattcgcgagcagattaaaaaatacagaaggcactttctgcgattctgtcacaacaataagaaagctcagagatacttactccacgggttagaatgtgtggttgctatgcatcaagctcagctgatttccaagatcccccacatactgaaagagatgtatgatgccgatttactggaagaagaggtgattatctcttggtcagagaaggcttcaaagaagtacgtcagcaaagaactggcaaaagagattagggtgaaagccgaaccgtttatcaagtggctaaaggaggccgaggaggaatccagcgggggagaggaggaagacgaggatgagaacattgaggtggtgtatagcaaggccgcttctgtcccgaaggtcgaaacagtgaaatccgacaacaaagacgatgacattgacatagatgctatctag

SEQ ID NO: 222568 - DNA, 603 bp, synthetic construct
  misc_feature 1..603: note = Description of Artificial Sequence: Synthetic coding sequence
  source 1..603: mol_type = other DNA
atgagcgtcaacgtgaaccggagcgtgtctgatcagttttacaggtacaaaatgcctcgcctgattgcaaaggtcgagggtaaagggaatgggattaaaaccgttattgtaaacatggttgatgtggctaaagctctcaaccggcctcctacttatcctactaaatacttcggatgtgaactcggtgcccagacccaatttgatgtcaagaacgaccgatacatcgtgaatgggagccacgaggctaataaactgcaggatatgttggacggttttatcaagaagttcgtgctttgccctgagtgtgaaaaccccgaaacggatctgcacgttaaccccaagaagcagactatcgggaacagctgtaaggcatgtgggtaccgagggatgcttgatactcaccataagctgtgtacctttatccttaaaaatccccctgagaacagcgactccgggacgggcaaaaaagaaaaggagaaaaagaatcggaagggcaaagataaggaaaatgggtccgtctcttcctcagagaccccaccacctcccccacctccaaacgagattaacccacccccacatacgatggaggaagaggaggattag

SEQ ID NO: 222569 - DNA, 441 bp, synthetic construct
  misc_feature 1..441: note = Description of Artificial Sequence: Synthetic coding sequence
  source 1..441: mol_type = other DNA
atgtcagtcaatgtgaacagaagcgtctctgatcaattctacagatacaaaatgcctcgccttattgctaaggtcgagggtaagggaaacggaattaaaaccgtcatcgttaatatggtagacgtggcaaaggcccttaatcggcctccaacgtatcccacaaaatacttcggatgcgagctcggcgcacagacacaatttgacgtgaagaatgaccgttacatcgtcaatggctcacacgaggcaaataaactgcaagacatgttagatggattcattaaaaaattcgtcctttgtcccgaatgcgagaatcctgaaaccgacctgcacgttaaccccaagaaacaaactatcggtaacagctgtaaggcatgtggctatcggggaatgttagacacgcaccacaagctgtgcacttttatcctcaagaatcccccatag

SEQ ID NO: 222570 - DNA, 1296 bp, synthetic construct
  misc_feature 1..1296: note = Description of Artificial Sequence: Synthetic coding sequence
  source 1..1296: mol_type = other DNA
atgagtgtgaatgttaatcgctctgtctcggaccagttctatcgttacaagatgccacggctgattgctaaggttgagggaaagggaaatgggatcaaaaccgtaatcgtcaatatggtagacgttgccaaagccctcaacagaccgcctacgtatccaacaaagtactttggctgtgagctcggcgctcagacgcaatttgatgtgaagaacgatcgatacatcgtgaacgggtcccacgaggccaacaagctccaggatatgttagatggcttcatcaagaagtttgttttgtgtcccgaatgtgagaacccagaaaccgacctgcatgtgaatcccaagaagcagacaattggaaactcgtgtaaagcttgtggctaccgaggcatgctcgacactcaccataagctctgtacatttatcttgaagaacccccctgaaaatagcgattcaggaacagggaaaaaagagaaggaaaaaaagaacaggaagggcaaggataaggaaaatggaagcgtgtcaagtagtgagacacctcctccccctcccccacccaatgagatcaatcctcccccacacacaatggaagaagaagaagatgacgactggggcgaagataccactgaggaggcacagagaaggcgcatggacgagatttcagaccacgctaaagtcttgacactttctgacgatctggaaaggactattgaagaacgagtcaatattctgtttgacttcgttaagaagaagaaggaagaaggcgtcatagactctagtgataaagagatcgtcgcagaggctgaacggctggatgtgaaggctatgggacctctagtgctgacggaggtcctgtttaacgagaagatacgcgagcagataaagaagtatagacgccatttcctccgtttctgccacaacaacaaaaaagcacagaggtatctcttgcatggtcttgagtgcgtggttgccatgcaccaggctcagctgatttccaagatccctcatattttaaaagaaatgtatgacgccgacctgctcgaagaagaagttatcatctcctggagtgaaaaagccagtaaaaaatatgtatccaaagaacttgcaaaggagattcgagtgaaggcagaaccctttatcaagtggctgaaagaagccgaggaggaatcctcaggtggtgaggaggaagatgaggacgagaatatcgaggtcgtgtacagtaaagccgcaagcgtgcctaaggtcgaaacggtcaagtccgataataaagatgacgacatcgacattgatgccatctag

SEQ ID NO: 222571 - DNA, 210 bp, synthetic construct
  misc_feature 1..210: note = Description of Artificial Sequence: Synthetic coding sequence
  source 1..210: mol_type = other DNA
atgtccgtcaacgtgaaccggagcgtgtcagaccagttttacagatacaagatgccacgcctcattgccaaagttgaggggaagggcaacggaataaagacagtaatcgtcaatatggtggacgtagccaaggcactgaaccgcccacctacataccccacaaagtactttggatgcgagcttggtgcccaaacacaattcgacgtgtag

SEQ ID NO: 222572 - DNA, 330 bp, synthetic construct
  misc_feature 1..330: note = Description of Artificial Sequence: Synthetic coding sequence
  source 1..330: mol_type = other DNA
atgtccgtgaacgttaaccgctcggtgtctgaccagttttatcggtacaaaatgccacgactgattgcaaaagtggagggaaagggcaacggaataaagaccgtgatagtcaatatggtggacgtggccaaagcccttaaccgacctcccacgtatcctactaaatattttgggtgtgaacttggagcacagacccagttcgacgttaagaacgaccggtacattgtgaacggaagccacgaagcaaataagctgcaggacatgttggatggcttcataaagaaatttgtgctctgccctgaatgtgaaaaccccgagaccgacctgtag

SEQ ID NO: 222573 - DNA, 306 bp, synthetic construct
  misc_feature 1..306: note = Description of Artificial Sequence: Synthetic coding sequence
  source 1..306: mol_type = other DNA
atgtcagttaacgtgaacagatccgtttctgatcaattttataggtacaagatgcctcgcctcatcgccaaagtggaaggaaagggtaacgggatcaaaaccgtgatcgtgaatatggtggacgtcgccaaagcccttaatcgtcctcccacctatccgaccaaatatttcgggtgtgaactgggagctcaaactcagtttgatgtgaagaacgatcgttacatcgtgaacggcagccacgaggcaaacaagctacaggatatgctggacggattcataaagaaattcgtgctctgccccgagtag

SEQ ID NO: 222574 - DNA, 156 bp, synthetic construct
  misc_feature 1..156: note = Description of Artificial Sequence: Synthetic coding sequence
  source 1..156: mol_type = other DNA
atgtccgttaacgtgaaccggagcgtctccgatcagttctacaggtacaaaatgcctagactaattgcaaaagtcgagggaaagggcaatggcatcaaaacagttatcgttaatatggttgacgtggcaaaagccctgaataggccccctacctag

SEQ ID NO: 222575 - DNA, 330 bp, synthetic construct
  misc_feature 1..330: note = Description of Artificial Sequence: Synthetic coding sequence
  source 1..330: mol_type = other DNA
atgtccgtgaatgtgaatcgtagcgtgtcggatcagttctatagatacaagatgcctcggctgattgcaaaagtggagggaaaggggaacggcattaaaacggtgatcgtgaacatggtagatgtagccaaagcactgaacagaccacccacctacccaacgaaatacttcggatgtgaactgggagctcagactcagttcgatgtgaaaaatgatagatacatagtcaatggatcgcatgaggccaataagctgcaagatatgctggacggcttcataaaaaaatttgtgctctgcccagagtgtgagaatcctgaaaccgatctgtag

SEQ ID NO: 222576 - DNA, 555 bp, synthetic construct
  misc_feature 1..555: note = Description of Artificial Sequence: Synthetic coding sequence
  source 1..555: mol_type = other DNA
atgtgtgggactggaggtactgattccaaaacaagacgaccccctcacagagcaagttttctaaagcggctggaatcgaagccactcaagatggctgatgatctggactttgaaacgggcgacgccggtgcctctgcaactttcccaatgcagtgtagcgcactccgtaagaatggtttcgtggtgttgaaagggagaccctgcaagattgttgagatgagtacaagcaaaaccgggaagcacggtcatgcaaaagtgcatcttgttgggatagatatcttcactgggaagaagtatgaagatatatgtccatcgactcacaacatggatgtcccaaatataaagcggaatgatttccaattgataggtatccaggacgggtacctctccctgttacaggactcaggagaggtgcgcgaggatcttcggctgcctgagggggatttgggcaaggagatcgagcagaagtacgactgcggggaggagattttgatcactgtgctctccgccatgacggaggaggccgcagtggccattaaggcgatggccaagtag

SEQ ID NO: 222577 - DNA, 465 bp, synthetic construct
  misc_feature 1..465: note = Description of Artificial Sequence: Synthetic coding sequence
  source 1..465: mol_type = other DNA
atggcggatgacctagacttcgaaacaggtgatgcaggcgcaagcgctaccttccccatgcagtgttctgcacttcgtaaaaacggattcgtggtgctgaaagggaggccatgcaaaattgtggagatgagtactagtaaaaccggaaagcacggacatgccaaggtgcatttagtgggaatcgatatcttcactggcaaaaagtacgaagacatctgtccatccactcataacatggatgtgccaaatatcaagaggaatgacttccagctgattggaattcaggacggatatctaagtctcctgcaggattcgggggaggttagagaggatctgcgtctgcctgagggcgatctgggtaaagaaattgaacaaaaatatgactgcggcgaggaaattcttatcaccgtgttaagcgctatgacggaagaagctgcagtcgccatcaaagctatggcaaaatag

SEQ ID NO: 222578 - DNA, 645 bp, synthetic construct
  misc_feature 1..645: note = Description of Artificial Sequence: Synthetic coding sequence
  source 1..645: mol_type = other DNA
atgacttggacatcccgtcaggaaatgcagggccctcaacctccttctcaatgttctgcccaacattatgtgaggatggcactgtggtgctctaaggctggccacgtgaggtcatcacgctgtctgttgcgcaggcttgcttctaccgcgacacctcgactggagttccacttgcggatcttgcctagtccctgtctccaatatctttggaggtctcagcaacaagcagccaattcagccgattttccgctgacactgttactcctgagcgactgcttctgtcttgccctgtcgctccatacccatagtgacaactacacctgttccccggtgttcagcctgttttgtggttacccatccgtgccagccagcttctctggctctcccagtgtctcacctgccctctgccaatccttgcagttcatcggcctttatgcactggcgatccagctgctgttgccctattcatggttcagcttatttctgtcgagcctggaaccactgctgtccggctgctttcatcacgttgcacagggtttcagtaactctacaccttcccctggcggtactccagcatctattctgtccttccaggtcacactgctgctgaggagccccgtcctcgccttcccactggagttgtag

SEQ ID NO: 222579 - DNA, 465 bp, synthetic construct
  misc_feature 1..465: note = Description of Artificial Sequence: Synthetic coding sequence
  source 1..465: mol_type = other DNA
atggcagatgatctggattttgaaaccggtgacgcgggagcttcagctacatttccaatgcagtgttccgccctgcgtaaaaatggattcgtagtcctgaaagggcgaccctgcaagatcgtcgagatgtcaacaagtaagactggcaaacacggccacgccaaagtccatctcgtgggtatcgacatcttcactggaaaaaaatacgaggatatatgcccgagcacacataacatggacgtccctaacattaagcgtaatgacttccagctgatcgggatccaagacggatacttaagtctgctgcaggatagcggggaggttcgagaagacttgagattgcctgaaggagacctgggaaaagaaattgaacagaagtacgattgtggggaagaaatcctgattaccgtcttatcagcgatgaccgaggaagccgcagtggcaattaaagccatggcaaaatag

SEQ ID NO: 222580 - DNA, 465 bp, synthetic construct
  misc_feature 1..465: note = Description of Artificial Sequence: Synthetic coding sequence
  source 1..465: mol_type = other DNA
atggcagacgatcttgattttgaaaccggtgacgccggagccagcgcaactttccccatgcaatgcagtgcgctgcggaaaaacgggtttgtggtgctgaaggggaggccttgcaaaatcgtcgaaatgtccacttctaaaaccggtaagcacgggcatgctaaggtacatcttgttggcattgacatctttacagggaagaaatacgaagatatctgtccatcgacacacaacatggacgtgcccaacatcaaacgcaatgactttcagctcatagggatacaggacggctacctcagtctccttcaagatagcggcgaggtgcgggaagacttaagacttccagaaggggacctcggcaaggagattgagcaaaagtacgactgcggagaagagatattgattactgttctgtcagccatgaccgaagaggccgcagtcgctatcaaagccatggcaaaatag

SEQ ID NO: 222581 - DNA, 462 bp, synthetic construct
  misc_feature 1..462: note = Description of Artificial Sequence: Synthetic coding sequence
  source 1..462: mol_type = other DNA
atggcagacgagattgacttcaccactggagatgcaggcgcatccagcacctatcctatgcagtgctctgccttaagaaagaatgggttcgtggtcctcaaaggtaggccatgtaaaatcgtggagatgtctacctcgaagacagggaagcatggacacgccaaggtgcacctcgtggggattgatatttttaccggaaagaagtacgaggacatctgcccatctacacataacatggacgtgcccaacatcaaaagaaatgactaccagctgatctgtattcaagacggatatctgagtttactcactgaaaccggtgaagtcagagaggacctgaagctgcctgagggtgagctaggcaaggagattgaaggaaaatacaacgccggagaggacgttcaagtgtccgttatgtgtgcgatgtcagaagagtacgcagtcgctataaaaccgtgcaagtag

SEQ ID NO: 222582 - DNA, 738 bp, synthetic construct
  misc_feature 1..738: note = Description of Artificial Sequence: Synthetic coding sequence
  source 1..738: mol_type = other DNA
atggctgtccgggcttcctttgagaacaactgcgagattgggtgtttcgccaaactgaccaatacgtattgcctggtagccattgggggttccgaaaacttctactcagtcttcgagggggaactgagcgacacaatccctgtggtgcatgcgtctatcgccggatgccgcataattggaaggatgtgcgtgggaaaccgtcacggtctgctggtccccaacaatacgactgaccaggagttacaacatattaggaatagcctgcctgatacggtgcagatcaggagggtggaggaacgactgagcgcattggggaacgtgaccacttgcaacgactacgtagcccttgtgcaccccgacttagaccgcgagacggaagagatcctggccgatgtgctgaaggtagaagtgtttaggcagacggtggccgaccaggttctggtggggtcctactgcgtattctccaatcagggcggtttggtccatcccaagacatccattgaagaccaagatgaattatcatccctcttgcaggtgccgctggtggctggaaccgtaaatcgcggatccgaagtgatagcagccggaatggtggtcaatgattggtgcgctttttgcggtttggataccacatcaacggaactcagtgtggtagagagcgtctttaaacttaacgaggcccagccctcaacaattgctacctcaatgagagacagcctgatcgatagcctgacgtag

SEQ ID NO: 222583 - DNA, 681 bp, synthetic construct
  misc_feature 1..681: note = Description of Artificial Sequence: Synthetic coding sequence
  source 1..681: mol_type = other DNA
atggccgtgagggcttcattcgaaaacaactgcgaaatcgggtgcttcgccaagctgaccaacacatactgccttgtcgctatcgggggatctgagaacttttataggtgcggaggctcgcccggtgcttacggtgggggtgaggcctgtgccggagtgaaatcttctggctccggaagggtgccagcccctctcccgcgacaccacagagtccatgtccccacagtttgctcaagagccagcagtccgatacctagcccatggtgtactcgtctgagtcctgccgctgcttcaagcggggcatgtgtgtgggagaccgaggagatccttgccgacgtgctcaaggtggaggtgttcaggcaaaccgtggcggaccaggtcctggtcggctcctactgcgtcttttccaatcaaggcggattggtgcacccaaagacttccatcgaagatcaagacgaactgagttcacttctccaagtgccactggtcgcaggaaccgtcaataggggcagtgaggtgatcgcagccggtatggtggtgaacgattggtgtgcattctgcggtctggacactacaagtacagagctgagtgtagttgaatccgtgttcaagctgaatgaagcgcagccaagcaccatcgcgacctcaatgcgggattcgcttattgacagcctgacttag

SEQ ID NO: 222584 - DNA, 738 bp, synthetic construct
  misc_feature 1..738: note = Description of Artificial Sequence: Synthetic coding sequence
  source 1..738: mol_type = other DNA
atggccgttagagccagcttcgaaaacaattgtgaaataggttgcttcgccaagctcaccaatacctactgtcttgtggccatcgggggtagcgagaacttttactccgtctttgagggggagctgtctgataccatccccgtcgtccatgcctctatcgcagggtgcaggataatcggacggatgtgtgtcggaaatcgccatgggcttctggtgcccaataatacaactgatcaggagctgcagcacataaggaactcactccccgacacggttcagatccgaagagtggaagagcgcctgagcgccctcggcaatgtgaccacttgtaacgattacgttgccctcgtgcatccagatctggaccgagaaacagaggagatactggctgatgtgctgaaggtagaagtatttcgtcagactgtggctgaccaggttctagtgggatcgtactgcgtgttctctaatcaggggggacttgtgcaccctaagacgtcaatcgaagaccaggatgaactcagctccttactgcaagtacctttggtggcaggaaccgtcaatcggggtagcgaggtaatcgctgccggaatggtggtcaacgattggtgtgctttctgtggtcttgacaccacctcaactgagctaagcgtcgtggagtctgtctttaagttgaatgaagcccagccatccacaatcgccacctcaatgagggatagtcttatcgactcgctgacatag

SEQ ID NO: 222585 - DNA, 327 bp, synthetic construct
  misc_feature 1..327: note = Description of Artificial Sequence: Synthetic coding sequence
  source 1..327: mol_type = other DNA
atggcagtccgtgccagcttcgaaaataactgcgaaattggctgttttgctaagcttaccaatacgtactgcttggttgcgataggcggaagcgagaatttttatagcgtctttgaaggcgaattgagcgatacgatcccggtcgtccatgccagcatcgcaggctgtcgcatcattggacgtatgtgcgtgggtaatagacacggactgcttgtacctaataacactaccgaccaagaactgcagcacattcggaacagcctgcctgatactgttcaaatccggcgagttgaggagcgcctgtcagcactagggaacgttacttag

SEQ ID NO: 222586 - DNA, 1314 bp, synthetic construct
  misc_feature 1..1314: note = Description of Artificial Sequence: Synthetic coding sequence
  source 1..1314: mol_type = other DNA
atggcagacgatccgtctgcagccgacaggaacgtggagatctggaagatcaaaaaactgattaagtctctagaggccgctcgaggcaatggaaccagcatgatttctcttattatccccccaaaagaccagatcagcagagtggcaaagatgttagctgatgagtttggtacggccagcaatataaagtcccgggttaatcgcctgtctgtgctgggtgcaattactagcgttcaacagcgtctcaaactgtacaacaaagtgccaccaaatggcctggtcgtttactgcgggactatcgtgaccgaggagggaaaggagaagaaggtgaatattgatttcgagccattcaaacccataaacacgtccttatatctgtgcgacaataagttccatacagaagctctcaccgctctgttaagcgacgactctaagttcggattcatcgtcattgacggatccggagccttgttcggcacactgcagggcaacactcgggaagtacttcacaagtttacagttgatttgccaaagaaacatggcaggggcggtcagagtgcacttcgattcgcacgtctccggatggagaagaggcacaattatgtccgtaaggttgccgaaaccgccgtgcagctctttatctcaggcgacaaagtgaacgtagccggactcgtcctcgcagggtctgccgactttaaaacagaactgtcacagagtgatatgttcgaccagagactgcagagtaaagttctgaaattggtggatatctcatatggaggagagaacggatttaatcaggccatcgagctctcaaccgaagtgctgagcaatgtaaagttcatacaggaaaagaagctgatcgggcgatacttcgatgaaatcagccaggacacaggcaagtattgctttggtgtggaagacaccctcaaagcactggagatgggcgctgttgaaatactgattgtttatgaaaatttagatataatgcgttacgtattacattgtcaagggacggaggaggagaaaattctttacttaactcctgagcaggagaaggacaagagccattttacagacaaggagaccggtcaggaacacgaactgatcgaaagtatgccactgctggaatggtttgccaacaattataaaaagtttggagctactctcgagattgtgactgacaagagtcaggaaggcagtcagttcgtgaaagggttcggcggaatcgggggaattctgaggtatcgagtcgactttcaaggaatggaatatcaggggggagacgacgagttttttgacctagacgactactag

SEQ ID NO: 222587 - DNA, 1215 bp, synthetic construct
  misc_feature 1..1215: note = Description of Artificial Sequence: Synthetic coding sequence
  source 1..1215: mol_type = other DNA
atgatttctctcatcattccccctaaggatcaaatatctagagtcgccaagatgctggcggacgagtttggaaccgcctctaatatcaagtcccgggtgaatcgtctgtcagtgttgggagccatcacgagtgtacagcaaagattaaaactgtacaacaaagtccctcccaatgggctggttgtctactgtggaaccatagtaaccgaagaaggcaaagaaaagaaggtgaatatagattttgagccgtttaaacctatcaacacttccttgtacttatgcgataacaagttccacaccgaggcactaactgctctactgagtgatgattcaaaatttggcttcattgtgatcgatggctcgggtgctctcttcgggacacttcagggcaacaccagagaggtactgcacaaattcactgttgacttgcccaagaagcacgggaggggtggccagtcggccctgcgtttcgctcggttgagaatggagaaaaggcacaattacgttagaaaggtcgcagagaccgctgtccaactgtttatatctggcgacaaggtgaacgtggctggcctagtactcgcagggagcgcagatttcaagaccgaactgtcccagagcgatatgttcgaccagagattacagtctaaagtgctcaaacttgtggatatctcttatggcggagaaaacgggttcaatcaggcgatcgaactgtcaaccgaggtgttatcaaatgtcaagttcatccaagaaaaaaaactgatcgggagatattttgacgaaatttctcaggacactggcaagtactgcttcggggtcgaggacactcttaaggcccttgaaatgggtgctgttgagatactgattgtgtacgagaacctggatatcatgcggtacgtgctgcactgtcagggaactgaggaggaaaagatactctacctgactcctgagcaggagaaagataaaagccatttcaccgataaggaaaccgggcaggagcatgagcttatagagagcatgcctctcctggaatggtttgcaaataactataagaaattcggggcaacactggaaatagtgacagacaaatcacaggagggcagtcagtttgttaaggggttcgggggaatagggggaatcctgagataccgggtggatttccaggggatggaatatcagggcggagatgatgagttttttgacttggacgactactag

SEQ ID NO: 222588 - DNA, 1272 bp, synthetic construct
  misc_feature 1..1272: note = Description of Artificial Sequence: Synthetic coding sequence
  source 1..1272: mol_type = other DNA
atgaagcaggacgtactcaattgcaccgagggcccaatccacagtaatggaacctccatgatctccttaattatacctcccaaggaccagatctcccgggtggctaagatgctggccgacgaattcggcaccgccagtaacatcaaatctcgcgtgaatcgactgtccgtactcggggctataactagcgtgcagcaacggctgaagttatataacaaggtcccaccgaacggcctggtggtctattgcgggaccatagtgaccgaagagggaaaggaaaagaaggtgaacattgattttgaacccttcaagccaattaacacatcactgtatctctgcgacaataaatttcataccgaagcactaacagccctactatcagatgattccaaatttggctttattgtgatcgatgggagcggagccctgtttggaacgttacagggcaacacaagagaggtcctgcacaagttcaccgtggacttgccaaagaaacacgggaggggcggacaatctgcactgcggttcgcgagactgcggatggagaaaaggcataactacgtgcgtaaagtagccgaaacagctgttcagctgttcatatccggggacaaggtgaacgtcgccggacttgtgttggctgggtcagccgacttcaagaccgaacttagtcagtcagatatgttcgatcagcgcctgcaatccaaggtgttgaaactcgtcgacataagctatggcggagaaaacgggttcaaccaggcaattgagctctcaaccgaagttttatccaacgtgaagtttatccaagagaaaaaattgattggccgatacttcgacgagatcagccaggataccggcaagtattgtttcggcgtggaagatactttgaaggccttagaaatgggcgcagttgaaatcctcattgtgtacgaaaatctggatatcatgagatacgtgttgcattgccagggcaccgaggaggagaagatactctatctgacccccgagcaggaaaaggacaagtcacacttcaccgataaagagaccggacaggaacatgagctgatagagtccatgccacttctggagtggtttgctaacaactacaaaaaatttggcgcaactcttgagattgtgaccgataagtcccaggaagggagtcaattcgtaaagggatttggagggattggaggcatcctgcgctaccgcgttgatttccaggggatggagtatcagggcggagacgacgagttcttcgacctggacgactactag

SEQ ID NO: 222589 - DNA, 1224 bp, synthetic construct
  misc_feature 1..1224: note = Description of Artificial Sequence: Synthetic coding sequence
  source 1..1224: mol_type = other DNA
atggagtcccgcaaggacatggtggtgtttctagacgggggacagctgggcaccctggtgggaaagcgggttagcaatttgagcgaagctgtcggttctccgctcccagaaccgccagagaagatggtgccaaggggttgtctttcaccacgcgctgtgccacctgctactcgcgagaggggcggaggaggccctgaggaagagccagtggatggcctggcaggcagtgccgctgggcctggagctgagcctcaggtggctggggcagccatgctgggtcccggacccccagccccttccgtggattcactttcagggcaaggccaacctagcagttctgacaccgaaagcgatttttacgaggagatcgaagtttcctgcacccctgattgcgccaccggaaacgctgagtaccagcactcaaaggggtctggcagtgaagcccttgtgggcagtcctaacgggggatctgaaacccccaagagtaatggaggttctgggggaggtggctcacagggcacgctggcctgcagtgcgagcgaccagatgcgcaggtatcgtacggcattcactcgcgaacagattgctagacttgagaaggaattctatagggaaaactacgtctcgcggccacgcagatgtgaactggccgcagcactgaatctgccggagactactattaaggtgtggttccagaatcggagaatgaaggacaagaggcaaagattagcaatgacctggccccacccagcggaccctgctttttatacatacatgatgtcacatgccgcagccgctggcggactcccttatccgttcccttcccacctgcccctgccgtactatagcccagtaggcctgggggctgcctcagccgctagtgcggctgcaagccctttttccggttcactaaggcccctcgacacatttcgagttctgtcccagccttaccctagacccgaactgctgtgtgcctttcgacacccccctctgtatccagggccagcacatggtctcggtgccagtgccggaggcccttgttcttgtttggcctgtcatagtggtccggcaaatggactcgcaccgcgagctgcggcagcgagcgattttacatgcgcttccacctctcgttctgattcatttcttacatttgcccctagcgtgctatccaaagcatcctccgtcgcgctggatcagcgggaagaagtgcccttgacccgctag

SEQ ID NO: 222590 - DNA, 678 bp, synthetic construct
  misc_feature 1..678: note = Description of Artificial Sequence: Synthetic coding sequence
  source 1..678: mol_type = other DNA
atgaggcggtaccggacagcatttactcgggaacagattgcacgtctcgagaaggagttctacagggagaattatgtgtccagaccccgtcgatgcgagctcgctgctgcccttaatctgccagaaacaactatcaaggtgtggttccagaaccgtcggatgaaagacaagcgacagcggctcgccatgacgtggccccaccccgctgacccagccttttacacctacatgatgtcacatgccgctgccgctggcggacttccctatccattcccatcacatctcccgctgccctactatagtccagttggactcggagccgcttccgcggcatcagctgcggcaagtcccttctctgggtcacttcgacccctcgatacattcagagtgcttagtcagccatatcctcggcctgaactgctctgtgcctttcgccacccccctttataccctggacctgcacacgggctgggagctagcgccggtggcccttgcagttgccttgcttgccactcaggcccagcaaacggtctcgctccaagagcagctgctgccagtgattttacatgcgcctcgacctccaggagtgactcatttctgacctttgcacctagtgtgttgagtaaggcctcctccgtggcgcttgatcagcgggaggaggtccctctgactcgctag

SEQ ID NO: 222591 - DNA, 1431 bp, synthetic construct
  misc_feature 1..1431: note = Description of Artificial Sequence: Synthetic coding sequence
  source 1..1431: mol_type = other DNA
atgatggagaggatccgtaaagaaatgatcttgatggagcgcggactgcacagcccgaccgctgggaagcggtttagcaatctatcaaacagcgccggaaacgccgtactggaagccctcgaaaattcacagcaccctgcccgactctcccctaggttacctagcgccccattacactccgctttgggagagctgccagccaaagggaagttcgagattgatacactcttcaacctacagcataccggaagcgaatccactgtgtccagcgagatctcgtccgctgccgaatcccgaaaaaagcccggtcattacagcgaggcagcagccgaggcagacatgagtagcgatgtggaggtgggttgctccgctctgcgtagccctggcggtcttggggctgcacagctaaaagaaaataacggaaagggatatgcagagagtggctcggccgctggcactacaacatctgcatctggttcaggacttggaagtttgcacggaggaagcggcggatctggcggatcagccgctctcggcggatccgggtccggagctgaccaggttaggcggtatcgaactgcatttacccgcgagcaaatcgcaagactggagaaggaattttatagagaaaactacgtctctcggcctagaaggtgtgagcttgccgcagcactcaacctgcccgaaactaccattaaggtatggtttcagaaccgacgtatgaaagataaacgtcagcgtctcgccatgtcatggcctcatccagcagacccatctttttacacatacatgatgacacacgctgccgctacaggaagcctaccttacccttttcacagccatgtacccctgcattattacccccacgtgggagtaacagccgcagcagccgcagccgcagcaagcggcgcagcagccgcagctagttccccgtttgccacatctataaggccgcttgacacattcagagcactttctcacccgtattccaggcctgaactcctgtgttcatttcgccatcccggtctgtaccaggcccctgccgctgctgctggtttgaatagtgctgccagcgccgctgcagccgcagccgcagccgcagctgccgcatccagcgcagctgcagccggagcaccacctagtggcggatcagccccttgcagttgcctcagctgccatagcagtcagtccgcagccgcagcagcagccgctgccgctgccgctctcggttcaagaggagggggagggggaggagggggaggtggaggaggtggcggaggcggagcaggagcaggcggtggatcagacttcggctgctcagcggctgcaccccgtagtgaaagcggattcttgccatactcggcggcagtgctctctaagactgccgtgagcccacccgaccagcgggatgaagcacccttgactcgctag

SEQ ID NO: 222592 - DNA, 2781 bp, synthetic construct
  misc_feature 1..2781: note = Description of Artificial Sequence: Synthetic coding sequence
  source 1..2781: mol_type = other DNA
atgtcccgcagacggaaacacgacgactccccctctccaaaaaaaaccccccacaagaccgtagctgcggaggagtgtggatcggtggtggagccaggccgaagacgactgcggtctgccagaggctcatggccatgcggagcacgagagggtccgccaggacctgttcggcagcgcgaacaaccacccacggctgccctgtgcagcaaatctaacccagaggaacggtatgagacccccaaacgggctctgaaaatggattccctatccagcagtttttccagcccaaacgacccagacggccagaatgacattttctgggatcaaaattcccccttaacaaagcagctgggaaaaggacgaaaaaagcagatatacactaccgacagtgacgagattagccatatcgtgaaccgaatagcccctcaggacgagaaaccgacaacgaactccatgttggacatgtggattggcgagacggctatcccctgcacccccagcgttgctaaaggtaaaagtagagccaagatctcttgcaccaaactgaagacccaatcacaggaggaggagctgatgaaacttgccaagcagttcgacaagaatatggaggaactcgatgtgatacaggagcagaacaaacgtaattatgacttcacacagatgatttccgagacggaaattttgtcaaactataaggataacatccagatgtggtctctacataacattgtacccgaaatcgacaacgccacaaaaaagccaatcaagggtaataccaaaatttcagtagcgaacaaccaaaacagttcccaaaaaccattcgatcaaatcgctgaagcagccttcaacgcaattttcgacggctccactcagaagtgtagtggccaactgtcacaggagctgccagaggcattctggtcaactagtaacaccacatttgttaagacaaacgctctcaaagaagaaaagatcataaccaatgagaccctagttatcgagaagctaagcaacaagaccccaaggtccctatcttctcaggtggacacgcctattatgacaaagtcatgtgttacaagctgcacgaaagaacccgagacctcaaacaaatatatcgatgcttttacaacttctgactttgaagacgattgggagaacctgctgggaagcgagcctttcgccatgcagaatattgatatgcccgagctcttcccttccaaaacagcccacgtcaccgaccagaaggaaatttgcacttttaatagcaaaactgtcaagaacacctcaagggcaaacacaagccctgacgcaaggctaggtgacagcaaggttctgcaggacttgagctcaaaaacatacgaccgagaactcatcgacgccgagtaccgcttttcccctaacagcaacaagtcaaacaaactgagcactggaaacaagatgaagttcgaaaattcttccaataagatcgtcattcaggacgagattcaaaactgcatagtcacttccaaccttacaaaaattaaggaagacattctgactaactcgaccgaagcttccgagaggaagagcgcactcaacaccagatacagtaatgaacagaagaacaaatgcattctgaaccagtctatcaaggctcccgtgaataccgacttgttcggctccgcaaatctgggttcgaaaacatctgtgagcaaccccaatcaaacttccgcctccaaggtcggaagcttttttgacgattggaatgatccctcatttgccaatgaaatcatcaaggcctgtcaccagctggacaacacgtgggaagcagatgacgtggatgatgacctgttatatcaggcgtgcgatgatatagagcggctcacccagcaacaagatatcaggaaggatagcaaaacttccgagagtatctgcgaaattaataacaacagtgagcacggtgccaagctgacccagcagcaagatataagaaaagactctaagacttctgagagcatttgtgaaattaacaataacagcgaacatggggcaaaaaacatgttcgctattagtaaacagggaagtaatctggttcagagcaagcatctgaatccaggctcgatctcggtgcaaacaagtctgacaaattccagtcagattgacaagcccatgaagatggagaaaggagagatgtacggcaatagccctaggtttctgggagccaccaatctcacgatgtactccaaaatttccaactgccagatcaataacctccacgtatcatacaccaacacagatgtgccaatccaagtgaattcatcaaagctggtgctgccagggtcttcatccctcaatgtgacatccgaccatatgaacaccgagattacaacttataaaaaaaagttgagcaccaaccaaccatgtcataaaaccgtgactgacgaagctcagagcaacctgaacactactgttggcttttcaaagtttacgttcacaaggatgaaaaattcccagatcctcagtcagtttaatcagaactgtattacagggtcaatgtccgacaccaagatcactcagggcgtggagaaaaaaaagggcgtgaatcctttactcgaagaggcagtgggacagcagtccctggtgaagctgtccgaaagcctgaagcaaagctctaaggaggaggaggaaaagaaccgtaagtgttctcctgaagagattcagcgtaagaggcaggaagctcttgtccggagaatggccaaagcacgggcatcgtccgtgaacgcggctccaacttcattcttgtag

SEQ ID NO: 222593 - DNA, 2349 bp, synthetic construct
  misc_feature 1..2349: note = Description of Artificial Sequence: Synthetic coding sequence
  source 1..2349: mol_type = other DNA
atgggcaagcgagaccgggctgatcgagataagaagaagagtcggaagaggcattacgaggacgaggaggacgacgaggaggacgctcctggcaacgacccgcaagaagctgtgcctagtgcggctggaaaacaggtggacgagtctgggacgaaggtagatgaatacggagctaaggactaccgcctccagatgcccttaaaggatgatcacacatctagacccctctgggtggctcccgatggccatatctttttagaagctttcagccccgtttacaagtacgctcaggacttcctcgtcgccattgccgaacctgtgtgcagaccaactcacgtgcacgaatacaaattgaccgcttattcactctacgctgccgtgagtgtcggcctgcagacatcggacatcactgaatacctgcgcaagctgagcaagacgggggtgcctgacggcatcatgcagtttattaagctgtgtacagtcagctacggaaaagtgaagctcgttttgaaacataacagatacttcgtggagtcctgccaccctgatgtgattcagcatctgctgcaggatccggtgattagagagtgtcgtcttaggaacagcgagggggaagcaacggagctgataacagaaactttcaccagtaagtcagccattagcaagacagcggaaagctcagggggacctagtacatcaagggtgacggacccccagggaaaatcagacatccccatggacctgttcgacttttatgagcagatggataaggatgaggaggaggaggaggagacccaaacggttagtttcgaggttaaacaggaaatgattgaggagctgcaaaagcggtgcatccatttagagtatcccctgctagctgaatacgatttcaggaatgactcagtgaatccagacattaacatcgacctgaagccaacagcggtgcttcgcccataccaggagaagtctcttcgcaagatgtttggtaatgggcgagcccgatcaggggtaattgttctcccctgcggcgcaggaaagagcttagtgggggttacagctgcatgcacagtgcgaaaacgttgcctggtgctaggaaactccgccgtgagcgtcgagcagtggaaggctcagtttaaaatgtggtctactatagacgactctcaaatttgcagattcacgagtgacgctaaagataagcccatcggctgctccgtggcaatttccacttactctatgctggggcacaccaccaagcggagctgggaggcagagagagtaatggaatggcttaaaacgcaggagtggggcctcatgatccttgacgaggttcacactatcccagctaaaatgttcagaagagtcctcaccatcgtacaggcccactgtaagctggggttgacagccaccttggttcgggaagatgataaaattgttgatctgaacttcctgatagggccaaagctgtacgaagccaactggatggagctgcagaacaacggctacatagcgaaagttcagtgcgccgaggtctggtgtccaatgtctccagaattctaccgcgagtacgtggccattaaaactaaaaagcgaattctcctgtacaccatgaatccaaataaattccgtgcttgtcagttccttatcaaatttcacgaacgaaggaatgataaaatcatcgttttcgccgataacgtcttcgccttgaaagagtacgcaattcggctcaacaagccatacatttacggccctacctctcagggagagcgtatgcagatcctccagaacttcaaacacaatcccaaaatcaatacaatctttatctcgaaagtgggtgatacgtcctttgatttgccggaggccaatgtcctgattcaaatatcctcacacggagggtcgcgcagacaggaggcccagaggctggggagagtcttgagggcgaaaaagggcatggtggccgaagaatacaacgcatttttctatagtttagtgtcccaagatacacaagagatggcttacagtaccaagcgccaaagattcttagtggaccaagggtactcctttaaagttatcaccaagctggctggaatggaagaggaagaccttgctttcagtaccaaggaggagcagcaacagttgctgcagaaggtgctcgcagctaccgatcttgacgctgaggaggaagtggttgctggcgaattcgggagcagatcctcgcaggcatcacggaggtttggtaccatgagctccatgtccggagctgatgataccgtatacatggagtaccacagctcgaggagcaaagcgcctagtaagcacgtccaccccctgttcaaaaggtttcggaaatag

SEQ ID NO: 222594 - DNA, 2157 bp, synthetic construct
  misc_feature 1..2157: note = Description of Artificial Sequence: Synthetic coding sequence
  source 1..2157: mol_type = other DNA
atgcctctgaaggacgatcacacttccagacccctgtgggttgccccagatggacatatcttcctggaggcttttagccctgtttataagtatgctcaggactttctcgttgccatcgccgaaccggtctgcagacctacccacgtacacgagtataaactgacagcttacagcttgtacgcagccgtgtcagtcggactgcagacgtctgacatcacagagtatttgaggaagttgagcaaaacaggagtacccgacggcatcatgcagttcatcaaattatgcacagtgtcttacggtaaggttaagttggtactcaagcacaatcgttactttgtggagtcctgccacccagatgttatccagcacctcctgcaggatccagttattcgggagtgccgactacgaaacagcgagggagaggccactgaacttataaccgagaccttcacatccaaatccgccatcagcaagacagcagaatcctctggcggaccgtctacatcccgggtgactgatccacagggaaagagcgatattccaatggacctgttcgatttttatgagcaaatggataaagatgaggaagaggaggaggaaacccagacggtatcattcgaagtcaagcaggagatgatcgaagaattacagaagagatgcatacaccttgagtacccacttttggccgagtatgatttccgcaacgacagtgtcaaccccgatattaacattgatctgaagccaacagccgtcttgaggccttaccaggaaaaaagcctgcggaaaatgttcgggaacgggagagcccgaagcggcgttatcgtgttaccatgtggtgccggtaaatctctggtgggagtaactgccgcttgtactgtcaggaaacgatgtctcgtgcttggcaactcggccgtctctgtggaacagtggaaggcgcagtttaaaatgtggagcaccattgacgatagccaaatctgtcgattcacgagtgacgccaaggacaagccaatcggttgcagcgttgccattagtacatacagtatgcttggacatacaaccaaacgctcctgggaagccgagagagtgatggagtggctgaagactcaggaatggggtctgatgattttggatgaagtacatacgattcccgcaaagatgttccgcagggtgttgacaattgttcaagctcattgtaaactagggctgacagctactctggtacgggaagacgacaagatcgtggatctcaactttctgatagggcctaaactctatgaggccaattggatggaactgcagaacaacggctatattgctaaggtgcagtgcgccgaagtctggtgtcctatgagccccgagttttacagggagtatgtggctattaaaacaaaaaaacgaatcctgctgtacactatgaatcccaacaagttccgggcatgccaatttctcattaagttccatgagcgcaggaatgataagatcatcgtcttcgccgacaacgtcttcgcgctcaaagaatatgccatcaggctgaacaagccttatatctacgggccaacttcgcaaggcgagagaatgcagatcctccaaaactttaagcacaaccccaagataaatacaatttttatcagtaaggtaggcgataccagtttcgatttacccgaggccaacgtgctcattcagatctcctctcacggaggctcgcgcagacaggaagctcagcgtctcggacgggtccttcgtgccaaaaaaggcatggtagctgaagagtacaatgcattcttttattccttagtatcccaggatacacaagagatggcttactccaccaaacggcagcggtttttggtggatcaggggtattcttttaaagtcatcactaagctggcaggcatggaagaagaagacctggcgttctctactaaggaagagcagcagcagcttctgcaaaaagtgctggcggcaacggacctcgacgccgaggaggaggtcgtggctggagagttcggcagtagatcttctcaggccagcagaaggttcggcacaatgtccagcatgtcaggggcagacgacacagtctacatggagtatcactcaagtagatctaaagcaccatctaaacacgtgcaccctctattcaaacggtttcgaaagtag

SEQ ID NO: 222595 - DNA, 3753 bp, synthetic construct
  misc_feature 1..3753: note = Description of Artificial Sequence: Synthetic coding sequence
  source 1..3753: mol_type = other DNA
atggaggccagtaggcggttccccgaggcagaggctctgtctcccgaacaggccgcacattacctacggtacgtcaaggaggccaaggaggctacaaaaaatggggacttagaggaggcatttaaactgtttaacctggctaaagatatctttccaaacgaaaaagtattaagcagaatccagaaaatccaggaggctcttgaggaactcgccgaacagggggacgacgaattcacagatgtatgtaacagcggccttcttctgtacagagagctccataaccaactgtttgaacaccagaaagaggggattgctttcctttactccctgtatcgcgacggacgtaagggaggcattctcgcggacgatatggggttgggcaaaacagtccaaatcatcgcatttctgagcgggatgtttgacgcctcgctggtgaaccacgtgctgctcattatgcctactaacctgattaacacctgggtgaaagaatttatcaagtggactccaggaatgagagtgaagacttttcatggcccatctaaagacgagagaactagaaatctgaacagaatccaacaacgcaacggcgtgatcattactacctatcagatgctgataaataattggcagcaactaagctctttcagaggccaggagttcgtttgggattacgtgatcctggacgaggctcacaaaatcaagacttcctcgacgaaatccgccatctgtgcaagggcaataccagcctcaaatcgactgttgttgacaggaacaccaattcagaacaacttgcaggagctctggagtttgtttgactttgcctgtcagggatcgctgctaggcaccctcaagacatttaagatggaatacgagaacccgattacccgcgctagagaaaaggacgccacgcctggcgagaaggcactgggattcaagatctctgagaatctaatggccatcatcaaaccttacttcctacgcaggaccaaggaggatgtccagaagaaaaagtcttctaatcccgaggcaaggctcaatgagaagaatccggatgtggacgctatttgtgaaatgccttcattgtctcggaagaacgacctgattatctggatcaggctggtgccacttcaggaggaaatctatcggaaattcgtgtccctagaccatataaaggagttgcttatggaaactcgcagcccattggccgagctgggagtactcaaaaagttgtgtgatcatcctaggctgctgtcagctcgcgcttgttgcctgctcaacctgggtactttctccgcccaggatggcaacgagggggaggactccccagacgtggatcatatcgatcaggtgactgatgatactctgatggaggaatctggcaagatgatcttcctgatggacctgctgaagaggctgagagacgaggggcaccagacactcgtattttctcaatcaagacaaatattaaacataattgaaagattactgaagaacaggcacttcaagactctccggatcgatgggacggttacgcacttgcttgaacgcgagaaacgcatcaacctttttcagcagaacaaagattactctgtgttcctcctgacaactcaggtgggaggtgtggggctgactcttaccgccgctactcgggtcgtgatttttgacccaagttggaaccctgcgacagatgcccaggctgtggatcgggtatataggatcgggcagaaagaaaatgtcgtagtgtaccgccttatcacctgtgggacagtggaagaaaagatctataggcggcaggtatttaaagattctctgataagacagacgacgggggaaaagaagaatccatttagatacttcagcaagcaggagctccgggagctcttcacaatcgaggatctgcaaaatagtgtgacccaactgcagcttcagtcattgcacgcagcccagcgaaagagtgatattaagctggacgagcatatcgcatacctgcagagtctgggcattgccggtatcagcgaccacgacctgatgtacacctgcgatctgtctgtaaaggaggagctcgatgttgttgaggaatcgcactacattcagcagagagtgcaaaaggcacagtttttagtcgagtttgagagtcaaaacaaggaatttcttatggagcagcagagaacgagaaatgaaggcgcatggttacgcgaaccagtgttcccctccagcacaaaaaaaaagtgtccaaagctgaacaagccccagccccagccatcgccgctgctttctacacatcacacacaggaagaagacatttcttctaaaatggcttccgtggtcatcgacgacctccccaaagaaggagaaaagcaggacctgagttcaatcaaggtgaacgtcacaactctgcaagacggcaagggcacaggcagcgcagactctatcgcgacactgcctaaaggatttggatccgtggaagagttgtgtacaaactcctcattgggaatggagaagtcatttgccactaagaacgaggccgtacagaaagaaacccttcaggagggccctaaacaggaggctctgcaagaagaccctcttgaatcatttaattatgtgctgagcaaatctactaaggcggatatcggtcccaacctggaccagctgaaggacgacgagatcctgcgccactgtaatccatggccgatcatttcaattaccaatgaatcacagaatgctgaaagtaatgttagtattattgagatagctgacgatctgagcgcctcacactctgctctgcaggacgcacaagcctcggaagccaaactggaagaagagccctccgcgtcctccccacagtacgcttgcgacttcaacctgtttctcgaagactccgctgataacaggcaaaacttctcctctcagagccttgagcatgtcgagaaggaaaactccctctgcggatctgcacccaattctagggcaggctttgtgcactcaaagacttgcctgtcatgggagttttctgagaaagacgacgaacccgaagaagttgttgtgaaagctaagattagatcaaaggcacgccgtattgtctccgacggagaggacgaagacgacagttttaaggacacatcctcgataaatccatttaacacaagcctatttcagttttcgtctgttaagcaatttgatgcctccacccccaagaatgacatatcccccccaggcaggtttttctccagccagataccaagcagtgtaaacaagtcgatgaattctcgcagatcactagcttccagaaggagcctgattaacatggttctagaccatgttgaagatatggaagaacggcttgatgactcttcagaggcaaaagggccagaggactatcccgaagagggagtcgaggagtcatcaggggaggccagtaaatacactgaagaggacccctccggagaaactctgagttcagaaaacaagtcttcctggctgatgacaagcaagccgtcagcactggcccaggaaacatccctgggggcacctgagcccctgtccggtgagcaattggttggctcaccccaagataaagcggcagaagccacaaacgactacgaaactctggtgaagcggggaaaagagctcaaagaatgcgggaagattcaggaagccctgaactgtctggtgaaagctctggacatcaaaagcgcggatccagaggtgatgctcctgacactgagcctgtataaacaactgaataataattag

SEQ ID NO: 222596 - DNA, 2685 bp, synthetic construct
  misc_feature 1..2685: note = Description of Artificial Sequence: Synthetic coding sequence
  source 1..2685: mol_type = other DNA
atgacagccataaaacacgctttgcaacgggatatttttacccccaacgacgagagactgctgtcaatagtcaatgtgtgcaaagctggaaaaaaaaagaagaattgcttcttatgcgcaaccgtgacaactgaacgcccagtccaagtgaaagttgtgaaagtgaagaaatcggataaaggggatttttacaagaggcagatcgcctgggctttaagagacttggctgtcgtagatgcgaaggacgctatcaaagagaacccagagttcgaccttcattttgagaagatctacaagtgggtcgctagcagcacagctgaaaaaaatgccttcatcagttgcatttggaagctgaaccaacgatacctcaggaagaagattgacttcgtgaacgtgagtagccagttgctggaagagagtgtgccgtctggagaaaaccagtccgtcactggaggtgacgaggaggtggtcgatgaataccaggaactcaacgcacgggaagaacaggacatcgagattatgatggagggttgcgagtacgcaataagtaacgcggaagctttcgcggaaaagttaagccgcgagctgcaggtcctcgacggtgccaacattcagtctattatggcgtcagaaaagcaggtcaacatactcatgaaactcctggacgaggcactcaaggaggtggaccagattgaattgaaactttcaagttacgaagagatgctgcagagcgtgaaggaacagatggaccagatttcagagagcaaccatcttattcatctgtctaatacaaataacgtgaagctgttaagcgaaatcgagttcctggtgaaccatatggatctggccaaggggcacatcaaggcgctacaggaaggtgacctcgcctccagccgcggtattgaggcttgtacgaacgctgcagacgctctgcttcagtgtatgaacgtcgcgctgcggccaggccatgacctacttttggctgtgaagcagcaacagcagcggttcagtgacctccgcgaactgttcgctcggcgtcttgcctctcacctgaacaatgtcttcgttcagcagggccacgatcagagcagtacgctggctcagcacagcgtcgagctgaccctgccaaatcatcatcctttccatcgagacctgttgcgctatgcaaagctgatggagtggctcaagtctacagactacggtaaatatgagggccttaccaagaactacatggattatctgagcaggttgtatgaacgcgaaatcaaagactttttcgaagttgcgaagataaaaatgactggaactaccaaagagtctaaaaagttcgccaccttaccaaggaaggagtcagccgtgaagcaagagaccgagagcctgcatggaagctctggaaagcttaccgggtctacatcatcgctgaacaagctgagtgtccagtcttccggaaatcgcaggagccagagctcttccctcctcgatatggggaatatgtctgcctctgacctggacgtggccgaccggacaaagttcgacaagatcttcgagcaggtgttgtccgagctggaaccactctgcctggccgagcaggacttcatcagcaagtttttcaagctccagcagcatcaaagcatgccagggactatggccgaggctgaggacctggatggcggaacccttagtcgtcagcataattgcggtacccctttgcccgtgagttccgagaaagatatgatccgtcaaatgatgattaagatttttcggtgcatcgagcctgaactgaataacttaattgccctgggggacaaaattgatagcttcaatagtctgtatatgctcgtgaagatgtcccaccacgtttggacggcacagaacgtcgaccctgcaagcttcctaagtaccaccctggggaacgtactcgttaccgttaagcgcaactttgataaatgtatctctaatcaaatcaggcagatggaggaggtaaagatatcaaagaagtcaaaagtaggaatcctgcccttcgtcgcagagtttgaggaattcgccggattagcagagtctatcttcaagaatgccgagcggaggggcgacctggacaaggcgtacaccaaactgatccgcggagttttcgtaaatgtggagaaggttgctaatgaatcccagaagactccgagagacgtggtaatgatggagaatttccatcatatcttcgctactctgtcccgcctgaaaatttcctgcctggaagccgaaaaaaaagaagcaaaacaaaaatataccgaccatctgcaaagttacgtaatctatagtctcggacagcctctggaaaagctcaaccacttcttcgagggagtggaagccagggtagcacagggcatccgcgaagaagaagtttcatatcagttggcttttaataaacaggagctccgaaaggtcataaaggaatatcctggtaaggaagtgaagaagggtttggacaatctttacaagaaagtggataagcatctgtgcgaagaggagaatcttctccaagtggtgtggcatagtatgcaagacgagtttattagacagtacaagcatttcgaggggctcatcgcccgttgttatccagggtccggagttacgatggagttcactatccaggatatcttagactactgtagctccatcgcccagagccactag

SEQ ID NO: 222597 - DNA, 2640 bp, synthetic construct
  misc_feature 1..2640: note = Description of Artificial Sequence: Synthetic coding sequence
  source 1..2640: mol_type = other DNA
atgaccgccatcaaacacgcactgcagcgtgacatctttaccccgaacgacgaacgcctcctgtctatcgttaacgtgtgcaaagccggaaagaaaaaaaagaattgctttctgtgtgcaactgtgactactgagagacccgtgcaggtgaaagttgtgaaagtgaagaagagtgacaagggagacttctacaagcggcagattgcttgggctctgagagacctggccgtggtcgatgctaaagatgctattaaggagaatcctgagttcgatctgcacttcgagaagatctacaaatgggtagcctcttcaacagctgagaaaaatgccttcatttcttgcatatggaaactgaatcagcgctacctcaggaaaaagattgacttcgtgaacgtcagctctcagttgctggaagagtcagtcccttcgggcgagaaccagagtgtgacggggggagatgaagaggtagtggacgagtatcaggaactcaacgctcgcgaggagcaagacattgagatcatgatggagggttgtgagtatgcgatcagtaacgccgaggcattcgccgagaagctgtctcgcgagctacaggtgcttgacggtgcaaatatccagtcaatcatggccagcgagaagcaggttaatatcctgatgaaactgctggatgaggccctaaaggaagtagatcaaatagaactaaaactgtccagctacgaagaaatgctgcagagcgtgaaagagcagatggaccagatctctgagagcaatcatttgattcacctatcaaacaccaataacgtcaagctcctgtctgagattgagtttctggtcaatcatatggatctcgccaaaggccacatcaaagcactgcaggagggtgacctggctagttcccgaggtattgaggcctgtaccaatgctgccgacgctttgctccaatgcatgaacgtcgcactccgcccaggccatgacctgctactggcagtgaagcagcagcagcagaggttttccgacctcagagagttattcgcaaggaggctggctagccatctaaacaacgtgttcgtgcagcaggggcacgatcagtcttctacgcttgcccagcattcagtcgaactgactttacctaaccatcaccctttccacagagatctgctccgctacgccaagctcatggagtggttgaaatctaccgactacggtaagtacgaagggctcacgaaaaattacatggactatcttagccggctctatgagcgtgagatcaaagatttctttgaagtggcaaagataaagatgacgggcacaaccaaggaatcaaagaagtttgggctgcacggatcctccggcaagctaaccggcagcacgtcatctctgaacaaattatccgtccagagttcaggaaataggaggagtcagtcaagcagcctccttgatatgggtaacatgtccgcatccgatctcgacgtagctgatagaaccaaattcgataagattttcgagcaggtgctgagtgagctggaacctctatgcttggccgaacaagattttatttccaaatttttcaaattgcagcaacatcagagcatgccgggaactatggcagaagccgaggaccttgatgggggtaccctgtcccggcagcataactgtgggacccctctcccagtctcttctgagaaggacatgatacgacagatgatgatcaagatctttcgctgcattgagcccgagcttaacaatctaatcgcactgggtgataagatcgactcattcaattcactctacatgctggtcaagatgagccatcatgtgtggacagcccagaatgtggaccccgcatcatttctgagcaccaccctggggaatgtgctggtaaccgtgaaaagaaacttcgacaagtgcatatccaaccagatccgccagatggaggaggtgaagatttctaagaaatccaaggtggggatcctgccatttgttgctgagttcgaagagtttgccggattagcggaatcaatcttcaagaatgcggagcggcgaggggacctggataaggcctataccaagctgataagaggtgtcttcgtcaatgtcgagaaagttgccaatgagagccagaagacgccacgagatgtcgtgatgatggagaatttccaccatatcttcgccaccctgagccgactcaaaatctcctgcctggaggccgagaaaaaagaggctaagcagaagtataccgatcacctacaaagttatgtcatctattccctgggccagcccttagagaagctcaatcattttttcgagggtgtcgaagcacgggttgcccagggaataagagaggaggaggtgagttaccagctggcatttaataagcaggagcttaggaaagtgatcaaagaatacccgggtaaagaggttaaaaagggcctcgataacttgtacaagaaagttgataagcacctgtgtgaagaggagaacttgctgcaggttgtgtggcacagcatgcaggacgagttcatacgccagtataagcacttcgagggtcttattgcaagatgctacccgggatccggagtcacaatggagttcacaattcaagacatcctggattattgcagctccattgctcagtcgcattag

SEQ ID NO: 222598 - DNA, 2685 bp, synthetic construct
  misc_feature 1..2685: note = Description of Artificial Sequence: Synthetic coding sequence
  source 1..2685: mol_type = other DNA
atgactgccatcaaacacgcccttcagcgcgacatttttacccccaacgatgaacggttgttgtccatcgtgaatgtgtgtaaggccggtaaaaaaaagaagaattgctttctgtgcgccacagttaccaccgagcgccctgtacaggttaaggttgtgaaggtcaagaagtctgacaaaggggacttttataagcggcagattgcctgggccctgcgcgatctggccgtagtggatgccaaagatgcaattaaggagaatccggagtttgacctgcacttcgaaaagatttacaagtgggtcgcatctagcactgcagagaagaacgccttcatttcatgtatttggaagctgaaccaacggtatttgcgaaaaaagattgatttcgtcaatgtgtcatcccaattgctggaggagtcagtcccaagtggcgaaaaccagtccgtcaccgggggagacgaggaagttgttgacgagtatcaggagctcaacgctagggaggagcaagacattgaaataatgatggaagggtgcgagtatgcgatttcgaacgccgaagcctttgcggaaaagctgagtagggagctacaagttctggacggcgctaacatccaaagcatcatggcttccgagaagcaagtgaatattcttatgaaactgttggatgaagcactgaaggaggtggaccaaattgaattgaaattgagctcctacgaggagatgttgcaatccgtgaaagagcagatggaccaaatcagcgaatccaatcatctcattcacctcagtaatacgaataatgtgaagctgctgagcgaaattgagtttttggttaaccacatggacctcgctaagggacatattaaggccctccaggagggtgaccttgcatccagccgcggaatcgaggcgtgtactaacgccgctgacgccttgctacagtgcatgaacgtggctctgagaccgggacacgacttacttttggctgtgaagcagcaacagcagcggttttcagacttgcgggagctgttcgccagacgattggcctcccacctaaacaacgtgtttgtgcaacaggggcatgatcagtcctcaactctggctcagcatagtgtcgagctaacactcccgaatcatcacccgttccatagggacttgctccgttacgctaaactgatggagtggctgaaaagtacagattatgggaagtacgaaggcctgacaaaaaactatatggactatttgagtcggctgtacgaaagagagatcaaagacttcttcgaggtggctaaaattaaaatgactggtacaaccaaggagtcaaaaaaatttgcgaccctccccaggaaggagtctgccgttaagcaggaaaccgaaagcctgcacggttcttcaggtaaattgaccggatctaccagtagtctgaataagctatcagtgcagtcttcgggaaatcgccgtagtcagtcaagttctttgctcgatatgggaaatatgtccgccagcgatcttgatgttgctgatcgcaccaaattcgataagatatttgaacaagtactgtcggaactggaacccctttgcctggctgagcaggacttcatctctaaattttttaaattgcaacagcatcaaagcatgcctggcaccatggccgaagccgaagacctggatggcggaactctgtccaggcagcacaactgcgggaccccactgcccgtgtccagcgagaaggacatgatccggcaaatgatgatcaagatcttcaggtgtatagagccagagctcaacaacctcatcgccctgggggataaaatcgatagtttcaattcactgtatatgctagttaagatgagtcatcacgtatggaccgctcagaacgtagaccccgctagcttcttatcgacaaccttgggtaacgtgctcgttacggtgaaacggaacttcgacaaatgcatctccaaccagattcggcagatggaggaagtgaagatctccaagaagagtaaggtcgggatcctgccgttcgtcgcagaattcgaggagtttgctggcttagctgaaagcatattcaagaatgccgaaaggagaggcgatctggacaaagcgtacaccaaattgattcgaggcgtatttgttaatgttgaaaaggtggcaaacgaatcccagaagacccctcgtgacgtcgtgatgatggaaaattttcaccatatctttgccacgttgtccagactcaagatttcatgtctagaagcagagaagaaagaggcaaagcagaagtatactgaccatctgcagagctacgtgatctactctctggggcagccgctagagaaacttaaccatttttttgaaggggtggaggcacgcgtcgcccaggggatacgggaagaggaagtttcttatcaactggcctttaacaagcaagaactgaggaaagtgattaaagagtaccccggtaaggaggtgaagaagggactggacaacttgtataaaaaagtggataagcatttatgcgaagaggagaatttgcttcaggtagtctggcacagcatgcaggacgaatttatacggcagtataagcacttcgaggggctcattgctcgctgctacccaggcagcggtgttactatggaatttacaattcaggacatactcgattactgctcatctatcgctcagtcgcattag

SEQ ID NO: 222599 - DNA, 2238 bp, synthetic construct
  misc_feature 1..2238: note = Description of Artificial Sequence: Synthetic coding sequence
  source 1..2238: mol_type = other DNA
atgaaagagacggacagggaggctgtcgctacagccgtccagcgcgttgccggaatgctgcagaggcctgaccagctggacaaggtggaacagtaccgacggagggaagcacggaaaaaagcgtctgtcgaggcaagactcaaagccgctattcaatctcagctcgacggggtacggaccggtctcagccagctgcataacgccctaaacgacgtaaaggacatccagcagagcctagcagatgtgagtaaagactggcgccagtcaatcaacaccatcgaatcacttaaagatgtaaaagacgcagtggttcagcactcgcaactcgctgccgctgttgagaacctcaagaacatcttttcggttcccgaaatagtaagagaaacccaggatcttatagagcagggtgcgttattgcaggctcaccgcaagttgatggacttggaatgctctcgggacggtttgatgtatgagcagtatcggatggactcaggtaataccagagatatgacccttattcatggctatttcgggagtacacagggactgtccgatgaactcgccaaacagttgtggatggtgctccagcggagtctagtaaccgtacggagggaccctacgctcctggttagtgtggttcgtataatcgaacgggaggaaaaaatcgaccggagaattctcgaccgcaagaagcaaacaggtttcgttccaccaggcagacctaagaactggaaagagaaaatgtttacgatcttagaaagaacggttacaactagaatcgaaggcactcaagcggacactagggaatctgacaagatgtggttagtaagacatttggagattataagaaaatacgttctggacgacttgatagttgctaaaaacctcatggtgcagtgctttccacctcactacgaaatctttaagaatttacttaatatgtatcatcaggctttgtcaactcgaatgcaggacctcgcaagcgaggacctagaagcaaatgaaatcgtgtccctccttacctgggtgttgaacacctacaccagtacggagatgatgcgaaatgtggaactcgcaccagaggttgatgtggggaccttagagcctcttctatccccacacgtcgtgagcgagctgcttgatacgtatatgagtactctgacttctaacatcatcgcttggttgagaaaggctctggaaaccgataaaaaagattgggtcaaggaaactgagcccgaggccgaccaggatggatactatcagaccacattgcctgcaattgtttttcaaatgttcgaacaaaacctgcaggttgccgctcagatctctgaggaccttaagactaaggtcctggtcctgtgtcttcagcagatgaattcttttctatcaaggtataaagatgaagcacagttatataaggaggagcacctgcgcaaccgccagcacccccattgttatgtgcagtacatgattgctataattaataactgtcagacctttaaggagagcatcgtcagcctaaaacggaagtatctgaagaacgaagtggaggaaggagtctcgccatcacagcccagcatggatggcattctcgacgccattgcaaaagagggatgcagcggcctgctggaagaagtgtttctcgacctcgagcagcacctgaatgagctgatgaccaagaaatggctcctaggttctaacgctgtagacatcatatgcgtgacagtggaggattatttcaatgattttgctaagattaagaaaccatataaaaagagaatgacagctgaagcgcataggagggtggtagtggagtatctcagggccgtgatgcagaaacgcatcagttttcgatcaccagaagaacgcaaagagggtgcggagaaaatggtcagggaggccgagcagctgaggttcctcttcaggaaactggcgagtggattcggagaagatgtggatggttattgtgatactatcgtggctgtagctgaagtgattaaactcacggacccctcactgctctatttggaggtgtccactctggtcagcaagtaccctgatattagagacgatcacatcggggctttgttggccgtccgcggagacgcaagccgggatatgaaacagactatcatggaaacattagaacagggaccagcccaagccagcccttcctacgtcccactgttcaaggatatcgttgttccaagcctcaacgtggcgaagctgttgaaatag

SEQ ID NO: 222600 - DNA, 1923 bp, synthetic construct
  misc_feature 1..1923: note = Description of Artificial Sequence: Synthetic coding sequence
  source 1..1923: mol_type = other DNA
cagtgtgaagattctaccagcttttttacaatgaaggagacagatagagaggccgtggctaccgctgttcagcgcgtcgctggaatgcttcagcgtccagaccagctggataaggttgagcagtacagaagacgggaggccaggaagaaggcctctgtggaggctcgccttaaagcggcaatacagagccagctcgacggagtccgcaccgggctgagtcaactacacaacgccctaaatgacgttaaggacatacagcagtcactggccgacgtgagtaaggactggcgccagtccatcaacacaatagagagtcttaaagatgtcaaagatgcggtcgtgcagcattcacagctagctgcagctgtggagaacttaaagaacatattctcagttccagaaattgtaagagagactcaagacctcattgagcagggcgcactactgcaggcccataggaagctgatggacctcgaatgctctcgagacggactcatgtacgagcagtatagaatggacagcggtaacacacgcgacatgacactgatacacggctacttcggatctacccagggactgtcggacgagcttgcaaaacaactgtggatggtgctgcagcgctccctggtcacagtgagacgggacccaaccttgcttgtttctgttgtccgcatcattgagcgcgaagaaaaaatcgataggcgcatacttgaccggaaaaaacagaccgggttcgtcccacctgggaggccaaagaattggaaggaaaagatgtttacaatccttgagaggactgtgacaaccaggattgaaggcacacaggcggatacacgggaaagcgacaaaatgtggctggtgagacacctcgagatcataagaaaatacgtccttgatgacctgatagtcgcaaagaatttgatggtgcaatgctttcctcctcattacgagattttcaaaaatctgcttaatatgtatcatcaggccctctctacaaggatgcaggacctggcttccgaggacctcgaagctaacgagatcgttagcctgctgacctgggttctgaatacctataccagatacaaggatgaagcccagttatataaggaggagcacctgaggaatcggcaacaccctcattgttacgttcagtatatgattgccatcatcaacaattgccagacgttcaaagagagcatcgtttcactgaaaaggaagtacctgaagaatgaggttgaggaaggcgtttcaccttcacagccctctatggacggaatcctggacgccatcgccaaagagggctgtagtggcttgctggaggaggtgttcttggatctcgaacagcaccttaatgagttgatgaccaagaagtggttgctgggcagcaacgctgtggacatcatctgcgtcaccgttgaagactatttcaacgatttcgccaagattaaaaaaccctataaaaagcggatgactgctgaagcgcaccggcgagtcgttgtcgagtatttgcgggcagtgatgcagaagcgaatatccttccgctctcccgaggaaaggaaggagggcgctgagaagatggtgagagaggccgagcaattgagattcttatttcggaaactggcatctggctttggagaggacgtagacgggtactgcgatactatcgtggccgttgccgaggtcatcaagctgacggatccctccctactctacctggaggtatcgacactagtttccaagtaccccgacatccgggatgaccatattggggctctcctcgctgtccgcggagacgcctctcgggacatgaagcagactatcatggaaactctggagcaggggccagcacaggcttcaccttcctatgtgccccttttcaaggacatcgtggtgccttctctcaatgtggcgaagctgctcaaatag

SEQ ID NO: 222601 - DNA, 210 bp, synthetic construct
  misc_feature 1..210: note = Description of Artificial Sequence: Synthetic coding sequence
  source 1..210: mol_type = other DNA
atgaaggaaactgaccgggaggcagttgcaaccgccgtccagcgagtcgccggaatgctgcagaggccagaccagttggacaaggtagaacagtatagacgtagggaagccaggaaaaaggcatccgtcgaggccagattgaaggccgctatacagtcccagctggatggagttcgcactggcctctcgcagttacataatgcactgtag

SEQ ID NO: 222602 - DNA, 2238 bp, synthetic construct
  misc_feature 1..2238: note = Description of Artificial Sequence: Synthetic coding sequence
  source 1..2238: mol_type = other DNA
atgaaggagacagaccgagaggcggtcgcaaccgctgtgcagagggtggccggtatgttgcagcggcctgaccagttggacaaggtagagcaataccgacgcagggaagccagaaagaaagcaagcgtagaggcccgactgaaagcagctattcagtctcaactggatggggtgcgcaccggactttcgcagctccacaatgctctcaacgacgtcaaagacatccagcaatctctggccgatgtcagtaaagattggcgacagtcgatcaatacaatcgagtccttaaaagacgtgaaggatgcggtcgtgcaacatagccaacttgctgctgcggttgagaatctgaagaacatcttttcagttcccgagattgtgagggaaacacaagacctgattgaacagggcgcattgttgcaggctcataggaagctgatggatcttgaatgcagcagggacgggctcatgtatgaacagtaccgtatggattccggaaacacgcgtgacatgaccctcatacacggttactttggatccacacagggactgagtgacgagctcgctaaacagctgtggatggtactccagagaagcctcgtgacagtgagacgagacccaaccctcctggtctctgtggtgagaattattgaacgagaggagaagatcgatcgtaggattctggacaggaaaaaacagacaggtttcgtgcccccagggcgacctaaaaattggaaggaaaagatgttcaccattttggagcgcacagtgacaacacggatagaggggacccaggctgacactagggaatcagacaaaatgtggctggtgagacacctggagataatcagaaagtacgtactcgacgacctcattgtggcaaagaatctgatggtccaatgttttccaccacattacgagattttcaaaaatctcctcaatatgtaccaccaagccctgtctacacggatgcaggaccttgcgagcgaggacctggaggcaaacgagatcgttagcctcttaacttgggtactgaatacttacacaagcacagaaatgatgcgcaacgttgaattagcacccgaggtggacgttggcaccttagaaccccttctttccccgcatgtggtgagcgaactactcgacacctacatgagcactctcacctccaatatcattgcctggcttcgaaaagccctggaaaccgacaagaaagactgggtcaaagaaacggagcccgaggcagatcaggatggatactaccagacaacgctgcccgcaattgtgtttcagatgttcgaacagaacctacaggttgcggctcagatttccgaagatctgaagacaaaagtacttgttctgtgtctgcagcaaatgaactccttccttagtcgctacaaagacgaagcccagctttacaaggaagaacacctgaggaaccggcaacatccccactgctatgtccagtatatgattgcaattattaataactgtcagacatttaaggagagtatcgtcagtcttaagaggaaatacctcaagaatgaggtggaagaaggggtttctcccagtcagccatccatggatggaattttggatgccatcgcaaaggaaggctgctcaggactacttgaagaggtgtttcttgacctggaacagcatctgaatgagctcatgaccaagaaatggttgctgggctccaatgccgtggatattatatgtgtgacagttgaggactatttcaatgattttgccaagattaagaagccatacaaaaagaggatgaccgcagaggctcataggagggtcgtcgttgaatacctgagagccgtaatgcagaaaagaatctcttttaggagccccgaggagagaaaagaaggcgcagagaaaatggtccgggaagcagaacaactgcggttcctgttcaggaagctggcctcagggttcggggaggatgtcgatgggtactgcgacaccatcgttgcggtcgcagaagtaataaagttgaccgacccctccctgctgtacctggaggtgagcacactggtcagcaaatatcccgacatccgtgacgaccatattggtgcactgctggctgtgcggggagatgcctctagagacatgaaacagacgataatggagaccctggaacaaggacctgcccaggcctcacctagctatgtcccactattcaaagatattgtcgtcccatcgctgaacgtggccaaacttttaaaatag

SEQ ID NO: 222603 - DNA, 2034 bp, synthetic construct
  misc_feature 1..2034: note = Description of Artificial Sequence: Synthetic coding sequence
  source 1..2034: mol_type = other DNA
atggatagcgctgcgaaagatgaaatgcagcccgctctgtctcccggatccagctttcccggtccagaatggccagaacaggagcgagcggagcagctcgcaaggggcgctgctctcaagtgggcttccggcatcttctaccgacctgagcagctggccagactggggcagtacagatccagagaagtgcagcgaacttgttctctagagtcgcgactaaagagtgttatgcaaagttacttagagggggtgcagactgtccccgctgcggtaagccacacccaaacactcattgatggacagcagttcctggaggcctatgtgtcgttgcgtgagcttgaacagctgcgcgaggatacatgggcaccgctcgggggattagaactgccggtgtttcaggggctagatctattgtttgaagctttggggcaggcagtggaggctgcagcaggggctgccggaaaactcgccagggaggaccccgcacttctcgtggcagcagtgcgcgttgcagaggtcgaaactgggcgtaccacaccactcggccaggttccaagggattggcgacaacggtgcttgagggcacttcaggagggtctggagcaagcccatttcggctccccgctgctgccagcccctggcgctttgcccggatggctggaagccctgcgcgttgccctcccagtggagttggctacggccgaagcactggtggccccttgttgccccccacagtataatgtggtgcaattatgggcccatacacttcacagtggactaaggaggtccctgcagaacctccttgccggaccagaactggaggccgctgatgctttcgctctgttgcattgggccttacacgtttatctgggccaagaaatgatgggatctctggagcttggcccagaggctgacgtgtcccagctggagccactccttacactcgagaacatcgaacagctcgaagccaccttcgtggcaaatattcagatcctggaagaaaacatcagagtcgcgtccctggtaagcgagagcctgcagcagagggtccacggcatggcgcttagcgagcttggcacattcctgcgcagcttcagcgacgctttaattaggttcagtagggatcacttcagaggaaaatccatggctccccactacgtaccctatctgttagctgctcttaatcataagagtgcactatcaagcagtgtcagcgtcctgcagcttgacggagctccaagcggcgctctggcaccagtggaggcagctctggatgagttgcagcggcgaatatacaggctggtcctcgaagccctccaggccgaacttcaacccctttttgcggatctaccctcccgccagtggctgagcagccccgagctgttgcagtctgtgtgtgagcggacaggtcgcttctgtcgagacttctggagagtcaggaacccaactgtgcagttgctactcgcagaagccgagagagccgtcgttctgcagtatctctccgccctcatgcagggtagactggtgtgcaggggagccgacgagcggacccaggccgcagagagactgcgtcatgatgcagctcagctgcagcaattgttcttgagtctggtaagagcctcctgggccggtaggcgcgctcgggtctcagtggccggatgggaacggggtctggcgcgagatcccacacccacatgttccggcccaggaggagagagagcgctgcgagctggcgctgcacggcctgaaggagccgctaagccacctcgacccagagccgcagggcctgggggtggatggcccgcagccacgatttctcgaagagagagagggccaaggctcagacccctcggcccagcaagaggactggtcccaggggcagcacccggacgggcacagcttcccgctggttgcgccgcagcagtcgctcctagagaacccccacggcctcttcagccaagcgccagggccagagctcccgcaagctgccttccaagcggctcgtgtgcccgtgccctgctgttagcagagtag

SEQ ID NO: 222604 - DNA, 2241 bp, synthetic construct
  misc_feature 1..2241: note = Description of Artificial Sequence: Synthetic coding sequence
  source 1..2241: mol_type = other DNA
atggactcggcggctaaagacgaaatgcagccggcactgtcgccaggcccagagtggcccgagcaggagagggccgagcagctagccaggggggcagccctaaagtgggcttccggcattttctatagacctgagcagctggccagattggggcagtatcgatcccgagaagtccaaagaacctgctcactggaaagccggctgaagtcagtgatgcagtcatacctggagggggtgcagactggcgtgtggcagctggcccaggctatcgaggttgtccaaggcacgagagaggccctctcccaggcgcgtggactcctgcagggaatgagccaggccctgcagacactcgagcctctaagagaaagagtcgcccaacataagcagctccaggctctaagtcacttgctgcccaggttgcgagcagtgccagccgctgtttcccacacacagaccctcatcgacggccaacagtttttggaagcttatgtgagtctgagggaattggagcagctgcgcgaggatacctgggcccctctgggaggcctagaattgcctgtcttccagggcctggatttgctgtttgaggctctgggccaagccgtggaggccgcagcgggagcagcgggaaagctcgctcgggaagatcccgcactgcttgtcgcagctgtgagggtggccgaagtggaaacaggcagaacaacacctctcggacaagtgccaagagactggcgacagcggtgccttagagccctccaggagggactagagcaagcccatttcgggagcccactgctgcccgctcctggcgctctgcctggatggttggaggctcttcgagttgcgctgcctgtggagttggcaacagctgaggctcttgtggccccatgctgcccaccacaatacaatgtcgtccagttatgggctcacactctgcattccggtctgagaaggtccttgcagaacctgctggccggaccagagctggaggctgctgacgcattcgctttgttgcactgggccttgcacgtgtacctgggtcaggagatgatgggatccctggagcttggcccagaagccgacgtctctcagctggagcctctgctcactctcgagaacatagagcaactagaagctaccttcgttgccaacattcaggcttcagtcagccagtggctgcaaaacgctctggatggggaagtggcagaatggggtcgagaacacgggcctaataccgatccaagcggcagttactattctcctatgcctgccatcgtgctgcagatcctcgaggaaaacatacgggtcgcttctttggtgagtgaatcgctgcaacagcgcgtgcacggaatggccctcagcgaactgggcactttcctgagatctttctcagacgccctcatccgtttttcacgtgaccacttccgagggaagtcaatggctcctcattatgtgccatacttactcgccgcactgaaccataagagcgcacttagtagctccgtctcagtgctccagcttgatggcgcaccctctggcgctctggccccagtggaagcggcattggacgagttacagcggcgtatttatcggctcgtgctggaggccttacaagctgaacttcagcccctgtttgctgacctgcccagccggcagtggctgtcctctcccgaactgctgcagtctgtgtgcgaaaggactggcaggttttgtcgcgacttttggcgagtccgaaacccaacagtacagttgcttcttgccgaagcggaaagagccgtcgtactccaatacctgtcagcgctcatgcagggacgtctggtttgtcggggtgccgatgaacggacacaggctgccgagcgcctaaggcacgatgcagctcaattacagcagctcttcttgtctctggggctggaagaaaacgcccactgtgctcccgtgctactagcccttagggagctgctcaatcttagggatccagcactgctgggactggaggtggccggacttagacaacagtttccagatgtttcagaagatcacgtcagtgctctgcttggactccgaggcgacctctctcgagagcagcaccttgcagctctgtcatctctgcaggctgcactgcctcctagcccacgcgcttccagacgagtactgttcagtctggtacccgcaccggctcttgcccctgcatcctgcctccctagtggatcgtgcgctagagctttgctgcttgccgaatag

SEQ ID NO: 222605 - DNA, 2040 bp, synthetic construct
  misc_feature 1..2040: note = Description of Artificial Sequence: Synthetic coding sequence
  source 1..2040: mol_type = other DNA
atggactctgcggcaaaggacgaaatgcaaccagccttgtcaccgggtcctgagtggccagaacaagagcgcgcagaacaattagcccgaggagctgccctaaagtgggcaagcggaatcttttaccgcccagagcaattggccaggctcggtcaatatcgatctagagaggtgcagaggacttgttcccttgaaagtcggctgaagagtgtgatgcagtcctatctggagggtgttcaaactgtgcctgccgctgtgagccacacccagaccttaatcgacgggcagcaatttcttgaagcgtacgtgtcattacgggagctcgagcaactgagagaggatacgtgggcaccattgggaggcctggagctcccagtgttccaggggctggatttactgttcgaggctctgggccaggccgtggaggccgcagcgggtgccgcaggcaaattggctagagaggatcctgcgctcctggtagccgcagtccgagtggccgaagtggaaaccggcagaactacccccctgggacaggtgccacgcgactggcgccagcgctgcctgcgagccctgcaggaaggccttgagcaggcccattttggttcccctctcctcccggcacccggagccttgcctggttggctggaggctctgagagtagcacttcccgtggaacttgcgaccgccgaggcactggtcgcaccttgttgtccaccccagtacaacgtggtgcaactgtgggctcacaccctgcattctggactcagaaggagcctccagaatcttcttgcagggcctgagctggaggccgctgacgcttttgccctgctccactgggccctgcatgtctacctgggtcaggaaatgatgggctcattggaactgggccctgaagctgacgtgtcacagttggagccgctattaacgttggaaaacatcgaacagcttgaagccacctttgtcgctaatatccaaatcctggaagagaacatccgcgtggcaagcctcgtctccgagagccttcagcagagagtccacggtatggccctaagcgagttgggaacgttcctcagatcattctccgacgccttgattagattttctagagaccattttagaggtaagtctatggcccctcactatgtgccttacctgctggctgctctcaatcacaaatcagcactaagttcatccgtctccgtgttacagctagacggcgcaccctccggagctcttgcccctgtcgaagccgctctcgacgagctgcagagacgcatctaccgactagtgctcgaggcccttcaggcagaactgcagcctctctttgctgatttaccgtctcgacagtggctgtcaagccctgaactgctacagtcagtgtgtgagcgtaccggcaggttttgtagggatttctggcgggtgcgcaatccgacagtccagctcctgttggcggaagccgaacgcgcagtcgtgctccagtaccttagcgctcttatgcaagggcgtctggtgtgtagaggagcggacgagcgaacgcaagccgcagagaggctcaggcacgacgcagctcagttgcaacagctctttctcagcctggtgcgcgcttcttgggcgggtcggagggcccgtgttagtgtcgctgggtgggagcgcggactggctcgcgaccctactcccacctgctctggcccaggcggagaaagggcactgagggctggagctgccagacctgaaggagcggcaaaaccccctcgtccgcgagccgcaggtccgggaggaggctggccagcagctacaattagtcgacgggaaagggggccacgactgcggcctctggggccagcacgcggactagtgccaggggcagcgccaggcagagcgcagctcccagccggatgcgctgcggctgtcgcaccccgagagcctccaagacctttgcaacccagtgcaagagcaagggccagggcgggactactgccagcactgggggtactgagacctagcccagccgcaaggaggattaatcacggttgccggtag

SEQ ID NO: 222606 - DNA, 2925 bp, synthetic construct
  misc_feature 1..2925: note = Description of Artificial Sequence: Synthetic coding sequence
  source 1..2925: mol_type = other DNA
atggccgctgaggctgccggtgggaaataccgatctacagtctcaaaatccaaggacccctctggactactgattagcgtgattagaaccctgtcaacatccgacgatgtggaagatagagagaatgaaaaaggcagattggaagaagcctacgaaaagtgtgatcgtgacttggacgagcttatagtccaacattatactgaactgacaaccgccatccgcacttaccagtcaatcaccgagcggatcacaaacagcaggaacaaaattaaacaggttaaggaaaacctgctgtcttgcaaaatgctacttcactgtaagcgagacgagttacgcaaactctggattgagggcattgagcacaaacacgtactgaacctgctggacgagattgagaacatcaagcaagtgccccagaagctcgaacaatgtatggcatccaaacactatctgtccgctacagacatgctggtgagcgccgtggaatccctggaggggccactcttacaggtggaggggctcagtgacctcagattggaactccactccaaaaaaatgaatctgcacctcgtgctgatcgatgagctacatagacatctttatatcaagagtacatctcgggtggtgcagcgtaacaaggagaaagggaagataagttctcttgtaaaagacgcctccgtccctttgatagatgtcacaaacctgccaacaccaaggaagtttctggacactagccactattctacagccggatcttccagtgtgcgtgagattaacctgcaggacatcaaggaagacctagagcttgatccagaagaaaattctacattgttcatgggaattctgatcaagggtctcgccaaactgaagaaaatccctgaaacagtgaaagctatcatcgagagactcgagcaggagttgaaacagattgtgaaaagatcaactactcaggtggcagattccggctatcagagaggcgaaaatgtgactgtcgagaaccaaccgagactgcttttggagttgttagaactgttgtttgacaaatttaatgctgtcgctgctgcccactccgtggtgctgggttacctgcaagacactgtggtgactccacttacccagcaagaggatatcaagctgtatgacatggccgatgtctgggtgaagatccaggatgtactgcagatgctgctcaccgaatatcttgacatgaaaaacactcgcactgcttcagaaccttccgcgcaactgtcctatgccagcacgggaagagagtttgccgcttttttcgccaagaagaaaccccagcgacccaagaactcattgttcaagttcgagtctagctcacatgcgattagtatgtccgcctacctgcgggaacagagaagggaactgtacagtaggtctggggagttacaaggcggacccgacgacaacctgattgaagggggaggaaccaagtttgtgtgcaaaccaggcgctagaaatataacggttattttccaccctctcctgaggttcattcaggaaattgagcatgccctgggcctggggcctgccaagcagtgtcccttgcgcgagttcctgactgtttacattaagaacatctttctcaaccaggtgctcgcggaaatcaataaggaaatcgagggagtaacaaagacatctgatcctttgaagattctggcaaatgctgacacaatgaaggtgctcggtgtgcagagaccccttctccagagtacgatcatcgtggagaagacagtacaggacctactcaatcttatgcacgatctgtccgcctactctgaccagtttctgaatatggtatgcgtgaaacttcaggagtataaggatacatgcacagcagcctatcgtgggatagtgcaaagtgaggagaaactcgtcatctcagccagttgggccaaggacgatgacatctcccggctcctgaagtccctgcccaattggatgaatatggctcagccaaagcagctgcgtccaaaacgcgaggaggaagaagatttcatcagggccgcattcggcaaggagtccgaggttcttataggaaatctgggcgacaagcttatcccgccacaggatatcctgagagacgtgtcagacttgaaagcactcgccaacatgcatgagagcctcgagtggcttgctagcagaactaagagcgctttcagcaatctgtctacatctcagatgttatctcctgcccaggattcacatacaaacacagatttacctccagtgtctgaacaaatcatgcagacactgagcgaacttgccaaatcattccaggatatggctgaccggtgcctcctagtgctacacctcgaggtgcgggtccactgttttcattatcttatacctctcgcaaaggaagggaactatgcaatagtagccaacgtggagtccatggactatgatccactggtagtcaagcttaataaggatatcagcgccatagaggaggctatgagtgctagtctgcagcagcacaagttccaatacattttcgaagggctggggcatcttatctcctgcattcttataaacggagcccagtatttcagaagaataagtgaatccggaatcaagaagatgtgtagaaacatcttcgttctccagcaaaacttaaccaatattactatgagtagagaggcggacctggacttcgcccgacagtattatgagatgctttacaacacagcggatgaacttctcaacctcgtggtagatcagggagtcaaatatacagaactcgaatacattcatgctctcaccctgctgcaccgcagtcaaacaggggtgggggaactgactactcaaaacacgcggcttcagcgattaaaagaaatcatatgcgaacaggctgctatcaagcaggccacaaaggacaaaaaaatcactaccgtttag

SEQ ID NO: 222607 - DNA, 1422 bp, synthetic construct
  misc_feature 1..1422: note = Description of Artificial Sequence: Synthetic coding sequence
  source 1..1422: mol_type = other DNA
atggccgcagaagccgctggaggcaaatatagaagtactgtgtccaagagcaaagaccctagcggattacttatcagtgtgatacggacattgagtacctccgacgacgtggaggacagagagaacgaaaaggggaggctggaggaagcatacgagaagtgtgatcgggacctggacgagctgattgtgcagcactatacggaattgactacggcaatccgaacatatcagagcatcacagagagaataaccaattctaggaataaaattaaacaggtgaaagagaatctactcagttgtaaaatgctcttgcactgtaagcgagatgaattaaggaagctgtggatcgaggggattgagcacaagcatgtgctaaatttgctggatgaaattgaaaatattaaacaggtcccccagaagctggagcaatgcatggccagcaagcactatctgagcgccacagacatgctggtgtctgccgttgaatccttggagggtcccctgctgcaggtggagggactgtctgatctgcgcctagagcttcacagcaagaagatgaacctgcatcttgtgttaatagacgagttgcaccgacacctgtatattaagtctacctctagggttgtccaaagaaacaaagaaaaagggaagatctcgagtctggtcaaagacgcaagtgtgcccttgatcgatgtgaccaacctcccgacccccaggaagtttctagacacctcacattactcgaccgccggatcttcgtctgtacgggaaatcaaccttcaggatattaaggaggatcttgaattggatccggaggagaattccacacttttcatgggaatcctgatcaagggcctcgctaagctgaaaaaaatacctgagacggtgaaggctatcattgagaggctcgagcaggaactgaagcaaatcgtgaagcggagcaccacccaggtcgcggattccggctaccaacgtggggaaaacgtgacggtggaaaatcagcctcgcctgctgctggagctgcttgagctgctgtttgacaagttcaatgccgtggccgcagcccatagcgttgttctgggctatctccaggataccgtagtgaccccactcacgcagcaagaagacatcaaactgtacgacatggctgatgtctgggtgaagatacaggacgttctccagatgcttttaacggagtacctggacatgaaaaataccagaaccgcctctgagccctcagcccaactctcctacgcgtctacgggcagggaattcgccgcattctttgctaaaaagaagccacaaagacctaaaaacagtctcttcaagtttgaatcctcatcacacgctataagtatgtctgcctatctgagggagcagcgacgggaactctacagtcgatccggcgagctacagggctag

SEQ ID NO: 222608 - DNA, 2622 bp, synthetic construct
  misc_feature 1..2622: note = Description of Artificial Sequence: Synthetic coding sequence
  source 1..2622: mol_type = other DNA
atgctgctgcactgcaaacgcgacgaactgaggaaattatggatcgagggaatcgagcataaacacgttctcaacctgctggatgagatcgaaaatatcaaacaagtgccccaaaagctggagcagtgcatggccagcaagcattatctgtcagctacagatatgctcgttagtgctgtcgaaagcctggagggtccacttttgcaagtagaaggactgtcagatctccggctcgaattacattctaagaagatgaacctgcacctagtactgattgatgaactgcaccggcatctgtatatcaagtcaacctcacgggtggtccagcgaaacaaagagaagggcaagatttcctccctggtcaaggatgcctcagttcctctgatcgatgttaccaatttaccaaccccacggaagtttctggacaccagccactactccaccgccggatcatctagtgttagagaaatcaatttacaggacatcaaggaggacctggagttagacccagaagaaaattccaccctgttcatgggaattctaattaaaggactggccaagttgaagaagataccagagaccgtaaaagccattattgagagactcgaacaggaactgaaacagatcgtgaaaaggtcaacgacccaggtggcagattctggttatcagcggggtgagaacgtcacagttgagaatcaacctcggttgctactggagctccttgaactgctatttgacaaatttaatgctgtcgccgctgcccactcggtggtgctgggatacctccaggatacagtggtgacccccttgacacagcaggaggacatcaaactttacgacatggccgatgtatgggttaaaattcaggatgtgctgcaaatgctgttgactgaatacctcgatatgaagaacacccgtacggcttcagagccttctgcccaattatcctatgcaagcactggccgagaatttgcagctttttttgctaaaaaaaagccccaacgccctaaaaattccctcttcaaatttgagagctcaagccacgccatcagcatgagcgcctaccttagggaacagcggagggagctgtacagccggagcggggaattgcagggaggcccagacgataaccttatagagggcggtggcaccaagtttgtttgtaagccaggcgctaggaacataaccgttatctttcatcccctcctgaggtttatacaggaaatcgagcatgcactcggcctgggtcccgcaaagcagtgtcccctccgcgagttcctcactgtttacattaaaaacatttttttgaaccaggtactcgcagagatcaacaaggaaatcgaaggagtcacaaaaacaagtgatccattaaagattctggccaatgctgacactatgaaggtcctcggcgtgcagaggcccctgctacaatctactatcattgtcgaaaaaacagtgcaggatttgttaaatctaatgcatgacctgtctgcttactccgatcaattcctaaacatggtatgcgtgaagctccaggagtataaggatacatgcaccgcagcctacagaggcatagtgcagtcagaagaaaaactcgttatttccgcttcttgggcaaaagacgacgacatcagtagactgctaaaaagcttgcccaactggatgaacatggctcagcctaagcagttgagaccaaaaagagaggaagaagaggactttattagagccgcattcgggaaggaatccgaggtgctcatcggtaatctaggcgataagctcattcctcctcaagatatcttgcgtgacgtgtcagacttaaaagcactcgcaaacatgcacgagtcattggaatggctggcatcaaggaccaagagcgccttttctaacttgtccacatcccagatgctgtcccctgcccaggatagccacacgaatacagatctgcctcctgtgtccgaacagataatgcagaccctctcagaactggccaagagttttcaagacatggcggatagatgtctgttagtgctccatcttgaggtgcgggtgcattgtttccattaccttatcccactcgctaaagaaggaaactacgcaattgttgccaacgtggaaagtatggactacgacccactggtcgttaagttgaataaggatataagcgccatagaagaggctatgtcggcttccctgcagcagcataaattccaatacattttcgaaggcctcgggcacctaatttcctgcatcctcattaatggggctcagtatttcaggagaatatccgagtctggaatcaaaaaaatgtgccgtaacatctttgttctgcaacaaaatctgacaaacatcacgatgtccagggaagccgatctggattttgctagacaatactacgaaatgctttacaacactgccgacgagttgctgaatctggtcgtggaccaaggtgtgaaatatacagagctggagtacatccatgccctgaccttgctgcacagatctcagacaggtgtgggtgagctgactacacagaacacacgtctgcagcgactgaaggaaatcatttgcgaacaagctgctatcaagcaggccactaaagataaaaagattacaaccgtgtag

SEQ ID NO: 222609 - DNA, 789 bp, synthetic construct
  misc_feature 1..789: note = Description of Artificial Sequence: Synthetic coding sequence
  source 1..789: mol_type = other DNA
atgcacgagagcctggagtggctcgcctcgcgcaccaagtctgctttttccaatctgtctacttcccaaatgctatctccagcccaagatagccacaccaatactgatctcccacctgtctcagaacagatcatgcagacattgtccgagctagctaaatcgtttcaagacatggcggaccggtgcttgctcgtgttgcacctggaggtccgagtgcattgttttcactaccttatccctttggcgaaggagggcaattacgccatagtcgccaatgtagaatctatggattatgacccacttgtggtgaagctgaacaaggatattagcgccatcgaagaggccatgtccgcttctctgcagcagcataaattccaatatattttcgagggcctgggccatctcatctcatgcatactcattaacggagctcagtacttccgacgaatttcagagagtggaatcaaaaaaatgtgtcgaaatatctttgttttacagcagaacctcaccaatattaccatgtcccgtgaggcagacttggatttcgccagacagtattacgagatgctgtacaatacagccgatgagctgctgaacttggtagtcgaccagggagtgaagtatacagagctcgaatacatccacgccctgaccctacttcatcgctctcagaccggggtgggcgaactgactacacaaaacactagattacagcggttaaaagagataatctgcgagcaagccgcaatcaaacaagcaacaaaggataaaaagatcaccactgtctag

SEQ ID NO: 222610 - DNA, 1755 bp, synthetic construct
  misc_feature 1..1755: note = Description of Artificial Sequence: Synthetic coding sequence
  source 1..1755: mol_type = other DNA
atggcaaatctcgtcacggcatccaagacaaaaatgtcaaaaggagaggatcctaataatccaagaagtatcaagcggattagtcaagggggtagagataaccaccttgctatcgccaagtgcgatttgacccagttaaagaaaaaacagagcgaggtttccaacgggagtagagagaccatcagtatgaagacatgctgtcagcacggagatcgcggttactggagtacgggctactactggcgcggaggcccagatgataatttgatcgaaggaggcggaaccaaatttgtgtgcaagccaggagccaggaatattaccgtgatctttcatcctttgttgcgtttcattcaagaaattgagcacgccctaggactcgggccagcgaagcagtgccccttgcgtgagtttctgaccgtttacattaaaaatatcttcttgaatcaggtgttggccgagatcaacaaagaaattgaaggtgttacaaaaacctccgatcccttgaagatattggcgaatgccgataccatgaaggttctaggcgttcagcgtcccctgctccaaagtaccatcattgtcgagaagactgtacaggatctcctcaatctgatgcacgacctttcggcctattctgatcaattcctgaatatggtgtgcgtcaaacttcaggagtataaagatacgtgtactgcggcatatagaggcatcgtgcagagtgaagaaaaattggtgatatctgcttcttgggccaaggacgatgatatttcaaggctcttaaaatccttacctaattggatgaatatggcccaacccaaacagctacgaccgaaacgagaggaggaggaggattttattcgcgcagcattcggaaaggagtccgaggtgctgattgggaacctgggggataagctcattcccccacaagatattctgcgtgatgtgtctgatctgaaggcgctggccaatatgcacgagagccttgagtggctggcatccagaaccaaaagtgccttttctaatctgagtaccagtcagatgctgagcccagcgcaggattctcacaccaacactgacctaccgcctgtgtccgagcagatcatgcagacactgagcgagttggctaaatcctttcaagatatggccgataggtgtctgcttgtcctgcatttagaggttcgtgtccattgttttcattatctgattcctctcgccaaggagggaaactacgcaattgtcgcaaatgtggagagcatggactacgatccgctggtcgtgaaattgaacaaagatatctccgctattgaggaagctatgtcggcttctctacaacagcacaaatttcaatacatctttgaaggtctcggccatctaatctcatgcattttgattaacggggctcagtatttccggagaatcagtgagtccggaatcaagaagatgtgcaggaatatattcgtactgcagcagaacctgactaacattacgatgagtcgtgaagcagatcttgactttgcacggcagtattacgagatgctgtacaacacggccgacgaactgctgaacttagtggtagatcagggagtgaagtataccgaacttgagtatattcacgctctcacgctgctccacagaagtcagaccggtgtcggcgagctgacaacccagaacactagactgcagagactgaaagaaattatatgtgagcaggccgcaatcaaacaagccacaaaggacaagaagattactaccgtgtag

SEQ ID NO: 222611 - DNA, 1782 bp, synthetic construct
  misc_feature 1..1782: note = Description of Artificial Sequence: Synthetic coding sequence
  source 1..1782: mol_type = other DNA
atggccgacgtgtgggttaagatccaagatgtccttcagatgcttctgacagaatatctggacatgaaaaacacaaggaccgcttcggaacccagcgcccaactgtcttatgcaagcactggaagagagtttgcggcattctttgcaaagaaaaagccgcagaggcccaaaaattctctgtttaagtttgaaagttcatcgcatgccatttcaatgagcgcctacctgagggagcagcgcagagagctgtattcaaggagcggcgagttgcagggcggacccgatgataacctaatcgaagggggaggaactaagtttgtgtgcaaacctggcgcaagaaatatcaccgttatcttccaccctttgcttcgtttcatacaagaaatcgagcacgcccttggcctgggcccagctaagcagtgcccattaagggagttcctaaccgtgtacataaaaaatatctttcttaatcaggtgctggccgaaatcaacaaagagatcgaaggggtcactaagactagtgatccactaaagattttagctaatgctgatactatgaaagtactgggcgtccagcgcccactcctccagagtaccataattgttgaaaagaccgtccaggacctgctgaacctcatgcacgatctgtcagcttattccgatcagttcctgaacatggtgtgtgttaaactgcaggagtacaaggacacttgtacagccgcttatagaggtatagtgcagtccgaggaaaagctggttattagcgcgtcttgggctaaggacgacgatatctcaagactccttaagtccttaccaaactggatgaacatggcgcagcccaagcaactcaggcctaaacgcgaagaagaagaggattttattagggccgcattcgggaaggagtccgaggtgctgatagggaatctaggggacaaattgattcctccacaggacatcctaagggacgtgtcagatttaaaggccctcgcaaacatgcacgagtcgcttgagtggctggcttcgcggacgaaaagcgccttctctaacttatcaactagccagatgctttcccctgctcaagattcacacaccaatacagacttaccacctgtatcggaacagatcatgcaaactttatccgagttggctaaaagttttcaggatatggcagatcgatgtctgttggtacttcacttagaggtgagagtgcattgcttccattatttgattcctcttgctaaggagggcaattacgctattgtggccaacgtcgaatctatggactacgatcctctagtagtgaagttgaataaggacatttcagccatcgaggaagcgatgtcggcttccctgcaacaacataagtttcagtacatcttcgagggcctgggccacctaatctcttgcatcctgatcaatggagcccagtacttcaggaggataagcgaatccgggattaagaaaatgtgccggaacatttttgtattgcaacaaaacctgaccaacattacaatgtccagggaggcagatcttgacttcgcccgtcagtattatgaaatgctgtacaacactgcagatgagttgctcaacctcgtggtagatcagggagtgaagtacaccgaactggaatatattcacgccctcaccttgcttcaccggagccagaccggagttggagagttaaccacacagaatactcgtctgcagcgcctcaaggagatcatctgcgaacaggcggcaatcaaacaagcaactaaagacaagaagattactacggtctag

SEQ ID NO: 222612 - DNA, 1932 bp, synthetic construct
  misc_feature 1..1932: note = Description of Artificial Sequence: Synthetic coding sequence
  source 1..1932: mol_type = other DNA
atggctacaaccgcggagctttttgaagagccctttgtggccgatgagtacattgaacggctcgtgtggcgcacacccggtggcggttctcggggaggtcctgaagcgtttgatccaaaacgcctactcgaggaatttgtgaaccacatccaggagcttcagattatggatgagcgcattcagagaaaggtggagaaactcgaacaacagtgtcaaaaagaagccaaggagtttgctaagaaagttcaggaactccaaaagagtaaccaaattaaagaagctgcagacatcatacagaagctgcatctgatcgctcaggagctgccatttgatcgattctccgaggtgaaatccaaaattgcgtcaaaatatcacgatttggaatgccaactgatacaggaatttaccagcgcacagcgacggggtgaaatcagccgcatgcgggaggtcgcggctgttctgctgcactttaagggatactctcattgcgtggatgtatacattaaacagtgtcaggaaggcgcttatctgcgaaacgatattttcgaagacgccggtatcctgtgtcagcgcgtgaacaaacaggtgggcgacatcttttctaaccccgagaccgtcctcgccaagctaatccaaaacgtgttcgagataaagcttcagtctttcgtcaaggagcagctcgaggaatgtcgaaagtccgatgcagagcaatacttgaaaaacctgtatgatctgtacacccgtacaaccaacttgtcctccaaactgatggaatttaacctgggcactgataagcaaacctttctctcaaaactgattaaatctatttttatctcctatctcgaaaactatattgaggttgaaacgggctacttaaaaagtcgtagcgctatgattctccaacggtactacgatagcaagaatcaccagaagagatcaattgggacagggggaatccaagacctaaaagagcgaataagacagcgaacaaacctgccccttgggccttccattgatactcatggggaaactttcttatcgcaagaggtggtggtaaaccttctgcaggaaacgaagcaggcctttgagagatgccaccgactgtctgatccttcagacctgcctcggaatgcttttcggatttttacaatcttggtggagttcctgtgcatagaacacatcgactacgcacttgagacgggactcgctggaataccatccagtgatagccgcaatgctaatttatactttcttgacgtggtgcagcaggccaacaccatcttccacttgtttgataaacaattcaacgaccatctgatgccgcttatctccagttcaccaaaactgtccgagtgtctgcagaagaagaaggagataatcgagcaaatggagatgaagctggacacgggcattgatagaaccctgaactgcatgatcgggcagatgaagcatattctggccgcagaacagaaaaaaacggacttcaagccagaggacgaaaataacgttctcatacagtacaccaatgcttgcgtgaaggtgtgcgcttatgtccgcaagcaggtggagaagattaaaaatagcatggatggcaagaacgtcgatacagtcctcatggagctgggcgtaagattccaccgccttatttacgaacatctccagcagtactcttactcctgcatgggagggatgctggccatttgcgacgtggcggagtacagaaaatgtgcaaaggacttcaagatccccatggtcctgcatttattcgacactctccacgctctttgtaaccttctggtggtggccccagacaatcttaagcaggtctgttccggtgagcagttggctaacttggataagaatattctgcacagtttcgtacagctgagagccgattaccgcagcgcaaggctcgcaagacacttctcttag

SEQ ID NO: 222613 - DNA, 2127 bp, synthetic construct
  misc_feature 1..2127: note = Description of Artificial Sequence: Synthetic coding sequence
  source 1..2127: mol_type = other DNA
atggccacgacagctgaactgttcgaggagcctttcgtggctgacgagtatatcgagcggcttgtgtggcgaaccccaggaggcggaagccggggagggccagaagcctttgacccaaagagattgttagaggagttcgtcaaccacatccaggaactccagattatggatgaacgcattcagcggaaagtggagaaattggagcaacagtgccagaaagaggccaaagagttcgcaaaaaaagtgcaggagttacagaagagtaaccaggtggcatttcagcacttccaagagctcgacgaacacatatcatacgtggccacaaaagtttgccacctcggcgaccaattagaaggagtgaacacccccaggcagcgggcagtggaggcccagaaactgatgaagtatttcaacgagtttctggatggcgagctgaaatccgatgtgttcacaaactcggagaagataaaagaagccgctgatatcatccagaagttgcacctgattgctcaggagctacccttcgaccgctttagcgaggtgaagtcaaagatagcctcaaagtaccacgacctagaatgtcaattgatccaggagtttacttcggctcagcgcaggggcgagatctcgcgcatgagggaggtcgcagcggtgctactgcacttcaagggatatagtcattgcgttgatgtctatattaaacagtgccaggagggcgcttacctgcgaaacgacatctttgaagacgccggtattctatgccaacgcgtgaacaaacaagtgggagatattttttctaacccggagacagtgctggcaaaactcattcagaatgtcttcgaaattaaactgcaaagctttgtcaaagagcagctggaggagtgtcggaagtcggacgccgagcagtatcttaaaaacctctatgacctgtacacaaggacaacaaacttgagcagcaagctcatggaatttaaccttgggaccgacaagcagacttttctttccaaactaattaagtcaattttcatctcttaccttgaaaactacatcgaagttgagaccggataccttaaaagcagatccgccatgattttgcagaggtactacgactccaagaaccaccaaaagcggtccatcggcactggtggcattcaagatcttaaggaaaggatacgccagcggactaacctgccactcggcccaagtatagacactcacggggagacattcctgtcacaggaggtagtggtcaacctccttcaagaaacaaagcaggccttcgagaggtgccaccgattaagtgacccaagcgacctccccagaaacgcgttcagaatcttcactattctcgtagagttcctttgtattgaacacattgactacgccctcgagacgggcttggcaggaatcccgagcagcgattcacgcaacgcaaatttgtacttcttagatgtggtgcaacaggctaatacaatctttcatctctttgacaaacagtttaacgaccatctgatgccactgatatctagcagtcctaagctgtctgagtgcctacaaaaaaagaaggaaataatagagcaaatggagatgaagttagacactggcatagaccgcacactcaactgcatgataggccagatgaagcatatcttggccgctgaacagaaaaaaacagactttaaacccgaagatgagaacaacgtgctgatccagtatacaaatgcctgtgttaaggtctgtgcctacgttcggaaacaggtggagaaaataaagaattccatggacggaaagaatgtcgacacggtgctcatggaactgggcgtgcggtttcatcggttgatctatgagcacttgcaacagtactcttactcatgtatggggggtatgctggccatttgcgacgtagctgaatatagaaaatgtgctaaggattttaaaattcctatggtgctccatctgttcgacacgttacatgccctgtgcaacctgctagtcgtagcgccagataatctgaagcaagtttgtagtggtgagcagctagcaaatctcgataagaatatacttcattcatttgtgcagctgcgggcagattaccgctcagctaggcttgcgagacatttttcttag

SEQ ID NO: 222614 - DNA, 2415 bp, synthetic construct
  misc_feature 1..2415: note = Description of Artificial Sequence: Synthetic coding sequence
  source 1..2415: mol_type = other DNA
atggcagagaactctgagagcctaggaacagtgccagaacatgagagaatcctgcaagagatcgagagcaccgacactgcctgtgtgggtcctacacttcggagtgtgtatgatgaccaacctaatgcccataaaaaatttatggaaaagctggatgcctgtattcgcaatcatgataaagagattgagaaaatgtgcaatttccaccaccaaggattcgtggatgccatcacggaactcctgaaggtgcgaaccgatgccgaaaagttgaaggtacaagtcactgacacaaaccggcgattccaggacgctggaaaggaggtaatagtccacactgaagacattattaggtgtcgtattcagcagagaaatattacaacagttgtggaaaagcttcagctctgcttacccgtgctggagatgtactccaaactaaaggaacagatgagtgctaagcgatattacagcgcccttaagacaatggagcagcttgaaaatgtctacttcccctgggtcagtcagtacaggttctgtcagctgatgattgaaaatctccctaaactacgggaagacattaaagaaatcagtatgagcgacctcaaggactttctggagagcatccggaagcattccgacaaaataggcgagacagccatgaaacaggcccaacaccagaagacatttagcgtaagcttgcagaagcagaacaagatgaagttcggaaagaatatgtacattaaccgagatcgcatccctgaagagcgcaacgagaccgtgctgaaacatagcctcgaggaggaagatgagaacgaagaggagatactgacagtgcaggatctggttgatttttccccagtctacaggtgcctacacatttactcagtgctgggagacgaggagacctttgaaaattactatcgtaagcaaagaaaaaaacaagcacggttagtgctacaaccccagtcaaacatgcatgaaacagtggacggatacaggcggtactttacccaaatagtcggcttcttcgtggtagaagatcatattttacacgtgacgcaagggctagttacccgcgcatacactgacgaactttggaatatggcccttagcaagatcatcgccgtgctccgcgcacactccagttactgcactgaccccgaccttgtcctcgaactgaagaaccttactgttatctttgccgataccctgcaggggtacggttttccggttaaccggttattcgaccttcttttcgagattcgggatcagtacaacgagacattgctcaagaagtgggctggcgtgtttcgcgacatattcgaagaggataactacagcccgatcccagtggtgaatgaagaagagtacaaaatcgtaattagcaagtttccatttcaagatcctgatctggagaagcagagctttcccaagaagttccctatgtcacagagtgtgcctcatatttatattcaggtgaaggagttcatatacgcaagcctcaaattttcagagagcctgcacagatcgagtaccgagatagatgatatgctccgtaaaagcacaaatcttctcttgacacgcactctgagcagttgcttgctgaacttaataaggaagccacatataggactcaccgaacttgtgcagatcatcattaacaccacccacctggaacaggcatgcaaatatctggaggattttatcacaaacatcaccaatatctctcaggaaacagtgcacacaaccaggctgtacggcttatctacctttaaggatgcacgtcacgccgctgagggcgagatatacacaaagttgaaccagaaaattgatgagttcgtgcagctcgccgattacgattggacgatgtcagaacccgatgggcgagccagcggatacctgatggacctcattaatttcctgcggtctatatttcaggtttttacccacctgcccggtaaggtggcacagactgcctgtatgtccgcctgccagcatctgtctacttccctgatgcagatgctgctcgactccgaactgaaacagatttctatgggcgcagtccagcaattcaacctggacgtcattcagtgtgagttgtttgcctccagcgagcctgtaccgggattccagggtgacacactgcagctggccttcatagacctgcgacagctcctagacctttttatggtttgggattggagtacatatttggccgactacgggcaaccagcgtccaagtatctgagggtcaaccctaatacggctctcacgctcctggaaaaaatgaaggatacttcaaaaaaaaataatatattcgctcagttcaggaagaacgatagagacaaacagaagctaattgaaaccgtggttaagcagctgcggagtctagtgaacggtatgtcacagcacatgtag

SEQ ID NO: 222615 - DNA, 462 bp, synthetic construct
  misc_feature 1..462: note = Description of Artificial Sequence: Synthetic coding sequence
  source 1..462: mol_type = other DNA
atggcagagaatagcgaatcgctgggaacagtgccagaacatgaaagaatccttcaggagatcgagtcaacagacaccgcctgcgtaggcccaacacttcgctccgtgtacgacgaccagccaaacgcccataagaagtttatggagaagctggatgcctgcatcagaaaccacgataaggaaatcgagaagatgtgcaatttccaccaccagggattcgtggacgcaatcacagaactgctcaaagtccggacagacgccgagaaactgaaggtccaagtcacagatactaatagaaggttccaggacgctggcaaggaagtaattgtccacacggaagacatcattaggtgtagaatccagcaaagaaacatcactacagtggtcgagaagctccagctgtgcctgcccgttctagagatgtactcgaaactgaaagaacagatgagcgctaaacgctag

SEQ ID NO: 222616 - DNA, 2463 bp, synthetic construct
  misc_feature 1..2463: note = Description of Artificial Sequence: Synthetic coding sequence
  source 1..2463: mol_type = other DNA
atgtgctgcgtgggaggggcagggagctgcagcgataccggaaagctaggggcttgcagagcaatgctggaggaagagactgaccagacatacgaaaacgtgttagccgagattcaatcatttgagctcccagtggaggctaccttacggagcgtgtacgacgaccagcctaacgcccacaagaaattcatggagaaactggacgcttgtatccgaaaccacgataaggagatagaaaagatgtgcaattttcatcatcaggggttcgtggatgcaataaccgaactcctcaaggtgcgcactgacgcggaaaaattgaaggttcaggtcacggacacgaatagaagatttcaggatgcaggaaaagaggttattgtgcataccgaagatatcatccggtgtcggatccaacagcggaacatcaccaccgtggtggagaaactccaactttgcctgccggtgctcgagatgtactcaaagttgaaggagcaaatgagcgcgaaaaggtattattcggctctgaagaccatggagcagttggaaaacgtctacttcccctgggtgagtcaatacagattttgccagctgatgatcgaaaatctgcctaagctgcgtgaggatattaaggagataagtatgagtgacctgaaggactttttggagagcatccgaaagcactctgacaagattggcgagacagcaatgaagcaagctcaacatcaaaagacgtttagcgtgtcactgcagaagcaaaacaagatgaagttcggaaagaatatgtacatcaaccgcgaccggatccccgaggagaggaatgagaccgttctgaagcactctttggaagaagaggatgaaaatgaagaagaaattctgacggtccaggacctggtggacttttcccctgtctaccgatgcctgcacatttacagcgtgttgggtgacgaggagacattcgaaaattattatcgcaaacaacgcaaaaaacaggctcggctcgtgttacaaccgcagagcaacatgcacgagactgttgacggatatagaaggtactttacccagatcgtaggatttttcgtggtcgaggatcacattttgcatgttacccagggtctggtgactcgcgcttacactgacgaattgtggaacatggccctgtcgaaaatcatcgctgtgctgcgcgcacattccagctattgtacagaccccgacctggtactagagctgaaaaatttgacagttatctttgctgatacgcttcagggatacggcttccctgtgaaccgattgttcgaccttctgtttgaaattagggatcagtacaatgagacattactgaagaaatgggccggtgtgtttcgagatatttttgaggaagacaactactcacccattcccgtcgtaaatgaggaagaatataagattgttatctctaaattcccttttcaggatccggatctagagaaacaaagtttccccaagaaattccctatgtctcagagcgtgccccacatctacatccaggtgaaggaatttatttatgccagcttgaagttctctgaaagtctgcataggtccagcaccgagattgacgatatgttgcggaaaagcactaatctgctcctgactcgcacgctaagtagctgccttctcaacttaatcagaaagccacacataggcttgaccgaactcgtgcagattataatcaacactacccacctggagcaagcatgcaaatacctggaggatttcattactaatattacaaacataagtcaggagacagtccatacgacccggctttatggtctgtctacattcaaggatgccagacacgcagccgagggggagatctataccaagctgaatcaaaaaattgacgaatttgtgcaactcgcagactatgattggactatgagtgaacccgacggacgcgctagcggttacttgatggaccttataaatttcctgcggtctatctttcaggtattcactcacctgccgggaaaagtggctcagacagcctgcatgagtgcctgtcaacacctttccacttctctgatgcagatgctgctcgacagtgaactcaagcagatttctatgggcgctgtgcaacagtttaatctggatgtcattcagtgcgaactgttcgccagctctgagcccgttcctgggttccaaggggacacactgcagttggcatttattgatttgcggcagctgctggatctgttcatggtttgggattggagtacatatctcgccgactacggtcagcctgcctcgaagtacctccgggttaatcccaatacagcactcacgctgttggagaagatgaaggatacctccaaaaagaataacatctttgcgcagttcagaaaaaacgatagagataaacaaaagctcatcgaaacggtggttaagcagctcaggagtttggttaatgggatgagccagcacatgtag

SEQ ID NO: 222617 - DNA, 2400 bp, synthetic construct
  misc_feature 1..2400: note = Description of Artificial Sequence: Synthetic coding sequence
  source 1..2400: mol_type = other DNA
atgttggaggaagaaacagaccaaacgtacgagaacgttctagccgagattcagagctttgagctcccagtggaagccactctgcgatctgtgtacgacgaccagccgaacgcgcacaagaagtttatggaaaagctggatgcctgcattagaaatcatgacaaggagatagagaagatgtgtaacttccaccatcaggggtttgttgacgccattaccgagctcctcaaagtcagaaccgatgccgagaaacttaaagttcaggtaaccgatacaaaccgcaggtttcaggacgcaggaaaggaggtgattgtgcacaccgaagacataatcaggtgccgtatccagcaacggaacatcaccacagttgttgagaagttacaactgtgcctgcctgtgctggaaatgtactcgaaactcaaggagcagatgtccgcaaaacggtattatagcgctctgaaaactatggagcagttggaaaatgtctacttcccttgggtgagtcagtaccggttttgccaattgatgatcgaaaatctccccaaacttagggaggacattaaagagattagcatgtcagaccttaaagatttcctggagtccatccggaagcactccgacaaaatcggggaaacagccatgaagcaggctcagcaccaaaaaacattctcagtgtcgctgcagaagcaaaacaagatgaagttcggtaagaacatgtatatcaatagagataggatccccgaagagagaaacgagactgtcttgaagcactcactcgaggaggaagacgagaacgaggaagagatccttaccgtgcaggacctagtggacttttctcctgtttacaggtgcctgcatatttattcagtattaggggatgaggaaacattcgaaaattactatcggaagcagaggaagaagcaggccagactggtgcttcaaccacagagtaatatgcatgaaacagtggacggctacaggaggtatttcactcaaattgtgggtttctttgtagtggaagatcacatccttcacgtaacccagggattggtcacacgggcttatactgatgaactgtggaatatggcattgagcaagatcattgctgtcctgagggcccattcctcctattgtaccgatcccgatctggtgctggagttgaagaacctcactgttatcttcgcggacacattgcagggctatggattccccgtaaatcgcttatttgatctgctgtttgagattcgtgaccaatataacgagacccttctcaagaagtgggccggagtcttccgcgacatcttcgaagaagacaattattcgcctattcccgtggttaacgaggaagaatacaaaatcgtcatcagtaagtttccttttcaggatccagatctagaaaagcaatcttttccaaaaaaattcccaatgtctcagagcgtgccccatatttatatacaggtgaaggagtttatctacgcttcactaaagttctcagagagccttcatcgttctagcacagagatagatgatatgttgcggaagtcaacaaacctgctgctgactcggactttaagctcttgtttgttaaatttaatccggaagccacacatcggcctcactgaactggtgcagatcatcatcaacactacccaccttgaacaggcttgtaagtatctggaggattttattactaatatcactaacatcagccaggagaccgttcatacaaccagactttacggcctgtcaacctttaaggatgcacgacacgccgcagagggtgagatctacacaaaactgaaccagaaaattgacgaattcgtccagctagcagattacgactggaccatgtctgagccagatggtagagcctctgggtacttgatggacctgatcaactttttaagaagcattttccaagtgtttacccatcttcctggcaaggttgcccagacagcatgcatgagcgcctgtcaacacctgagcacgagcctcatgcagatgttgcttgactctgaattaaagcagatctctatgggcgcagtccaacaattcaaccttgatgtgatccagtgcgagctatttgcatcgtccgagccggtgcctggctttcagggagataccctccagctggcctttatagacttaaggcaattattagacttgtttatggtctgggattggagcacctacctcgccgattacgggcagcctgcctcgaagtaccttcgcgtcaatccaaatactgctcttaccctgttggaaaaaatgaaagacacgtccaagaagaataatattttcgcacaattcaggaaaaacgaccgtgataagcagaagctaatcgagactgtcgtgaagcagctccgatcgctggtgaatgggatgagccagcacatgtag

SEQ ID NO: 222618 - DNA, 2106 bp, synthetic construct
  misc_feature 1..2106: note = Description of Artificial Sequence: Synthetic coding sequence
  source 1..2106: mol_type = other DNA
atggccgaaaacagcgaaagcttaggaaccgtccccgaacacgagcggatcctacaggaaatcgagtctaccgatacggcatgtgtggggcctaccctccggagcgtctatgatgaccagcctaatgcccacaagaaatttatggaaaaactggacgcctgtataagaaatcatgacaaagagatcgaaaaaatgtgcaacttccaccaccagggattcgtcgatgccataacagagctccttaaggtccgtaccgacgcggagaagctgaaggttcaggttacggacactaacagacgctttcaggacgcaggcaaagaggtaattgtgcacactgaggatatcataagatgccgtatccagcagcggaatattaccactgtcgtggagaaactgcagctgtgcctgccagtactcgagatgtactcaaaactgaaagaacagatgtccgcaaagcgctactacagcgccctgaaaacaatggagcagctggaaaacgtctacttcccttgggtctctcagtacagattttgccaattgatgatcgaaaacctgccgaagttacgagaagatattaaggagatttctatgagtgaccttaaggacttcctggaatctatcaggaagcactcagataagatcggagagacagctatgaaacaggcgcagcaccagaagacattctctgtatcccttcagaaacagaacaaaatgaaattcggcaaaaatatgtatattaacagggaccggattccagaggaaagaaacgaaactgtcctgaaacactccctcgaagaggaggacgagaacgaggaagagggtgatgaggaaacctttgaaaactattatagaaagcagcggaaaaagcaggcacggctggttctacagcctcaaagcaatatgggttatgggtttcccgtgaacaggctgtttgatcttctcttcgaaatccgggaccaatataacgagactttgttaaagaagtgggccggtgtctttcgcgacattttcgaggaggataattatagccccatccccgtggtgaacgaggaggaatacaaaatcgtgataagcaagttccccttccaggaccccgacctggagaaacaaagcttcccaaagaaatttcccatgtcacaatctgtcccccacatctatattcaggtaaaagagttcatttacgccagcctgaagttcagcgagtctcttcatagaagcagtacggagatcgatgatatgctgagaaagagcacaaatttgttgctaacccgcaccttatctagctgcctgctgaatctgattagaaagccccatatcgggctcactgaactggttcagatcattattaatactactcacttggagcaggcctgcaaatatctggaagattttatcactaatattacaaacatctcacaagagacagtgcataccacacggctgtacggtctcagcacctttaaggacgctaggcacgcagcagaaggggagatctacactaagctgaaccagaagatcgatgaattcgtgcagctggccgattacgactggacaatgtcagaaccagacggtcgcgcatccggttacctcatggacttgattaatttcctacggagcatctttcaggtgttcacccatctccctggcaaggtggctcagacggcctgtatgagcgcatgtcaacatctctcaaccagcttaatgcagatgttgctggacagtgagttaaaacaaatctccatgggagccgtgcagcagttcaacctggatgtaatccagtgcgagctctttgctagctccgaaccggtgcctggctttcagggcgataccctgcagttggccttcatcgatttgaggcagctcctcgaccttttcatggtgtgggactggtctacataccttgcagattatggacaaccggcatctaagtaccttcgggtcaacccaaataccgccttaactctgctcgaaaagatgaaagatacgtccaagaagaacaacatctttgctcaattcaggaaaaacgaccgggacaaacaaaagctgatagaaaccgtggttaagcaactgagatccctggtcaacggtatgtcgcagcacatgtag

SEQ ID NO: 222619 - DNA, 219 bp, synthetic construct
  misc_feature 1..219: note = Description of Artificial Sequence: Synthetic coding sequence
  source 1..219: mol_type = other DNA
gggaaggtggcacagacagcctgtatgtctgcctgtcagcacctttcaacatcgctgatgcaaatgctattagattctgaactgaagcaaatctcgatgggcgctgtgcaacagtttaacctagatgtcatccagtgtgagctgttcgcttcatcagaacccgtacccggtttccagggggacaccctacaacttgcattcattgaccttagacagtag

SEQ ID NO: 222620 - DNA, 2436 bp, synthetic construct
  misc_feature 1..2436: note = Description of Artificial Sequence: Synthetic coding sequence
  source 1..2436: mol_type = other DNA
atggaacgtgggaagatggccgaggctgaatctctcgagacagcagcagaacacgagcgcattctgcgcgagatcgaatcgacagacacggcttgcatcggcccaaccctgcgaagcgtctacgatggcgaggagcatggacgcttcatggaaaaactggaaacacggattcgtaaccacgaccgtgagatcgaaaaaatgtgtaactttcattaccaggggttcgtggattctatcacagaactgcttaaggtgagaggagaggcccagaagctcaaaaaccaggtgacagacaccaaccgcaagctccaacacgaggggaaggagctagtaatcgctatggaggagctgaaacaatgtcgactgcaacagaggaacatatccgctacggtggataagctgatgctgtgcctcccagtcttagaaatgtactctaaactacgcgaccaaatgaagaccaagagacactaccctgccctgaagacattggaacaccttgaacacacatatctcccccaggtctcccactatcgcttttgtaaggtcatggtggacaacattccgaagctgagagaggagatcaaggatgtatctatgtccgatttgaaggacttccttgagtctatccggaagcacagcgacaagattggcgagacagccatgaagcaagcccaacagcagaggaatcttgataatattgtcctgcagcagcccagaattggctctaagaggaaatcaaaaaaagacgcatacatcatctttgacacagaaatcgagtccacctcgcctaaaagtgagcaggactctggcatcttggatgtagaggacgaggaggacgatgaggaagtgcccggagctcaggacctcgtagatttttctccagtgtaccggtgcttacacatatacagtgtactaggtgcaagggagacattcgagaattattaccgaaagcagaggcgcaaacaagctcggctcgtgctgcagcctcccagcaatatgcacgagacccttgatggctaccggaagtatttcaatcagatcgttggattcttcgttgtggaagaccatattctccataccacacaggggctggtgaatcgggcttacattgatgagctgtgggaaatggctctgagcaagaccattgctgccctccggacacacagttcgtattgcagtgaccctaacctggtcctggatctgaagaatttgatagtgctgttcgccgatacccttcaggtttatgggttcccggttaaccaactgtttgacatgttgctggagatcagggatcaatacagcgagacactacttaagaagtgggccggtattttccgtaatatcttggattcagacaactacagcccgatccccgtcacttctgaagagatgtataagaaggtggtgggtcagtttcctttccaggacattgagctggaaaaacagccatttcccaaaaagttccctttcagtgagtttgtgccaaaagtttacaatcagattaaagagtttatatacgcgtgcctaaagttttctgaggatcttcacttaagctcgacagaggtagatgatatgatccggaaatccacgaacctgctccttacccggaccttgtctaatagtctgcagaacgtgattaagaggaagaatatcgggctgaccgagctggttcagataataattaacaccacacatctcgaaaagtcatgtaagtacctggaagaattcatcaccaatatcactaatgtgctccctgaaacagtgcatacaacaaagctgtatggaaccacaacttttaaagatgcccgacacgctgccgaggaagagatctataccaacttgaaccagaaaattgaccagttcctgcagttggccgactacgactggatgaccggcgatttggggaacaaggcatctgattacctggttgacttgattgccttcctgcggtcgacattcgccgtcttcacccatctccccggaaaggtggcccaaactgcttgcatgtcagcatgtaaacaccttgccactagtctgatgcaacttttgctggaagctgaggtgcgtcagctaacactaggcgcactccagcagttcaacctggacgtccgagagtgcgagcagttcgcacgatccggacctgtaccaggctttcaagaagacacgctccagcttgcgttcatcgatctacgccaactgctggatttgtttatccagtgggactggtccacttacctcgcggactatggccagccgaattgcaagtaccttcgcgtgaaccccgtcacagctctgacgctgctggagaaaatgaaggacacatcgcgtaagaataacatgttcgcgcagtttcgtaaaaatgagagggataaacagaaattaatcgacaccgttgccaagcagctgcgtggcctcatctcgagccaccacagctag

SEQ ID NO: 222621 - DNA, 2016 bp, synthetic construct
  misc_feature 1..2016: note = Description of Artificial Sequence: Synthetic coding sequence
  source 1..2016: mol_type = other DNA
atggaacggggtaagatggcagaagcagaaagtctcgaaacagcggctgagcatgagaggattctgcgcgagattgagagtactgacactgcttgcatcgggccaacgttgcgcagcgtttacgatggcgaagagcatgggagatttatggagaagttggagaccaggatacgtaaccacgatcgcgagatcgaaaagatgtgtaattttcattaccaaggcttcgtggacagcattacagagctcctaaaagtgcggggagaagcacagaaactcaagaaccaggtaaccgataccaatcggaagctgcagcacgagggcaaggagctggtgattgcgatggaggaacttaagcaatgtcggctccaacaacgcaatatctccgctaccgttgataaactaatgctgtgcctgccagtgctggaaatgtactcaaagctccgtgaccagatgaagacaaaacgccactacccggctcttaaaacacttgagcacttagaacatacctacctcccacaggtgagccactacagattctgtaaggttatggttgataatatcccaaagcttagggaggagattaaagacgtttctatgagcgacctgaaagacttccttgagtctattagaaaacactccgataaaatcggagagacagcaatgaaacaagcccaacagcagcgcaacttggacaacattgtcctgcagcagccacgaattgggtcaaaacgtaaatccaagaaagacgcatacatcatatttgatacggaaatcgagtccactagtcccaagtcagaacaggatagtggcattctggacgtggaagatgaggaggacgacgaggaagtccccggagctcaggatctggtagatttctcaccggtgtaccggtgcttgcacatctatagcgtgctcggcgcaagggaaactttcgaaaattattacaggaaacagagacgaaaacaggcaagacttgtcttgcagcccccttcaaacatgcatgagacactggacggatacaggaagtacttcaaccaaatcgttggattttttgtcgtggaggatcacattctgcatacgacacaaggcctcgtcaatagagcctacattgacgagctctgggaaatggcgctctcaaagactatagctgccttgcgcactcattctagctactgttccgatccaaatctggtgctagacctgaaaaatctgattgttctgtttgccgacacactgcaggtatacgggtttcccgtgaaccagctcttcgacatgcttctagagatccgcgatcagtattctgagacgctcctcaagaaatgggcaggaatcttcaggaacattctagatagtgacaactattccccgatccccgtcactagcgaggaaatgtacaaaaaggtcgttgggcaattccctttccaagacatagaattggagaagcagcccttccctaaaaagtttccattctccgaatttgtgcccaaagtctacaatcagataaaagaatttatttatgcctgtctcaagtttagcgaggatctccacctgagcagtaccgaggtggacgatatgatccgcaagtcaacaaatctcctgcttacccgtacactgtctaacagtctccaaaacgtgattaaacgaaaaaatattggcctgactgaactggtgcagattattattaacaccacacatctcgaaaagtcctgtaaatatctggaggagttcattacaaatattaccaatgtgctgcctgagaccgtgcatactactaaactttacggtacaaccacattcaaagacgcaagacacgctgcggaagaagaaatttatacgaacctaaaccaaaagattgaccaatttcttcagctagcagattatgactggatgacaggggatctcgggaacaaagcctcagactacctcgtagacttgattgcatttctgagatccaccttcgcagtgtttacccatctccccgtctccgggagctgttatttcgtgctttacatatag

SEQ ID NO: 222622 - DNA, 5970 bp, synthetic construct
  misc_feature 1..5970: note = Description of Artificial Sequence: Synthetic coding sequence
  source 1..5970: mol_type = other DNA
atgacgaaggtgcctcccgcattcgatttcagcttcctaaatgacgaggaggccaggaagatactgcaggtgctggaacgtaacgaggagttgcagcgggctgagaaggatcggattagcaagctccaaaagaccaaaagggacattcggtggctacagggagttaccggggagtggttcgaggagatacagaggaaaaagttttgcaacgaaactgatgtgtcccagatgctgaagcagccacttacctatcggctctctaaagagatggccaaaaacgaccccatcgaactccccacatccagatccaagaatgtgactaatcaaaaaaagcctactcctttctcctcacggatgagttttaggagcagcttcgcctccttattcagctttcgaaaaagtggcaaagagactagtaaactgccatcccttggacagaagggctgcgatggccatgcaggaccaccaatgccggttcgaggtgcagcggtccaggctaagatttataacagtccactagaaaatcacttagtggatagtaccttcgtgccgaagcctgcagtgatgcgcgaggaaagcggaatgccccctccgtgggacgcttctcttttggaaaatgagttcttccaggtcttggacgatttagattcaaaacttgctcaagagcaatcagcgagctcagtgaatacacgaactccactgaactacggctctaggactcagttcggtcacttttattcgtcaggcaaccgacacggcaatatcaccgagcgtcacaagaagcactataacgagacatcaaatatgtccatttatgacattctgcgtcccggaacccctcgggaagggttcaagacattcagtccacgaacttctacgatatatgacatgtacaggacccgcgagcccagagtgtttaaggaagattacgtgcagaagaatactttcgggagcacctcgctttgcttcgacagtaggcagcgtagcgcgcttcctgccacaggccattttactgcgcgatcactccatttccctgctaccacccaaagcaagagtggtttcatccccccaaggcaccagcaaagccccaaaagaacgccgctcagtagcataatctggaatcgctccgactcctccagggatagggaaaaccaagaagagttcctgcgagctcccagtccgatggaaattgaccctgcagacaagtacgtatatccaagaggttttcaggaaaacaagaggtatgagtcatatcattctcagaatgtttatcagcgagtgagcctaaacgccccaatggagaatgcgatgtcacctgacacttttgaaaattctgagaacatgcctttctaccaccaaagcaatacgtttacccggtctttcttttcgaacacctttggaaggtcaggtgaacagcggagatttggacagggaccgttttgggggcaagagaaaggacatagcttctggtctgacttccaccgttcaaggaaaagcttttcctcaagtgatcgggatttcgagatgataagcatggaggctaactctgttagcgccatccatggacacaacgtctcctccgaacactgggaaagcttcagcagtgggtacggcactgatgtcagtcggggtcaggaagagccccacccttggcaattcgactttcaacgatcaaccttagacagtatggtcgtgtcccacggaaatgagactcaactgacaccccattttggcaccccaaacgtgtgttctatgacgggaagttcctaccacgtgaaatcctctgagttggtgtcccagcaagattcctcgcccgtagaagtccatatcaataaagaggcttcatccttcggtatagcacagactctggcctcctccttcaagacctcgtttagccagatctccgacgaccgcaggaatccccagtcacccaatctgcagaaccccacagttacacttcagaaaatttttccaaacaaacctgcttcccacccgatgcgctcacataccgaagttactgtaacttcatccaatagcgtggactccctgcctcttgctaagagccagcccaatatcctggtcacagaggtcaataatgaaaaggacctcaacgagagcatctcggaggaagataaacagctctctaagatggatcagactaacaaggccggagagatcccccagcctgtcagccagacgggcatttccaactccttaccagactttcaaaaccctctgagccaggattccgctaagtctaacggctttggtttcaatgcctctacgattatttcttcaaagaaatcaccgcgtgtgttctctagaaaagatacgagcaaaatgtacatcccacataccgataaatctaacgacatcaaacaggacaagaggttcactgaaaatagaaagttaggttccactgcttcacttccgtttatccaggagcaccgtacaccgcctagtttcccccgtacggatcagggttgccaccaggaattaaccgtcaacaacgaagacatctctcgtattattacaaataaccattggtcatccgccctcactgatactcagaatgcccagtatagtaaatgtaaactcacacccggtcataagacctcatgcgactccctggatctcagtagcgctgctcttccagatagcagccccagtaaaaactctagtcttgatgcccctgtcgtgccatcaacgacagtgttctcgcgtagatccccctcagataaggatccttccctaggggaacgcgaggaaaaggacaatgcaggcaagaaccagaaaaaccaatttatcgtctctcactccgaaaaccaggaaaggaacgacagccctgtacctacccatgatgaggtagtggacgtcaagtgccactcacatagtcccttccgcaatgaacggggtaagggcaagataaggcaccacatttcttgtatagagaagctctccaagactgagtctattagtgtgccaaccagcgaccatcgatctctgattgaggccaatcagtccaattccaaggtctctgaactggacacgatctattgcactctgccccgaaaatccagctcttttctgatacatgggagacaaagtggctccaagataatggccgcatctctacggaacggtcccccacctttccagatcaagaacaatgtggaggacgccatggggaactatatgctgaataaattttcaccaagctctcccgaaagcgctaacgagtgctccaaagtgttgtcagactccgctttggaagctccggaggccactgagaggatgacaaatgtgaagagcagcggcagcactagcgtaaggaaaggaccactgccatttctgatcaacagagccatgagctgccctagtggcgagcctcatgcgtccaccgggagggaaggacgaaagaagccactgacctccggcatggatgctagcgaactgacacccagggcctgggagagaattatttcaccagttgagagcgattccagtgtccgggactgcagtttgactaagagacagcaccaaaaggagaattttcaggaatatactgaaaaagagggcaaaatggcggcatcacgccgatctgtatttgctttgagcaatgaggaccccctccccttctgctccgatctctctggcaaggagcggggaaaaacactccataaagttaaaaccacctcaacgttctccgtttcaggagacgaagacaacgtgaaatgcttggaggtggtgtcgatctactacaccctgccacggaagccttcaaaaaagttctgcaacttgctccagcagtatacccagaacacgaacctactcatagaaagtccccaggtcgaaactgagacattccctaacgcgctcgagaaggacaagcagaactactccacgcgcgagcagagcggcactcccagctgcgaaaacctgaaaatgtccgtgaattccgatcagacactaacaaccgagaatatgacagctttccggctatccaatagaggccctctggctcctaccctccaagagatggcgtccgtggaggccgcagtttccttgcctgaagaagagtctaaagctcgggagattttcagcgacaacctggctaagactcccctgggggactctgaaaacaagaaggagcgtggtaagaaactacagagcgagaccctgcacacatctctgatgctgcaacgaaagaatgtgagtgaggagaaaagcgaaaattgtcagcagagcatcaacagctcaaactctggcccaagctcgcttccagcgctatccgaagtgaacattggaaacagtcagaccaggagatcaagctgggaatgtaccggttcaggcagagccattccattcacagggagcgggaaatgccctcagaaggaccacacatcaacggcagtgggggatggatcatcaggaagccagcctagggagggcaggggtgacattggaaccaattgtcagaagatgaccaataagaccctgtcccactccgaatcccaggtttttgccctcaccccggcactccacaagctgcagctgggggaggagacccaatccgatgaaccaaacttggagtccctccagtcagagccgagagaactgcctcaacggtcacaggaggctaacatgaccgaatcacgaaaagcagaggacgagatgcagaagtcagcttgggatcaaccctcccttcctgagggtaacaaaaataagactaaccttgatgacctcgtcaagggtgagaaccgtagctctgtgaaacatcggttagctgcgatgtccaaggcctcaaggaagttcccggcaaaggacgtgtcaccaaggagacacgtagctacaatctttccacaaagtggtagccggagcggatttgaccatttaagcctaggcacggttgagtgtaacccactctttcctgagccgactccaaaatccgcagaatctattggcgagtctcgattaagcgaaaacgggaagcacgtgaagaagagcgagaacttgttgccgattactgtgctgcctaatagggagccctcaactcatgtgagcaaccagaagtccaactccatctcccaaaggcaccagaatgaattcaagaatgtttcagaaagcccaagcaagcacgagaattcgaaggacgtgaccgcggcacagaacctagtgcgggagagtggcgcaccgagccctatcacattcacaagcttgcgtgaggcagaattctctgacaaccagagacgcctgtccccgccattccctctggaaccggcacagaagtccagagtgtctagccccctggcttcattcctgcagcagcagcgaagcgcctctagtctcgagtgggagcccgaaccacatctgtatcgttctaaatcattgaagtccatcaatgtccatggagacctactgcgcaaatctcacccaccaaaggtgagagaacggcacttcagtgaatcaactagcattgataatgcactaagtcggctcaccttgggtaatgagttttcagtcaacaacggttacagtaggaggtttcggtctttttctgaactcccgtcctgcgacggcaacgaatcctgggcgtacagatccgggaccaagaccggccctaggagcgcaatctccatctacagacctatcgattacgggatattcggaaaggagcaacagctcgccttcctggaaaacgtcaaacgatcactcacacaaggccgactatggaagcccagctttctgaagaatcctggctttctgaaggatgacctgcgaaacccacccaatccctccgagtccctttcttcaaattctcctagtagccaagtgcctgaggacgggctgagtccaagcgagccactgaacatatacgaggacgacccggtagatagtaactgcgatactgacacaacgactgatgatgagtactatcttgacgagaacgataaagaatcagaactttag

SEQ ID NO: 222623 - DNA, 5741 bp, synthetic construct
  misc_feature 1..5741: note = Description of Artificial Sequence: Synthetic coding sequence
  source 1..5741: mol_type = other DNA
atgctgaaacaaccactgacataccgcctgagcaaagagatggccaagaacgaccctatcgaactccccactagccgctcgaaaaatgtcaccaaccagaaaaaacccaccccattctcatcccgcatgtctttccgatcaagcttcgcctctctgttctcgttcaggaaatcaggcaaggagacatcgaaactgccctccctggggcaaaagggctgcgatgggcatgcaggcccaccaatgcccgtgaggggcgcagccgtgcaggccaaaatatacaatagcccgcttgagaaccacttggtggacagcacgtttgtgcctaaaccagcggttatgagagaggagagcgggatgccacccccatgggatgcttccctgctagagaacgagttttttcaggtgctggatgatttggattctaaattggctcaggagcagtcggcctcttccgtgaacacacgaacccccttaaattatggcagcaggactcaatttgggcatttttacagctccggcaacagacatggcaacataaccgaacgacacaaaaaacactataatgaaacctcaaatatgtccatctacgacattcttaggcccggtactccccgtgaggggttcaaaaccttctctccccgtacgtctacaatctatgatatgtaccgcacacgagagccaagagttttcaaggaggactatgtgcagaagaacacattcgggtctaccagtctgtgtttcgactctaggcagcggtccgcactgcccgcaactggacatttcacagctcggagcctgcactttcccgcaaccacccagtctaaatctggttttatcccgcctcgacatcagcagagcccgaagcggacacccctgagctccattatctggaacaggtccgatagtagtagagaccgcgaaaaccaagaggaattcctacgcgcaccttcacccatggaaattgatcccgctgacaaatacgtctaccctcggggtttccaagagaacaagcggtacgagtcctaccattcacagaacgtgtaccagcgagtcagtcttaatgccccaatggaaaacgctatgagtcctgatacgtttgaaaattccgagaacatgcctttctaccaccagagcaatacttttactcgatcattcttttccaacacatttggacgcagcggagagcagaggagattcggtcagggcccattttgggggcaggaaaaagggcactcattctggtccgatttccaccgctccaggaaaagtttcagttccagtgacagagacttcgaaatgatttctatggaggcgaactcagtttccgccatacacggacacaatgtgtcaagcgaacattgggaatctttttctagtggctacggcacagacgtctcgcgtgggcaagaggaaccccatccttggcaatttgacttccaaaggtccaccctcgactctatggttgtgagtcatggcaatgaaacccaattgaccccccatttcggcactcccaatgtctgttccatgaccggatcttcttatcatgtgaagtcttcagagctcgtgtctcagcaagattcttcccccgtggaggtgcatattaacaaggaagcaagctcgttcggcattgcccagactttagcctcctcttttaaaacaagctttagccagataagtgatgatagaagaaatcctcagtcccccaatctgcaaaatcctactgttaccctgcaaaaaatctttccgaataaaccagccagccaccctatgagaagtcacacagaagtcactgtcactagtagtaacagtgtcgactccctcccactggccaaaagtcagccaaacattttggtgactgaagtgaacaatgagaaagacctgaacgagtccatatccgaggaagacaaacagttatctaagatggaccaaaccaacaaggccggagagatcccccagccagttagccaaaccggcatctctaatagcttaccagattttcagaaccccttgagccaggacagtgctaagtccaacggttttgggttcaatgcttctacgatcatctcatcaaagaagtctccaagggtgttttctagaaaagatactagcaagatgtatatccctcacaccgacaagtcgaatgacatcaaacaggacaaacgctttacagagaatcggaaattaggatccacggcctccctgccattcatccaggaacacagaaccccgccttcctttcctagaacggaccagggatgccaccaagaacttactgtaaacaacgaagatatcagcagaattatcacaaacaaccactggtcttcagctttaactgacacgcagaatgctcaatatagcaaatgtaagctcactccagggcacaagacctcctgtgattcactggatctgtcttccgctgcgttgcccgactcctctccttccaagaactccagtctggatgccccagtggtgccctcaacaaccgtgtttagcaggcggagtcccagcgataaagatccgagcctgggagagcgcgaagagaaagataacgctggtaaaaaccaaaagaaccagttcattgtgtctcactcagaaaaccaggagagaaatgatagcccagtgcccactcatgatgaggtggtcgacgtaaagtgccattctcatagtcctttcagaaatgaaagaggaaagggaaagatccgacaccacatcagttgtatcgaaaaactctcaaagacagagtccatttccgttcctacaagcgaccacagatcactgattgaggcaaatcagtcaaatagtaaggtttcggagctggatacaatctactgcaccctgcctcgtaagtcaagcagttttctgatacatggcaggcaatctgggtccaaaatcatggccgcttctctgcgaaatggaccacctccgtttcagattaaaaacaacgtagaggatgcgatggggaactacatgttgaataagtttagtccaagctcgcccgagtcggccaatgagtgctccaaggtcctgagcgatagcgccctggaggcaccagaggcaacagaacgcatgacaaacgtgaagtcaagtggttccacttccgtgagaaaaggacccttacctttcctgattaacagagcgatgtcctgcccatccggcgaaccccacgcctcgactggtagagaaggtaggaaaaagcctctgacttccggaatggacgctagtgagctgaccccacgagcttgggaacgaatcataagtcccgttgagagtgattctagcgtgagggattgcagtttgactaagcgacagcatcagaaagaaaatttccaagagtatacggagaaagagggcaagatggctgctagccgtcgctctgtcttcgccctaagtaatgaggaccccttacctttttgcagcgacttgtccgggaaagagcgaggcaagacccttcataaagtaaagacaacgtctaccttctctgtctcaggtgatgaggataatgttaagtgtttggaggtggtctccatctattacactcttcctcgtaaaccatccaagaagttctgtaaccttttgcagcagtacacacagaacacaaacctcctaattgaatccccccaagtcgaaactgagacattccctaatgctctcgagaaggataaacagaactattccactcgtgagcagagtggtacccccagttgcgagaacctcaagatgagtgtaaacagcgatcagactttgacaaccgaaaatatgaccgcttttcggctttcgaacaggggtcccctggcgccaaccctccaggagatggccagcgtggaggctgcagtgtccctgcccgaggaggaatctaaagctagggagattttcagtgacaacctcgctaagaccccgctgggcgacagcgaaaacaaaaaggagcggggaaaaaaactgcaaagtgagaccctccatacatccctcatgctccagagaaaaaacgtgagcgaggaaaagagcgagaactgccaacagtctatcaattcctcaaactccgggccttcgtccctgcctgccctgagcgaagtaaatattggcaattcccagactaggcgctcctcttgggagtgcacgggcagcggtagagcgatcccattcacaggatccgggaagtgcccacaaaaagaccacaccagtactgctgtcggagatggcagttccggtagccagcctagagagggtcggggagacatcgggacaaattgtcaaaagatgaccaacaagaccctctcccattccgaatcacaggtcttcgccctgacaccagcgctccacaagctccagctgggggaggagacccaatcagacgaaccgaatttggaatcccttcagtctgagcccagggagctccctcaaagatcacaggaggccaatatgaccgagtctaggaaggctgaggatgagatgcagaaatcagcttgggatcaacctagcctaccagagggcaataaaaataaaactaacctggatgatctggtaaagggagaaaatcgatcttctgtgaagcataggcttgccgctatgagtaaagctagtcgcaaatttccggctaaagacgtatctccaagacggcatgtagcgactattttcccccaatcaggcagccgcagcggctttgatcacttgtctctgggaactgtcgagtgcaaccctctttttccagaacccactcctaagagcgccgagtccattggggagtcacgcctgagcgaaaacggcaagcacgtcaagaaatccgaaaatctactgcctatcaccgtgctaccaaatcgggagccatctacacacgtcagcaaccagaaatctaactctattagccagcgacaccagaacgagtttaaaaatgtcagcgagagcccatccaaacatgagaactccaaggatgtgactgccgcacagaatctcgtcagagagagcggggctcccagtccgattacttttacgagtctgagggaagccgagttttctgacaaccagcggagactctcacccccttttccccttgagccagcccaaaagtctagagtgagctcgccattagcttccttcctgcagcagcagcgatcggccagtagcctggaatgggaaccggaaccccatctgtacaggtctaagagtctcaagagtataaacgtgcatggagacctcctgaggaagtcccatcctcctaaggtgagagaaagacacttctcagaaagcacaagcatcgataacgccctctctcggctgacacttggcaacgagttctcagtcaacaacggttacagtcgaaggttccgcagcttctcagagctgccgtcttgcgatggcaacgaatcctgggcctatagatccggcaccaagactggccctagatccgctatcagtatctaccggccaatcgattacggcattttcggaaaggagcagcagctcgcatttctggagaatgtgaaacggtcattgactcaggggaggctgtggaagccaagtttcctgaagaaccccggttttctgaaagacgacctacggaatcctccgaacccatcagaaagtttgtcctctaatagtcccagcagccaggtgccggaggatggcctgtctcccagtgaacctttgaatatttacgaagacgatccggtggactccaattgcgacaccgatactactacggacgatgagtactatcttgacgagaatgacaaggagtccgagctgta

SEQ ID NO: 222624 - DNA, 2460 bp, synthetic construct
  misc_feature 1..2460: note = Description of Artificial Sequence: Synthetic coding sequence
  source 1..2460: mol_type = other DNA
atgccagttcgaggagcagccgtgcaggccaagatttataactccccactggagaatcatctcgtggattccactttcgtgccaaaacccgcagtcatgcgcgaagagagcgggatgcctcctccctgggacgcatctcttctggaaaacgaattcttccaggtgcttgacgacctggactctaaacttgctcaggagcagtccgcctcatccgtgaataccagaactccactgaactatggctcaagaacacagtttggacacttttatagcagtggcaatcgtcatgggaatattaccgaacgccacaagaagcactacaacgagacctctaatatgtctatttatgatattctacgtccgggaacgcctagagaaggctttaagacattctcaccgaggacgtccactatctatgacatgtacaggacacgagagccacgggtctttaaggaggactacgtgcagaaaaatactttcgggagcaccagtctctgctttgactccaggcagagatcagccttacctgctacgggccacttcacagccaggtctttacactttcctgcgactactcagtctaaatctgggtttatacctccacggcaccagcaatcgcccaagagaacacccctgagcagtattatatggaaccggtctgactccagtagggacagagagaatcaggaagagtttctgcgcgctccctcaccaatggagattgaccccgctgacaaatacgtttatccccgagggttccaggaaaacaagcgatacgaatcctaccattcccagaacgtctatcagagagtgtctctcaatgcacctatggaaaatgcaatgtcacccgataccttcgagaattcagagaacatgccattctaccaccagagtaacacattcacccggtcattcttctcgaacacattcggcagaagtggcgagcagagacggtttggccagggtcctttctggggtcaggagaaagggcactctttttggtctgacttccatcgctcacggaagtcctttagcagctcagaccgcgatttcgagatgatctctatggaagcaaactcagtgagcgctatccatgggcacaacgtgtcttctgagcactgggagtcattttcatctgggtacgggactgatgtatcaaggggtcaggaagaaccacacccatggcaattcgattttcagaggagcaccctcgacagcatggtggtgtcacacgggaacgagacacagcttacaccccacttcggcacccctaatgtctgcagcatgaccgggtccagctaccacgtgaagagttcagagttggtgtcccagcaagattcttcaccagtcgaggtccatataaataaagaggcgtcttcttttgggatcgctcagacactggcctcctcttttaagacaagcttcagccagattagcgatgataggaggaacccccaatcccctaatctccagaaccccacagttactttgcagaagatttttcccaataaaccagctagtcaccccatgagaagccacacggaggttactgtgaccagctccaattcggtggacagcttacccttagctaagagccaaccaaatatcctggtgaccgaggtcaacaatgagaattccaaagacgtcacagccgctcaaaacctggtcagggagtcaggtgccccaagtcccattacctttacaagtttacgcgaggcagagttttcagataaccaaaggcggctcagccctcccttcccgctggaacccgctcagaaatctcgggtgtcgagccccttagcatcattcctccaacagcagcgatcagcttcgagcttggagtgggagccggaaccacatctctaccggtctaaaagcctcaaatctataaatgtccatggagatctactgcgaaaaagccatccaccaaaggttcgcgaaagacactttagtgagagcacttccatcgataatgctctttcgcggcttaccctgggaaacgaattttcagtcaacaacggatacagtcgcaggtttaggagcttctcggagctgccatcctgtgatgggaacgagagctgggcttaccgcagcggtaccaaaaccggtccgagatctgccatcagcatatacagaccgatcgattacggaatatttggaaaagagcagcagctcgctttcctggagaatgtcaaaaggtccttgacacagggcaggctctggaaaccgtcatttctgaagaatcccggatttctaaaagacgaccttcggaacccccctaatccaagcgagagcctgtccagcaattcccccagttcacaggttcccgaggatggactatcaccgagcgagcccctgaacatatatgaagacgaccctgtggacagtaactgcgatacggatacgacgactgatgacgaatactatcttgacgagaacgacaaggagtcggagctctag

SEQ ID NO: 222625 - DNA, 5405 bp, synthetic construct
  misc_feature 1..5405: note = Description of Artificial Sequence: Synthetic coding sequence
  source 1..5405: mol_type = other DNA
atgagggaggaatcaggaatgcctcccccttgggatgcctcactgctggaaaatgaatttttccaggtcctggatgacttggactcgaaactggctcaggaacagagcgctagtagcgttaacaccaggacacctctgaactatggcagcaggacccagttcgggcatttctactctagtggcaatcggcacgggaacattacggaaagacataagaaacactacaatgaaactagcaatatgagtatttacgacatactcagacccggaactcccagggaggggtttaagacattcagtcccagaacatctaccatctacgatatgtatcgaactagagaacctagggtgttcaaggaagattacgtccagaaaaacacattcggaagcacgtcactctgctttgattcccggcagcggagcgctctcccggctaccggacatttcactgccaggtcccttcatttcccagctacgacccagtcaaagtcgggttttatcccacctcgacaccagcagtcccccaagagaacccctctctcgagcattatttggaacaggagcgattccagccgagatagggagaatcaggaagaattcctgagagcaccgtctccaatggagatcgaccccgcagataaatatgtgtaccctcgcggttttcaagagaacaagcgttacgaatcttaccactcccagaatgtttaccagagggtgtcgcttaatgcacctatggaaaacgctatgtcaccagacacgttcgagaactcagagaacatgcccttctatcaccagtcaaatacatttactcgctcgttcttttcaaataccttcgggagaagtggcgagcagcgccgatttgggcagggtcctttttggggacaggagaaggggcacagcttttggtccgattttcatcgctctaggaagtcattctcatccagcgatagagactttgaaatgatttccatggaggcaaatagcgtcagtgcaattcatggtcacaacgtttcatctgagcactgggagtcgtttagctcaggctacgggacggacgtgtcacggggtcaagaggaacctcatccctggcaattcgactttcaacggagcaccttggattcgatggtggtgtcccacggaaatgagactcaactgactccacattttgggacacctaatgtgtgctctatgacgggttcttcatatcacgtgaagtctagcgagctcgtgagccaacaagatagcagtcccgtggaggtccatatcaataaggaagcatcgtccttcggcatcgctcaaacacttgcctcaagtttcaaaacctcctttagccagatatccgacgaccggaggaaccctcagagtcctaatctgcaaaaccctacagtcacactgcagaaaatcttccctaataagccagcatcccatcccatgagaagccatacagaggtgacagtgacaagcagcaactcagttgactcactgccgctggctaaatcccaaccaaacattctggtgactgaggttaacaacgagaaagacctgaatgagagtatttcagaagaggataaacagctgtccaagatggaccaaacgaacaaggctggggagataccccagccggtcagccagacaggcatcagtaatagccttccagactttcaaaatcccttgagtcaggattccgccaaatctaatggtttcggatttaacgcctccacaatcatctcatctaaaaagagcccccgtgttttcagccggaaagacacttcaaaaatgtacatcccacataccgacaaaagtaacgatatcaagcaggataagaggtttactgagaataggaagctgggaagcactgcatccctgccattcattcaggaacataggacgccaccttcctttcctaggactgaccaaggctgccatcaagaacttaccgtgaataatgaagacatttcgcgaatcattactaacaatcactggtctagcgctcttaccgacactcagaatgctcaatatagcaaatgcaagctgactccagggcataaaacatcttgtgacagtctggatctcagttctgcagccctgcccgacagctctcccagtaagaactccagcctggacgcaccagtcgttccgagcacaactgtcttctcccgacgatcaccttctgacaaggatccctccctgggcgaaagagaggagaaggataatgcaggcaaaaatcagaaaaaccagttcatcgtatcccacagcgagaatcaagaaagaaatgacagccctgtgccaacacacgacgaggtggtggacgtgaaatgccattcacacagtccctttcgtaatgagagggggaaaggcaaaatccgccaccacatcagttgtatcgagaagctgagcaagactgagtctataagcgtccctacctccgatcatcgttccctcattgaggcgaatcagtcgaactcaaaggtttcagagctagacaccatctactgcacactgccgagaaaatcttccagttttctgattcacggcaggcagtccggcagcaagataatggctgcaagcttgcggaatggcccacctccttttcagatcaagaataacgtggaggatgccatgggcaattacatgttaaataaattcagtcccagcagtccagagtctgccaatgagtgttccaaagtcttatcagacagcgccttagaagcccctgaggcaacggagagaatgaccaatgttaagtctagcggaagcacatccgtacgtaagggacccttgccctttctaattaatcgagccatgtcttgccctagcggcgaacctcatgcctctacgggccgtgagggaaggaagaagccactgacaagtggcatggacgcctccgaattaacaccccgtgcatgggaaaggattatttcgcccgtggagagtgacagctcagttagagactgctcattgactaaacgccagcatcagaaggaaaactttcaagagtacactgagaaagagggtaagatggcagcatctcgccgttctgttttcgcactgtctaacgaggatccacttcctttttgctcagatctctccggtaaagaaaggggcaagacactgcacaaagtcaagacaacgagcacattttccgtgagcggcgatgaggacaatgtgaagtgcctagaagtcgtctctatatactatacactgcccaggaagccatcaaagaagttttgtaatctcctccagcaatatacccagaatacaaatctgttgattgagtccccccaggtggagaccgaaacttttccgaatgccctggaaaaagacaagcagaattactccaccagggagcagagcggcacacctagctgcgagaatctgaagatgtcagtcaatagtgaccaaactttaaccaccgagaacatgaccgcctttcggctgagcaatcgtggacccctggcccctacactgcaggaaatggccagtgtggaggcagcagtctccctgcccgaggaggagagcaaggccagggaaatcttctccgacaaccttgccaagacacctctgggggactccgaaaacaagaaggagcggggaaaaaagcttcagagcgaaactttgcacacatccctgatgttacagcgcaagaacgtttcagaggaaaaatccgagaattgccagcagagcatcaattctagcaattccggaccctccagcctgccagctctgtccgaggtgaacatcggcaacagccagactcggcgttcatcatgggaatgcactggctctggaagggccattccatttacaggctcgggaaaatgcccccagaaagaccacacctctacggccgtcggagacgggtcctccggtagccagcccagggaggggcgaggtgacattgggactaactgtcagaagatgacaaacaagacccttagccactcggaatcccaggtgttcgccctgacccccgcactgcacaagttacagctcggtgaggaaacgcagtccgacgagccaaacctggaatctctgcaaagcgagcccagagaactgccacagaggtcccaagaagctaatatgacagagagcaggaaagcagaagacgaaatgcagaagagcgcttgggaccagcccagtcttcctgaaggcaacaagaacaagacaaacctggacgacctggtgaagggcgagaatcgctcttccgtgaaacatagactcgctgcaatgagcaaggccagtagaaagttccccgctaaagatgtgagcccgaggaggcatgtggccacgatctttccccaatccgggtctcggtctggatttgatcatctgtctttggggactgtggagtgtaaccctctgtttcccgaacccactccgaagtccgctgaaagcatcggcgagtcacgccttagcgagaatggcaaacacgtcaaaaagtctgagaacttacttccaattacagtattacctaacagggagccatctactcatgtgtctaaccagaaatccaactcaattagtcaacggcatcagaacgaattcaagaacgtcagtgagtcaccatcaaagcacgaaaattccaaagacgtgacagctgctcaaaacctggtgagagaaagcggagctcccagccctattacattcacatcgctgagagaggccgaattttcagacaatcagagaaggctcagtcctccatttcctctggaaccagcccagaaaagcagggtaagctcccccctggcatcattccttcaacaacagaggtccgcaagcagtctggagtgggagccagagccccatctgtaccgttcgaagtctctcaaatccatcaacgttcatggagatctgcttcggaagagccaccccccaaaggttcgggagcggcatttttctgaatcgactagtattgacaacgctctctcacgattgaccctcgggaacgagttttctgtcaacaatggctacagccgaagatttcgcagtttcagtgagcttccttcctgcgacgggaatgaatcatgggcatacaggagcgggacaaagaccggccctcgttctgccatctcgatttataggcctattgactatggtattttcggcaaggaacagcaacttgcttttctcgaaaatgtgaagcgtagcctgactcagggcagactgtggaaaccatcctttctcaaaaacccaggctttctcaaagacgatctgcgcaaccccccaaaccctagtgaatccctctcaagcaatagccctagcagccaggtgccagaggatggactttctccttccgaaccactgaacatctatgaggacgatccagtcgactccaattgcgacacagacacaacaactgacgatgagtattatctggatgaaaacgataaggagagcgaactgta

SEQ ID NO: 222626 - DNA, 5948 bp, synthetic construct
  misc_feature 1..5948: note = Description of Artificial Sequence: Synthetic coding sequence
  source 1..5948: mol_type = other DNA
atgagcctttccttcctgaatgatgaagaggcccgtaaaatcctccaggtcctagagaggaatgaagagctgcaaagagctgagaaggataggatcagcaagctgcaaaagaccaaaagagatatacgttggctccaaggagtgacgggcgagtggttcgaggagattcaacgcaaaaagttctgcaacgaaactgatgtcagccagatgctcaagcagcctctcacctaccgactctccaaagaaatggctaagaacgacccaatcgagctgcccactagcaggagtaagaacgtaacgaaccagaagaaaccaaccccgttcagtagtcggatgtcctttcggagcagctttgcaagcctctttagttttcggaaatcgggaaaagaaacaagtaaattgcctagccttggacagaagggctgcgacgggcatgcaggccctccaatgcctgtgcgtggggcagcagttcaggccaaaatctataacagcccacttgagaaccatttggtggactcaacatttgtcccaaagcctgccgtgatgagggaagaatccggaatgcctcccccttgggatgcttctctgctggagaacgagttctttcaggtattagacgatttggactccaaacttgctcaggaacagtcggcttctagcgtcaatacacgtacacctctgaattatggaagcagaacccaattcgggcatttctattcatcagggaatagacatggaaacatcactgagcgtcacaagaagcactataacgagacctcaaatatgagtatatacgacatcttacggcctgggaccccaagggaggggtttaaaaccttttcccccaggactagtaccatttacgacatgtaccgtactcgcgagcccagagtgtttaaagaggactatgtgcagaagaacacgtttggtagcacatccctctgttttgactcccgccagagatcagccctgcccgctaccggccactttacagctcgatcattacactttccggcaaccacccaatccaaatcaggatttattcctcccaggcaccaacaatcccctaagcggacgccactgtcctctatcatttggaatcggtcagattccagccgggacagagagaatcaggaggagtttctcagggctccctccccgatggagattgacccagccgacaaatatgtctacccacgtgggttccaggagaacaagcgctatgagtcttatcatagccaaaatgtgtatcaaagggtttccctcaatgctcccatggaaaacgccatgtctcccgatacatttgaaaattctgaaaacatgcccttctatcatcaatctaacaccttcactaggtcgtttttctcaaataccttcggtcgctcaggcgagcagcggagattcggacaagggccattctggggacaggaaaaaggacatagcttttggtcagatttccatagatcaagaaaaagtttctcctcatctgatcgggactttgaaatgatctccatggaggccaacagcgtgagcgctatccatggacacaacgtctcctccgaacactgggagagcttttccagcggctatgggaccgacgtctctaggggtcaagaggagccacatccatggcagtttgatttccagagatccacacttgattctatggttgtgagtcacggcaacgaaacacagctgaccccgcacttcggaactcctaacgtgtgcagcatgaccgggtcttcgtatcatgtgaaatcgagtgagctggtgagccagcaggactctagccccgtcgaagtccacattaataaggaggcttcctccttcggcatcgcacaaacccttgcgtcctccttcaaaacatccttcagccagatatcggatgacagaaggaacccccaatcgcccaatctccagaatccaacagtcacattacagaaaatctttccaaataagcctgcctcacatccaatgaggtctcatactgaagtgacggtcacttcctctaactcagtggactccttaccccttgccaagtctcaaccaaatatcttggttaccgaggtcaacaacgaaaaggatcttaacgagtcgatctcagaggaggacaagcagctctctaagatggatcagaccaataaggctggcgagattccgcagcctgtttcccagaccggcatttccaatagtttacccgactttcagaacccactgtcccaggatagtgcaaaatccaacggtttcggcttcaatgcctctactataatctcctccaaaaagagtccccgagtgttttcccggaaggataccagcaaaatgtacataccccatacagacaaaagcaatgatatcaagcaggataagcgcttcaccgaaaatcgtaagttgggttccactgcctccctgccgttcatccaggaacaccgaacgccgcctagcttccccagaacggatcaaggctgtcaccaggagctgaccgtaaacaacgaagatatatcccggattattaccaataatcattggtcgtctgctctgacagacacacagaatgcccagtatagtaagtgcaagttaacacccggacataagacgtcttgcgattccctagatctgtcgtcggcagccctgcctgatagttctccctcaaagaattcctcactggacgctcctgtcgtcccgtctacgaccgttttttctaggaggtcaccttctgacaaagaccccagtctcggtgaacgcgaagagaaggacaatgccggaaagaatcagaaaaaccagtttatagtgtcccactctgaaaaccaggagcgaaatgactctccagtgccaacacatgatgaagttgttgacgtcaaatgccattcccacagccccttccgcaacgagcggggtaagggcaaaatccgccaccacatcagttgcattgagaagctatctaagaccgagtccatctcggtccccacaagcgaccaccgctcgctcatcgaggccaaccagagtaactctaaggttagcgaactggacactatctactgtacactgcctaggaagtcgtcctccttcctgatacatggtcggcaaagcgggtccaagattatggcagcctcattgcggaacggtcctcctcctttccagatcaaaaataatgtagaagatgccatggggaactacatgctgaacaaattcagcccatccagtcccgagtctgccaacgaatgtagtaaagtgttgtctgactctgcactggaagctcccgaggcaactgagagaatgacgaacgtgaaatctagcggtagtacttcagtgcgtaagggcccacttccgttcttgattaatagagccatgtcatgccctagcggagagcctcatgccagcacaggcagggagggaaggaaaaagcccctgacgtctggcatggatgcctctgagctaacccccagagcatgggagcgcatcatctcacccgtggagtcggacagctcagtgagggactgcagcctaacaaaacgacaacaccaaaaagagaactttcaggagtacacggaaaaagaagggaagatggcagcatctcgtcgatcagtgttcgcactgagcaacgaggatccactgccgttctgtagtgacctgagcggaaaggaaaggggcaagaccctgcacaaggttaaaaccacaagtactttttccgtttcaggtgacgaggacaatgtcaagtgcttggaagtcgtaagcatctattacactctacctcggaagcccagcaagaaattctgtaatctcttacagcaatatacgcagaataccaatctgctgatcgagagtcctcaggttgagactgaaactttccctaatgcccttgagaaagataagcaaaactattcaactcgggagcagagtggtacccctagctgtgaaaacctgaagatgtctgtcaattctgatcagaccttgacaaccgagaacatgaccgcattcaggttgagcaatcgcggtcccttggccccaacactgcaggaaatggcaagtgtcgaagctgcggtaagcctgcccgaggaagaatctaaggccagagaaatctttagcgacaacctagctaaaaccccactcggggatagtgagaataagaaagagcgcggaaagaagttacagtctgagacgttacatacaagtctcatgctgcagaggaagaatgtcagcgaagaaaagagcgagaactgccagcagtctatcaattcctccaacagtggcccaagttcgttgcctgctttgtccgaggttaatatcggtaattctcagacaagacggagttcctgggagtgtacaggaagcggacgggctatccctttcacgggttctggcaagtgcccacagaaggaccataccagtaccgccgtgggcgatggcagcagcggcagccaaccacgcgagggacgcggtgacatcggtactaactgccaaaagatgacgaacaagactctaagtcattctgaaagccaagttttcgccctgactccggctctccacaagcttcaacttggagaagagacccagtcagacgagcccaatctagaatccttacagtcagaaccacgggaactgccccagcggtcccaggaggcaaacatgaccgaatccaggaaggccgaagatgagatgcaaaaatctgcttgggatcaacccagcctgcctgagggaaacaagaacaagactaatctcgatgacttggtgaagggcgagaaccgatcatctgtgaaacacagattagctgcgatgagtaaagcctcaaggaagttccccgctaaggacgtgtccccccgacgacatgtggccacaatctttcctcagtcgggcagtcgtagcggattcgaccacctttcactgggcactgtggaatgtaatccgctgtttccagaacctacgccaaagtctgccgaaagtattggagaaagcagactgagcgagaacgggaagcacgtgaagaaaagcgagaacttgctcccgataacagtgttacccaaccgtgagccatccacacacgtcagtaaccaaaagagtaattccattagccagaggcatcagaacgagttcaaaaacgtgtctgagtcccccagtaaacacgagaactccaaagatgtcacagcggctcaaaacctggtacgagagtctggagcaccttcccccatcacgtttacctccctgagggaggcagaattttccgacaaccagagacggttatcccctccttttccattggaaccggcacagaaaagccgggtgtcatcaccactcgcctcttttctccagcagcagaggagtgccagcagtctggaatgggaacctgagcctcacctatatcggagcaaaagcctgaagtccattaacgtgcatggcgatctgctgaggaaatctcaccctcccaaggtacgtgagcggcacttctctgaatctaccagtatagataacgccctgagcagattgacactgggtaacgagttctccgttaacaacggctactctagaaggttcaggtcttttagcgagctgcccagctgcgacggtaacgaaagttgggcctatcgaagcggcactaagacaggaccacggtcagctatcagcatttatcggccaatagattatgggatttttgggaaggagcagcagttagccttcctggagaatgtgaaacgcagtctgacccagggtaggttgtggaaaccttcctttctgaagaatcctggctttctgaaagacgatttgagaaatccaccaaacccctcagagagcttgtcctcaaactcccccagcagccaggtgcccgaggatggactttccccgtcagaacccctaaatatctatgaggacgatcccgtggattctaattgtgacacagatacaaccacagatgacgaatattacctggacgagaatgacaaggaaagcgaactgta

SEQ ID NO: 222627 - DNA, 2583 bp, synthetic construct
  misc_feature 1..2583: note = Description of Artificial Sequence: Synthetic coding sequence
  source 1..2583: mol_type = other DNA
atggcccctcctagtactagggaacctagagttctgagcgccacctcggccaccaagtctgacggcgagatggtgttaccaggttttccagacgcggacagttttgttaagtttgccctggggtctgtggtggcagtaacaaaagcgtcaggcggtctgcctcagttcggcgacgaatacgatttctacagaagctttcccggttttcaggctttctgtgaaacccagggagacagactcttgcaatgcatgtctagggtgatgcagtaccatgggtgtcgctccaatattaaagaccggagcaaggttacagagctcgaggacaaattcgatctactagtggatgccaatgacgtgatcttagaacgcgtggggatcctcctcgatgaagcctctggtgtgaataaaaatcagcagcccgtattgcccgctggccttcaggttccgaaaacagtggtctcttcttggaatcgaaaagctgccgagtatggaaagaaggccaagtccgagacatttcgcttactgcacgcgaagaatattatccggcctcagctgaagtttagggagaaaattgataacagcaacactccctttcttcccaagatcttcatcaagccgaacgcacagaaaccactgccccaggctctgtccaaagagcgacgtgagaggccccaggatcgccctgaggatctcgatgtccctccagctttagcagatttcatccaccagcagcggacgcagcaggttgagcaagatatgtttgcacatccctaccagtacgagcttaaccacttcactccggcagacgctgttctgcagaaacctcagccgcagctgtatcgtcctattgaagagaccccctgccatttcattagctctctggacgagcttgttgaactcaacgagaaactcctgaactgccaggagttcgccgtggacttggaacaccattcgtaccgttctttcctgggattgacctgtctgatgcagatttccactaggacagaggacttcatcatcgatactctggagctaagatctgatatgtacatactgaatgagagcttaacggatcctgctatagtaaaggtgttccatggggctgacagcgacatagaatggctccagaaggacttcggcctctacgtagtgaatatgtttgacactcaccaggctgctagactgttgaacctaggccgacattctcttgaccacctgctgaagctgtactgcaatgtggactccaataagcaatatcagcttgcagattggagaataaggccactgccagaggaaatgctctcttacgcacgggatgacacccactatctgctttatatttatgacaagatgaggttagaaatgtgggaacggggaaatggccagccagtccagctccaggtggtttggcagagaagccgagacatttgtctgaagaagtttatcaagcccatctttacggacgaatcctatctagagctgtatcggaagcaaaagaaacacttgaacactcaacagctcaccgcatttcagctactgttcgcatggagggataagaccgcaaggcgcgaggatgaaagttacggatatgtgctgccgaatcacatgatgctcaaaatcgcagaggagctccctaaggagccccagggaatcattgcatgttgtaatcctgtccccccattagttcggcaacagatcaatgagatgcatctcctgatacagcaagctcgagagatgcctcttctcaaaagcgaggtggctgcgggtgtgaaaaagagcgggccactcccctcagccgaaaggctcgagaacgtgttgttcggcccacatgattgttcccacgctccaccagacggttatcctatcatccctacgtccggcagtgtgcccgtccaaaagcaagccagtctgttcccagatgagaaagaggacaatctcctggggaccacttgtttgatcgcaactgcggtcatcacattgtttaatgaaccctccgccgaagactcgaaaaaagggcctctaactgtggcccagaaaaaagcccaaaacatcatggaatctttcgaaaacccattccggatgatttccaacagatggaaactggcccaagtgcaggtgcaaaaagatagcaaggaagcagtgaagaaaaaggctgccgaacagacagctgccagagagcaggctaaagaagcttgcaaggcagcggcagagcaggcgatatccgtgagacagcaagtggtgttggagaacgctgccaagaagcgggaacgagcaacctccgatccgcgtaccaccgaacaaaaacaagaaaagaagcgactcaaaattagcaagaagcctaaagaccctgaacccccagaaaaagagtttactccttacgactactcacagagcgatttcaaggcattcgccggtaatagcaagtccaaggtaagttctcagttcgatcctaacaaacagaccccgtccggaaaaaagtgcatcgcagccaaaaaaatcaagcaaagtgtaggcaataagtctatgagcttccctacaggcaagtcagatcgtggatttaggtacaactggcctcaacgttag

SEQ ID NO: 222628 - DNA, 2658 bp, synthetic construct
  misc_feature 1..2658: note = Description of Artificial Sequence: Synthetic coding sequence
  source 1..2658: mol_type = other DNA
atggcacctccatccacaagagagcctcgcgtgctgtctgccacatcggctaccaagagcgacggcgagatggtgctgccaggattccctgacgccgattccttcgtcaagttcgcattgggatccgtggtggctgtgacaaaggcaagcggaggcctaccacagttcggggacgagtacgacttttaccgttcctttcctgggtttcaggctttctgcgaaacacagggagacagattgcttcagtgcatgtcccgagtaatgcagtaccatggctgcagaagtaacatcaaagataggagcaaggtcacggaactggaggataagttcgacctactggtcgacgcaaacgacgtgattctcgaacgcgtaggaattctgctggatgaagcttctggagtaaataaaaatcagcagcctgtactccctgctgggctacaggtacccaagacagtcgtcagctcctggaatcggaaggccgcagagtacggaaagaaagcgaaaagtgagacattcagattgctgcatgccaagaatatcatcagaccccagcttaagttccgagagaaaatcgacaattctaatacgccatttcttccgaagatctttattaaaccgaacgcccagaagcctttgccccaagcactgtctaaagaaagacgcgagcgcccacaagaccgcccagaggatcttgatgtacccccagctctggccgatttcatccatcagcagagaacacagcaggtggagcaagatatgtttgcacacccctaccagtacgagcttaaccactttactccggctgatgccgtactccagaagcctcagcctcagctctatagacctattgaagaaactccatgtcattttataagtagcctagatgaactagtagagctgaatgaaaagttgttgaactgtcaggagtttgcagtggatttggaacaccatagctacagaagctttttgggccttacttgtctaatgcaaatctctaccaggacagaagacttcataatcgacacgcttgagctgcgctcagatatgtatatcctgaatgagtccctgacagacccggcaattgttaaagtgttccacggcgcagactcagacatcgagtggctgcagaaggatttcggtctgtacgtcgtgaatatgttcgacacccatcaagccgctcgccttctgaacctgggaagacactccctggaccatttgttaaaactctattgcaacgttgattccaataaacagtaccagctagcagactggcggattcgccctctaccagaagagatgctgagttatgctagagatgacactcattatttattgtatatttacgacaagatgagactcgaaatgtgggagcggggtaacggccagccggtgcagctgcaagtggtgtggcagaggagtcgggacatttgccttaagaagtttattaagcctatcttcacggacgagtcgtatctggaattgtaccgtaaacagaagaagcaccttaatacccaacagctcacggccttccagttgctgttcgcttggcgcgataagactgcgaggcgagaagatgaaagctacggttatgtcttgccgaatcatatgatgctgaaaatcgcagaggaactgccaaaagaacctcaaggaattatcgcatgttgtaatcccgttcctccactggtgagacagcaaataaatgagatgcacctgttgattcagcaagccagagagatgccccttttgaagtcagaggtggcagccggagtcaaaaagtccggccctctgcctagcgcagaacgtctggagaacgtgctctttggaccacacgattgtagccatgcaccacccgacggctaccccattatccccactagcggatctgtgcccgtgcagaagcaggcttctctgtttcccgacgaaaaggaggacaacctcctggggaccacttgtttaatcgccaccgccgtgataactttgtttaatgaaccttctgcggaagacagtaaaaaggggccactgacagtcgcacaaaaaaaagctcagaatatcatggagtcattcgaaaatcccttccgaatgttcttgccaagccttggacatagggccccagtttcccaggccgcaaaatttgatccctcaaccaagatttatgagataagcaacaggtggaaactggcccaggttcaggttcagaaggacagcaaggaggcggtgaaaaaaaaagccgcagagcagaccgctgcacgggaacaagccaaggaggcatgcaaggcagcagctgagcaagccatctccgtgcgacaacaggtcgtgttagaaaatgccgctaagaagcgcgaaagagctacctctgacccgagaacgacagaacagaagcaggaaaagaagagactgaagatctctaaaaaacctaaggaccctgaaccccctgagaaggaattcacaccatatgattactcccagtccgacttcaaggctttcgccggaaactcgaaatcaaaagtgagctcccagttcgaccccaataagcaaacccctagtggcaagaaatgcatagcagccaaaaaaatcaagcaatccgttggaaataaatctatgtcgtttcctacagggaagtcagatcggggattcaggtataactggccacaaaggtag

SEQ ID NO: 222629 - DNA, 2040 bp, synthetic construct
  misc_feature 1..2040: note = Description of Artificial Sequence: Synthetic coding sequence
  source 1..2040: mol_type = other DNA
atggcaccaccgtctactcgagagccccgtgtattgagcgctacctcagccacaaagagtgatggcgagatggtcctgcccggatttcctgatgcagactcattcgtgaagttcgctcttggatccgtggttgctgttactaaggcatctggaggacttccacagttcggtgacgaatatgacttctacaggagcttcccgggatttcaggccttctgcgaaacacagggagatcgcttgctgcagtgcatgagtagagttatgcagtaccacggatgccgttctaacattaaagaccgatcaaaagtgactgagctggaggacaagtttgaccttctagtggatgctaatgacgttattctggagcgtgttggtatcctgctggacgaagccagcggcgtgaacaagaaccagcagcccgtcctgccagctggtttgcaggtgcccaaaaccgtggtcagctcctggaatcgcaaagcagctgaatacggaaaaaaagctaaatctgagacgttcaggctcctccacgcgaaaaacattattagaccccaactaaaattcagagaaaagatcgacaactcgaatacccccttcctcccaaaaattttcatcaaaccgaacgcacagaagcccctccctcaggctttaagtaaggaaagaagggagcgaccccaggatcgcccagaagatcttgatgttccccctgcactcgccgattttattcaccagcagcggactcagcaggtggaacaagacatgttcgcccacccctatcagtacgaacttaatcactttactcccgctgacgcagtcttgcagaaacctcaacctcagttatatcgccctattgaagaaacgccctgtcacttcatttcctccttagatgagctagtggaactgaatgaaaagctgctcaactgccaggaatttgccgtcgatcttgagcatcattcctacaggagcttcctgggtctgacgtgcttgatgcagatcagcacccgaactgaggattttattatcgatacactggaactcaggagcgatatgtacatcctgaacgaaagcctaacggaccccgcaatcgtgaaggtgttccacggcgctgattcagacatcgagtggctgcaaaaagactttggactgtatgtggtgaatatgtttgatacccaccaggccgctcggctcctgaacttgggcaggcactcactggaccacttgctgaagctatattgcaacgtcgattccaacaagcagtatcagcttgctgactggcgcatcaggcccctcccggaagaaatgctgagctacgcaagggacgatactcattatttgctctatatatacgataaaatgcgccttgaaatgtgggaacggggtaatgggcagcctgtccagctgcaagtggtgtggcaacgaagtcgggacatatgccttaagaagtttatcaagcctatcttcactgacgagtcgtatctcgaactgtaccgcaaacaaaagaagcacctgaacacccagcagctaaccgcattccagttgttgttcgcctggcgtgacaaaaccgcgaggcgggaggacgaatcatacggctatgtgctcccaaaccacatgatgctgaagatagccgaagaattgcctaaggaaccccagggcattattgcttgctgcaatcccgtgcccccattagttagacaacagataaacgagatgcacctgttgatccaacaggctcgggagatgccattattgaaaagtgaggtggctgccggagtaaagaaatcaggccctttaccatccgccgaggtcgagtgtagaatttgtttcctcccgcaagaaggcaaaaggcaggtcactgcgtctgcttctactccattaaccgaggcctgcgcggatagctggcaaaaagccacagccggactgcacgttctgcacgcttctttactggtctcttttaacgctgaaataggtgagtgtagcctctggacctctagactcttaccttgtccatccggctggctgtctaaccatcctaatcaatggtag

SEQ ID NO: 222630 - DNA, 747 bp, synthetic construct
  misc_feature 1..747: note = Description of Artificial Sequence: Synthetic coding sequence
  source 1..747: mol_type = other DNA
atggctgccggtttcaaaaccgtggaacctttagaatattacagaaggttcctcaaggagaattgcagacccgacggcagggagttaggtgagtttagaactactactgtcaacatcggatccatcagtacagcggacggttccgcactggtaaagcttggcaacaccactgtgatctgtggcgtcaaggctttccggtctggtcctccgggtgaggaggcccaagtagcctcacaatttatagccgatgttattgaaaacagtcagatcatccaaaaagaggatctttgcatctcacccggaaagctggtctgggtgctctattgtgaccttatctgtttagattatgatggcaacatcctggatgcctgcacattcgcgctgttggccgcactcaagaacgtccagctcccagaagtgactatcaacgaagagaccgctttagccgaagtgaatttgaagaagaaatcttatctcaatatcaggacccatccagtggcaacgtccttcgccgtgtttgacgataccctcctcatcgtagaccccacgggagaggaagagcatctggctactggcacactgaccatcgtaatggacgaggagggcaagttgtgttgtcttcataaaccgggtggctccgggctcaccggcgctaaacttcaggactgcatgagccgagcagtgactagacacaaggaagtgaaaaaattgatggacgaggtcattaagtcaatgaagcctaaatag

SEQ ID NO: 222631 - DNA, 831 bp, synthetic construct
  misc_feature 1..831: note = Description of Artificial Sequence: Synthetic coding sequence
  source 1..831: mol_type = other DNA
atggccgctggcttcaaaacagtggaacccctggaatactatcggagatttttgaaggagaactgccgacctgacggtcgggagctcggcgaatttagaactacaaccgtgaacatcgggtctatcagcaccgccgatgggtcagccttagtgaagctgggcaataccacagtgatctgcggggtaaaggcggagtttgctgctccatcaacagatgcccctgacaaaggctacgtagtacccaacgtggatctgccaccattatgcagttcacggtttagatctggcccacctggggaagaggcacaggtggcatctcaatttatcgcagacgtaatcgaaaactctcagattatccagaaggaggacctctgcatctcacctggcaagctggtgtgggtgctgtattgtgacctgatttgtctggactacgacggcaacatcttggatgcctgtacgtttgcactactggcagcactgaaaaatgttcagctcccagaagtcacgataaacgaggaaacagcacttgccgaggtcaacctaaaaaaaaagtcatacctgaacatacggacacatcccgtcgccacctcctttgccgtgtttgacgataccctgcttatcgtggacccgactggggaagaggagcacctcgccacaggcaccttaacaattgtgatggatgaggaggggaaattgtgttgtctccataaaccaggcggtagtggtctgacaggggcaaaacttcaagattgcatgagcagggcagtcacacggcataaagaagttaagaagctgatggatgaagttatcaaatctatgaagcccaagtag

SEQ ID NO: 222632 - DNA, 1320 bp, synthetic construct
  misc_feature 1..1320: note = Description of Artificial Sequence: Synthetic coding sequence
  source 1..1320: mol_type = other DNA
atgaaagagaccccgctgtccaattgcgaacggagattccttttgagagctatagaggagaagaagcggcttgatggaaggcagacttacgactataggaacattcgaatcagttttggaactgactacgggtgttgcattgtcgaactaggcaaaactagggttttggggcaggtatcttgtgagttggtctcacctaaactcaacagggccacagaaggaatcctgtttttcaacctggaactgtctcaaatggcagcgccagctttcgaacccggacggcagtccgatctcctggttaagctgaatagattgatggagcggtgcctaaggaacagtaaatgtattgataccgagagtctttgtgtggtggcaggcgagaaggtctggcagatcagagtcgacctgcatctgttgaaccacgatggcaatattatcgacgctgctagtatcgcagctatcgtcgcactgtgccactttcgccgaccagatgtaagcgtgcagggagacgaagtcaccctttatacaccagaagagcgggatcctgtgcccctgtctatacatcatatgcccatttgtgtgtcctttgcattcttccagcagggaacatatctgttggtggatcctaatgaaagggaggaaagagtcatggacggcttgctagtaatcgcgatgaacaagcaccgggaaatatgtactatccagtcttcaggcggtatcatgctactgaaggaccaggtgctacggtgtagcaaaattgcgggagtaaaagtggccgaaatcaccgagttgattctcaaggccctggaaaacgaccagaaggttagaaaagaaggcggtaaattcggcttcgcagagtctattgccaaccagaggatcactgcgttcaagatggagaaggctcccatagatacatccgacgtagaagaaaaagctgaggagattattgccgaggctgagcctccttcagaagtggtgtcgactcccgtcctctggactccaggcacagctcaaatcggggagggagtcgaaaatagttggggagatctggaagattctgagaaggaagatgatgagggaggcggtgatcaggccatcatcttagatggcataaaaatggacaccggggtcgaagtctccgatatagggtcgcaggatgctccaattatccttagtgatagtgaggaggaagagatgatcatacttgagcccgataaaaatccgaagaaaattagaacacagactacgtcggctaagcaggaaaaggcacctagcaagaaacccgttaaacgcagaaagaagaaaagagctgcaaattag

SEQ ID NO: 222633 - DNA, 1371 bp, synthetic construct
  misc_feature 1..1371: note = Description of Artificial Sequence: Synthetic coding sequence
  source 1..1371: mol_type = other DNA
atgaaagaaactccattgtcaaattgtgagcgacgctttcttctgcgcgcaatcgaagaaaagaaaaggctcgacggtcggcagacatatgactaccgtaatatacggatctcctttggcactgactacggatgctgcattgtagagctgggaaagacgagggtactggggcaggtgagttgcgagctagtcagcccaaaactgaatagagcaacggaggggatcctcttcttcaatttggagctatcccaaatggccgcacctgcttttgaaccgggtcggcagtccgacctgctagttaagctgaatcggcttatggagcgttgtcttcgaaattcgaaatgtatagataccgagtccctgtgtgtggtggcaggcgaaaaggtctggcagattcgcgtggatcttcacctcctgaaccacgatggcaatatcattgacgccgcttctattgccgcaatcgttgccttgtgccacttccgcagacctgacgtctcagttcaaggcgacgaggttactctttatacccccgaggagcgggaccccgttcccctaagcattcaccatatgcccatctgcgtttctttcgctttcttccaacagggcacatatctcctcgtcgatccaaatgagagagaggagagagttatggatgggctgcttgtgattgcaatgaacaagcacagggaaatttgcactattcagtcttcaggaggtataatgttgctgaaagatcaagttctccggtgcagcaagattgctggcgtgaaagtagctgagatcacagagttgatcctaaaagcactcgagaacgatcaaaaggtgagaaaagaggggggtaaattcggattcgcagagagcattgccaatcaacgaatcacagcctttaaaatggaaaaagcacctattgatactagcgacgtggaagagaaagccgaagaaattatcgctgaagctgagcctccatccgaggtcgtgagcacacccgtcttgtggacacccggtactgcccagatcggggagggcgtcgagaatagctggggggaccttgaggatagcgaaaaggaagacgacgaaggtggtggcgatcaggcgatcattctggatgggatcaaaatggacacaggcgtggaggttagcgatattgggagccaggagctcggctttcaccatgtggggcagaccggccttgagtttctgactagtgatgccccaatcatcctgagcgattctgaagaggaggagatgattatcctggaaccagacaagaaccccaagaaaatcagaactcagactacatccgccaagcaggaaaaggctccttccaagaagcctgttaaacgccgaaaaaaaaaacgggctgccaactag

SEQ ID NO: 222634 - DNA, 2031 bp, synthetic construct
  misc_feature 1..2031: note = Description of Artificial Sequence: Synthetic coding sequence
  source 1..2031: mol_type = other DNA
atgcagagttggagacggagaaaatctctctggctggctctgtcagcaagctggttgctcctggtgctcctggggggattttcgctccttaggctggctttacctccaagacccagaccaggagcttcccaggggtggcccaggtggctggacgctgagctcctgcagagctttagccaacccggtgagcttcctgaagatgcagtctcacctccccaggcccctcacggtgggtcttgtaactgggaatcatgcttcgacacctcaaaatgcaggggagatggtctgaaagtcttcgtttatcccgctgtcggtactattagcgagactcacagacgaattctggcctccatcgagggcagcagattttacactttctcaccggctggtgcatgcctcctgctgcttttgtcacttgacgcccagactggggagtgctcaagtatgccgctgcagtggaacagaggaagaaaccacctagtgctacgtttgcacccagcaccttgtccgcgaacttttcagctgggacaggccatggttgccgaggcttcccccactgtggactctttccgaccgggatttgacgtggctctgccgttcctaccggaagcccatccacttagaggaggcgcacccggacagcttcgccagcacagcccacagcccggagtggccctattggcgctggaagaagagagaggcggttggcggactgccgatacaggctcttctgcctgcccatgggatggccgatgtgaacaagacccgggtccaggccagactcaacgtcaggagaccctcccaaacgccactttctgtttgatctctggacacagacccgaggctgcttctaggttcctccaggcgttacaagccggttgtattcctgttctgctgagtccccgatgggagttgcctttttccgaagtaattgactggaccaaagcggctatagttgcggatgagcggttacccctgcaggtgcttgccgctctgcaggagatgagtccggcaagagtcctggccctaagacaacagactcaatttctgtgggatgcttacttttctagcgtggagaaggtgatccatactaccctcgaggtcattcaggacagaattttcgggacttccgcccacccctccttactctggaacagccccccaggtgccctgcttgctctctcaacattttcaacctctcctcaagactttcctttctattatctccagcagggttctagaccagagggacggttctcagcgctgatttgggtcggccctcccggtcagcccccactgaagctgatccaggccgtggcaggatcccaacactgtgcccagatcctcgtgttgtggtccaacgagcggcctctgccttctaggtggcctgagacagccgtcccactgacagttattgacggacaccggaaggtatccgacaggttctacccctactcaacaatcagaacggatgccatactttctctagacgccaggtctagtctttctacgtccgaggtggacttcgctttcctggtgtggcagtccttccccgaacgaatggtgggatttctaacaagctctcatttttgggatgaggcccacgggggatggggatacacagctgaacgaacaaatgagttctctatggtcctgacaacagcagccttttatcaccgctactaccatacgctttttactcatagcctgcccaaggctctgaggacactggcagacgaggcacctacatgtgtggacgtgcttatgaattttatcgtggccgctgtaaccaagctacccccaattaaagtgccctacggtaagcagcggcaggaggctgcccctctagcccctgggggacccggtccccgacccaagcctccggctcccgcaccggactgcatcaatcagatcgctgccgctttcgggcacatgccactactgagctcccgcttgagactggatcctgtcctctttaaagatcctgtttcagttcagcgcaaaaaatatcgctctctagagaagccgtag

SEQ ID NO: 222635 - DNA, 993 bp, synthetic construct
  misc_feature 1..993: note = Description of Artificial Sequence: Synthetic coding sequence
  source 1..993: mol_type = other DNA
atgagatgctgtcacatctgcaaactgcccggacgggttatgggaatccgggtgctacgtctctctttagtggtcattctggtgctgttgctggtggctggcgcattgacagcactgttgccttctgtcaaagaagacaagatgttgatgttacgaagggaaatcaagagccagggcaaatctaccatggattcattcacattgatcatgcagacttacaataggacggacctgctactaaaattgctgaatcactaccaggctgtgcctaatctgcacaaagtcatcgtcgtctggaacaacatcggcgaaaaggccccagatgagctatggaactctctgggtccacatccgattcctgtgatctttaagcagcagacggctaatagaatgcggaatcggcttcaagtattccccgagctggagacaaatgctgtgctcatggtggacgacgatactctcatctcaacccccgacctggtttttgccttcagtgtgtggcagcaatttcccgatcagatcgtcggattcgtgccgagaaaacatgtgtcgacctcttctggcatctattcctacggttcatttgagatgcaagctcccggttctggcaacggggaccagtattcaatggtcctgattggtgcttcattcttcaattcaaaatacctcgaactgttccaacgtcagccagccgctgtgcatgccttgatagatgatacacagaactgtgatgacattgccatgaatttcataattgctaagcatattggaaaaactagtggcattttcgttaagcctgtgaacatggacaatcttgaaaaggaaaccaacagtggctacagtggtatgtggcatcgggcagagcatgccctgcagcggtcttattgtatcaataaactggtcaatatctatgatagcatgccactgagatactccaatatcatgatctcccaatttgggtttccttacgcaaactataaacgcaaaatctag

SEQ ID NO: 222636 - DNA, 993 bp, synthetic construct
  misc_feature 1..993: note = Description of Artificial Sequence: Synthetic coding sequence
  source 1..993: mol_type = other DNA
atgagatgctgccatatctgtaaacttcccggtagggtgatgggaattagagtcctccggctgtccctggtcgtgattcttgtgctgctcttggtggctggagcactgactgccttgcttccatccgtgaaggaggataagatgctgatgttgcgcagggaaatcaagagtcaggggaaaagtacaatggattcattcaccctgatcatgcagacctacaacaggaccgacctattgctgaagcttctgaaccattaccaggccgtgccaaatctgcacaaagttatcgtggtttggaacaacattggggagaaggctcccgacgagctctggaattctctaggtcctcacccaattcccgtaatattcaagcagcagaccgctaaccggatgcgcaaccggctacaggttttccccgaacttgaaaccaatgctgtgctcatggtggatgacgacacattgatatccacaccagatcttgtcttcgcattctctgtctggcagcagtttcctgaccagatcgtgggttttgtgccaaggaagcacgtatccacgagcagcggtatttacagttacggatcattcgagatgcaagcccctggttcaggtaatggggaccaatacagcatggtgcttatcggcgctagctttttcaacagcaagtacctggagctgttccagaggcagccggctgctgtacatgctttgattgacgacacccagaactgtgacgatattgcaatgaacttcatcatagccaagcacattggaaaaaccagtggcatttttgtgaaacctgttaacatggacaacttagagaaagaaacgaattctggttactccggtatgtggcatagagccgaacacgccctccagcgaagttactgtatcaacaagctggtaaacatatacgatagtatgcctcttaggtactcaaatattatgatctcccagttcggcttcccatacgccaactataaaagaaagatatag

SEQ ID NO: 222637 - DNA, 354 bp, synthetic construct
  misc_feature 1..354: note = Description of Artificial Sequence: Synthetic coding sequence
  source 1..354: mol_type = other DNA
atggggatcagggtcctcaggctgtccctggtggtcatcttggtgctgttactcgtagcaggggcactaaccgcccttcttcctagcgtgaaggaggacaagatgctcatgctgagacgcgaaattaaatcccagggaaagagcaccatggattcattcacactgattatgcagacatataacaggactgacctcctacttaagctgctgaaccactatcaggcagtacccaatctccacaaagtgatcgttgtgtggaacaacattggagagaaggcaccggatgagctatggaattccctgggccctcatcccattcccgtgatttttaagcagcaaaccgccaatcggtag

SEQ ID NO: 222638 - DNA, 801 bp, synthetic construct
  misc_feature 1..801: note = Description of Artificial Sequence: Synthetic coding sequence
  source 1..801: mol_type = other DNA
atgaggacgtggaatagcggcggtaccaaatgttgccacatttgcaagcttccaggtcgggtgatgggcatccgcgtgttgcgactgtctctcgtggttatccttgtgcttcttcttgtggctggagcgctgaccgcccttcttccctccgtgaaggaagataaaatgctcatgctcaggagggagattaagagccagggtaagagcactatggattctttcactctcattatgcagacctataacaggactgatctgctcctcaaactgctgaatcactatcaggcagtccctaatctgcacaaggtcatcgtggtgtggaacaatattggggagaaagccccagatgagctgtggaactccctcgggccacaccccattcctgtaatattcaagcagcaaactgcaaacaggatgcgcaacagactccaggtatttcctgaacttgaaaccaatgctgtgctcatggtggatgacgatacattgattagcacaccagacctggtcttcgccttctccgtgtggcagcagtttccagaccagattgtggggtttgtcccacgcaagcacgtcagtaccagcagcggtatttacagctacggatcgttcgagatgcaggcaccagggagtggtaacggtgaccagtactccatggtgctcatcggagcatcttttttcaactctaaatatctggagttattccagaggcagcctgctgccgttcatgccctgatcgatgatacacagaactgcgacgatatcgcgatgaattttataatcgctaagcacatcggcaaatag

SEQ ID NO: 222639 - DNA, 954 bp, synthetic construct
  misc_feature 1..954: note = Description of Artificial Sequence: Synthetic coding sequence
  source 1..954: mol_type = other DNA
atgggaatcagagtactgcgcctgagcctcgtggtgatacttgtgttgttactggtcgcaggggctcttacagctctcttgcccagcgttaaggaggacaaaatgctgatgctgagaagggagatcaagagccaggggaaaagtaccatggattcattcaccctcatcatgcagacctataatcggacagatctgcttctgaagttacttaaccattatcaggcagtccctaatctacacaaggtgatcgtagtatggaacaatattggtgagaaggccccagatgaactgtggaatagtttaggaccccaccctattcctgttatttttaagcaacagaccgctaatagaatgcggaatcgcctgcaggttttccccgagcttgaaaccaatgccgttttgatggttgatgacgatacactgatctccaccccagatctcgtctttgcattcagtgtgtggcagcagtttcccgatcagattgtaggtttcgtcccacggaaacatgtgtccacctcctctggcatctactcatacgggagcttcgagatgcaggccccaggctccggtaatggagaccagtactccatggtgttgataggggcttctttcttcaattccaagtacttggagctgttccagaggcaacccgctgcagttcacgccctgatcgatgatacccagaactgtgatgacatagcgatgaatttcatcatcgccaagcatatcggtaagacatccgggattttcgtcaaaccggttaacatggataatctggaaaaggagaccaacagtggatacagtgggatgtggcatagggctgaacatgcgcttcagagatcctattgtatcaataagttggttaatatctatgactctatgcctttgaggtatagtaacattatgatctctcagtttggtttcccatatgcaaactataaacgaaagatttag

SEQ ID NO: 222640 - DNA, 519 bp, synthetic construct
  misc_feature 1..519: note = Description of Artificial Sequence: Synthetic coding sequence
  source 1..519: mol_type = other DNA
atgtcagtacctggaccctccagccctgacggggctttgactcgtcctccttattgtcttgaggccggagaacccacaccagggctgtccgacacatctcccgatgagggcctaatcgaggatctcaccattgaggacaaagcagttgaacagctggccgaaggcttgctgtcgcactacttacctgacttacagagatcaaaacaggctcttcaagaactgacacagaatcaggtggtgttgctcgacaccctggaacaagagataagcaaattcaaagagtgccactctatgcttgatatcaacgccttattcgcagaagccaaacactatcacgccaaactggtgaacatccgaaaggagatgcttatgctccatgaaaagacctccaaattgaaaaagagggccctaaaactgcagcagaaacggcaaaaagaagaactcgagcgcgagcagcagcgggaaaaggaattcgagagggaaaagcaactgacagccaggcctgcaaagcgaatgtag

SEQ ID NO: 222641 - DNA, 1608 bp, synthetic construct
  misc_feature 1..1608: note = Description of Artificial Sequence: Synthetic coding sequence
  source 1..1608: mol_type = other DNA
atgttgcacaagagcgaagagggcagagtattagttgagtttacctgcaagaaccagcccaaaccctctttgcccacagaatgggccctttgcggggagagggaggaccgcctggagctgctcaaactatctacattcgcgctcattattactcccggtgacccgagattggtgatttcttccggatgcgccactagactcttcgaggctctcgaggtgggggcagtacccgtggtacttggggaacaagtccagctgccctaccaagatatgctacagtggaacgaagcagcgcttgttgtgcccaaacctcgcgtgactgaagttcatttcctcctccggtcccttagcgattctgatcttctggctatgaggcgtcagggaaggttcttgtgggagacatacttcagcaccgccgacagcatttttaatacggtcctggctatgatacgaactcgcatccagattccagccgctcctatacgggaggaggcagccgcagagatcccccatcggagcgggaaagccgcaggcacggatcctaatatggccgacaacggggacttggatttgggcccagtcgaaaccgagccaccatacgcttcacctcgatacctacgcaatttcaccctaaccgttacggacttctacagaagctggaactgtgccccagggccatttcacctgtttccccacacgcccttcgaccctgtactccccagtgaggcaaaatttcttggcagcgggacagggtttcggcctatcgggggtggtgctggcggatctggcaaagaattccaggctgccctgggcggaaacgtgcctcgagagcagttcactgtggtcatgctgacttacgagcgcgaggaggttttaatgaattccctcgagcgtctgaacgggctgccatacctcaacaaagtcgtcgtggtttggaactcgcctaagctaccaagtgaggacctactgtggccagacatcggggtgcctatcatggtggtgcggactgagaaaaacagcttaaacaatcgttttctcccctggaatgaaatcgaaactgaggctattctgagcatcgacgatgatgctcatttgaggcatgacgagatcatgttcggatttcgcgtgtggcgagaggctcgggacagaatcgttggttttccgggacgttatcacgcctgggatatcccacaccaatcttggctctacaactctaattatagctgcgagctgtcgatggtgttaactggagccgctttcttccacaaatattatgcttatctctactcatacgtcatgccccaggcaataagggatatggtggatgagtatataaattgcgaagatattgcaatgaatttcttggttagtcatattacccggaaaccccctattaaagtgaccagtcggtggacgttccggtgtcctgggtgtccacaggccctgagtcatgacgactcccattttcatgaacggcataagtgcatcaacttcttcgtcaaggtatacgggtatatgccgctcctgtatactcagttccgggtggacagcgtgctgtttaaaacccggctcccgcacgataagaccaaatgctttaagtttatttag

SEQ ID NO: 222642 - DNA, 3216 bp, synthetic construct
  misc_feature 1..3216: note = Description of Artificial Sequence: Synthetic coding sequence
  source 1..3216: mol_type = other DNA
atgcctgccataatgaccatgctggccgaccacgccgcacgtcaactccttgatttctctcaaaagttagacattaatctgcttgacaatgttgttaactgtctctatcacggcgagggcgctcagcagcggatggcccaagaggtgctgacacaccttaaagaacaccccgatgcctggacaagggttgataccatcctggaattctcccagaatatgaatacaaaatactacggtctgcagatcctggagaacgtgataaagacccgatggaagatattacctcgcaatcagtgcgaagggattaaaaaatacgttgtgggcctgatcatcaaaacatccagtgaccccacatgcgtggaaaaagagaaagtgtacattgggaaactcaacatgatcctggtgcagattctgaaacaagaatggcccaagcactggcccacttttatatcagacatcgtcggggcttctagaaccagtgaatccctatgtcagaacaatatggttattttaaaactgcttagcgaggaggtgtttgactttagctctgggcaaattactcaggttaagtctaagcaccttaaagactctatgtgcaacgaattcagtcagatatttcagttatgccaatttgtaatggagaactctcagaatgcgccacttgtgcacgctacccttgaaacactcctcagatttctgaactggattccactcggttacatctttgaaactaaattgatcagcaccctgatctacaagttccttaatgtgcccatgttccgaaatgtaagtctcaagtgcttgacagagattgccggagtctcagtgagccagtatgaggaacagttcgtcactctgtttacccttactatgatgcagctgaaacaaatgctaccccttaacactaatatccggcttgcttacagcaacggtaaggacgatgaacaaaactttattcaaaatttgtcactgtttctgtgtacgttcctgaaggagcacgatcaactcatcgagaagaggctgaacctgcgcgagaccctcatggaggcccttcactatatgctcctcgtgagcgaggtggaagaaactgaaatatttaagatctgcctcgaatactggaaccatctggccgctgaactctatcgcgaatcaccattcagtacttctgcttcccctctgctctctggatcacagcatttcgatgttccccctaggagacagctgtaccttccgatgttgttcaaggttcgcctcctgatggtgtcccggatggccaaaccagaggaagtattggtcgtggagaacgatcaaggagaggtcgtacgcgagttcatgaaagatacagattctatcaatctctataaaaacatgcgcgagaccctggtttatcttacccatcttgactacgtcgataccgaacggataatgacagaaaaactgcataatcaagtgaacggaacggagtggtcctggaagaacctgaatactctatgttgggcaatagggagtatcagcggagccatgcacgaggaggatgagaaacgatttctcgtaacagtcatcaaggatcttttgggtctctgtgaacagaaaagggggaaggataacaaagctattatcgccagcaacattatgtacatagtgggtcagtatccacggttcctccgcgcacattggaaattcctgaagactgtggtaaacaaactgttcgagttcatgcacgagacacacgacggcgtgcaggacatggcctgtgacacttttatcaaaattgcccagaaatgtcggaggcatttcgtccaagtccaggtgggcgaagttatgcccttcatcgacgaaatcctcaataatattaatacaattatttgtgatctgcagccgcagcaggtgcataccttctacgaggctgtcgggtacatgatcggagcccagacggaccaaacggtgcaagaacacctgatagaaaagtacatgctcctcccaaatcaagtatgggactccatcatacaacaagccacaaaaaacgttgatatcctgaaggatcccgagacggtgaaacagttggggtccattctcaaaacaaacgtccgggcttgtaaggcagtgggacatccattcgtaatccagcttggcaggatttatctggatatgctgaatgtatacaagtgcctttctgagaatatttctgccgctatccaggctaacggcgaaatggtgaccaaacagccgctcattcgttctatgagaacagtaaaaagagaaacactgaagttaataagcggctgggtaagtagatcaaatgaccctcaaatggttgcggagaactttgtgccacctcttctcgacgccgtcttgatcgattatcagcgtaacgtgccagcagcgagagagcccgaggtcctgagcaccatggcaattattgtaaataaactgggaggacacattactgcagagatcccacagatttttgacgctgtattcgagtgtactctaaatatgattaacaaggatttcgaagaatatccagagcataggactaactttttccttctcctgcaggccgtgaactcccactgttttccagccttccttgcgataccacccacccagtttaaactggtgcttgactcaattatctgggctttcaaacatacaatgaggaacgttgccgacacaggcttgcaaatcctcttcaccctgctccagaatgtcgcccaggaggaggcagcagcccaaagtttctaccaaacctatttctgtgatattctacagcatatattctcagtcgtgactgacacgtctcacaccgctggcctgaccatgcatgcttccatcctggcatatatgtttaatctcgttgaggaggggaagatcagtacgagtctaaatccgggaaatccggttaataatcaaattttcctgcaagagtacgtggcgaatttgctgaaaagcgcttttcctcatctgcaggacgctcaggtgaagcttttcgtaactggactattttcactgaaccaggatattccggcatttaaagagcacctccgggacttcctagtgcagatcaaggaatttgccggagaggacaccagcgacttgttcttggaagaaagagagattgcgctgcgacaggccgacgaggagaagcataagcggcagatgtccgtgcccggaatttttaacccacacgaaatccctgaagaaatgtgcgactag

SEQ ID NO: 222643 - DNA, 3216 bp, synthetic construct
  misc_feature 1..3216: note = Description of Artificial Sequence: Synthetic coding sequence
  source 1..3216: mol_type = other DNA
atgcccgctattatgactatgctggcagaccacgcagctcggcaactgctagatttctcccaaaagttagatataaacttactcgataacgtggtcaattgcctgtaccacggcgagggggcacagcagaggatggcccaagaggtcctgacgcatctgaaagaacatcctgacgcgtggacacgagtcgataccattttggagttcagccaaaatatgaatacaaaatactatggcctgcagattcttgaaaatgtcatcaagacgcgctggaaaattctgcccagaaatcagtgtgaggggattaagaaatatgtagtgggccttattattaagacctccagcgacccaacctgtgtagagaaggagaaggtttacatcgggaaattaaacatgattctagtgcagatcctgaagcaggagtggccaaagcattggccgacctttatatctgatatagtgggggcttcgcgcacctccgagagcttgtgtcagaacaacatggtcatattaaaattactctcggaggaggtttttgacttttcaagtgggcaaattacacaggtgaaatccaagcatctgaaagactccatgtgcaacgagttctcgcagatattccagctgtgtcagtttgttatggagaacagtcagaacgcaccattagtacacgctacgctcgaaacccttcttcgatttttgaattggatccctctcggctatattttcgagaccaaactcatttcaaccttgatctacaagtttctgaacgtccctatgtttcgaaacgtaagcttgaaatgtctgaccgaaattgccggagtctctgtgtcacagtacgaagaacaattcgtcactcttttcaccctcacaatgatgcagttaaagcagatgctgccactgaatacaaacatcagactagcttacagcaatggtaaggatgacgaacaaaatttcatacaaaatctctcgctgtttctatgtacgtttctgaaggagcatgaccagctgatcgagaaaagactcaacctcagagagaccctgatggaggcactgcactacatgcttcttgtctccgaggttgaggaaactgagatttttaaaatctgcctcgagtactggaatcaccttgctgctgaactgtaccgcgagagtccattcagcacttcggctagtcccttactctcgggttctcagcactttgacgtcccacccaggaggcagctgtacttgcccatgctgtttaaagttagactcctgatggtgtccagaatggccaaacctgaagaggtgctcgtagtggaaaatgatcagggtgaggtcgtaagagaatttatgaaggacacagattccattaacctatacaagaatatgcgcgaaactctggtgtatctgacccacctggactatgttgatacagaacgaattatgacagaaaaactgcataaccaggttaacggcacggagtggtcttggaaaaacctcaacaccctgtgttgggccatcgggtccatttcaggagccatgcatgaagaagatgagaaacgcttcctggttaccgttatcaaggacctgttgggactgtgtgagcagaagaggggaaaagacaataaggctataattgcatccaacattatgtatatcgtcggtcagtatcccagatttttgcgtgcacattggaaatttctgaaaacagtggttaataaacttttcgagttcatgcatgaaacccacgacggggtgcaggatatggcatgtgacacttttatcaagatcgctcagaagtgtcggcgtcatttcgtgcaagtgcaagtgggcgaggttatgcctttcatcgatgagatcctgaacaatattaacaccattatctgcgacctccagcctcagcaagtgcacactttctacgaagccgtgggatatatgataggcgcacagaccgatcaaaccgtgcaggagcacctgattgagaaatacatgctgctgcctaaccaggtatgggattctattatccagcaggctacaaagaatgtggacatactgaaagaccctgaaaccgtcaaacaattgggcagtatcttaaaaactaacgtcagggcttgcaaggcagtgggtcatccatttgtcatccagttagggaggatctatttggacatgctcaatgtctacaagtgcctgagtgaaaacatcagcgctgccattcaggctaacggtgagatggttacaaaacagcctttaattaggtcaatgagaactgttaaacgcgaaacactgaagctcatttctggctgggtgagcaggtccaatgatcctcagatggtcgcagaaaactttgtgcccccactccttgatgcggttctcatcgactaccagaggaatgtaccggctgcgagagagcctgaggtgctctccaccatggctattatcgttaacaaacttgggggtcacatcacagcagagatcccacagatatttgatgctgtttttgaatgcacgttaaatatgatcaataaagatttcgaagaataccctgagcatcgcacgaacttcttcctgctactccaggcagtaaacagccactgtttccccgcattcctagccataccaccaacccagttcaagttggtcctggacagcatcatatgggcgtttaagcacacaatgaggaacgttgccgacacggggctccagatccttttcacattgctgcagaatgtggctcaggaggaggcagccgctcagagtttttatcagacgtacttctgcgacatcctacagcacatcttcagcgttgtgactgacacaagccacactgctggcctgacgatgcatgccagcatcctggcctacatgtttaacctagtcgaagaaggaaaaatctcaacatctctcaacccaggtaatcccgtgaataaccagatcttcctccaagaatacgtggccaatctcttgaaatcagcttttcctcatctgcaggacgcccaggtgaagctgtttgtcacgggactcttcagtctgaaccaggacatacccgcattcaaggaacacctgagagatttcctagtgcaaatcaaagagtttgccggagaggacacttccgatcttttcctcgaggagcgagagattgcactgagacaagccgacgaggagaagcacaaacgccagatgagcgtgcccggtatatttaatcctcacgagatcccagaggaaatgtgtgattag

SEQ ID NO: 222644 - DNA, 3216 bp, synthetic construct
  misc_feature 1..3216: note = Description of Artificial Sequence: Synthetic coding sequence
  source 1..3216: mol_type = other DNA
atgccagccattatgaccatgctggccgatcatgcagctcgtcagctgttggatttctctcagaagctcgatatcaatctgctggacaatgtagtaaactgcctgtaccatggcgaaggagcccagcagcgtatggcacaggaggtcctgacgcacctcaaggaacatcccgacgcttggaccagggtagacactatcctcgaattctcacagaatatgaataccaagtactacggcctgcagatactggagaatgtgatcaagactcgttggaagatacttccacggaaccaatgcgagggaatcaaaaagtacgttgtgggcctgatcataaagacttcctcagaccctacttgcgtcgaaaaggagaaggtgtacatcgggaagctgaacatgattttggtgcagatattgaaacaggaatggccgaagcactggccaacttttatctcagatatcgtgggtgctagccggacttccgaaagcctctgccagaataacatggtgatcctcaagttgctcagcgaggaagtattcgatttttcaagtgggcagataacgcaggtcaagtccaaacatctaaaagattcaatgtgcaacgagttctcgcagatctttcaactgtgtcaatttgtaatggagaacagtcagaacgcgcctctggtgcatgcaaccttggaaacactgctcaggtttctgaattggatcccactcgggtacatcttcgaaacaaaattgatctccacacttatttataagttcctgaacgtgcctatgttccgcaacgtgtccctgaaatgtctcaccgagatcgccggtgttagtgtgtctcagtatgaggagcagttcgtgaccctcttcacactcacgatgatgcagctcaagcagatgctgcccctcaacaccaacatcagattggcatattctaatggaaaagacgatgaacagaacttcatccagaacctgtcgctgttcctgtgcacctttttaaaggagcacgaccagctgatcgaaaagcgactgaacctcagagaaacactcatggaagcactgcactatatgctgctcgtgtccgaagtggaggagactgagatcttcaagatttgcctcgagtactggaatcacctcgcagcggaactgtacagggaatcccctttcagcaccagcgcgagccccctgcttagtggctcccagcactttgacgttcccccacggaggcagctctacctgcccatgctattcaaagtgcggctgttaatggtgtctcggatggcaaaaccagaggaagttttggtggtcgagaacgaccagggggaagtggtccgcgagtttatgaaagacacagatagcatcaacttgtacaagaacatgagggagactctcgtgtatctcacccatctggattacgtcgatacagagcgcatcatgaccgagaagttgcacaatcaggttaatgggacagagtggagctggaaaaatctgaacaccctttgttgggccattggaagcatctcaggcgctatgcacgaggaggatgaaaagaggttcctggtcactgttattaaagacctgctgggcttgtgtgaacagaaacgaggtaaggacaacaaggccatcatcgcgagtaatataatgtatatcgtgggacagtatcccaggttcctgagggctcattggaagtttttaaaaactgtggtgaataagctattcgaattcatgcacgaaacacacgacggagtccaagatatggcgtgtgatacctttattaaaatagcacagaaatgtagaaggcactttgtacaagtccaggtcggcgaggtcatgcccttcatcgacgaaatcctgaacaatatcaacacaataatctgcgacctgcaaccacaacaagtccatactttctacgaggcagtgggatacatgataggcgcacagacggaccagaccgttcaagaacacttgatcgagaaatacatgctattaccgaatcaggtgtgggattctattatccaacaggcgaccaagaacgtcgacatcttgaaggaccctgagacagtgaaacagctcggatcaattttgaagaccaatgttagggcatgcaaagccgtcggtcatcccttcgtgattcaactgggacgaatataccttgacatgttaaatgtctataagtgtctaagcgagaacatttctgctgccattcaggcaaacggggagatggtcacaaagcagccactgatcaggtccatgagaaccgtcaaacgggagaccctcaagcttatcagtggctgggtttctagaagcaacgatccacagatggttgctgagaactttgtgccacctctccttgacgccgtcctaatcgactatcagaggaatgtacctgcagctagggagccagaagtgctcagtaccatggcaattatcgtgaataagttggggggtcatataactgccgagatccctcagatctttgacgcagtattcgagtgtacactaaacatgatcaacaaagatttcgaggaataccctgagcataggacaaacttttttctcctcctccaggcagtgaacagccactgctttccagccttcctagccatcccgcctacccaattcaagctggtgctcgactctattatatgggcctttaagcacactatgcgtaatgtggccgatacagggttgcaaatactgttcacccttctccaaaacgtggcacaagaggaggcagccgctcagagcttctatcagacttatttttgcgatatactgcaacatattttctcagttgtgactgacacttcgcacacagctggtctaacgatgcatgcatcgattctcgcttacatgtttaacctcgtggaggaagggaagatcagcacctccttgaatcccggaaaccccgtgaataatcagatattcctccaggagtacgtcgccaatcttttgaagtccgccttccctcacctccaggatgcccaagtgaaactctttgttacaggacttttttctcttaaccaggacattccagcattcaaagaacatctcagggatttcctcgtgcagattaaagaattcgcgggtgaagatactagtgatttgtttctggaggagcgagagatcgccctgcggcaagcagatgaggaaaaacacaaaagacagatgtcagtgccgggtatttttaaccctcacgagattcccgaagagatgtgcgactag

SEQ ID NO: 222645 - DNA, 303 bp, synthetic construct
  misc_feature 1..303: note = Description of Artificial Sequence: Synthetic coding sequence
  source 1..303: mol_type = other DNA
atgcccgctattatgaccatgttagctgaccacgccgctagacagctgctggacttctcacagaaacttgacatcaatctgctggacaacgtcgtaaattgtttataccacggcgagggcgctcagcagcggatggcgcaagaagtgctgacccacctgaaggaacatccagacgcatggacgcgagtcgacacgattctggagtttagccagaatatgaacacaaagtattacggcctgcagattctggaaaatgtcattaagacccggtggaaaatcttgccacgaaaccagtgcgaatag

SEQ ID NO: 222646 - DNA, 288 bp, synthetic construct
  misc_feature 1..288: note = Description of Artificial Sequence: Synthetic coding sequence
  source 1..288: mol_type = other DNA
atgcccgcaattatgactatgcttgccgatcatgctgccagacaactcctggatttctcacagaagttggatataaacctcctggataacgtagttaactgcctgtatcatggggaaggagcacagcagcgaatggcgcaggaggtcttgactcacctgaaggaacaccctgacgcatggactcgcgtagatactatcctggagttctcccagaacatgaatactaaatattatgggctccagatactagagaatgtgatcaagacaaggtggaagatcctcccctag

SEQ ID NO: 222647 - DNA, 180 bp, synthetic construct
  misc_feature 1..180: note = Description of Artificial Sequence: Synthetic coding sequence
  source 1..180: mol_type = other DNA
atgcccgcaattatgacaatgctagcagatcacgccgctcggcagttgctggacttcagtcagaagctggacattaatttgcttgacaatgtcgttaattgtctttaccacggcgaaggtgcccagcaaagaatggcacaggaggtactgacccatctgaaagagcatcccgacgcttag

SEQ ID NO: 222648 - DNA, 399 bp, synthetic construct
  misc_feature 1..399: note = Description of Artificial Sequence: Synthetic coding sequence
  source 1..399: mol_type = other DNA
atgccagctatcatgactatgttggctgaccatgctgccagacagcttctggattttagtcaaaaactggacatcaacctgttggacaacgtggttaactgcctctatcacggtgagggggcacagcagcgtatggcacaagaggtccttactcacttaaaagaacaccccgacgcctggactagagtggatacgattctagagttcagtcagaacatgaataccaagtactacgggttgcagatcttggagaatgtcataaagaccagatggaagatcttgcctaggaaccagtgcgaaggtattaaaaaatacgtagtcggacttatcatcaagacgagcagcgatcccacttgtgtcgagaaagaaaaagtgtatatagggaaactaaacatgtag

SEQ ID NO: 222649 - DNA, 189 bp, synthetic construct
  misc_feature 1..189: note = Description of Artificial Sequence: Synthetic coding sequence
  source 1..189: mol_type = other DNA
atgcctgccatcatgaccatgctcgccgatcacgcagcacgccagcttctcgattttagccagaaactggacataaacctgttggacaatgtggttaattgcctatatcatggcgagggcgcacaacagagaatggcgcaggaggtcctcacccacctgaaggagcacccagatgcctggactcgctag

SEQ ID NO: 222650 - DNA, 540 bp, synthetic construct
  misc_feature 1..540: note = Description of Artificial Sequence: Synthetic coding sequence
  source 1..540: mol_type = other DNA
atgcccgcaatcatgacaatgttagccgatcatgctgcaagacaactcctcgacttctctcagaagttggatatcaaccttctcgataacgtggtgaactgcctgtaccacggcgaaggtgcacagcagcggatggcccaagaggtcctcacacacttgaaggagcacccggatgcctggactcgggtagataccattctggagttcagccagaatatgaacacaaagtactatgggcttcagatactggaaaatgtaataaagaccaggtggaaaatcttgcctcgcaatcagtgtgaaggaattaaaaagtatgtcgtgggtcttatcatcaagacttcttcagatccaacctgtgtggagaaagagaaggtctacataggcaaactaaatatgattctggtgcagattctgaaacaagagtggcccaagcactggcctacgttcatctccgacatcgtgggagcctcaaggacatctgagtccctgtgtcagaacaatatggttattctgaagttgctatcagaagaggtgttctag

SEQ ID NO: 222651 - DNA, 285 bp, synthetic construct
  misc_feature 1..285: note = Description of Artificial Sequence: Synthetic coding sequence
  source 1..285: mol_type = other DNA
atgccagctatcatgactatgctcgccgatcatgccgctcgccagttactggattttagtcaaaagctggatataaacctgttggacaacgtggtgaactgcctgtaccacggggagggtgcccaacagcgcatggctcaagaagtcctcacacacctgaaagagcaccccgacgcatggactcgggtggacacgattttggagtttagtcagaatatgaacaccaagtactatggactccaaatccttgaaaacgtgataaaaaccagatggaaaatcctgtag

SEQ ID NO: 222652 - DNA, 3615 bp, synthetic construct
  misc_feature 1..3615: note = Description of Artificial Sequence: Synthetic coding sequence
  source 1..3615: mol_type = other DNA
atggcgatggatcaggttaacgccctatgcgagcagttggttaaggctgtcaccgtgatgatggatccaaactctacccagagatatagactggaggctctcaaattttgtgaggagtttaaggagaagtgtccaatctgcgtgccctgtggactcagactcgctgagaaaacccaggttgccatcgtgagacatttcggactgcagatactggagcatgttgtgaaattccgctggaacggcatgagccggctggagaaggtgtacctcaagaactctgtcatggagctcatcgctaatggcaccctcaacatcctggaggaagaaaatcatattaaggacgcccttagccgcattgtagtcgagatgattaaaagggagtggccgcagcattggcctgacatgctgatcgaattagatacgttatcaaagcaaggcgaaacacagacagaactggtcatgttcatccttctgagactggcagaagacgtcgtcacttttcagactctgcctccacagcggcgaagagacattcagcagactctgactcagaatatggagagaattttttcctttctgttaaacactttgcaggaaaacgttaacaaataccagcaagtgaagacagacacatcccaggagtcaaaagcgcaggccaactgtagagtgggcgtagcggctctcaacaccttagccggatatattgactgggttagcatgtcacatatcaccgccgagaattgtaaactgcttgaaattctatgcctgctgctgaacgaacaagagctgcagctaggcgctgccgaatgcctgctaatcgccgtgtctaggaagggtaaattagaagacaggaaacccctcatggtgctcttcggagatgtcgctatgcattacatactgagtgccgctcaaacggctgacggaggcggactcgtggagaaacactacgtattcctcaaaagactgtgtcaggttctctgtgccttaggaaatcagctgtgtgcactgctgggcgctgacagcgatgttgagactccctctaatttcggtaagtatttggagagtttcctggcatttacaactcacccctcccaatttctgcggtccagcacccaaatgacctggggcgcactgtttaggcatgaaatcctttctcgtgatcctcttctgctggcaattatacctaagtacctcagagcctccatgacgaacctcgtaaagatggggttcccgtccaagacagattcgccttcctgcgagtactcccgattcgactttgactccgacgaggactttaatgccttctttaacagttctagggcacagcagggtgaggttatgcggctggcctgccgtctggatcctaaaacctcctttcaaatggctggagagtggctcaagtaccagctgtccaccttcctggatgctggatccgtgaacagttgttccgctgtggggaccggcgagggatccctgtgctccgtttttagtccctctttcgtgcagtgggaggccatgaccttattcttggagagcgtgattacccagatgttccgcacactgaacagagaagagatccctgttaatgatggcattgaactcttgcagatggtgctgaatttcgacaccaaggatcctctaatcctctcatgtgtgttgaccaacgtgagcgcactgtttccctttgtaacctatagacccgaatttctcccacaggttttttctaagctgtttagctctgttacgtttgagacagtagaggagtcgaaagcccctagaaccagagcagtgcgcaacgtgaggcggcacgcctgctctagcatcatcaagatgtgtcgggactatccccaactcgtgctccctaactttgatatgctgtataaccacgtcaagcagcttctctccaacgaattgctactcacacaaatggaaaagtgtgctctgatggaagccctggtgctgatatccaaccaatttaaaaactatgagaggcagaaagtatttttagaagagctcatggctcctgtggcttctatttggttgtcacaggacatgcaccgggtactgagtgacgtggacgctttcatcgcttatgttggtaccgatcagaaatcatgcgaccccggattggaggacccctgcggactgaaccgggcacgtatgtcgttttgtgtttactcaattctcggagtggtcaagaggacatgctggcctaccgatctggaggaagccaaggctggaggcttcgtggtggggtacactagcagcggaaatccaatcttcaggaacccttgcactgaacagatcttgaagctcctagataatctgctggcactcatcaggacacacaataccctatacgcacctgagatgctggcaaaaatggccgagcccttcactaaggccttagacatgttagatgccgaaaaaagcgccattcttggcctccctcagcccctcctcgagctgaatgactcccctgttttcaaaacagtgctggaacgcatgcagcgttttttcagcaccctttatgaaaattgcttccatatcttaggaaaagcaggcccttccatgcagcaggatttctacacggttgaagacttggcgacacagctgctaagctccgcattcgtgaacctgaacaacattcctgactacagacttaggcccatgctgcgggtcttcgtcaagcctttagtgctattctgcccacccgagcactacgaagccctcgtgagccccatcctaggccctctgtttacctatttgcatatgcggctcagccaaaaatggcaggtgattaaccagagaagcttactgtgtggcgaagatgaggcggctgatgagaaccccgagtcgcaagagatgttggaggagcaattagtgcgaatgctgacccgcgaagtaatggacctgattaccgtctgttgtgtgtccaaaaaaggcgctgatcactcctccgcgcctccggcagatggtgacgatgaagaaatgatggcgactgaggtgactcccagcgcgatggccgaactcactgacctgggtaagtgccttatgaaacatgaggacgtgtgtacagcactccttataactgccttcaatagtttggcttggaaggacactctgtcttgtcagcggacaacttctcagctgtgttggcctctcctgaaacaggtgttgtctgggaccctgcttgctgacgctgtgacatggctatttacctctgttctgaaaggattgcagatgcacggtcagcacgacggatgcatggcttccctggtgcacttggcattccagatttatgaagccctcaggcctcgatacctggagataagagcagtgatggaacagatccccgagatccagaaagactcactggaccagttcgattgtaagctgctaaaccctagcttacaaaaagtcgcagacaaacggaggaaggatcagttcaaacgcctgatcgcgggatgtatcgggaagccgctaggcgagcagtttcgaaaggaggtgcacatcaagaatctgccctccctctttaaaaagaccaagcctatgctggaaactgaagtcctggacaacgatggtgggggactggccacaatctttgagccgtag

SEQ ID NO: 222653 - DNA, 513 bp, synthetic construct
  misc_feature 1..513: note = Description of Artificial Sequence: Synthetic coding sequence
  source 1..513: mol_type = other DNA
atggcaggtgaatggttgaagtaccagctaagtaccttcctagacgctgggtccgttaatagttgttcagcagtaggaacaggagagggctctctgtgttcagtcttttcccccagcttcgtacaatgggaggctatgacgctcttccttgagtctgttataacccaaatgtttcggacgctgaaccgggaggagattcccgttaatgatggtattgagctgctccagatggtcctgaacttcgacactaaagacccactgattctgagctgcgttctcacaaatgtcagcgctctgtttccctttgtcacctatcgccctgagttcctccctcaggtgttcagcaaattattcagttcagtcacttttgagacagtggaagagtcgaagccaccccacttccctccactatccgcatggaaggagatacaggtatggtcatggcgagaacaagcgctgtgtcgcactcgctccaactacactaaggtgagtcgtaagggggttcgagcctag

SEQ ID NO: 222654 - DNA, 2166 bp, synthetic construct
  misc_feature 1..2166: note = Description of Artificial Sequence: Synthetic coding sequence
  source 1..2166: mol_type = other DNA
atggccggtgaatggctcaagtaccaactctccaccttcttggacgctggcagtgtcaacagttgctcagctgtgggaacaggcgaggggtccttgtgctccgtcttcagccccagttttgtccaatgggaggcaatgaccttatttcttgagagtgtgatcacgcagatgttccggacgctaaaccgcgaagagatcccggtaaacgatggtatcgaactcctacagatggttctgaactttgatacaaaagatcctctgatcttatcctgtgtcctaacaaacgtgagcgcactgttcccatttgtgacttatcgtcctgaatttttgccacaggtcttttctaagctcttcagttcggtcacctttgaaaccgtggaggagagtaaggctccgcgtaccagagctgtgagaaatgtgcgcaggcacgcctgttcttctattatcaaaatgtgtcgcgattatccacagcttgtgcttcccaactttgacatgctatacaatcatgtgaagcagctgctctcaaacgagctattactgacgcaaatggagaaatgcgcgctgatggaagccttggtgctgattagtaaccagttcaaaaactacgaaaggcagaaggtttttctcgaggaactgatggcgccagtcgcttcaatctggcttagtcaggacatgcaccgggttctcagtgatgttgacgccttcatcgcttatgttgggaccgaccagaagtcgtgtgatcctggccttgaagacccctgtggactcaacagagctagaatgtccttctgtgtctactccatcctgggcgtggtgaagcgtacttgttggcccactgatctcgaggaggccaaagccggtgggttcgtcgtgggctataccagctcaggcaaccctatttttcggaatccttgtaccgagcagatactcaaactgctggataatctgctcgcactcattaggacccacaacactctctatgcaccagagatgttagccaaaatggctgagccattcacgaaggcgcttgatatgttagacgcagagaagtccgccatacttggcctgccacagccactactggaactaaacgattctcctgtcttcaagaccgtgctggaaagaatgcagcgtttttttagtaccctgtacgagaattgctttcatatcctcggaaaggctggaccttcaatgcagcaagacttctataccgttgaggaccttgctacacagctactgtcatccgccttcgtcaatctaaacaatatcccagattaccgactccggccaatgctgcacattctctcaaagcctctggtcttgttctgtcctccagaacactatgaggcgttggtcagccctatccttggtcccctattcacttatctccatatgcgtctctcccagaagtggcaggttatcaatcagagatccctgctctgcggtgaggacgaggctgctgatgaaaatcccgaatctcaggaaatgcttgaggaacagttggtccgaatgttaacacgcgaggtcatggacttgattacggtgtgctgcgtgtctaagaagggcgcagaccactccagtgcccctcccgctgacggcgatgatgaagagatgatggccaccgaagtgactcctagtgctatggccgaacttacagacctggggaagtgtctcatgaagcatgaagacgtgtgtacagccctattgataacagctttcaattcgttggcatggaaagacacactaagttgccagagaaccacctcccagctgtgctggccgctgctgaagcaggtcctaagcggtacactgctggccgatgcggtcacctggctgtttacttctgtgctgaaaggtctgcagatgcacggtcagcatgacggatgcatggcttctctcgtgcatctggcattccaaatctacgaagctcttcggccaaggtacctggaaatcagggccgtgatggaacagattcctgagatacagaaagacagcctggaccaatttgactgcaaattactgaatccatccttgcagaaagtagcggacaagcggagaaaggatcaatttaagcgcctcattgccggttgcattggaaaacccctaggtgaacagtttaggaaggaagtgcatattaagaacctcccttttgtcgctgatttatag

SEQ ID NO: 222655 - DNA, 2211 bp, synthetic construct
  misc_feature 1..2211: note = Description of Artificial Sequence: Synthetic coding sequence
  source 1..2211: mol_type = other DNA
atgcactatatcctttccgctgcacagaccgctgacgggggaggacttgtagaaaagcactacgtgtttctgaagaggctttgccaagtcctctgcgctctgggcaatcagttgtgcgcgctgctgggggctgacagcgatgtggagacacctagcaatttcggaaaatacctagaaagctttctagcattcactacacacccttcccagttcctgaggtcttccacccagatgacatggggggcacttttccgacatgaaatcctctcacgggatccattgctgctagccataatccccaagtatctacgagcatcaatgaccaaccttgttaagatgggattcccgtctaagacagattcacctagttgcgagtactctaggttcgacttcgattcggacgaagactttaacgcattttttaacagctcccgagcccagcagggggaagtgatgcgcctcgcctgcaggctggaccctaagacaagctttcagatggcaggggagtggctgaaatatcagttaagcacctttctggacgctggcagcgttaacagttgttccgccgtgggaacgggcgagggttctctatgtagcgtcttttccccatctttcgttcagtgggaggccatgacccttttcctagagtcggttatcactcagatgttccgcacattaaatcgcgaggaaattcccgttaacgatggcatcgagctgttgcagatggtgcttaattttgatacgaaggaccccctcatcctgtcttgtgtgttgaccaacgttagcgccctttttccatttgtaacctacaggccggaattcctcccacaggtattctcgaagttgttctccagcgtgacatttgagacagtcgaggaatccaaggcccctcgcacacgggctgttcgtaatgtcaggagacatgcgtgctcttcgattattaagatgtgtagagactatcctcagctcgtcttacccaattttgatatgctatataatcacgtgaaacaacttcttagcaatgagctgcttctgacccaaatggagaagtgtgccttgatggaggctctggtgctcatcagcaatcagttcaagaactatgaaaggcagaaggtattcctcgaggagcttatggcccctgttgcaagtatatggctgtcccaggacatgcatagagtgctctccgatgtggacgctttcatagcatatgtcggcaccgatcagaagagctgcgatcccggactggaggatccctgcggtctcaatcgagccaggatgagtttttgcgtctactctatcttaggcgttgtgaaaagaacgtgctggcccaccgacctcgaagaggccaaagccggtgggttcgttgtgggatatacttcatccgggaaccccattttccgcaacccatgtacagagcaaatccttaaattgcttgataacctgctcgccttaatcaggacacacaatactctatatgccccagaaatgctggccaaaatggccgagccatttaccaaagcccttgacatgctggatgcagagaaatctgcaatcctggggctcccccagcctctactggagctgaacgactcccccgtgttcaaaacagtgttggaacgcatgcaacgttttttctccactctgtacgagaattgcttccatatactgggcaaagctggaccatctatgcagcaggacttctatactgtggaagatttggcaacccaattattgtcctctgcctttgtcaacctcaataacatccctgactatcgcctcagaccaatgcttcacatcctctctaaaccactggtgttgttctgccctcctgagcattatgaagcactggtgagtcccatcttgggcccattgtttacttacctgcacatgaggttatcccagaagtggcaggttattaatcaacgaagtttattgtgtggcgaagatgaggccgcagatgagaaccctgaatctcaggagatgctggaggagcagttagttcggatgttgaccagggaggtcatggatttgatcactgtttgttgcgtttcaaagaaaggggctgatcattcatccgctccacctgctgacggggacgacgaggagatgatggccacagaggtaacaccttcagccatggcggagctgaccgacctggtaagcattcaatctaccgacaaacgggtcagtcctagggccgaggtggattag

SEQ ID NO: 222656 - DNA, 2499 bp, synthetic construct
  misc_feature 1..2499: note = Description of Artificial Sequence: Synthetic coding sequence
  source 1..2499: mol_type = other DNA
atgacgtggggggctctgtttaggcatgagattctcagccgtgatccactcctgttggccatcattcccaaatacctacgcgcttccatgaccaatttagtgaagatggggttccctagcaagaccgatagtcctagctgtgagtattcgaggttcgattttgactccgatgaggacttcaatgcattttttaacagctctcgagctcagcaaggagaagttatgcgtctcgcctgccggctggatccgaaaacctctttccagatggctggcgaatggctgaaatatcaactctctaccttccttgatgcaggcagtgtcaattcctgtagcgcggtggggactggtgagggatccctttgtagcgtgttctcccccagctttgtgcagtgggaggccatgacactatttctggagtctgtcataacacagatgtttaggacactcaaccgggaggaaatcccagtgaacgacggcatcgagcttctgcaaatggtgctgaatttcgacacgaaagaccctctgattcttagttgtgtcctcacaaatgtttccgctttgtttcccttcgtgacttaccgcccagagtttttgccgcaggtgttttctaagttatttagctccgtaactttcgaaactgtcgaagaaagtaaagcccctcggacacgcgcagtgcgcaacgtgcggagacatgcttgtagttcaattatcaaaatgtgtagagactacccccaactcgtactgccaaattttgatatgttgtataaccacgtgaagcagttgctgtctaatgaactgttgctgactcagatggagaagtgcgccctgatggaggctctcgtacttatttctaatcagttcaagaattatgagcgtcagaaggtcttcctggaggagctgatggccccagtcgcaagcatttggctgtcacaagatatgcatcgcgtgttatctgacgtagatgcatttatcgcgtatgtgggtacagaccagaagtcttgcgacccaggtctggaagacccgtgcggcctaaaccgggcaaggatgtccttctgtgtctatagtatccttggggtggtgaaaagaacgtgctggccaaccgatcttgaggaagccaaagccggtggctttgtggtaggctacacatcctcaggaaatcccatcttcagaaatccttgtacagaacaaattctaaagctcctggataacctccttgcacttatcaggactcataatacactgtacgctcccgagatgctggcgaaaatggccgagcctttcaccaaggcactcgatatgctagacgccgagaagtctgcaatattagggctaccccagcctttgcttgaactcaatgactcaccagtttttaaaaccgttctggagaggatgcagaggtttttcagcactctttacgagaattgcttccatatcctgggcaaagctggaccttccatgcagcaggacttctatacggtcgaagatctcgccacccagctccttagttccgcctttgttaacctgaacaatattccagactatcggctgcgcccaatgctccgtgtgtttgtcaagcctcttgtgctgttctgtcctcccgaacactacgaggcgctcgtctcacctattcttgggcctctctttacttatttgcacatgcgccttagccagaaatggcaggtgataaatcagagatctcttctgtgtggcgaagacgaggccgctgacgagaatcccgagagtcaggaaatgctggaagaacagctagtcagaatgcttacaagagaggtgatggatctcattacagtctgttgtgttagcaagaaaggggctgatcactctagcgcaccccctgctgatggagacgatgaggaaatgatggcgacggaggtgacccccagtgcaatggcggagctgaccgatctgggaaaatgcctgatgaagcacgaggacgtgtgcactgcactgctgatcaccgccttcaactccctggcttggaaagatacattaagttgtcagcgaacgacttctcaattgtgctggcccctcctgaaacaggtgctctctggcacccttctggccgacgccgtaacgtggctctttaccagcgtgctcaagggactgcaaatgcacggccagcatgatggctgtatggcaagcttggtacatttagccttccaaatctatgaggccctgcgccctaggtatttggagatacgggctgtgatggaacagatccccgagattcaaaaggatagcttagaccagtttgactgtaaacttctgaacccgagcttgcagaaagtagccgacaagcggaggaaggaccagttcaaaaggctaatagctgggtgtatcggcaagcccttgggggaacaatttcgtaaagaggtgcacattaagaatttaccctcgctgttcaaaaagaccaaaccgatgttggaaaccgaagtactcgacaacgacggcggagggttagctactatttttgagccgtag

SEQ ID NO: 222657 - DNA, 3378 bp, synthetic construct
  misc_feature 1..3378: note = Description of Artificial Sequence: Synthetic coding sequence
  source 1..3378: mol_type = other DNA
atggcgagcgaagaagcctccttacgggctctggaaagcctcatgacagagttttttcatgactgtacaacaaatgagcggaagcgtgagatcgaagaattactgaataatttcgcacagcagattggcgcttggcggttttgtctatatttcttgtcttccaccaggaacgactatgttatgatgtattcgcttacagtctttgaaaatctgattaacaaaatgtggctgggggtgcctagccaggataagatggaaattagatcctgccttcctaagctcctgcttgcccatcataaaacattgccttactttattagaaataaactctgtaaggtaatagttgatatcgggaggcaggattggcccatgttttaccatgactttttcactaacattctgcaattgattcagtctcccgtcaccaccccgctgggactaatcatgttaaagacaacgagcgaggagctagcttgcccgagggaagacctctccgtggccagaaaggaggagctccgaaagctgctcttggaccaggtgcagaccgtcctgggactccttaccggcatattggaaacagtttgggacaaacatagtgtcaccgccgcaacccccccaccatcaccaacgagcggagaaagtggcgacttgttaagcaacttactgcaaagcccatcgagtgcgaagttgcttaatcaacccatccccatactggacgtggagtccgagtatatttgttctctggctctcgagtgcttagcccacttgttctcgtggatcccattgagtgcatcgatcactccttctctcttgactacaatctttcactttgccaggtttgggtgcgacatacgtgccaggaaaatggcttcagtgaacggaagcagccagaattgtgttagtggtcaagaacgtggcagacttggagtgttagccatgtcttgcattaacgaacttatgtcgaaaaattgcgttcccatggaatttgaagaatacctgctgcgtatgtttcagcagaccttctacctgttgcagaagatcactaaggataacaatgctcataccgtgaagagtcgcctggaggaactcgacgaatcttacattgaaaagtttaccgacttcctgagattatttgtgtctgtgcaccttaggcgtattgaaagctacagccaattcccagtcgtagagtttcttacattgcttttcaaatacacatttcatcagccaacgcacgagggatacttctcctgcttggacatatggacactgttccttgattatctcacttccaaaatcaagtccaggctcggtgacaaagaggcagtgcttaatcggtatgaggatgcgctcgtgttattattgacagaggtgctgaacaggattcagtttagatacaatcaggctcagctagaagagctagacgacgagacgctggacgatgatcagcagacagagtggcaaagatatctccgtcagtctctggaggttgtcgctaaagtaatggaactcctaccaacacacgcgttttcaacactgttcccagtcctgcaggataacctggaagtatacttaggcctccagcaatttatcgtgacttcagggagtggacacagactcaacatcaccgctgaaaatgactgccgcaggctgcattgctcactccgtgatctcagcagtctgctgcaggcagtgggacgccttgccgagtactttattggcgatgtgttcgccgctaggttcaatgatgcactgaccgtcgtcgaaaggctggtgaaagtgactctatacggttcgcagatcaagctctacaatatcgaaactgcagtgccaagtgtgttgaagccagatctgatcgatgtgcatgcccagagcctggccgcactgcaggcctatagccactggttggctcaatactgctccgaggtgcatcggcaaaacactcagcagtttgtcactttaatttcaactaccatggacgccattactccactgatctcaacaaaagttcaagacaagttgcttttgtccgcttgtcatttgctggtgtctctagccacaaccgttagacctgtatttctgatttcgatccctgccgttcagaaagtcttcaacagaataacagacgcctcggctctgaggttagtagacaaggcacaggttctagtctgtagggccctgtccaacatcttgctcctgccatggccaaacctaccagaaaatgagcagcagtggccagttcgctcgatcaatcatgcatcgctcatcagcgccctcagtcgggactatagaaacctgaagccgtccgcggtggctcctcaaagaaagatgcctctggatgatactaaacttataattcaccaaaccctgtccgtactggaagacatcgtagaaaatatctccggggagagtacgaaatccagacagatctgctaccagagcctccaggaatctgtgcaagtctcgctcgccctgttccctgcttttatccatcaaagtgatgtgactgacgagatgcttagtttttttttgactctgttccggggattaagagttcagatgggtgtcccttttacagagcagatcattcagacattccttaacatgtttacaagagagcaactggcggagtcgattctccatgaggggagtaccggctgccgggtggtggaaaagttcctaaagatcctgcaggtcgtggtccaagaacccggacaggtgttcaaaccatttctcccttcgatcatcgccctgtgcatggagcaggtgtacccgataattgctgagagacccagcccggatgttaaagcagaactgttcgagctgctcttccggacccttcatcataactggagatatttttttaagtctaccgtcctggcatccgtccagagaggtatagctgaagagcaaatggaaaatgaaccccaattctccgccatcatgcaggccttcggacagagctttctgcagccagacatccatctcttcaaacagaacttattctatctggaaacccttaacacgaagcagaaactctaccacaagaagatattccggactgccatgctgttccagttcgtcaacgttctcttgcaggtcctggtccacaagtcccatgacctgttacaagaagagataggcatcgccatctataatatggcctccgttgacttcgacggcttcttcgctgcatttttgcccgagtttctcacgagctgcgacggggtggacgccaatcagaaatcagtgctggggaggaacttcaaaatggatcgcgatcttccatcttttacacagaacgtgcaccggttggttaatgatctgcgttattaccgactctgcaatgatagcctgcccccaggcactgtaaagctttag

SEQ ID NO: 222658 - DNA, 3336 bp, synthetic construct
  misc_feature 1..3336: note = Description of Artificial Sequence: Synthetic coding sequence
  source 1..3336: mol_type = other DNA
atgactgaattcttccacgattgtacaaccaacgagagaaagcgcgagattgaggaactgctcaataacttcgcccaacagataggtgcatggcggttctgcctctacttcttatccagcactcgtaacgactacgtgatgatgtactcccttacagtgtttgaaaatctcattaataagatgtggcttggagtgccttcccaggacaagatggagatcagatcatgcttacccaaactacttctcgctcaccacaagactctgccatattttattagaaacaaactgtgcaaagttattgtcgatatagggcgacaggattggcccatgttttatcatgactttttcacgaatatcttgcaactcatccagagtccggtcacaacccccttgggactgattatgctcaaaaccacctcagaggagttagcgtgccccagggaggatctttcagtggcccgaaaagaggagctcaggaaacttcttctggatcaggtgcagacagtcctggggctgctgaccgggattctggaaactgtttgggataagcacagcgtgacggcagctacccctcctccatctcccaccagtggcgagtccggagacttgctgtcaaacttgctccagagtccttccagcgctaagctgctcaatcagcctataccaatattggacgtcgagtccgagtacatttgttcactagctctggagtgcttggctcatcttttctcctggattccattgagtgccagtatcaccccctcactgttgacaaccatctttcactttgccaggttcggctgcgatattcgggcacgaaaaatggcaagtgtaaacggatcatcccaaaattgtgtctccggccaagagagaggtaggctgggcgtgctagccatgtcctgtattaacgaactgatgtctaaaaattgcgtcccaatggaatttgaggagtacttgctgagaatgtttcagcagaccttctacctactgcagaaaatcacaaaggataacaacgcccatacggtgaaatcccgcctggaggagctagatgaatcctacatagaaaagttcaccgatttccttcggctatttgtgtccgtacaccttagacgcatcgaaagctattctcagtttccggtggtcgagtttctgactctgctgtttaagtacacattccaccagccgacacacgaaggctatttctcctgcctagatatctggacattgtttttggattacctgactagcaaaatcaaatccagactgggagataaagaggcagtgctaaatagatacgaggatgccctcgtgttgctcttgactgaggttttaaatcggatacagttccgatacaatcaggctcagttggaggagctggatgatgagacattggatgacgaccagcaaaccgaatggcagcgctatctgagacagagcctcgaagtggtggctaaagtcatggaacttctccctactcatgccttttccacccttttccctgtgctacaggacaacttggaggtctacctaggtctccagcagtttattgtcacatctggaagcggccaccgcctcaacatcacggccgagaacgactgccgtagattacactgcagcctgcgagacttgtcttcgctgctgcaagccgttggcaggctggcggaatattttatcggtgacgttttcgccgctcggttcaacgacgcactgacagtagtggaaaggctcgtcaaggttacattgtacggctcgcagattaagctgtacaacattgaaaccgcggtgccttccgttctcaagcccgatctaatcgatgtgcatgcgcagtcactggccgctctgcaggcatatagccattggttagcgcagtattgtagcgaagtccatcggcagaatacccagcagttcgtgactcttataagcaccacaatggacgccattacccccttgatatccacgaaagttcaggacaagctgctactgagtgcatgccacctgcttgtgagtcttgccactacggtgaggccagtgtttctcataagcattccagcagttcagaaggtcttcaatagaattacagatgccagcgctctcagactcgtcgataaagctcaggtgttagtgtgccgggctctgtccaatattctgctcctaccatggccaaatctgccagagaatgagcaacagtggccggtccgttccatcaaccacgcctcactgatttcagctttaagtagagattacaggaacttgaaacctagtgcggtggcccctcaacggaaaatgcctctggacgatactaagttgattatacaccagactctgagcgtgctggaggacatcgtggaaaatatctccggggagtctactaaaagcaggcaaatttgctaccaaagcctgcaggagagcgtgcaggttagccttgctttgtttccagcatttatccaccagtctgacgtaactgacgagatgctgtcattctttctgacactctttcggggtctgcgtgttcaaatgggcgtgcctttcactgaacaaatcatccagaccttcttgaatatgttcaccagagagcagctcgctgagtccattttacatgaaggctctaccggttgtcgggtcgtggagaagtttttgaagatccttcaggtggtggtccaagagcccggacaggtctttaaacccttcctcccctctataatagccctttgcatggagcaagtgtatccgataatagccgaacgaccatctcccgacgttaaggcagaactcttcgaacttcttttcaggaccctgcatcacaactggcgttactttttcaagtctaccgtgttagcaagtgttcagcgtggtatagccgaggaacagatggaaaatgaaccccagttctctgcaatcatgcaggctttcgggcagagctttcttcagcccgacattcatctgtttaaacagaatctgttctacctggaaactctcaatacaaaacagaagctataccataagaagattttcaggactgccatgttatttcagttcgttaacgtgctgctacaagtgttagtgcacaagagccacgacctcctccaagaggaaattgggattgccatctacaatatggcctcagtagattttgacggattcttcgccgcattccttccagagttcctaacttcatgtgacggggtagatgctaaccaaaagtcggtcctcggacgaaactttaaaatggatagagacttaccatcattcactcagaacgtacatcgcctggtaaacgaccttcgctactaccggttatgcaacgactcactccctcccggaacagtaaaactgtag

SEQ ID NO: 222659 - DNA, 3264 bp, synthetic construct
  misc_feature 1..3264: note = Description of Artificial Sequence: Synthetic coding sequence
  source 1..3264: mol_type = other DNA
atggcggaccatgtgcaaagcttggctcaactcgaaaatctgtgcaaacagctgtacgagaccacagataccacaacacggcttcaggccgagaaggccctggtggagttcactaactcccccgattgcctctctaagtgtcagctgctattggagcggggaagttcaagctactcccaactactcgctgctacctgcctgaccaagctagtctcgcgaactaataaccctttacctcttgagcagcggatcgacatcaggaattacgtgctgaactacctggccacacgcccaaagctcgcaacgttcgtcactcaggcccttatccagctgtatgctcggatcacaaagctgggctggttcgattgccagaaggacgactatgtctttcggaacgcaatcacagatgtcacccgctttttgcaggacagcgtcgaatactgtatcattggcgtgactatactgtcccagttaaccaatgagatcaatcaggccgacacaacacacccactgacgaagcacaggaagatcgctagctcttttcgagactctagcctctttgatatttttaccctgtcctgtaacctgcttaagcaagcgtcagggaaaaatctgaacttgaacgacgaaagccagcacggcctgctgatgcagcttctgaaactgacccacaactgcctgaacttcgatttcatcgggacatccacagatgaatccagtgatgacctatgcaccgtccagattcctacaagttggaggagcgcttttttagatagtagcacactgcagctgttctttgacctgtaccactccattccgccaagcttttcacccttggtgctgtcatgtctggtgcaaatagcatccgttcgtagatcattgtttaataatgctgagcgcgctaagtttcttagccacctggtggacggtgtgaagcggattttggagaacccgcagtctctcagcgatcctaacaactaccatgaattttgccggttgttggctcggctaaagtctaactaccagctaggcgagctggtcaaggtggagaactaccccgaagtgattagactgattgccaacttcactgtgacctctctccagcattgggaattcgccccaaattcagtgcactatctactcagcctctggcaaagattggccgctagtgtcccatacgtaaaagctactgagcctcacatgcttgaaacatacactcccgaagtgactaaagcgtacataacctccagactggagagcgtccatatcatcctgcgcgatggcctggaagatccacttgaggatacgggtctcgtccagcaacagctggaccagctgtccaccattggtcgctgtgagtatgagaaaacctgcgctctcttagtgcagttatttgatcagtccgcccagtcatatcaggaactactgcagagcgccagcgccagtcctatggacatcgcagtgcaagagggaaggctgacatggctggtgtacataatcggcgctgtcatcggaggcagagttagcttcgcatccactgacgagcaggacgccatggacggagaactcgtatgccgtgtgcttcagctgatgaacctgacagactctcgccttgctcaagccggaaacgaaaagctcgaactggccatgttaagttttttcgagcagttcagaaagatctatatcggtgatcaagtccagaaaagcagtaagctgtaccggaggctttccgaagtactgggactgaacgatgagacgatggtcctgagcgtattcattggaaagatcatcaccaacttaaaatattggggcaggtgcgaaccaatcacatccaagactcttcagttgctgaacgatctcagcattgggtattccagcgtgcggaaactggtaaaactttcagctgtgcaatttatgctgaataatcataccagcgagcacttttccttcttgggcattaataatcaatccaatctgaccgatatgaggtgtcgtactacattctataccgcactggggagattgcttatggtagacctcggtgaggacgaggatcagtatgagcaattcatgctcccactgactgctgcttttgaggcggtggctcagatgttcagtacaaattcctttaatgagcaggaggcaaagcgaacattagtaggtcttgtgcgcgacctgcgcggaatcgccttcgcattcaacgccaagacctcattcatgatgctgttcgaatggatctacccatcttatatgccaatcctgcagcgggctattgagctgtggtaccacgatccagcctgcactacacccgtcctgaaattgatggctgagctcgtgcataatcgctcccaacgcttgcagtttgacgttagttcaccaaacggaatactcttattccgagagacctcgaagatgattaccatgtacggtaaccgaattctcacccttggggaagtgcctaaggatcaagtgtatgctctgaagctcaagggcataagtatctgctttagcatgttgaaagcagccctcagtggatcttatgtcaactttggagtgttccgtctgtacggcgacgacgctctggataacgcgcttcagacgtttatcaagcttctgttgagcattccccatagtgacctgttagattaccccaaattgagccagagttactattctctcctagaggtcctgacccaggaccacatgaattttatcgcaagtcttgaaccgcacgtgattatgtacatcttgagcagcataagcgagggcctgaccgccctggatactatggtctgcacagggtgctgttcttgccttgatcacattgttacatacctgtttaaacagttatcaagatccacgaagaagcggactacacccctcaatcaggagagcgacaggtttctgcacatcatgcaacagcacccagaaatgattcagcagatgttgagtaccgttctgaatatcatcatctttgaggattgtagaaaccagtggagtatgtcacgcccactgctgggtctaatccttctgaatgaaaaatattttagtgacttacggaattcgattgtaaatagccagccacctgagaaacaacaggctatgcatctgtgcttcgagaacctgatggaagggatcgaaagaaatctgttaacaaagaatcgcgacagatttactcagaacctcagcgcatttcgccgtgaggtgaatgatagcatgaagaacagtacctacggtgtcaattcgaacgatatgatgagttag

SEQ ID NO: 222660 - DNA, 3267 bp, synthetic construct
  misc_feature 1..3267: note = Description of Artificial Sequence: Synthetic coding sequence
  source 1..3267: mol_type = other DNA
atgcgcgaccccggaagaaaaagtctagcacagctggaaaatttgtgtaaacaactgtacgaaaccacagatactaccacgaggttacaggccgagaaggctctcgtggagttcactaacagtccagactgcctgtctaagtgtcagctgctgctcgaaaggggtagttctagctactcacagctcctcgcagccacttgtttaacaaaactggtttctaggactaataacccacttccgctggaacagcggatcgacatacggaactacgtccttaattatctggccacccgtcctaagctggcaacatttgttacacaggcattgattcagctttatgccaggatcactaaactgggatggtttgactgtcaaaaagacgactatgtgttccggaatgccataacagatgttacaaggttccttcaggactccgtcgagtattgtatcataggggtcacaattctcagccagctcacaaacgaaatcaaccaggcagacacgacacacccactcaccaagcacagaaagatagctagctcattccgggacagcagtttgttcgatatcttcaccctgagctgtaacttgcttaaacaagcctccggcaagaatttgaatctcaatgacgaaagtcagcatggcctcctcatgcagctgctcaagctgacgcacaactgtctaaatttcgacttcatcggcacatcaaccgacgagtctagtgatgatctgtgcaccgtgcagatacctacaagctggcgcagtgcttttttggacagttccactttgcagctcttctttgatctttatcactccattccacctagcttttcacctctggtcctgagctgtctggtgcagattgcctcggtgcgtcggagcctcttcaacaacgccgagcgggctaagttcctgtctcatctggtggatggtgttaagcgcatcttggagaacccacagagccttagcgacccaaacaactaccacgagttctgtaggttactagcaaggctgaaaagtaactaccagctgggggagctggttaaggtggaaaattatcctgaagtgatcaggctcatcgctaatttcaccgtgactagtctgcagcactgggaatttgcacccaatagtgtgcattaccttctctccctgtggcagcgtttggccgcatcagtcccttacgtgaaagctacggagccacacatgctcgaaacatacacccccgaagttactaaggcctacatcactagccgcctcgaatccgtgcacatcatccttagagacggactcgaagatcccctcgaggataccgggctagtgcagcagcaactggaccagctgagcacgataggtcggtgtgagtatgaaaaaacgtgcgccctgctggtccagctgtttgaccagagcgcgcagtcttaccaggaattactacaatctgcatcagctagtcccatggacattgccgtccaagaaggtcgactcacctggttggtgtacataattggggctgtgatagggggaagggtgagcttcgccagcactgatgagcaggatgctatggatggggaactggtttgccgcgtgcttcagttgatgaacctgacagacagccgcctcgcccaagctggcaatgagaagctagagctggctatgctctcctttttcgagcagtttaggaaaatctatattggggatcaggtgcagaagtcctccaaactctacaggcggctgagtgaggtgctgggactgaacgatgagacaatggtgctgtctgtgttcattgggaagatcattacgaacctcaaatattggggaagatgcgagcccatcaccagcaagactctgcaactgctgaacgaccttagcattggttatagttccgtgaggaagctggttaagttatctgccgtgcaattcatgctgaacaaccacacttccgagcatttcagttttctagggatcaacaatcagagcaacctgactgacatgcgttgtcggacaaccttttacactgccttaggccgactgttaatggtagacttgggggaggatgaggatcagtacgagcaatttatgctcccactaaccgccgcttttgaagccgttgcccagatgttttcgacgaacagctttaatgaacaagaggcgaaacgcactttggtggggctggtcagggatcttagggggatagccttcgcctttaatgcgaaaacctctttcatgatgctcttcgagtggatatacccttcctacatgccaatcctgcaacgggcaatcgaactgtggtaccatgaccccgcttgtacaactccggtgctgaagctaatggctgaactcgtgcacaatcgctcccaaagactgcaattcgacgtaagttccccaaacggtatcttgctctttcgggagacttctaagatgattacgatgtacgggaataggatcctgacactaggagaggtgccgaaggatcaggtgtatgctctcaaactaaaaggaatttccatctgcttttccatgcttaaggccgctctgtccggatcttatgtcaattttggcgttttcagactctatggcgatgacgcactcgacaacgccctgcagacatttatcaagctgcttttatccatacctcacagcgacctgctggactaccccaagctctcacagagctattatagcttgctggaggtgctgactcaggaccatatgaactttattgcgtccttggaaccccacgtaattatgtacatcctcagtagtatttcagagggtttaaccgcactggacaccatggtgtgcacgggatgctgctcctgcttagaccatatagttacctacttgttcaaacaactttcaaggtctactaagaagcgcaccactcccttaaaccaagaaagcgaccggttcctgcacattatgcaacaacatcctgagatgatccagcagatgctctctaccgtgctgaacataataatctttgaagactgtcgaaatcagtggtcgatgagtagaccgttactcgggctcattctgttaaatgagaaatacttttccgacttgcggaattctattgtcaacagtcagcccccagaaaagcaacaggcaatgcacttgtgttttgaaaacctgatggagggaatcgagagaaatcttttaactaagaatagagatagatttacccagaacctgtctgcatttagacgcgaagtgaacgactctatgaagaacagtacctatggagtgaattctaacgacatgatgtcatag

SEQ ID NO: 222661 - DNA, 3291 bp, synthetic construct
  misc_feature 1..3291: note = Description of Artificial Sequence: Synthetic coding sequence
  source 1..3291: mol_type = other DNA
atggcagaccatgtacaatcgcttgcacagcttgagaatctctgcaagcagctctacgagacgacagataccactactcggcttcaagcagagaaagccttagtcgagtttacgaattcacctgattgtctgtccaaatgccagcttttgttagaacggggatccagctcatactctcaattactggctgctacatgccttacaaaactggtgtcccgcaccaataacccgctgccccttgagcaaaggatagacattcgtaattacgtcttaaactatctggctactcggccaaagcttgctacattcgtaacacaggctctgattcagctgtacgctcgcattactaaactcggatggtttgattgccagaaagatgactacgtcttcaggaacgctatcacagacgtcacacgctttctacaagattcagtagagtactgtattattggtgtgacaatcctgtctcagctgactaatgaaatcaaccaggtgtctgctaccgctttcctgatcgaggccgatacaacacaccctctgactaaacacaggaaaatagccagctccttccgtgattcctctttatttgacatctttaccctctcttgtaatctgctaaaacaagcatcggggaagaatttgaatctgaatgatgaatcacagcacggtttactgatgcagttgctgaagctaacccataattgtctgaacttcgatttcattggaacctcgaccgatgagtcaagcgacgacctgtgcacagtgcagattcccacttcctggaggtccgctttcctggactcatcaaccctgcagctgttcttcgacttatatcattcaattcctccttcattctctcctctggtgctcagctgcctcgttcagattgccagtgtgagaagatccttgttcaacaacgctgagcgtgccaagtttctttcccatctggtggatggggtgaagcggatcttggagaatccacagtcgctttccgacccaaacaattaccacgagttctgtaggcttttggcaaggctgaaaagcaactaccaactcggcgagctggtcaaggtggaaaactaccctgaagtgatccgccttatcgctaacttcaccgtgacaagccttcaacattgggagtttgctccaaactctgtgcactaccttctatcactgtggcaacggttggcggcaagcgtcccttacgtcaaagctaccgagccacatatgctggaaacttataccccagaagtcactaaagcctatataacatcccgcctggagtcagtgcatataattctgcgagacggactcgaagacccactggaggacacgggcttggtgcagcagcaattggaccagttgagcaccatcggcagatgcgagtacgaaaaaacctgtgctcttctggtgcaacttttcgaccaaagtgctcagtcctatcaagagctactccaatccgcctcagcctcaccaatggatatagctgttcaggagggccgtctgacttggttagtgtacatcatcggcgcagtcatcgggggtagagtgtcctttgcatcaacggatgagcaggatgccatggacggcgaacttgtgtgtagggtgctgcagctgatgaatctgacggactctagactagcccaagcagggaacgagaagctggaattggccatgctcagcttctttgagcagtttagaaagatatatattggggatcaggtccagaagtcatccaagctatataggcgccttagcgaggtgttgggcttaaacgatgagacaatggtcctgtctgtattcataggcaagattatcacaaacctcaagtactggggcagatgtgagcctatcacatctaagaccttacaacttctaaacgatctctcgatcggctatagcagcgtgcgcaagcttgtcaagctttctgctgtccagttcatgttgaataaccatactagcgaacatttcagcttcctcgggataaataaccaaagtaatctgactgatatgcgctgcagaaccacattttatactgctctcgggaggctgttgatggtcgacttgggggaggatgaagatcaatatgagcagtttatgctgcctttgactgccgcattcgaagcagtggcacagatgttttccaccaactccttcaacgagcaagaagctaagcgtactctggtgggtttggtccgggatctgaggggcatcgcctttgcctttaacgctaagacctctttcatgatgctgtttgagtggatatacccctcctatatgcctattcttcagcgggcaattgagctatggtaccacgatcctgcctgtaccacccccgtgctgaagctcatggccgagcttgtccacaacagatcccagcgtttacagttcgacgtcagctcgcccaatgggatcctgctattccgggagacctcaaagatgatcacgatgtatggaaatcgcatacttaccctaggagaggttcccaaagaccaagtttatgccttaaaactgaaaggcatttctatttgtttctccatgttgaaagctgctttaagcggctcttatgtgaacttcggcgtgttcaggctgtatggcgacgacgcacttgataacgctctccaaacatttataaagctgcttctttccatcccgcactcggatcttctggactatccaaagctgagccaaagctactactcgctgctggaagtgttaacccaggatcacatgaactttatcgcttcccttgaaccccatgtgatcatgtacattctaagttctattagtgagggtctgacagccctggacactatggtttgtacaggatgctgcagttgcctggatcacattgtcacttacctgtttaagcagctgagcagatcaaccaaaaagcgtaccactcccttaaatcaggaaagtgatcgattcttacacatcatgcagcagcaccccgaaatgatccagcagatgctcagtaccgtgctgaatatcattatttttgaggattgtcggaatcaatggtcaatgtctcggccattacttggactgatcctgttgaatgagaaatacttctcagatctccgaaactctatcgtgaactctcagccccctgagaagcagcaagcaatgcacctatgtttcgaaaacctcatggagggaatagaacgcaatctcctgaccaagaaccgggacagattcactcagaacctgtctgccttccgccgtgaggttaacgactccatgaagaactctacttacggcgtgaactcaaacgatatgatgtcttag

SEQ ID NO: 222662 - DNA, 6363 bp, synthetic construct
  misc_feature 1..6363: note = Description of Artificial Sequence: Synthetic coding sequence
  source 1..6363: mol_type = other DNA
atgcgctcatttaagagagttaactttggtactctgctgtccagtcaaaaggaggctgaggaactgctgcccgctctgaaagaatttctgagtaatccccctgccggtttccctagctctcggtccgacgctgaacggcgtcaagcctgcgacgcaatcctccgtgcttgtaatcagcagttgacagctaaacttgcctgccctagacacctcggttcactcctcgaactcgccgaactggcgtgcgacgggtatctggtgtctacccctcagagaccaccattgtacctggagcgcatcctgtttgtgcttctaagaaacgccgctgctcaaggctcacctgaggccacactgcgcctagcacagccactccatgcttgcttggtgcaatgttcaagggaagcagcaccgcaagactacgaagcagtcgctcggggaagcttttcattactttggaagggcgctgaagctctgttggagcggagagctgcattcgctgcgaggctgaaagcattgagtttcttagtattgctcgaggacgagagcacaccgtgcgaagtgcctcattttgcatctcccaccgcctgccgggctgtggctgctcatcagcttttcgatgcaagcggacacggactaaatgaggcggacgcagacttcctggatgaccttctctcccgccacgtcattcgcgcactcgtaggcgaacgtggtagttctagcgggctattaagcccccagcgcgcactgtgcctgctcgagttgacattggaacattgccggaggttctgctggtcaaggcaccacgacaaagccatctccgccgtggagaaggcacacagctatctcaggaataccaatctcgccccttcccttcagctttgtcagctgggtgtaaaactgctgcaggttggagaggagggaccgcaggctgtcgccaaactgcttattaaggcttccgcagtcctcagcaagtcaatggaggcccctagcccccctctgcgggctctgtatgaatcttgtcagttttttctgtccggtctggagagagggacaaagagacgatatcggctggatgccatcctgtctctcttcgcctttctaggtggttattgtagcctcctgcagcagttgagagatgacggcgtatacggcggaagtagcaagcagcagcagtcttttctgcaaatgtatttccaaggcctacacctgtacacagtagtggtctatgactttgcccagggctgccagatcgttgacctggctgacctgacacaactggtggatagttgcaaatcgactgtcgtttggatgctggaagcactggagggcctctctggccaggagctgaccgaccacatgggcatgacagctagttacacttcgaacttggcctactctttttactcccataagctgtatgccgaagcctgtgccattagcgagcctctttgtcagcatctcggactagtcaaacccggaacatatccagaagtgccaccggaaaagcttcatcgatgcttcaggctacaggtcgagtcactcaaaaagctgggcaaacaagctcagggttgcaagatggtaattttgtggcttgccgcacttcagccgtgcagcccagaacatatggctgagccggttactttctgggtcagagtcaagatggatgccgctagggctggagacaaagagctgcagttaaaaactttgcgcgacagcctgagcgggtgggacccggagaccttagctctgctattgagagaagagttacaagcctacaaagctgtgagggccgacacaggtcaggagaggtttaatattatttgtgatttattggagctgagccctgaggagacccccgcaggtgcttgggctagggccactcacctggtcgaactggcacaggtgctgtgttaccatgacttcacccagcagaccaactgctctgcattggatgcaattagagaggccctgcaactcctagattccgtaagaccagaagcgcaggctagggatcagttgctcgatgataaggcccaggcccttctgtggctgtacatttgcaccctggaagctaaaatgcaagaaggcatcgagcgggaccgccgagcacaagctcctggaaatctagaggagtttgaagtgaacgatctgaattacgaggataaactccaggaagacagattcctgtattctaatatcgcatttaacctggcagccgacgctgctcagagtaaatgcctggatcaggctcttgccttgtggaaggaactgttgacgaaaggtcaagcccctgccgttagatgtctgcagcaaactgctgcctcgcttcagatcctggccgcactgtatcagctggtggctaaacccatgcaggccctcgaggtattgttgttgctaagaatcgtaagcgagagactcaaggaccactcaaaggctgctggttcctcttgtcacattacacagttactgcttacactcggctgcccatcgtacgcacagcttcacctggaggaagctgcttcatccctgaaacacctggaccaaacaacagacacctacttgctgctgtccctgacatgcgacctgctccggtcccagctctattggacccaccagaaagtcactaaaggcgtgtctcttctgttaagtgtgctccgtgatccagcattgcagaagtcaagcaaagcatggtaccttctccgcgtccaggttctccaactggtcgctgcctacctgagcttgccctctaataacctgagtcactctctctgggagcaattgtgcgcgcagggatggcaaaccccggaaattgcactgatagatagtcataaactgctgcggagcataatcttgctgttgatgggctctgacattctatcaacacagaaggctgccgtggaaaccagtttcctagactacggagaaaacctggtacagaaatggcaggtcctcagcgaggtattatcctgctccgaaaagctcgtctgccatctgggacgcctgggcagcgtttccgaggccaaagccttttgtctggaggccctcaagcttacaacaaaactccagattccacgacaatgcgcgttgtttctggttctgaagggtgaactagagctagcgagaaacgatattgatctatgtcagagtgatctgcagcaagtgttgttccttcttgagagctgcactgagtttggcggagtgacccagcatctggacagcgtgaagaaagtacacctccagaaaggaaaacagcaagcacaggtgccttgccctccccagctgcccgaggaggagctcttcttgaggggccctgctttagagctcgtagccactgtggctaaagaacccggacccatagcacctagtaccaactctagccctgtcttgaaaactaaaccccagccaatcccaaattttttaagccactcgcctacttgtgactgttccctctgtgcatcaccggttttgactgcagtctgcctgagatgggtgctggtaaccgcgggagtgcggcttgccatggggcatcaggctcaggggctggatctgttgcaggtcgtgcttaaaggctgtccagaggctgctgaaagactgactcaggcgcttcaggcatcgctgaaccataaaacacctccatctttggtgccctcgttgctggacgagatcttggcccaggcttatacactgcttgcactggagggactgaatcagccaagcaatgaaagccttcagaaggtccttcagagtgggctgaagttcgttgccgcacgcattccacatctggaaccttggagggcctctctgctactgatctgggccctaaccaagcttggtggtctgtcctgctgcacaactcagcttttcgcctcatcatgggggtggcaacctcctttaatcaagtctgtgccaggttccgaaccatccaagacccagggacagaagcgctcagggagggggcgtcagaaactggcgtcagcaccactcagattgaacaataccagccagaaaggccttgagggcagaggcttgccgtgcacgcctaaaccacccgataggataagacaggccggacctcacgttcccttcaccgtgttcgaggaggtgtgccccactgagtccaagcctgaagtgcctcaggcgcctcgcgtgcagcagcgcgtgcagaccagactgaaagttaatttcagcgacgactccgatttagaggacccagtgtctgctgaagcgtggctcgccgaggaacccaagcgaaggggaaccgcctccagaggccgaggtagggccagaaaaggcttaagcctcaaaaccgacgccgttgtggctccagggagcgcaccaggcaatccagggctgaacggtagatctcggcgagcaaagaaggtagctagccgccattgtgaggaacgtcgccctcagcgggctagcgaccaggccaggccaggcccagagattatgcgcacaattccggaggaagagctgaccgataactggcgtaaaatgtcctttgaaattctgagaggctccgatggcgaagattctgccagtggtggaaaaaccccagcccctgggccagaagccgcttctggcgaatgggagttgcttaggctggatagtagcaagaagaaactcccttcgccttgtcccgacaaggaatccgacaaggatctggggccacggctcaggctcccctcagctcccgtcgcgactggactatctactctggactccatctgtgactccttgagtgtagcattccggggtatttcccactgtccaccgtcaggcctgtatgcgcatctgtgccgatttctggccttatgccttggtcatagggacccctacgccacagcttttcttgttaccgaatccgtgagcattacctgtagacaccagctcctcacacaccttcacagacagttatccaaagcccaaaagcatcgcggttccctcgagatcgctgatcaactgcagggattgtcgttgcaggaaatgccaggtgacgtaccactggccaggatccagcgattgttcagcttccgcgctcttgaatccggccactttccccagcccgaaaaggagtcattccaagagagactagcactgatcccctccggcgtgacagtgtgtgtgctagctttagcgaccctgcagcccggtaccgtgggcaataccctcttactcacgagactggagaaggactcgcctcccgtgtccgtgcagatccccaccggccaaaataagcttcacctgcgaagtgtactgaacgagtttgacgccattcagaaggcacagaaggagaactccagttgcaccgataagagagagtggtggactggacggcttgccctggatcatcggatggaagtcctcattgcatccctggaaaagtccgttttgggttgttggaaagggcttctgctaccatcatctgaggagcctggtccagcacaggaggctagcagattacaggagctgctccaggattgtggatggaagtatccagaccgcacactgctaaaaattatgctctctggagcgggtgcactcaccccgcaagatatacaggctctggcctatgggttgtgccccacacagccagagcgggctcaggaattgctcaatgaggctgttgggagactgcagggtctgaccgtgccatctaattcccacctcgtcctcgtgctagacaaggatctgcagaagctgccctgggagtctatgcccagtttgcaggccctgcctgttacaaggctccccagttttcggttcctgctgtcatacagcattattaaagaatacggcgcttccccagttttgtctcagggtgtcgatccacgctctacgttttacgtgctcaaccctcataataacctcagcagtaccgaagagcagttcagagcgaacttctccagtgaagcaggatggcgtggcgtggtgggggaagtgcctcggccagagcaagtacaggaagctttgacaaaacatgacctctatatttacgctggccacggcgctggcgctcgtttcctggatgggcaagctgtgctcaggctgagctgcagggcagtggccctcttatttggctgttctagtgctgcgctggccgtccgaggtaacctggaaggtgccggaatcgtgctcaagtatattatggctggatgtcctctgttcttggggaacttgtgggacgtaactgatagagatatcgaccggtataccgaagccctgctccaaggttggctgggggctggtccaggggcacccctgctgtactacgtgaatcaagctagacaggctcctaggctgaagtatcttatcggcgcagctcctattgcgtatggactgcccgtttcactgcgctaa

SEQ ID NO: 222663 - DNA, 6362 bp, synthetic construct
  misc_feature 1..6362: note = Description of Artificial Sequence: Synthetic coding sequence
  source 1..6362: mol_type = other DNA
atgcggtctttcaagcgtgtgaacttcggcactcttctgagctcccaaaaggaggcggaggagctcctccccgcactgaaggagttcctgtccaatcctcctgccggtttcccttcgtcccgatccgacgctgagaggagacaagcgtgtgacgcaatcttgcgggcatgcaatcagcaattaacggcaaaactggcatgccctagacatttaggctcgctgctggagctcgccgaactggcatgtgatggataccttgtttccaccccacaacgacccccactgtatctggagagaattctgttcgtgctgctacggaatgctgctgctcaaggaagtcctgaagcgactttgaggctggcgcaacccctgcatgcttgtctcgtgcagtgctccagagaagcagccccacaggactacgaggccgtagccagaggctccttttctctcttgtggaaaggtgccgaagctctcctggaaagaagagccgcatttgcagctaggctgaaggcgctctcattcttagtgctcctggaagacgaatccaccccttgtgaagtcccccatttcgcctcgccgaccgcctgcagagcagtcgcagcacatcagctgtttgatgccagcgggcacggcctgaatgaagcagatgcagattttctggatgacctgctctctagacacgttattcgagcgctcgtaggcgagcggggaagtagctctggactactgtctccgcaacgcgctctgtgtctgctagaacttacccttgagcattgcagaaggttttgctggagccgacatcacgataaggcaataagtgctgtggagaaggctcactcttatttacggaacaccaatctagccccatccttgcagctgtgtcagctgggcgtgaagctccttcaggtgggggaagaaggacctcaggcagtcgctaagctcctgatcaaggcaagtgcggtgctatcgaaatctatggaggcaccttctccacccctgagggctctgtatgagtcgtgccagttttttctttcaggtctcgaacggggaacaaagcgtaggtacagactggatgcaatactgagcctattcgccttcctcggtgggtactgctctttgctgcaacagctgagggatgacggagtttatggcggaagctccaaacaacagcagtcattcctgcagatgtactttcagggtcttcatctgtacactgtagtggtgtatgattttgcgcagggatgtcaaatcgtcgacctcgcggacctgactcaactggtggactcatgtaaatcaaccgtcgtctggatgctggaagcactggagggcctgtctggccaggaactcaccgaccatatgggcatgacagctagttacacctccaatctggcctatagtttctattcacataaattatacgcagaggcttgtgctatctctgaacccttatgccagcatctgggccttgtcaaacctggcacatacccggaggtgcctccggagaaactccataggtgcttccggttacaagttgaatcactcaagaaactgggcaaacaggcacaggggtgcaagatggtaatactgtggctggctgcccttcaaccttgcagccctgagcatatggcggaacctgtgaccttttgggtccgagtgaaaatggacgccgcacgggctggtgacaaagagctgcaactaaaaactctgcgggacagtttatcagggtgggacccagagacactcgccctcttactgcgcgaagaactgcaggcatacaaggccgttcgcgctgataccggccaggaaaggtttaacattatatgtgacctcctcgagctgtctcccgaagagactccggctggggcttgggccagagctacacacttggttgaattggctcaggtgctgtgctatcacgacttcacccagcagacaaactgttctgcattggacgcaatcagggaagctctccagcttctggactcagtgaggccagaggcacaggctagggatcaactcctagatgataaagcacaggccctcttatggctctacatttgcactctggaggcaaagatgcaggaggggatcgagcgcgatcgcagagcccaggctcctgggaacttagaggagttcgaggtaaacgacctaaattacgaggataaattgcaggaggatcggttcttgtacagtaacattgcatttaacttagctgcagacgcagcccagtcaaagtgtttagatcaggcactcgcactgtggaaggagctgctcaccaaaggtcaggcccctgcggttaggtgtctgcaacagacagcggcatccctgcaaattctggcagcactgtatcagttagtagccaagcccatgcaggcgttggaagtgctgctcctgttacggatagtctctgagcgcctgaaagatcattcgaaggctgccggatcctcctgtcacatcacacaactcctattgaccctcggttgcccgtcatatgctcagctccatctcgaagaagctgcaagtagtctaaaacatctcgaccagacgaccgatacctacctcctgctttccctgacatgcgacctgcttaggtcacagttgtactggacacaccagaaagtcacaaagggtgtcagcttgctgttgagtgtcctgagagaccccgctctgcagaagagctccaaggcgtggtatctgttgagagtgcaggtgttacagctggttgccgcttatttgtccctgccctccaacaacctgtcacatagtctgtgggaacagctgtgcgcccagggctggcaaacacctgaaatcgctctgattgactctcacaaactgcttcggagcatcatattgctcctgatgggatctgatattctgtcaacccagaaggccgctgtcgagacatcatttcttgattacggcgagaaccttgttcagaaatggcaggtgctgtccgaagttctttcttgtagcgagaaactggtgtgtcatctcggcaggctcggcagcgtctctgaggcaaaggccttttgtctggaggccctcaagttgactacgaagctgcagattcctagacagtgcgctctgtttttagtcctgaaaggcgagctcgagcttgccagaaacgacatcgatttgtgccaatcggaccttcagcaagtgctttttctactcgagagttgcacagagtttgggggagtgacacagcacctcgactccgtgaagaaggtccatttgcagaagggtaagcaacaagcccaggtgccctgccccccacagctgcctgaagaagagctattcctacgcggtcccgcactggaactggtggccactgttgccaaggagcctggcccaatcgcgccatcgactaactcctcacccgtgctgaagacgaaaccccagccaatccccaactttctgagccattctccaacctgtgactgctctctctgcgcctcccccgttctgaccgccgtctgtctcagatgggtattagtcacggcaggcgtgaggctggccatggggcatcaggcccaaggactggacctgttgcaggtcgtccttaaagggtgtccagaagcagctgagaggcttacccaggccctacaggcaagtctgaaccacaaaacccctccaagccttgtcccaagtctgctggacgaaattctagcacaggcatataccttgctggcacttgaggggttgaatcagccctcaaatgagtcgctgcaaaaagtcttgcaaagcggcctgaagtttgtggcagctcgcatcccccatctcgagccctggagggcatcgttgctgctcatatgggcattgaccaagctgggcggattatcctgctgtaccacccaactatttgccagtagttggggatggcagcccccactgatcaagtctgtaccgggaagcgagccaagtaaaactcagggccagaagcgttcggggagagggagacaaaaactggccagtgcccctctgcgattgaataacacttcccaaaaggggctggaaggtcgtggcttgccatgcactccaaagccccctgaccgcatcagacaggccggacctcatgttcctttcacagtgttcgaggaggtttgcccaaccgaaagcaagcccgaagtgccccaagcccctagggtgcagcagagggtccagactaggctcaaagtgaacttctccgatgattcagatcttgaggacccagtctccgctgaggcctggcttgccgaggaacccaagagaagaggcactgctagtcggggtcgcggtcgtgccagaaaggggttgagtctgaaaaccgacgccgttgtggcccctggcagtgcaccaggtaaccctgggctgaatggcagaagtcggcgtgcaaaaaaggtcgcatcacgccattgcgaagaaagaaggccccagcgggcttcagatcaggcgagacctggacctgaaatcatgcgcactatcccagaggaagagcttacagacaattggcgtaaaatgtcatttgagatcctgagaggatccgatggagaggattccgcgagtggcggtaaaacccctgccccaggccctgaagctgcttccggtgaatgggaattgttgagattagacagttcaaagaagaagctgccttcaccctgtccagacaaagagagcgataaggatctcggacccaggctgagattacctagcgccccagtcgcgaccggactgtctactttagactctatctgcgatagcctatcagtggcattccggggtatttctcactgccctccttctggcctgtatgcccacctgtgcaggtttttagccttgtgcctggggcatcgcgatccctacgcgactgcctttttagtgaccgaatctgtgagcatcacctgccgacaccagctgcttacgcacctgcatcgccagctcagcaaagcccaaaagcaccggggtagcctggaaattgctgaccagttgcagggcctttccctccaggagatgccaggggatgtgcctctagcaagaatccagaggctatttagctttcgggcactcgagtccggacattttccccagcccgagaaggagtcgtttcaagaaagattggctctgattcccagcggtgtcaccgtgtgtgtcctggccttagctactctgcagcccggaacggtggggaacaccttgctgctaactagactggaaaaagattctccccctgtcagcgtgcagattcccactgggcagaataagctgcatttgaggtctgttctgaatgagttcgatgctatacagaaggctcagaaggagaactctagttgtactgataaaagggaatggtggactggccgattagcactggaccaccgaatggaagtgctcatcgcgtccctcgagaagtctgtgctgggatgctggaagggactgctgctgcctagcagcgaggaacctggacctgcccaagaagcctctcgcctgcaggaactgctccaggactgtggatggaagtacccggacagaaccttgttgaaaatcatgctcagcggcgctggagcactgactcctcaggacatccaggccctggcctacggactttgtcccacgcaacccgaaagggcacaggaactgctgaatgaggccgtcggtagactccagggacttacagtgcctagcaattcacatctagttctcgtgctggataaggacctgcagaaacttccatgggaaagcatgccctctctgcaagctctgccggttactcggttaccgagttttagatttctcttaagctacagtattataaaggagtatggagcctccccggtgctcagccagggagtcgaccctaggagcacattttatgtgctgaatccccacaacaatctgtcatctactgaagagcagtttcgggctaatttctcctctgaggctggctggcggggagttgtgggtgaggtgccgcgacctgagcaggtacaggaggccctcacaaagcatgatctgtatatttatgccggtcacggcgcaggcgcacggttcctagatggccaagccgtgctgcgtttgtcatgccgggctgtcgctctgttgttcggctgcagcagcgccgctctggccgtcagggggaacttggagggcgctggaatagtgctgaaatacattatggccggttgccccctgtttctaggcaatctatgggacgttacagatagagacattgatcggtatacagaggcattgcttcagggctggcttggagcagggccaggggctccactgctgtattatgtcaatcaagcacgacaagcacctaggctgaaatacctcattggggctgcacctatcgcttacggcctccccgtatccctgcggta

SEQ ID NO: 222664 - DNA, 5387 bp, synthetic construct
  misc_feature 1..5387: note = Description of Artificial Sequence: Synthetic coding sequence
  source 1..5387: mol_type = other DNA
atggaagccccaagccctccactaagagccctgtatgagtcctgccagttctttctttcagggctggagcgtggcaccaagaggcgttacagattggacgcaatcctgagcctgttcgctttcctaggaggctactgcagtctgttacaacagctcagggacgatggagtctacggcggatcctcaaaacaacagcagtctttcctccagatgtatttccaggggctccacctctacactgtggtggtatacgactttgcccagggctgccagatcgtggacttggcagatctgacacagctcgttgatagctgcaagtccactgtagtttggatgctggaggctctggaaggactgtctgggcaggagctaaccgatcacatgggcatgaccgcatcatatacctctaatctggcctactctttctactcacataaactgtacgccgaagcatgcgccatctccgaaccattgtgccagcatctgggcttggtaaagcctggcacatatccggaagtccccccagagaaactgcaccgatgctttagactacaggtggaatcgctgaaaaaactggggaagcaagcgcaggggtgtaagatggtgatcctgtggcttgccgctcttcagccctgctctcccgaacacatggccgaacccgttacattttgggtccgggtgaagatggacgctgcaagggcaggcgataaggagctccagttgaaaacccttcgggacagccttagcggatgggatccagaaaccctggctctgctattgcgggaggagctgcaggcctacaaagccgtcagggctgacaccgggcaggagcgatttaatattatttgtgaccttctggagctttctcctgaagaaacccccgcaggagcctgggctagggcgacccacctggtggaactcgcacaagtgctgtgctatcacgactttacccagcaaacgaattgctcagcgctcgatgctattcgcgaggctttacagctgctggacagtgtacggccagaagctcaggccagggatcagttactggacgacaaggcgcaggctctgctctggctgtacatctgtaccctggaagccaaaatgcaggaaggaatagaacgcgaccgcagagctcaggccccaggaaacttggaagagtttgaggttaatgatttgaactacgaggataagctgcaagaagatcgctttctgtatagcaacatagcattcaatttggccgcagacgctgcacaatctaagtgtctagaccaggcgcttgcattgtggaaggagctgttaacgaagggacaggcacctgctgttcgatgtcttcagcagactgccgcttctctccagattctggctgccttataccaactggtggccaaaccaatgcaagcacttgaggtcctactgttgctcaggatcgtgtctgaaagacttaaggaccactcaaaagccgctggctcatcctgccacattacacagctgcttctgaccctgggctgccctagctacgctcagctgcatctggaagaggctgcgtcctctcttaagcatctagatcagacaacagacacatatctgttactctcattgacttgtgatctgctgcggtcacagttgtactggacacaccagaaagtcacaaaaggagtttctctgctgctatccgtcctgagggatcccgctttacaaaagtcctccaaggcctggtacctcttgagggtccaagttctgcagctggttgcagcctatctgtcactgccaagtaacaatttaagccactccctgtgggagcagctttgcgcccaaggttggcaaacccctgagattgcactgattgattcacacaagctgctgcgcagcatcattctcttgcttatgggaagcgacatcttgagcacccagaaggccgctgtggaaacttctttccttgactacggtgaaaacctcgttcagaaatggcaagtcctgtctgaggtgctgtcctgttccgagaaactggtatgccatctgggcaggctgggttcggtatccgaggctaaggctttctgccttgaggcccttaagttgaccactaaacttcaaatcccacgtcagtgtgccctgtttctcgtgctgaaaggagaactggaactggcccgaaacgatatcgacctttgccagtccgatctgcagcaggttttattccttttagagtcctgcactgagtttggtggcgtgactcaacacttggacagtgtgaaaaaagtccacctgcagaagggcaagcagcaggcacaggtcccatgccctcctcagctgcccgaggaggagttgtttctgagaggccctgcgctggaacttgtggccaccgtggccaaggaaccaggacctatcgcaccgtctactaactcatcacccgtgctgaaaaccaagcctcaacctatcccgaactttctatcacactcacctacctgtgactgttcactgtgtgctagcccagtgctcactgcagtgtgtctgaggtgggtgctcgtgaccgccggagtgaggctggctatgggccatcaggcccaggggctggacctgttgcaggttgtgctgaagggatgtcccgaagccgctgaaagactgactcaggcgcttcaggcctcactgaatcacaagacaccaccaagcctggtccctagcttgctcgacgagattctggctcaggcatatactcttctcgctctcgagggcttgaatcaaccttccaatgaaagcctgcagaaagtcctgcagtccggactgaaatttgtggcagccagaatcccacatctggagccctggagagctagtttgcttcttatttgggccttgacaaagctgggagggctgtcctgttgcacaacacagctttttgcttcgtcttggggttggcaaccaccgcttataaaaagcgtgccgggaagtgagccgagcaagacccaagggcagaaaagaagcggcagaggcaggcaaaaattggccagtgcccctttgaggctcaataacacatctcagaagggactcgagggacggggactaccatgcacacccaagccccctgatcgaatacggcaagctgggccacatgtgcccttcacagtgttcgaagaggtttgcccgacggaaagcaaaccagaagttcctcaggctcctagggtgcaacagagggtgcaaacaagactgaaggtgaactttagtgatgactctgacctggaggaccctgtgagcgctgaggcctggctggctgaagaacctaaaagacggggtacagcatctcgtggtcgagggagagccagaaaggggctctctctcaaaacagatgccgtggtcgccccagggtccgctccgggtaatccaggtttaaacggcaggagtcgcagggctaaaaaggttgcttcccgccactgcgaagaacgtaggccgcaaagagcttctgaccaggctagacccggacctgaaataatgcgtaccattccagaggaagagctgaccgataattggcgcaagatgtctttcgaaattctccggggaagcgacggcgaagactctgcctccggtggcaagactccagcccctggccctgaagccgcttccggggagtgggagctgctgagactcgattcaagcaaaaagaaactcccttcaccttgtccagacaaagagagcgataaagacttgggccctcggttgcggttgcctagcgcacccgtcgcaaccggtctgagtaccttagacagcatttgcgattctctcagtgttgcctttcggggtatttcacactgtcctcctagcggactctacgctcacctgtgtagatttttagctctgtgtcttgggcacagagacccctatgccaccgcctttctcgtcaccgagtcagtgtctattacctgccggcaccagctgctcacccatctccataggcagctctcaaaagcacagaagcacaggggatccctggagatcgctgatcagctgcaggggttgtcattacaggagatgccaggggatgtgccactggcaaggattcagaggttattcagcttccgtgcactggagtctggacactttcctcagcccgagaaagaatccttccaggagagactagcactgatccctagcggggtgactgtgtgcgtgttggcattagccacgcttcaacccggaacagtgggtaacacattgttactgactcgcctagaaaaggatagtcctccggtgtccgttcagattcctacaggccagaacaagttgcacttaaggtccgttctgaacgaattcgatgccattcaaaaggctcagaaagagaattcttcctgcacagataaaagagaatggtggaccggtcgcctggctctcgatcatagaatggaagtacttattgctagtttggaaaagagcgtcttaggatgctggaagggcttgctgctcccttcgtccgaggagccagggcctgcacaagaggctagccgactgcaggagcttttacaggattgcggctggaagtacccagaccgcacattgctgaagatcatgctttcaggtgcaggggctcttactccccaggacattcaggccctggcctacggactatgtccgacacagccagaaagagcacaggaactgctcaacgaggccgtgggacggcttcagggcctgaccgtgccaagtaacagccacctcgtgctggtgttggacaaagacctgcagaagctcccctgggagagcatgccaagtctgcaagctctacctgttacccgcctgccttcctttcggttcctcctgtcctactcaatcatcaaggagtacggagcctctcctgttctgagccagggggtagatcccaggtctactttttatgtccttaatccccataataacctgtccagcaccgaagagcagttccgggcaaacttttcctctgaggctgggtggcgcggtgtagtcggggaggtaccgcgtcctgagcaggtgcaggaagcccttaccaaacatgatctgtacatatacgccggacacggagcaggcgcacgcttcctggacggccaagcagtgttacgcctctcttgccgggcagtggctcttctgtttgggtgtagttcagctgctctggccgttcggggtaatctggagggtgcaggtattgttctcaaatatatcatggctggatgtccactcttcctagggaatctctgggatgtgacagacagggatatagatcgctacaccgaggctcttctccagggctggttaggagcaggcccaggcgcacccctcttgtactatgtgaaccaggcgagacaggctccaagattgaagtatctgattggcgctgccccaatagcatacggattaccagtaagtctgcgata

SEQ ID NO: 222665 - DNA, 1248 bp, synthetic construct
  misc_feature 1..1248: note = Description of Artificial Sequence: Synthetic coding sequence
  source 1..1248: mol_type = other DNA
atgggcacgaccgccagagccgctctggtgcttacatatttagctgtggcttccgcggcaagcgagggcggattcacagccacaggccagaggcaattgcgccctgaacacttccaggaggttgggtacgctgcgccaccaagtccgcctctctctcgtagcttacccatggatcatcctgattcgtcgcagcacggcccaccgttcgaaggccagtcccaagtacagcccccacctagccaggaagccactcccctgcaacaagagaaactcctgcctgcccagctaccggcagagaaggaagtcggacctccactgcctcaggaagccgtgcccctgcaaaaagaactacctagtctgcagcaccccaacgaacaaaaagagggaaccccagctccttttggtgatcagtcccatccagagcctgaatcctggaatgccgcacaacactgtcagcaggaccgctctcagggcggatggggtcacaggctggatggttttcccccaggaagacctagtcctgataacctcaatcagatctgtctacccaatcggcagcacgttgtttacggtccatggaacctgcctcagtcctcatacagccacctcacccgccagggcgagacactgaattttctggagattgggtacagccggtgttgtcactgcaggagtcatacaaataggctggaatgtgctaaactggtgtgggaagacaccctggacaagtactgtgacagggagtatgcagttaagacccatcaccacctctgctgtcgtcacccaccatcacccacgagggacgagtgctttgcccgtcgagctccctaccccaactatgatcgagatatcctgactatagacataggacgagtgacacccaatttaatgggccacctatgtggtaatcagcgcgttttaactaagcacaaacacatccctggactgatacacaacatgaccgctagatgctgcgacctacctttcccagaacaggcctgctgcgccgaggaagaaaagctgacattcatcaatgacctgtgcggcccaagaagaaatatctggagggatcctgcgctgtgttgttacctgtctcctggcgatgaacaagttaattgttttaacatcaattacctgcggaatgtggcccttgtaagcggggatacagaaaacgccaagggccagggggaacaggggtctaccggtggaacaaatatatccagtacctcagagccaaaagaagagtag

SEQ ID NO: 222666 - DNA, 1623 bp, synthetic construct
  misc_feature 1..1623: note = Description of Artificial Sequence: Synthetic coding sequence
  source 1..1623: mol_type = other DNA
atgggtacgactgcaagagccgcactcgtgctgacttatctggcagtcgcctccgcagcctctgaagggggatttaccgctactgggcagagacagttgagacccgaacattttcaggaggttggatatgccgctcccccatctccacctctgtcgagaagtttgccaatggatcaccctgatagctcccagcacgggccacccttcgagggccagagtcaggtgcaacctcctccttcccaagaggctaccccgctccagcaggagaagctcctgcccgctcagcttcctgctgagaaggaagtcggaccacccttacctcaagaagccgtccccctgcagaaggagctgccttctctccagcacccgaatgagcaaaaggagggtacaccggctcccttcggagatcagagtcatcctgaaccggagtcatggaatgctgcccaacattgtcaacaagaccggtcccagggtggttggggccaccggctagacggctttcctcctgggagaccgtctcctgacaacctgaaccagatttgtctgccaaaccgccaacatgtggtttatggaccctggaacctgccccagagctcttacagccacctgactagacagggagaaaccctgaattttcttgagattgggtatagcagatgttgtcattgccgttcacataccaatagactggaatgtgctaaactggtctgggaagaggctatgtctaggttctgtgaggccgagttttccgttaaaacccggccacactggtgttgtactcgccagggcgaggccaggttctcttgcttccaagaagaggctccccaaccacattatcaactgagggcttgcccttcccatcagccagatatttcttctggtctggaattaccatttccgccaggtgtgccgacgctggacaacattaagaatatctgccacttacggcgtttccggtccgtgccccgtaacctgccagccactgatccactgcagagagagcttctggcacttattcagctggagcgcgaattccagcgatgctgccgccaggggaacaatcacacgtgtacctggaaggcgtgggaagatactttggacaagtattgtgatcgcgagtatgcagtcaagacacaccatcacctctgctgcaggcacccgccttcaccgaccagggatgagtgttttgcacgtcgggctccctaccctaactacgacagagatattctgaccattgatatcggaagggtcacacctaatctgatgggccacctctgcggtaaccagcgggtactcaccaagcataagcacatacctggcctgatacataacatgacagcgaggtgctgcgatttgcccttccctgagcaagcttgttgtgctgaagaggaaaaattaacttttataaatgatctttgcggcccaaggaggaatatttggcgcgatccggcactgtgttgctatctcagccccggtgacgagcaggttaattgcttcaacatcaactacttacgtaacgttgccctcgtatcgggtgatactgagaacgctaaggggcaaggcgaacagggcagcacgggaggtaccaatatcagttccacttccgagcctaaagaggaatag

SEQ ID NO: 222667 - DNA, 1704 bp, synthetic construct
  misc_feature 1..1704: note = Description of Artificial Sequence: Synthetic coding sequence
  source 1..1704: mol_type = other DNA
atgggtaccacggcccgtgccgctttggtgctaacttacttggcagtcgcctcggctgcaagcgaaggtggattcacagccaccggtcaaagacagttgcgcccagagcattttcaggaagtcggctatgccgcacctcctagcccacctctgagccgcagcctccccatggatcaccccgattcctcacaacatggccctcctttcgagggccagagcggtaaagagggacgcggacctaggccccatagtcagccatggctgggcgagcgcgtgggctgtagtcacattccccctagtatagtacaaccccctccttcccaggaagccaccccattgcagcaggagaagcttctcccggcacagcttccagcggagaaggaagtcggacctcccttaccgcaggaggcggtccccctccagaaagagctgcccagcctccaacacccaaacgaacagaaggaaggcaccccggctccttttggcgaccagtcacaccccgagcccgagagctggaatgcagcccagcactgtcagcaagacaggtcccaaggaggatggggccacagacttgatggcttcccgcctggcagaccctcccctgataatctaaaccagatttgcctccctaatagacagcacgtggtctacggtccctggaacctcccacagtcgagctacagccaccttactcgccaaggagagacactaaattttctagaaatcggttactcccgatgttgtcactgtcgtagccacacaaataggctggaatgtgctaaattggtatgggaggaggctatgtcgcgattctgtgaagctgagttctcagtcaagactcggcctcattggtgctgtaccaggcagggagaggcacgtttttcctgtttccaggaagaggccccacagccacattaccagctgagagcttgtccttcccaccagcccgatatttccagcggcctggaacttccgtttccacccggagtcccaacacttgataatataaagaacatttgtcacctccgcagattccgttccgtccccaggaacctgcccgctacagaccccttacagagagagcttttggcgctgattcaactggagcgggagtttcagcgctgttgcaggcaagggaataaccacacctgcacttggaaagcgtgggaggatacccttgacaaatactgcgaccgggagtacgctgttaagactcatcaccacctgtgctgtcggcatccacctagccccacccgcgacgagtgcttcgctaggcgggcaccttatcctaactacgatcgggacattttgaccatcgacatcggacgcgttacgcccaaccttatgggacatctttgtggcaatcaacgagtactaactaaacataagcatatacccggtctaatccataacatgacagcccgttgctgtgatctgcctttccctgagcaagcctgttgcgctgaagaggaaaagctcacgttcatcaacgacctctgcggacctagacgaaatatctggcgggaccctgccctttgttgttacctctcgcctggagatgaacaagtcaattgttttaacataaattatttacgtaatgtggccctggtgtcaggcgacaccgagaacgccaagggccagggcgagcagggaagtacaggcggaactaatatcagcagcacgagtgaacctaaagaagagtag

SEQ ID NO: 222668 - DNA, 2100 bp, synthetic construct
  misc_feature 1..2100: note = Description of Artificial Sequence: Synthetic coding sequence
  source 1..2100: mol_type = other DNA
atgaagatcgctgtgttattctgttttttccttctaatcatttttcagaccgatttcggtaaaaacgaggaaatccccaggaagcaacgccgtaaaatttaccaccgtagactgagaaaaagttccacatctcacaaacataggtccaacaggcagttaggcatccagcagacaaccgtctttaccccagtggctaggttacccatcgttaacttcgactactcaatggaagagaagtttgagtccttcagctcatttccaggcgtggagagcagctacaacgtgcttccaggtaagaaaggccactgtttggtgaaaggaatcacaatgtacaataaggcagtctggtctccggaaccttgcacaacgtgcttgtgttctgatggacgcgtgctgtgtgatgagacgatgtgtcatccacagagatgtcctcagaccgtcattccagagggagaatgttgccctgtgtgtagtgccactgtctcttactccctgctgtctgggatcgccctgaacgatcgaaacgaatttagcggtgatagctccgagcaacgtgagccaaccaacctgctacacaagcaactgccaccccctcaggtgggcatggaccggatcgtgcgcaaggaggcactccaatctgaggaggacgaggaggttaaggaagaggatacagaacaaaagagagaaacgcctgagagccgcaaccagggacagctgtactccgagggcgactcccgagggggagatcgcaagcagcgcccaggtgaggagcggagactggcccatcagcagcaacgtcagggcagagaggaggaggaagatgaagaagaagaaggggaggagggcgaagaagacgaggaggatgaggaagacccggtacggggtgacatgttccgcatgccatcgcgttcccccctgcccgcaccccctcggggaactctcaggctgcccagcggatgttccctttcctacaggacaatatcctgcataaacgccatgctgacacagatccccccactgaccgcgcctcagatcacttcactggagcttactggaaactccatcgcttccataccagacgaggccttcaatggtctcccgaatctggaaaggctggacctctccaagaataatattacaagctcaggaattggtccaaaggcgttcaaactacttaagaagttgatgcgccttaacatggacggcaataaccttatccagataccctctcagctgccatctactctcgaggagctgaaggtgaatgaaaataatcttcaggccattgacgaggagtccctatcagatctgaatcaactagtgacactggagttagaggggaataatctatccgaagctaatgtgaatccactggctttcaagcccctgaagtcgctggcctacctgcgcctggggaagaataaatttcgtatcattcctcagggtctgcctggaagcatagaagagctgtatctcgagaataaccagatcgaagagatcactgagatctgtttcaaccatacgagaaagattaatgtgattgtgctacggtacaataagatagaagaaaatcgaattgcaccgctcgcatggataaatcaggaaaatcttgagagtatcgacctttcatataataagctgtaccatgtcccttcttacctcccgaaatccttattgcatctggtcctcttgggaaatcagatcgaacggatcccaggttatgtatttggccacatggagcctggactcgagtatctgtatctctccttcaataaattggccgatgatggcatggatagagtatcgttctatggtgcctatcacagtctccgcgagctgtttttagaccacaatgacctgaaaagcatcccccctggtatacaagaaatgaaggcattgcactttctgcgcttaaataataataagatcagaaacattcttcctgaggaaatctgtaatgccgaggaagatgacgatagcaacttagagcatctacacctcgagaataactatatcaaaatacgtgaaatccctagctatacctttagctgcatccggagctacagttcaattgtgctgaagccgcagaatatcaaatag

SEQ ID NO: 222669 - DNA, 495 bp, synthetic construct
  misc_feature 1..495: note = Description of Artificial Sequence: Synthetic coding sequence
  source 1..495: mol_type = other DNA
atgaaaatcgccgttctattttgcttcttcctgttgatcatttttcagaccgatttcggcaaaaacgaggagataccgaggaagcagcggaggaaaatatatcatcgacgccttagaaagtctagcactagccataaacatcgtagtaacagacagctgggcatccagcagacgacagtatttactcctgttgctagactgcccattgtgaactttgactatagcatggaggagaagtttgagtcgtttagcagctttcccggagtggaaagtagctacaatgtgctccccggaaagaaaggccactgccttgttaaaggcataaccatgtacaacaaggcagtgtggagccccgagccctgcaccacatgcttatgctcagacgggagggtgctttgtgacgagaccatgtgccacccacagcggtgtccccagacagttatccccgaaggtgagtgctgccctgtgtgttctgccacaggtaccgagatctag

SEQ ID NO: 222670 - DNA, 483 bp, synthetic construct
  misc_feature 1..483: note = Description of Artificial Sequence: Synthetic coding sequence
  source 1..483: mol_type = other DNA
atgaaaatcgctgtgctgttttgcttctttcttctaataatttttcagaccgatttcggaaagaatgaggaaatcccgaggaagcagcggaggaaaatataccaccgccgactgcgcaaaagctcaacctcacataagcaccgaagcaacaggcagctggggatccagcagacaacggttttcacacctgtagccagactacctatcgtgaatttcgattacagcatggaggagaagttcgaatcgttctcctctttcccgggtgtagaatccagttacaatgttcttcctgggaaaaaagggcactgtctcgtgaaaggcattactatgtacaataaggccgtgtggagccctgaaccctgtactacatgtctctgcagcgacggacgcgtgttatgtgacgaaaccatgtgtcatccccagcgctgcccccagacggtgatcccagaaggggaatgctgtcctgtgtgcagcgcaacctag

SEQ ID NO: 222671 - DNA, 1932 bp, synthetic construct
  misc_feature 1..1932: note = Description of Artificial Sequence: Synthetic coding sequence
  source 1..1932: mol_type = other DNA
atgaagatcgcagtgttgttctgttttttcttgttaatcatcttccagacggatttcggcaaaaacgaagaaattccacggaagcaacgccgaaaaatttaccaccgtcgcctgaggaagtctagcacatctcacaagcatcggagtaaccggcagctcggtatccagcagaccaccgtgtttactccggtcgctcggcttcccatcgtgaattttgattattccatggaggagaaattcgagagcttttcctcttttcctggtgtagaaagttcttataacgtcttgccaggtaagaagggacattgcctggtgaagggaatcacaatgtacaataaagccgtttggagccccgagccctgcacaacgtgtctatgttctgacggcagagtgctgtgcgatgaaacgatgtgccatcctcagcgatgccctcagactgtgatccctgagggcgagtgttgcccagtgtgtagcgccactgagcagcgtgagccaacgaacctgctgcataaacagctgcccccaccacaggttgggatggatcggatcgtgagaaaggaggctctacagagtgaggaggacgaagaagtcaaggaagaggatactgaacagaaaagggagactccagagagtagaaatcagggtcagctgtatagcgagggcgatagtcgcggaggcgatagaaaacagcggcctggagaggaacgccgactcgcccatcaacagcaacgacaaggcagggaggaggaggaagatgaggaggaagagggcgaagagggggaagaagatgaggaggacgaagaggaccccgtgcggggagacatgtttcgcatgccctcccggtcaccccttcctgccccacctagagggacacttcggttgccctcggggtgttcactctcttacaggacgatctcttgcataaatgccatgcttacacagataccgcctctgacagctcctcaaattacttctctggaattaaccggtaattccatagcctccattccggatgaagcgttcaatggattacccaacctcgagcgtttggacctctctaagaacaacataacttcaagcggcattggacccaaggcgttcaagctcctgaaaaaactgatgcgcctcaatatggatggaaacaatttaatccaaatcccatctcagctgccaagtacactggaggagttaaaggtaaacgagaacaatcttcaagccatcgatgaagaaagcctgtcagacctgaaccagctggtgactttggagcttgaaggaaacaatctgtctgaggcaaacgtgaaccccctagcttttaagccgttgaaatcactagcgtaccttcgactcgggaagaacaagttcaggataatcccccagggcctaccgggttctatcgaagaattatatttggaaaataaccaaattgaagagatcaccgaaatatgctttaaccatacacggaaaattaacgtgattgtgctcagatataataaaatcgaagagaatcgcatcgcccctctggcatggatcaaccaggagaacttggaaagcatcgacttgtcttataataaattgtaccacgtgccgtcttacttgccaaagtctttattgcatcttgtgctgctcggaaatcagatcgaaagaatccccggttatgtatttggtcatatggagcccggtctggaatacctttatctctcttttaacaaattagccgacgacggcatggatcgggtgtcattctacggggcttatcactctctcagggagctgtttctggatcacaacgatttgaagtccataccaccgggtattcaagagatgaaagcactccactttctacgcctgaacaataataagatacgctgcgtatcagacgccgtcctagaaaccgtgaccaacaggtcggatgtggccttccccttgtggtag

SEQ ID NO: 222672 - DNA, 1779 bp, synthetic construct
  misc_feature 1..1779: note = Description of Artificial Sequence: Synthetic coding sequence
  source 1..1779: mol_type = other DNA
atggagatgcaggaccttacatcaccgcactcacgccttagtggctcatcagagagcccaagtggcccaaaacttggcaattcccatatcaatagcaactccatgacccccaacggaacggaggtgaaaacagagccgatgtcttcctccgaaactgccagtaccactgcagacggatccctgaacaacttttcgggcagcgcaatagggtcctcctcgttttctcccagaccaacacaccagttctcgccgcctcaaatctatccatcaaacaggccatacccacacattctgcccacacccagctcacagactatggctgcttacggccagacccaattcaccacagggatgcagcaagcaacggcgtatgccacatatccccagcccggtcagccttatggtatatcctcctatggagcactgtgggctggaatcaagacggaggggggtctttctcaatctcagtctcctggacagactgggttcctcagctacgggacatctttctccaccccacaacctgggcaggcaccttacagctaccagatgcaggggagctcattcacaacaagcagcgggatttacactggcaacaatagtcttactaattccagcggcttcaactcgtcacagcaggattatccaagttacccatctttcggacagggacagtatgctcaatactacaacagctccccttaccccgctcactacatgacctccagcaacacatccccaactaccccaagcacaaacgctacataccagttgcaggagcccccatccgggatcacgtcccaagcggtgaccgaccccacagccgaatactcaaccatccactccccttccacccctattaaggatagcgatagtgatcgtctccgcaggggctctgacgggaaatcacgaggtcggggacggagaaacaataatccctcccctcctccggacagcgatctcgagcgggtctttatctgggacctggacgaaactatcatcgtttttcacagtctgctgactggctcttacgctaatcgatacggacgcgacccaccgacatctgtgagtctgggacttcgtatggaagaaatgatcttcaatcttgctgacacacacctcttctttaacgatcttgaagagtgcgaccaagtgcatatagacgacgtgagctccgacgataatggccaagacctgtctacatacaatttcgggacagatggctttcctgcggctgctacaagcgcaaatttatgccttgcaacaggagtgcgcggaggcgtagactggatgcgcaaactggcattccggtataggagagtgaaagagatctataatacatacaaaaacaatgtaggcggattactcggtcccgctaagcgggaggcgtggctgcagcttagggccgaaattgaggcgttgacagatagctggctaaccttggctctgaaagctctaagcctaattcactctcggacaaactgtgtcaatattctggtgaccacgactcagctgatccccgcactagcaaaggtgttgctgtacgggctggggatcgtgttccccattgagaatatatacagcgccacgaaaatcggcaaagaaagttgctttgaaaggatcattcagcgcttcggcaggaaagtagtatacgttgttataggggatggggtagaggaggagcaaggggctaagaagcatgcaatgccattttggcgcatctcaagccatagtgaccttatggccctgcatcatgcactggaacttgagtacttgtag

SEQ ID NO: 222673 - DNA, 1680 bp, synthetic construct
  misc_feature 1..1680: note = Description of Artificial Sequence: Synthetic coding sequence
  source 1..1680: mol_type = other DNA
atgctgttgtttcctcaggtggccgttaagaccgagccgatgagtagctctgagaccgcatcaactaccgcagatgggtccctaaacaatttcagtgggtccgctatagggtcatcttcttttagtccacggcctacacatcaattctctcctccgcagatctatcctagcaacaggccatatccacatattctaccgacaccttctagtcagaccatggcggcttatggccagactcagttcactaccggcatgcagcaagctaccgcctatgctacttatccccagcccggtcaaccatacggaatcagtagctacggcgctctatgggcagggattaagacagagggagggttgtctcaaagtcagtcacctgggcagacgggttttttaagctacggaacatctttcagcaccccacagcccggtcaggctccatattcttaccagatgcagggctctagcttcactacctcctcaggcatttacacaggcaacaattccctcacgaatagttccgggtttaatagctcccagcaggactacccatcttatccatcctttggccagggccagtatgcccaatactacaattcctccccctacccagctcactatatgacttcatccaatacctctcccactactccatccactaatgctacttatcaactgcaggaaccaccttccggcatcacatcacaagcagttacagacccgaccgccgagtactctaccattcactctccctccacaccaatcaaagacagtgactccgatcgtttgcgcagagggtccgacggcaaaagccgaggccgtggcaggcggaacaacaacccctccccaccgccagacagcgacctggaacgcgtgttcatctgggacttagacgagacaattatcgtctttcactcccttctcacaggctcatacgccaatagatatggcagagacccaccgacatctgtttcattggggctccggatggaggaaatgatctttaaccttgccgatacacacctgtttttcaatgatcttgaagagtgtgaccaggtacacatcgatgatgtgtctagcgacgataatgggcaggatctgtcaacatataattttggcacggacggatttcctgcggcagctacgtccgctaacctctgtctcgccaccggcgtgcgtgggggagtagattggatgcggaagttagccttcaggtatagaagagtcaaggagatctataatacatataaaaacaacgtgggcggattactgggtccagccaagagagaagcatggctgcagctcagagctgaaatcgaagccctcacggatagttggctgaccctcgcgttgaaggcattgagcctgatacatagccgaactaattgcgtgaatatcttggtcacgaccactcagctgattcctgcgctggcgaaagtcctattgtacgggctgggcatcgtctttcctatagagaacatctattctgctacaaaaatcggaaaggaatcttgtttcgagcgcattatccagaggttcggaagaaaagtcgtttacgtggtgattggggatggagtcgaggaggaacagggtgcaaagaaacacgctatgcctttctggagaattagctcacactcagatttaatggcgctgcatcacgcactggaacttgaatatctctag

SEQ ID NO: 222674 - DNA, 1779 bp, synthetic construct
  misc_feature 1..1779: note = Description of Artificial Sequence: Synthetic coding sequence
  source 1..1779: mol_type = other DNA
atggagatgcaggacttaacctcacctcactcccgtctctccggctctagcgagtcccccagcggtcccaagctgggaaattcccacatcaacagcaattcgatgacaccaaacggcacggaagtaaaaacggaacccatgtcatcttcagaaacagcttcaacaactgctgatgggagtctcaataacttctcggggagcgccattgggtccagcagcttctcgccaaggccgactcaccagttctcgcccccacagatctacccttccaatcgtccttacccacatatcctccccacccccagcagtcaaactatggccgcttacgggcagactcaatttacaacaggtatgcagcaggccacagcatacgcaacttatcctcaacccggacagccgtacggaatcagttcctacggtgctctgtgggcaggaattaagaccgaaggcggtttgagccagagccagagtccaggccagaccggcttcctgtcatatggcacttccttttcaaccccccagcctggacaggcgccttatagctaccagatgcaaggatcttcctttactaccagctcaggtatctatacagggaataatagcctcacaaatagctccgggttcaattcatcccagcaggattacccttcctatcccagtttcggacaggggcaatacgcacagtactacaactcatctccataccccgcacactatatgacctcttctaacacatcccctaccacacccagtacaaatgcaacctaccagctgcaggagcctcctagcggcatcaccagccaggcagtcacggacccgactgccgaatactcaacaatacactccccttctacaccgatcaaagacagtgacagcgaccgcctccgccgtggctctgatgggaaaagtaggggcaggggaaggagaaataataacccttccccaccgccagactccgatttggagagagtatttatctgggatcttgacgaaacaataatcgtgttccactctctgcttacaggctcatatgccaatagatatggtagggatcctcccactagtgtgtccttgggcctcagaatggaggagatgatatttaacctggccgacacgcatctcttctttaatgacctcgaagagtgcgaccaggtccatatcgatgatgttagtagcgacgataacggacaggatttaagcacatacaacttcggcacggatgggtttcctgctgctgccacctcggccaacctgtgcctggccaccggcgtccggggtggcgttgactggatgagaaagctagcctttcgttacaggcgcgtcaaggagatttacaatacttacaaaaacaatgtggggggtctcctcggcccagctaaaagggaggcctggttacaattgcgcgctgaaattgaggcgcttaccgacagctggttaaccctggctctcaaggctctgtcattgattcactcgagaaccaattgcgtgaacattcttgttactaccacccagctcattccagccctggcaaaagtattattatacggcctgggaatcgtgttccccatcgagaacatctatagcgcgacaaagatcggcaaggagagctgcttcgagcgtattattcagcgattcggccgtaaagtcgtctacgttgtcatcggggatggggtggaggaggagcaaggcgctaaaaagcatgcaatgccgttctggcgcatctcaagtcactcggatctgatggctctgcaccatgcacttgagctcgagtacctctag

SEQ ID NO: 222675 - DNA, 1683 bp, synthetic construct
  misc_feature 1..1683: note = Description of Artificial Sequence: Synthetic coding sequence
  source 1..1683: mol_type = other DNA
atgcttatgatttatgttcagttagtggtcaagaccgagccaatgtcttcatccgaaactgcttccacaactgcagacggatccctgaacaatttcagtgggtccgcaatcggatcttcctccttctccccgagaccaacgcatcagttttctccccctcagatttacccttctaatagaccttatcctcatatcctgccaactccgtcctctcagacaatggcagcctacgggcagacccagttcaccactggcatgcagcaggctacagcctacgctacctatccacaaccgggacagccctacggcatctccagttacggagctttgtgggctggcataaaaacggagggcggtctctcccagtcacagagtcctggtcagacaggattcctgtcttacggcacgagtttttcaacaccccaacccggacaggccccatatagctaccaaatgcaggggtcctcgttcacaactagttccggcatttatacaggcaacaatagtctaacaaatagcagtggtttcaatagttcccaacaggattacccatcatacccttcatttggccaggggcagtatgctcagtactataattcgtccccttatcccgcacattatatgacctcctctaacacctctccgaccaccccgagcactaacgcaacatatcaacttcaggaaccaccatctggcatcacttctcaggctgtcacagatcccacagctgagtacagtacaattcattcgccttccaccccaatcaaagattcagactctgacagactccgcagggggtctgatgggaagtcacggggtaggggcagaaggaacaacaatccctctcctcctcctgactcggacctggaaagggtgtttatctgggacctggatgagactattatagtatttcacagtctgctgacagggtcttacgccaacaggtatggcagggatcctcctaccagcgtctctctggggctgcggatggaggaaatgattttcaacttagcggacacccatctcttcttcaatgatctcgaggaatgtgaccaggtgcatatcgatgacgtatctagtgatgataatggccaggacctcagcacatacaactttggtacggatggctttccagcagctgcaacctctgcaaatctgtgtctggcgaccggcgtacgcggaggagtggactggatgcggaagctcgctttcaggtatcgtcgggtgaaggaaatttataacacctacaaaaacaacgtgggagggttactcggaccggcaaagagggaagcatggctgcagttgagggccgagattgaggcgctcacagactcttggcttaccctcgctctcaaagctctgagcttgattcactcaagaaccaactgcgtgaatatcctggtcacaaccactcaactcatacccgctttggccaaggtgcttctgtatggactgggaattgtgttcccaattgagaatatctattcagctactaagattggtaaggagtcatgcttcgagcgcatcatccaacgcttcgggagaaaagtagtttacgtggttataggggatggtgtggaagaggaacagggagccaagaaacacgctatgccattctggcggatttcttcacattcagacctgatggccctacatcatgctctcgaactcgaatatctgtag

SEQ ID NO: 222676 - DNA, 1674 bp, synthetic construct
  misc_feature 1..1674: note = Description of Artificial Sequence: Synthetic coding sequence
  source 1..1674: mol_type = other DNA
atggagatgcaagacctgacttcacctcattccaggctgtccgggtcttccgaatccccgtcagggcctaagctaggtaattctcacatcaattcaaactccatgactcctaacggcactgaggtgaagactgagcctatgtcttcttcagaaacagcgtccacgaccgccgacggcagcctgaataacttctctggatcagccattggctcctctagcttcagtccccgtcctacgcaccagttttccccccctcaaatctaccccagcaaccgtccctatccccacatactgcccacaccatcgtctcagacaatggcggcatatgggcaaactcagttcaccaccgggatgcaacaagctacagcctatgccacgtatcctcagccaggtcagccctatggaataagttcctacgggatcaaaaccgaaggaggactttcacagtctcaaagtcctggtcagacgggctttttgtcttatggaacatcttttagcacccctcagcccggacaagctccatactcgtatcagatgcagggaagctcctttaccacctctagtggaatctatacaggaaacaatagtctgactaactccagcggatttaatagcagccagcaggactatcccagctaccccagcttcggacagggccagtacgcgcaatattataactcttccccttatcccgcacattacatgacttcctccaatacaagtcccaccacaccttctaccaatgcaacttatcagttacaggagccacccagtggaattacctcccaggcggttacagacccaactgctgagtactctaccatacatagcccttccaccccaattaaagattctgactctgaccgactgagacggggttccgatgggaagtcccgcggaagagggagacgaaacaataatccttctcccccacccgactctgatctggagcgggtgtttatctgggacctagacgagactatcatcgtgttccattcactgctgaccggaagctacgccaatagatatggaagagagtgcgaccaggttcacatcgacgacgtgtcttccgatgacaacgggcaggacctcagcacatataacttcggcacagatggatttcctgcagccgcaacaagcgccaatttatgtctcgccacaggcgtccggggaggggtcgactggatgcgaaaattggcctttagatacaggagggtgaaagaaatatacaacacatacaaaaataatgtgggaggactactgggcccagccaaacgcgaagcttggctgcagctgcgtgcggagatcgaggccttaacagacagctggctgacacttgcactgaaggcactgtccctgatacactccagaaccaactgtgtgaacattcttgtcaccacaactcagctcatcccggctctagcaaaagtgctgctctacggactcgggatcgtgttccccatcgagaatatctattccgctacaaagatcggcaaagagtcctgttttgagcgaatcattcagcgctttgggcgtaaggttgtctacgtggtgattggggatggagtggaagaagaacagggggctaagaagcatgctatgccgttttggaggatatctagccacagtgacctcatggcgctccatcacgctttggagcttgagtacctgtag

SEQ ID NO: 222677 - DNA, 1527 bp, synthetic construct
  misc_feature 1..1527: note = Description of Artificial Sequence: Synthetic coding sequence
  source 1..1527: mol_type = other DNA
atggttgagctggtcattagcccctctctgacagtgaactctgactgccttgacaagttaaagtttaaccgagcagatgcggctgtgtggacactctctgataggcagggaataacaaaaagcgctcctctgagagttagccagctttttagccgtagttgtcctcgtgttctgcctcggcaacccagtaccgccatggcagcctatgggcagacccaatatagcgccggaatccagcaggccaccccttacaccgcctaccccccacctgcgcaggcctatgggatccctagctactccatcaagactgaagacagcttgaatcactctccaggacagagcggcttcctgagctacggatccagcttctcaactagccctaccgggcaaagtccctacacataccagatgcatggaacaacagggttctatcaaggaggcaacggtctggggaacgcagccggttttggtagtgtccatcaagactacccctcctacccaggattcccgcagagccagtacccccagtactatggctcctcctataatccgccttatgtacccgcttccagcatatgtcctagccccctcagtacatcaacatacgtgcttcaggaggcctctcataatgtcccgaaccagtcctccgagagcctggcaggtgagtacaacacccataacggacctagcactcctgcaaaggagggagacactgaccggccacatagggctagcgatggaaagttgcgcggacggtcaaagcggagctctgacccaagtcctgcaggcgataatgagatcgagcgtgtcttcgtatgggatctcgacgaaaccatcatcattttccatagtcttttgaccggaacgttcgcttcgcggtatgggaaagactgcgatcagattcacgtagatgacgtgtccagcgatgacaatgggcaggacctatctacatataacttcagcgctgacggcttccactcttctgcaccaggtgctaacctgtgtctgggctccggcgtgcatggcggagtggattggatgcgtaaattagccttccgctatcgccgagtcaaggagatgtacaacacttataaaaataatgtcgggggactcatcggcactcctaaacgtgagacttggctgcaactgcgtgccgaacttgaggcccttactgacttgtggctcacacattctctgaaagctttgaacctgataaacagccggccaaactgcgtcaacgtccttgtgaccactacccaactgatccccgctcttgccaaggtcttgctttatggcctgggcagcgtgttccccatagaaaatatctatagtgcgaccaagaccggcaaggagtcttgtttcgagagaattatgcagcgtttcggccgtaaagccgtttacgtggtgataggagatggtgtggaggaagagcagggtgccaaaaaacacaatatgcctttttggcggatctcctgtcatgccgacctggaggccctgcgtcatgcactcgagctagagtacctctag

SEQ ID NO: 222678 - DNA, 1617 bp, synthetic construct
  misc_feature 1..1617: note = Description of Artificial Sequence: Synthetic coding sequence
  source 1..1617: mol_type = other DNA
atggtcgaactggtcatttcacccagcttgaccgtgaactcagattgccttgataaactgaaattcaaccgagccgacgcagctgtatggacacttagtgaccggcaggggattactaaatccgcccctctccgcgtcagccaacttttcagtcgctcctgccctcgagtcctgccacggcagccctccactgccatggctgcgtatggccaaactcaatatagtgcaggtattcaacaggctaccccttatactgcctaccctccacccgcacaggcgtatgggattcccagctactccatcaaaactgaagacagtctgaatcacagtccaggacagtcgggcttcctgagctatggttctagcttttctacctctcccactgggcaatcaccgtatacctatcagatgcatggaacaaccggcttttaccagggcggaaacgggctgggaaatgcagcagggtttggctctgtacaccaggattacccttcgtaccccggatttccccaatctcagtacccacaatactacgggagtagctacaacccaccctacgtgcctgctagctccatatgtcctagccccctctccacctctacttacgtccttcaggaagctagccataacgtgcctaatcagagctctgaaagcttggctggcgagtataacacccacaacggcccttctacccctgcgaaggagggtgacaccgatagaccacatcgggcatctgacgggaagctccgtggtcgctccaagcggtcgtcagaccccagccctgctggcgacaacgaaatcgaacgcgtatttgtctgggatctcgacgaaaccatcattatattccatagcctattgaccggtacatttgcatccaggtacggaaaagacacgacgacttccgtgcgcatagggctcatgatggaggagatgattttcaacctggccgatacccatctcttcttcaacgacttggaagattgcgaccaaatccacgttgacgacgtgtcatctgacgacaatggacaggacttgtcgacttacaatttctcggctgacggctttcatagttcagcaccaggtgctaacctgtgcctgggcagtggggtccacggtggggtggactggatgagaaaacttgccttccgttaccgtagggttaaagaaatgtataacacatacaaaaacaatgtgggaggccttattggaacaccgaagagagagacatggctccagctgcgagccgaactcgaggctctaacggacctgtggctgacccactccctgaaagcactcaacctgatcaacagcagacctaactgcgttaatgtcctggtgacaaccacccaattgattcctgccttagccaaagtgcttttatacgggctggggagtgttttcccaatcgagaatatatactctgccaccaaaaccggaaaggaatcatgtttcgagaggattatgcagcggtttggtagaaaagcggtatacgttgtgatcggagatggcgtggaggaggaacagggagcgaaaaagcacaatatgccgttttggagaataagctgtcatgcagatcttgaagccctgagacatgcgctggaactggagtatctctag

SEQ ID NO: 222679 - DNA, 1380 bp, synthetic construct
  misc_feature 1..1380: note = Description of Artificial Sequence: Synthetic coding sequence
  source 1..1380: mol_type = other DNA
atggtggagctggtaattagcccaagtctcaccgttaatagtgactgtctagataagctgaagtttaatcgcgcagatgcagcggtgtggacattgtccgatagacaggggataacgaagtcagccccactcagagtatcccagctcttttctcggtcctgcccccgtgtcctgcctcgacagcccagtacagcgatggcagcctacgggcaaacacagtatagcgccggaatacagcaggctactccatatacagcatatcctccacctgctcaggcttatggaattccctcctactcgattaagactgaagatagcctcaatcattcgcccggacaatccggctttctgagctacggctcctcattttcaaccagccctactgggcaatcaccctacacctaccagatgcatgggaccacgggcttttaccaagggggtaatggcctcggaaacgctgctggctttggtagtgtccatcaagactatcccagttatcccggattcccacagtcgcaatatccacagtactatggctcctcctacaacccgccatacgtcccagcctccagcatttgtccttccccgcttagcacttccacatacgttctgcaagaggcctctcataacgtacctaatcaaagttctgaatcgctggctggggagtacaacacccacaatgggccttccacccccgctaaggagggcgacaccgatagaccgcaccgtgcctccgacggaaagttgcggggtcggagtaagagatctagcgacccatctcctgctggtgacaacgagatagagcgcgtgttcgtttgggacctcgatgagactatcattatctttcacagtttactgacgggaacatttgcatccaggtacggcaaggacactactacatccgtccgcattggcctcatgatggaggaaatgatttttaatctagccgatacacacctgttcttcaatgacctggaggattgcgaccagatccatgtggacgacgtctcatctgatgacaacggtcaggacctctcaacttacaatttttccgctgacggtttccacagctctgctccaggggctaacttgtgtttaggatctggcgtgcatggtggcgtggactggatgcggaagttggcctttagatatagaagggtgaaggaaatgtataacacttacaaaaataacgtgggcggtaaggagagttgtttcgagcgtattatgcagcgattcggtaggaaagccgtctacgttgtcattggcgacggtgtggaggaggagcaaggcgcaaaaaaacacaatatgcctttttggaggatctcttgccacgccgacctcgaggcactcagacacgctcttgagcttgagtatttgtag

SEQ ID NO: 222680 - DNA, 1527 bp, synthetic construct
  misc_feature 1..1527: note = Description of Artificial Sequence: Synthetic coding sequence
  source 1..1527: mol_type = other DNA
atggtggaattagtaattagcccctctctcacagtgaatagtgattgccttgacaaactgaaattcaaccgggctgatgccgctgtatggaccctatctgacaggcaaggcatcacaaaatcggcccctctgcgcgtgtctcagctgttttcacgaagctgtcccagggttctgccacggcagccttctacggcgatggccgcttacgggcaaactcagtattcagcgggtattcaacaggctacaccttacacagcatacccacccccagcccaggcgtacggtatcccttcttactctatcaaaactgaagactccctgaatcatagtcctggtcaatcaggatttcttagctatggtagctcattcagtaccagccctactggccaatctccatacacttaccagatgcatggtaccacagggttctatcaggggggaaatggactggggaacgcggcaggtttcggttcagtgcatcaggactatccttcctatccaggattcccccagtcccagtatcctcagtattacggtagcagctataaccctccctatgtgcctgctagctcaatctgcccaagtcctctgagtacgtctacatatgtgctccaagaggcctctcataatgtgcccaaccaaagctccgaaagtcttgcaggtgagtataacactcataatggcccttcaactcccgctaaggagggtgacaccgatcgacctcatagggcgtctgatggcaagctgcgtgggaggagcaaaagatccagcgatccaagtccggctggtgataacgaaattgagcgggtcttcgtttgggacctagatgagacaatcatcatattccactccttgttgaccgggaccttcgctagtcgatacggaaaggactgtgatcagatccatgtagatgacgtgtcatccgatgacaatggccaggatctgtccacctataatttttccgcggacggatttcactcctcagcgccaggtgccaatctgtgcctcggaagcggtgtgcacgggggtgtggactggatgagaaagttagccttccgttatcgaagggtgaaagagatgtataacacctataagaacaatgtgggaggccttatcggcacacctaaacgcgagacttggctgcagctgcgggcagaacttgaagccctgacagatctgtggttaacccatagcctgaaagccctcaatcttattaactctcggcagaattgtgtcaacgtgttagttactacaacgcagctgattcctgcgcttgctaaagtgttgctgtacgggctggggagcgtctttccgatcgagaatatatatagcgccacaaaaacaggaaaggaatcatgcttcgagcgcattatgcaacggttcggcagaaaggcagtctatgtagtcattggcgatggcgtggaagaggaacagggagccaagaaacacaacatgcccttttggcgaatcagctgccatgcggatcttgaggctttgcgccacgcccttgaactagaatacctgtag

SEQ ID NO: 222681 - DNA, 1611 bp, synthetic construct
  misc_feature 1..1611: note = Description of Artificial Sequence: Synthetic coding sequence
  source 1..1611: mol_type = other DNA
atggaagaggagcaggatctgcccgaacagcctgttaagaaggccaagatgcaagagagcggtgagcagacaatatcacaggtctcaaatcctgacgttagcgatcagaaacccgaaacctcttctctagctagcaatctgcctatgtctgaggaaataatgacatgtacagactatatcccgcgatctagcaacgactacactagtcagatgtactcggctaagccttacgcacacatcctgtccgttcccgtttccgagaccgcctacccgggtcagactcagtaccaaaccctacagcagacgcagccgtacgcggtttatccacaggccacacagacatatggtcttcctccgttcgcctcatccactaacgcctccctgataagcaccagcagcaccattgctaacattcctgccgctgcggtagcctccatctctaatcaagattaccctacatacaccattttaggccaaaatcagtaccaggcgtgttaccccagttcctccttcggagttacaggtcagaccaactcggacgccgaaagtaccacgctagccgctaccacgtaccagagtgaaaagccctctgttatggccccagctcctgctgcccaaaggttgagttcaggagacccttccaccagccctagcctgagccaaactacccctagtaaggatacggacgaccagtctcggaaaaatatgacttctaagaacagaggcaagcgcaaggcagacgctacttcctctcaggacagtgagctggagagggtgttcctgtgggatctcgacgagacgattataatttttcactccctgttgactgggagttacgcacagaagtacggaaaggacccgaccgtcgttataggcagcgggctgaccatggaggagatgatttttgaagtcgctgatacccacctgttctttaatgatctcgaggaatgcgatcaggtgcatgtcgaagacgtggcatccgatgataacggtcaggacctcagcaattactcattttccactgacgggttttccggttcgggcggaagcggtagccatggctctagtgtgggcgtccagggtggtgtggattggatgagaaagctggcattccgttaccgcaaagtccgggaaatctacgacaaacacaagtctaatgtggggggtctgctaagtcctcagcgcaaggaggctcttcagcgtctgcgcgcagaaatcgaggtgctcactgattcctggcttggaactgccctgaagtcacttctccttattcagagccgcaaaaactgcgtgaatgtactcatcacgaccacccagctcgtgcccgctctcgccaaggtcctcctctacggattgggcgaaatctttccaatcgaaaacatttacagcgccaccaaaatcggaaaggagtcgtgttttgaaaggatcgttagccgcttcggcaagaaagtgacttacgtggtgataggcgatgggagagatgaggagatcgctgctaaacagcagctctattttctcgatatggaggccctagggtgccaactcgaacccacagcactaatcctgtttatacaactttctggaaacctgtccaattataataaactttag

SEQ ID NO: 222682 - DNA, 1251 bp, synthetic construct
  misc_feature 1..1251: note = Description of Artificial Sequence: Synthetic coding sequence
  source 1..1251: mol_type = other DNA
atgatcattcctcataaatgcatcctgcagactagctctacaaatgccagtcttatctcaacctcctccaccatagcaaacattcctgccgcagcagtggcctcaattagcaatcaagactaccccacctacacaattttgggacaaaaccagtaccaggcctgctacccctcctcgagttttggagtgaccggccagacaaattcagacgcagagtccaccactctcgctgctacgacataccaaagtgaaaagccctccgtgatggcccctgctcctgcagcgcagaggctcagttcggacccatctacctctccctccctgtcccaaaccaccccgagcaaggataccgatgaccagagtcgcaagaatatgacatcgaagaaccgaggcaagcgaaaggcagacgctacatcttcccaggatagtgaacttgagcgcgtatttctgtgggatctggacgagacaataatcatcttccactccttactcaccgggagttatgctcaaaaatatgggaaagatccaacagtcgtgatcggatccgggttgaccatggaggagatgatttttgaggttgccgatacccacctgttctttaatgacctggaggaatgcgaccaggtgcacgtagaggacgtggccagtgacgataatggacaagatctgagtaattatagcttctctaccgacggtttttcagggtccggcggttccggctcacacggcagctccgtgggggtccaggggggtgttgactggatgcgcaagctcgcttttcggtaccgcaaggtgcgagagatttatgacaagcataagagtaatgttgggggtcttctgtctccacagcgaaaggaagccttgcagcgccttcgggctgagatcgaagttcttactgattcttggctgggaaccgctctgaagtctctgctactgatacagagccgtaaaaattgcgtgaacgtgctaataactacaacacaattggtgccggcactagctaaagtgctgctctacggcctgggagaaattttcccgattgaaaacatttactctgccaccaagatcgggaaagagtcttgctttgagcgcattgtctccaggttcgggaagaaggttacctatgtggttatcggagatgggagagatgaagagatagctgccaaacaacataatatgccgttttggagaattaccaatcatggagaccttgtgagtctgcaccaagcccttgagctggactttctgtag

SEQ ID NO: 222683 - DNA, 1722 bp, synthetic construct
  misc_feature 1..1722: note = Description of Artificial Sequence: Synthetic coding sequence
  source 1..1722: mol_type = other DNA
atggaagaagaacaagatctgcctgaacaaccggtgaagaaggcgaagatgcaggaaagtggggagcagactataagccaggtttccaaccccgacgtgagcgaccagaaaccagagacctccagcttggcctctaatctgccaatgtcagaggaaatcatgacatgtactgattacatccccaggtcatctaacgattatacaagtcagatgtattcagccaagccatatgcccatattcttagcgttccagtctctgaaaccgcgtatccaggtcaaacacagtaccagacgttgcagcagacacaaccttacgccgtgtacccacaggctacccaaacatacggacttcccccattcggagctctgtggcctggaatgaagccagagagcggcttgattcaaacgccctcgccatctcagcactccgtgctgacatgcaccaccggcctcactacatctcagccttcccccgctcactactcttatcccattcaggcttcctctaccaatgcatctctaatctccacctcctcaacaattgcaaatatccccgcagctgcagttgcatctattagcaatcaggattatcccacatatacaatcttggggcagaatcagtaccaggcctgttacccctcgtcttccttcggagtgacaggccagaccaatagtgacgcagagtcaacaactctcgccgcaaccacctatcagtctgaaaagccatcagttatggctcctgccccagcagcacaacgtctttcctccggcgatccaagtacttccccttctctgtcccagaccacaccaagcaaggatacggatgatcagtcgcgaaagaatatgaccagtaagaatcggggaaaaaggaaggcagacgctacctctagccaggatagcgaacttgagcgcgtgtttctatgggatttggatgaaacaatcataatcttccacagcctgctcaccggctcttacgcccaaaaatatgggaaggacccaactgtggtgatcgggtctggcctcaccatggaagagatgatctttgaggttgcggacactcaccttttcttcaacgacttggaagagtgcgatcaggtacatgtcgaagacgtagcgtcagatgacaatggccaggacttgagcaactactctttcagcaccgacggtttttccggatcaggaggatcggggagccacgggtccagtgtgggtgttcagggcggagtggattggatgagaaaactcgcatttcgctacagaaaggtacgtgaaatctacgataagcacaagtccaatgttggtggattgctgtcgcctcagcgtaaggaggccctgcagcggcttcgcgcagagatagaagtcctgaccgacagctggcttgggaccgcactgaaaagcttgttacttattcagagccgtaaaaactgtgtgaacgtactgatcacaacaacacaacttgtccccgctttggctaaagtactactgtacgggctaggagagattttccccatcgagaacatttatagcgccaccaagatcggaaaagagtcttgcttcgagcgcatcgtctctaggtttgggaaaaaggtgacctacgtggtcattggagatggcagggacgaagagatcgccgcaaagcaacacaatatgcctttttggagaatcacgaaccacggcgacctggttagcttgcaccaggccctggagttggatttcctgtag

SEQ ID NO: 222684 - DNA, 1344 bp, synthetic construct
  misc_feature 1..1344: note = Description of Artificial Sequence: Synthetic coding sequence
  source 1..1344: mol_type = other DNA
atgaaacccgaatctggtctgattcagactccctctccctcacagcacagcgtgctgacgtgcactactggtctgactacatcacagccttcacctgcacattatagttacccaatccaggcaagctccaccaatgcttccctcatcagcacgtctagcacaatcgctaatatacccgctgctgcggtggccagtatctccaaccaggattatccaacctacacaattttaggacagaatcagtatcaggcctgctaccctagttcatcctttggcgtaacaggtcaaaccaatagtgacgccgagtcaactacactcgccgctaccacttaccagagtgagaagccgtccgtcatggccccagcccctgccgctcaacgactgagtagcggcgacccaagcactagccctagtttgtcccaaaccactccttctaaggatactgacgatcagtctcgcaagaacatgacctctaaaaatagaggcaaaagaaaagccgatgcaacatcctcgcaggatagcgaactagaacgggtttttctctgggacctggacgaaactataatcatctttcactccctgctgacaggcagctatgctcaaaagtatggtaaggaccccacagtcgtgataggtagtgggctgacgatggaagagatgattttcgaggtcgccgacacccatctcttcttcaatgatctggaagagtgcgatcaggtccacgtcgaagacgtggccagtgacgataacggccaagatctctctaactacagctttagcaccgacggcttttcaggctcgggtgggagtggttcccacggaagctcggtgggcgtacaaggcggagtggattggatgagaaagctcgcctttcggtatcgaaaggtccgtgagatctatgataagcacaagtccaacgtgggagggctgctcagccctcaaagaaaagaggccttacaaaggctgagggccgaaatagaggtccttacagattcatggctcggaaccgccctgaagtctttactactgattcagtccagaaagaactgtgttaacgtgctcattacaacaacccagctggttcccgcacttgcaaaagtgctcttatacggacttggtgagatattccctattgagaatatttactccgccaccaagatcggaaaggagtcttgctttgaacggatcgtctccaggtttggcaagaaagtcacttacgtggtgatcggagatggtcgggatgaggagatagctgctaaacagcataacatgcctttctggagaattaccaaccatggggatttagtttctctgcatcaggctctggagctggactttctttag

SEQ ID NO: 222685 - DNA, 1584 bp, synthetic construct
  misc_feature 1..1584: note = Description of Artificial Sequence: Synthetic coding sequence
  source 1..1584: mol_type = other DNA
atggaagaggagcaggacttgccggagcagccagttaagaaggctaagatgcaggagtctggcgagcagacgataagccaagtgtccaatccggacgtgtcggaccagaagcccgaaacctcttcacttgcttccaatttgccaatgtcagaagaaattatgacatgtactgactatatcccccgttcctcaaatgactacacctcacagatgtactccgccaagccatatgctcatattttaagcgtgcctgtgtctgagacagcgtatcctggccagacccagtaccagactcttcagcaaacacaaccgtacgcagtgtaccctcaggctacacagacttacggtctgccacccttcgcgagcagcacaaatgcctcactgattagtaccagcagtacaattgcaaacatcccggcagctgcggtagcaagtatatccaaccaagactaccccacctacactattctcggtcaaaaccagtaccaggcatgctaccctagctcttctttcggggttacaggccaaacaaactcagatgccgagtccacgactttagcggctacaacgtaccagagcgaaaaacctagcgtcatggcccctgctcctgccgcacaacggttgagctccggagacccgagcacaagtccctctctcagtcaaacaaccccgagcaaggacacggacgatcagtcacgaaagaatatgacgtcaaagaaccggggtaaacgtaaagctgacgccacatcgtctcaagacagcgagcttgaacgggttttcctttgggatctcgacgaaacgatcatcatctttcactctctcctgacgggttcatatgcacagaaatacggcaaggaccctaccgtggtgattggctccgggttgactatggaggaaatgatctttgaggtggctgacacccatctgttctttaatgatctcgaggaatgtgaccaagtgcacgtagaagacgtggcctcagacgataacggccaggatctgagtaactactcattttcaactgatggctttagtggaagcggcggtagcgggtcccacgggtcaagtgtgggagtgcagggcggtgtggactggatgcgcaaactagccttcaggtaccggaaagtcagagagatttatgataagcacaagagtaacgtcggcggactgctgagtccacaacgaaaagaagctttacagaggttgcgcgctgaaattgaagtgctgactgactcttggctcgggaccgctctcaagtccttgttgctcatccagtctcgcaaaaattgtgtgaacgttctaatcaccaccacccagctcgtcccggcactggctaaagtcctgctctatgggctcggcgagattttccctattgaaaatatctattccgctaccaaaatcggcaaggaatcatgttttgagcggatcgtatcacggttcggaaagaaagtgacatatgttgttattggagacgggcgagacgaggagattgccgctaagcaacacaatatgcctttctggagaatcacaaatcacggcgacttagtctctctgcaccaggccctggagctagacttcctctag

SEQ ID NO: 222686 - DNA, 1563 bp, synthetic construct
  misc_feature 1..1563: note = Description of Artificial Sequence: Synthetic coding sequence
  source 1..1563: mol_type = other DNA
atgacttgcaccgattatattccccgttcttcaaatgattatacaagccagatgtactctgctaaaccctatgcccacatcctgtcggtacccgtcagtgagaccgcatatccagggcaaacgcaataccaaacattgcagcagacacagccctacgctgtttaccctcaggcaacccagacatatggcctgcctccatttggagcgctctggcctgggatgaagccggaatctggacttattcagacccctagtcccagtcagcattctgtactgacgtgtactaccggactgaccaccagccagccctcacccgctcactactcttacccaatccaggccagcagcacaaatgcttcactgattagcaccagcagtaccatcgctaacattcccgcagcggcagtagcatcaatttccaaccaggattatccgacctacaccatcctcggtcagaaccagtatcaggcgtgctatcctagcagttccttcggcgtgacaggtcagaccaacagcgatgcggagtcaaccaccctggctgcgactacataccagtccgaaaagccttcggtcatggctcccgcaccagctgctcagcgactaagcagcggcgacccgtcaacctcgccttctcttagtcagaccacaccctccaaggacactgacgaccagtctagaaagaatatgacctcgaagaatcgaggtaagaggaaggccgatgctacttcatcccaagactccgaactggaaagggttttcctgtgggacctggatgagacgattattatatttcacagcctactcaccggatcttatgcacaaaaatatggcaaagatccaacggtcgttattgggtctggtctgacaatggaggaaatgatatttgaggtcgccgacacccatctgttcttcaatgatctcgaggagtgcgatcaggtgcacgtggaggatgtcgctagcgatgacaatggacaagacctgagcaactactctttctcaaccgacgggttctccgggtccggaggatctgggtcacatggttcatccgtcggagtgcagggaggcgtagactggatgcgaaaactggcctttcgctacaggaaggtccgtgaaatctacgataagcacaaatccaatgttgggggactccttagtccccagcgcaaggaagcgctacagagactgagggctgagattgaagtactgacagattcttggctcgggacggccctcaaatctctcctattgatccaatcaagaaagaactgcgtcaacgtcctaatcacaaccacacagctcgtgcctgctctggccaaggtgctgttatacggcctgggggagatctttccaatcgaaaacatctacagtgccaccaaaatcggaaaggaatcatgttttgaaagaatcgtctctcgcttcggaaagaaggttacttatgtggtcatcggggatgggagagacgaagagattgcagccaaacagcacaatatgcccttttggaggatcaccaatcatggggacctggtgtcattgcatcaggctctcgaattggatttcctttag

SEQ ID NO: 222687 - DNA, 1920 bp, synthetic construct
  misc_feature 1..1920: note = Description of Artificial Sequence: Synthetic coding sequence
  source 1..1920: mol_type = other DNA
atggaggattctcaggacctgaatgagcagagcgtaaaaaaaacatgtacagaatccgatgtgagccagtcccagaactctcgctctatggagatgcaagatctggcatccccccacacactggtggggggaggagatacccctggttcttcgaagcttgagaagtcaaatctgtcgtccacttccgtaaccacaaatggcacaggcggagaaaatatgacagtactgaacaccgccgactggcttctgtcttgcaacacaccaagttctgcaacaatgagtctgctagcagtcaaaaccgagccgctgaattctagtgaaactactgccacaaccggagacggtgccctggacacctttaccggttctgtgattacaagcagtgggtatagcccgagatcggctcaccagtattccccacagctctacccctccaaaccatatcctcatatcctgtcgactcctgcagcacagaccatgtccgcctatgccggacaaacccagtattctggaatgcagcagcccgctgtgtacacggcgtactcccagacagggcaaccctacagcctcccaacgtacgaccttggcgtgatgttgccagccatcaagaccgagtcgggcctcagtcaaacccagtcccctctgcagtccgggtgcttgagttacagcccagggttttccaccccccagcccggtcagacaccttactcctaccagatgcccggaagctccttcgccccttcaagtactatatacgccaacaatagtgtgtctaactccacaaacttctctggatctcagcaggactatccatcatacaccgcttttggccagaaccaatacgcccaatattacagcgcctcgacatatggagcgtatatgacttctaacaacaccgcggatgggacaccgtcgtccacctctacctaccagctccaggaaagcctcccaggtctcaccaatcagcccggagagttcgacaccatgcagtccccatcaacccctatcaaggacctcgatgagcgaacatgccggagcagtggtagcaaatcacgcggacgaggacggaagaataaccctagtccacctccggattccgacctggagagagtctttgtctgggatctggacgagaccattatcgtttttcacagcttgctgacaggcagctacgcacagaagtatgggaaggatcctcccatggcagtgacccttggtctccgcatggaagagatgattttcaacctggcagatactcatctgtttttcaatgatttagaggagtgtgaccaggtgcacatcgatgacgtgagctctgatgataatggccaggatctctccacgtattccttcgcaacggatggattccatgcagcagcatctagtgccaacctctgcctaccaacaggagtgcgcggaggcgtggattggatgagaaagttggccttcagataccggagggtgaaagagctatataacacttacaagaacaatgtcggaggactcctgggcccagctaagagggatgcctggctccagctgcgtgccgagatcgaaggtctgaccgacagctggctgacaaacgcactgaagtccctctccatcataagtacccgtagcaattgtatcaatgttctggttactactacccaattgattcccgcacttgcgaaagtgctgttgtactctttgggcggtgcttttcctatagagaacatttacagcgcaaccaagattggcaaggaatcatgctttgaacgaattgtcagtagatttggcactaacatcacctacgtcgtgattggggatgggagggatgaagaacacgctgccaatcagcataatatgcctttctggcgcatctccagtcatagcgacctgctggccctacaccaggctctagagttggagtatttatag

SEQ ID NO: 222688 - DNA, 1851 bp, synthetic construct
  misc_feature 1..1851: note = Description of Artificial Sequence: Synthetic coding sequence
  source 1..1851: mol_type = other DNA
atggaagactcccaggacctgaatgaacagtctgtgaagaagacatgcacagagtcagatgtctcacagagccagaattcaaggagcatggagatgcaggacttggcatctccccatacgctggttggcggtggggatacacctggcagctctaaactcgaaaaaagcaacctgtcttccacttctgttactacaaatggaactggcgtctcactcctggcggtgaaaaccgagcctctgaatagcagcgaaacaaccgcgaccaccggcgatggcgcactggacacctttacaggatcagttattacttctagtgggtacagccctcgttcagctcatcaatactcaccacagctgtatcctagcaaaccctatcctcatatactctctacgcccgctgcacagactatgagcgcctacgcaggtcagacacagtacagtggcatgcaacaaccagctgtgtacaccgcatactcccagacgggccagccttactcgttgccgacgtatgatctcggcgtaatgctgcctgccattaaaaccgagagcggactgtcacaaacccagagcccacttcagtctggatgtttgtcttactcccctgggttctctactcctcagcccggacagaccccatattcgtaccaaatgcccggatcttccttcgccccatccagtactatctacgccaataacagtgtgagcaactccacaaacttctcaggctcccaacaggattacccatcctacactgcgtttgggcagaaccaatacgcccagtattactccgcttctacctacggagcctacatgacctctaataatactgccgatggaaccccttccagtacgtccacatatcagctgcaggagagtctgccaggattgaccaatcaacccggtgagtttgatacgatgcaatccccaagtacgcccatcaaagatttggatgagcgcacctgcaggtcatcaggctctaagtcccggggtcggggtaggaagaacaacccttcccccccacccgattccgatctcgagcgagtattcgtttgggatcttgatgagaccattatcgtgttccactctctgctgaccggatcatacgcccagaagtacggtaaggaccctcctatggcggtgacactggggttgaggatggaagaaatgatcttcaacctggccgatacgcatcttttcttcaacgatctcgaggagtgcgatcaagtgcacatcgacgatgtgagtagcgatgataatggacaggatttaagcacatacagttttgcaacagacggcttccatgcagcagcatcaagcgctaacctgtgcctccctaccggggtgcggggtggggtggactggatgcgaaagctggctttccggtaccgccgtgtcaaagaattgtacaacacttataaaaacaatgtaggcggacttctcggcccagccaagcgcgatgcctggctgcagctcagggcggaaatagaagggctgactgactcttggctcacaaatgctctgaagagcctgtcaatcatatccacccgaagcaattgcatcaatgttttggttactactacccagctgatccctgccttggcgaaagttctgttatattccttgggcggagcgttccctattgaaaatatatactcagctactaagattggtaaagagtcttgctttgagcgaattatgcagcggtttgggagaaaggtcgtgtacgtcgtaattggggatggtgtggaagaggagcaggctgccaagaagcataacatgcccttttggcgtatctcaagccatagcgacctgctggctttgcatcaggctctcgaactggaatacctctag

SEQ ID NO: 222689 - DNA, 1920 bp, synthetic construct
  misc_feature 1..1920: note = Description of Artificial Sequence: Synthetic coding sequence
  source 1..1920: mol_type = other DNA
atggaggatagccaggaccttaacgagcagagtgtcaagaaaacgtgcaccgagagcgacgtgagccagtctcagaacagccggtcaatggaaatgcaggatttggcctcgccacacaccctcgtgggtggtggtgacacccctggatcttccaagctggaaaaatctaatcttagttccacatcagtaaccactaacggcacaggaggcgagaacatgaccgtcttaaacacagctgattggctgctgagctgcaatacacctagtagcgcgaccatgtccttgctggcagtgaagacagagcctctgaactctagtgagacaactgccaccactggggacggcgctctggatacgttcacagggtccgtaatcacaagcagcggctattcaccacgcagcgcgcaccagtactcccctcagttatacccatccaaaccttaccctcacattttgtcaacaccagctgcccagacaatgagcgcgtacgctggacagacccagtactcaggaatgcagcagccagctgtttacaccgcctattctcaaacaggccagccctacagtctccccacctacgaccttggcgtgatgttgccagccatcaagacagaatctggcctctcgcagacccaatcccctctgcaatctgggtgcctgagctactctcccggattcagcaccccacagcctgggcagactccttactcctatcagatgcccggtagctcctttgctccctcctccacaatttatgcaaacaatagtgtttcaaacagcactaatttctcaggctcacagcaggattatccgagctatactgcttttgggcagaaccagtacgcccagtactattcagcttcaacctatggagcttatatgacttcaaacaacaccgctgatggtaccccgtcgtccacctctacttaccagttacaggaaagcctcccgggtttgaccaaccagcctggcgagtttgacaccatgcagagtccctctactccaatcaaagaccttgacgagaggacctgtcgatctagtggctctaagagtcgcggtaggggcagaaagaataacccgagccctcctccagatagcgatttagagcgagtgtttgtttgggacttagacgagactataattgtgttccatagtcttcttacagggtcctatgcccagaagtatggcaaagatccacccatggctgttacactagggctcagaatggaggaaatgatctttaatcttgctgacacccatctcttctttaatgacctcgaagaatgtgaccaggtgcacatagatgatgtcagtagcgacgacaatggccaggacctctctacatacagctttgcaaccgatggctttcacgcagcggctagtagcgcaaacctctgtcttcccactggggtgcgtggtggtgtggattggatgcggaaactcgccttccggtaccggcgtgtcaaggagctgtacaatacttataagaacaacgttggaggtctgctggggcctgccaagagggatgcatggctccaactgagggccgagatcgagggactgacggactcatggctgacaaacgccctgaaatccctgtccatcataagcaccagaagtaactgtattaatgtcctggtgactactacgcaactcatcccggctctggccaaagtcctgctttactctctgggcggtgcgttccccattgagaacatttatagtgcaacaaaaattggaaaagagagctgttttgagaggatcatgcagcgtttcggtcgcaaggtggtgtacgtcgtaattggtgatggcgtggaagaggagcaggcagcaaaaaagcataacatgcccttttggcgcatcagtagccatagtgatctgctcgccctgcaccaggctctagaactggagtacctttag

SEQ ID NO: 222690 - DNA, 9497 bp, synthetic construct
  misc_feature 1..9497: note = Description of Artificial Sequence: Synthetic coding sequence
  source 1..9497: mol_type = other DNA
atgactgataagtccattgtgatactgtccctcatggtgttccacagtagctttatcaatggtaaaacctgcaggaggcaacttgttgaggagtggcaccctcagcccagttcttacgtcgtcaactggacacttactgagaatatctgtttggacttctatagggactgctggtttctgggagttaacacgaaaattgatacgtcagggaaccaggccgtgccgcagatctgccctctgcagatccagctgggtgacatcctcgttattagtagcgaaccgtctctccagttccccgaaattaacctgatgaacgtctccgaaacatcatttgtagggtgtgttcagaacaccacaactgaggaccaactgctatttggctgccgactaaaggggatgcacaccgtcaacagtaaatggctaagcgtggggacgcactacttcatcactgtaatggcctcaggcccaagtccgtgcccgctgggcctcagactgaatgtgactgtgaagcagcagttttgtcaggagagcctctcttccgaattctgcagcggtcacggaaagtgtttgtccgaggcatggagcaaaacttacagctgccactgtcagcctccattttctggcaagtattgccaggaattagatgcatgcagcttcaagccttgcaaaaacaatggctcgtgtattaacaagcgggagaactgggacgagcaggcctacgaatgcgtttgccatccgccattcaccgggaaaaactgcagcgaaatcattggtcaatgccaacctcacgtgtgcttccacgggaattgctccaacatcacgagcaatagttttatttgcgagtgtgacgaacagttctccggaccattctgtgaggtatcagcgaagccatgcgtaagcttgttattctggaaacgcggtatttgcccaaatagctctagcgcgtatacatatgagtgccccaaggggtcaagcagccagaatggagagacagacgtctcagaattcagtctggtcccatgtcaaaacggaaccgattgtatcaaaatctccaatgacgtaatgtgtatttgttcccctatctttaccgacctgctgtgcaaaagcatccagacgtcctgcgaatcctttccccttcggaataacgccacatgcaagaaatgtgagaaagactatccatgtagttgtatctcaggctttacggagaagaattgcgagaaggccatcgaccactgtaaacttctgagcattaattgtctcaacgaagaatggtgctttaatattattggtcgcttcaagtacgtttgcatccccggttgtaccaagaatccttgttggtttctgaagaatgtgtatttaatacaccagcacctctgctactgcggcgtgaccttccacggaatctgtcaggataaggggcctgctcagttcgagtatgtctggcagttggggttcgctgggagcgaaggagagaaatgtcaaggtgtgattgacgcctactttttcctggctgcaaattgtactgaagacgccacctatgttaatgatcccgaagacaataactcatcttgttggttccctcacgaggggaccaaggaaatctgtgctaatggctgttcttgcctgagtgaagaggactcccaggagtacaggtatctgtgcttcctgcgatgggcgggaaacatgtacttagaaaatacaaccgacgaccaggagaacgaatgccagcatgaggcagtatgtaaagatgagatcaacagacctcggtgctcatgttcactgagttatattggcagactttgtgtggttaacgtcgactactgcctgggcaaccactcaatctcagtccacggtctgtgtttagcactgtcccataattgcaattgtagtggcctccagagatacgaacgaaatatatgcgagattgacaccgaggattgcaagtcagcctcttgtaaaaatggcaccacatctacccacctgcggggttattttttccgaaagtgcgttccaggatttaaaggcacgcagtgtgagatagacattgatgagtgtgctagccacccatgcaaaaacggcgcaacatgcatcgaccagcccggtaactacttctgtcagtgcgttccacccttcaaggtggtcgacggattctcatgcctgtgcaacccaggatatgtcggaattcgctgcgagcaggacatcgatgactgcatcctgaatgcatgtgaacacaacagcacctgtaaggacctccatttaagctaccagtgtgtgtgtttgagtgactgggaaggaaacttttgtgagcaggagagcaacgaatgcaaaatgaatccatgtaagaataatagtacctgcaccgatctctacaagtcctacagatgtgaatgtacctcgggctggaccgggcagaactgctctgaagaaattaatgaatgtgatagcgacccctgcatgaacgggggattgtgtcacgagagcacgattccgggtcagtttgtctgcctttgtccacctttatacaccgggcagttctgtcatcagcgttataacttgtgcgatctactgcacaatccctgtcggaacaattcgacctgtctggcacttgtcgatgccaaccagcactgcatctgtcgggaagaatttgagggcaagaattgtgagatcgatgtgaaggactgtttgtttctttcctgccaggattatggggattgcgaggacatggtgaacaacttccgctgtatttgcaggcctggcttcagtggaagtctgtgcgaaattgagatcaacgaatgcagctcagagccatgcaagaacaatgggacatgtgtcgatctaacaaaccggtttttctgcaattgtgagccagagtaccatggccctttctgcgaactcgatgtaaacaaatgcaaaatcagtccctgccttgatgaggaaaactgcgtttacaggactgacgggtataattgtctctgcgcgccaggctacaccggtatcaactgtgagataaacctcgacgagtgtctgtccgagccctgccttcatgacggcgtatgtatcgacggcataaatcattacacatgcgactgcaagtccggattttttggcacccactgcgagacgaacgccaacgattgtctgagcaatccatgtctgcatggacgctgtactgagctgatcaacgaatacccctgttcctgcgatgccgatggtacgtccacgcagtgcaagatcaagataaacgactgcacatccatcccctgtatgaatgagggcttctgccagaagagtgcacacggattcacgtgcatctgtccacgaggttatacaggagcgtattgcgaaaagtcgatcgacaattgcgccgaaccagagctgaactccgtgatttgtctaaatggagggatctgcgttgacggccctgggcacacatttgattgccgctgtctgcccggattcagtgggcagttttgcgaaatcaatatcaatgagtgctctagcagcccttgtctccatggcgctgactgtgaggatcatatcaacggctacgtctgtaagtgtcagccaggttggtctggtcaccactgtgagaacgagctggagtgtatcccaaacagttgtgtgcatgagctttgcatggaaaacgagcctggatcaacatgtctgtgtacccccggattcatgacctgtagtatcggtctgttgtgtggggacgaaatccgcaggataacgtgcttgactccaattttccaacggacagatcctatttcaactcaaacgtacaccattcccccatcagagactctggtgtcctcctttccttccattaaggccacacggattccggcaatcatggatacttatcccgttgaccagggtcccaaacagactggaatagtgaaacacgatatattgccaacaactggccttgcgacgctgcggatctccacccccctggaatcttaccttctccaagaattgatcgtgaccagagaacttagcgcaaagcactctctactgagctctgcagatgtgtcctcatcccggttcctgaatttcggaatcagggatccggcacagatcgtgcaggacaaaacctccgtttctcatatgcctatcagaacttctgctgcaactcttggcttctttttccccgatagaagggcgaggacaccatttattatgagttccctcatgagcgactttatcttccccacccagtctctgctgtttgagaattgtcagacagtggccctgtccgcgacacctacgaccagtgtgatcaggtccatccccggagccgacatagagctaaatagacagagcctgctctctagggggtttttattgatcgctgcctcgatctctgcaacccccgttgtgagcaggggggctcaggaagatatcgaggaatattctgcggacagtttaatcagcagacgagagcactggagactgctctcgccttccatgagccctatatttcccgcaaaggtaattatttccaagcaagtgaccattcttaattcttccgccctgcacagattttcgaccaaggcctttaacccatccgaatatcaagccatcacagaggcgtcgtccaaccagagattaaccaatatcaaatcccaagcagccgacagcctccgagaactgtcacaaacctgcgccacctgcagcatgacggagatcaagtccagccgcgaattcagtgaccaggtactacattcaaagcagtctcatttttatgagactttttggatgaattcggctattctggcgagttggtatgctctcatgggtgctcagaccatcactagtggtcactcattcagttctgcaacagaaattaccccatccgtagcatttactgaggtcccgtccctgtttccctctaagaaatccgccaagcggacaatcctgagttcctctctcgaagagagtatcaccctctcaagcaatctagatgtgaacttgtgcctcgacaaaacatgcctgtcgattgtcccaagccagaccatctcaagtgacctcatgaacagtgacctcacgagcaaaatgacgacagacgaactcagcgtttctgagaatattttgaagctattgaagataagacagtatggtatcacaatgggtcccaccgaggtgctgaaccaggagagcttgctcgacatggaaaagagcaaaggttcgcacacactattcaagctgcacccctctgattctagcctcgatttcgaactgaatctgcagatctaccctgacgtcaccctcaaaacctatagcgagattacgcacgcgaacgactttaagaataacttgccacctttaactgggtctgtgcccgacttctccgaggtcacgaccaacgtggctttttacaccgtatctgccacccccgctctttcaatacaaacctcctcctcaatgtccgtgattcgacctgactggccctacttcaccgattacatgacctcgctgaagaaagaggttaaaactagttccgagtggtccaagtgggagcttcagccgagcgtccagtaccaggaattcccaacggcctcaagacacttgccattcacgcggtcattaaccttgagcagcttggagtcaattttggcccctcagagactgatgataagcgacttttcctgcgtccgctattatggcgactcttaccttgaatttcagaatgtggccttgaacccacagaacaatatctctctagagtttcaaaccttctcaagctatggtctgctgctttatgtgaagcaggacagcaatcttgtggatggattcttcatccagttgttcattgagaacggaaccctgaagtaccatttctattgtcctggtgaagccaagtttaagtctatcaatacaaccgtgagggtggacaacgggcaaaaatataccctgctgattagacaggaactggatccgtgtaacgccgaactgaccatactaggtagaaatacacagatttgtgagtccattaaccacgtgctgggcaagcccctgcccaagtcaggctccgtctttattggcggattccccgatctccatggaaagattcagatgcccgttcccgtgaagaattttactggctgcatcgaagtgattgaaataaacaactggcggtctttcatcccttcaaaggctgtgaaaaattatcacattaacaactgcaggtcccagggattcatgctctccccgaccgcatcatttgtggatgcctccgacgtcacacagggtgtggacactatgtggacgagcgtgtctccctctgtggctgctccttctgtttgtcagcaagatgtgtgccataacggaggaacgtgccacgccatctttctgtcttccgggatcgttagtttccagtgcgactgcccactgcacttcactggtagattctgtgaaaaggatgcagggctgttttttcccagctttaatgggaactcttatctcgagctccctttcttgaagtttgtgctggagaaggaacacaacaggactgtgaccatatatctcactataaaaacgaacagccttaacggaaccatcctgtactctaatggtaacaattgcggaaagcagttcttacatttgtttttggtcgaaggccgaccatctgtgaagtatggctgcgggaactcgcagaacatactgactgtgagcgcaaactacagcatcaatacaaacgcctttacaccaatcactatccgttacactaccccagtcggcagcccaggagttgtatgcatgatagagatgaccgccgatggcaagcctccagtgcaaaaaaaagatactgaaatctcccatgccagtcaagcgtacttcgagtctatgtttctcggtcatatccctgcgaacgtgcagatccacaaaaaggctgggcctgtgtacggtttccgcggatgcatcctcgacctgcaggtcaacaataaagagtttttcatcattgacgaagcacggcatggtaaaaacatcgaaaattgtcatgttccctggtgtgctcatcatctatgtagaaacaatgggacctgtatttccgacaacgagaatctcttctgcgagtgccctcggctgtattcaggaaaattatgccagttcgcgtcgtgcgaaaacaacccttgtgggaatggtgcgacatgcgtccccaagtccgggaccgatatcgtttgcctctgcccttatgggagatctggccctctgtgcactgacgcgattaatatcacccaaccgaggtttagtggcactgatgccttcgggtatacaagcttccttgcgtatagcaggataagcgacataagcttccattatgagttccatctaaagtttcaacttgccaataaccattcagccctccagaataacctcatcttctttactggacaaaagggtcacggacttaacggagacgactttctcgcagttggcctgttgaatggcagtgtggtgtacagctacaatttgggctccggtatcgcctccatccggtctgagcctcttaatctgagcctcggcgtgcatacagtgcacttgggcaaattcttccaagaaggttggctgaaagtcgatgatcacaagaataagagtatcattgctccgggtagacttgtcggactaaatgtctttagccagttctatgtggggggttatagcgagtatactcccgatctgttacccaatggcgcagattttaagaatgggttccaggggtgtattttcaccttacaagtgaggacagagaaagacggacacttccggggtctaggaaaccccgaaggccacccaaacgctgggaggagcgtaggccagtgccatgcctcaccttgctctctgatgaagtgtggtaacgggggaacctgcatcgaatcaggaacaagcgtttactgtaattgtaccactggctggaaaggatccttctgcacagagactgtgtccacatgcgaccccgagcacgatcccccacaccactgctcacggggtgccacatgcatctccctgccccatggctatacttgcttctgtccactgggaacaaccgggatctattgtgaacaagcactgattctgatcgtgatactcgagaaacctaaaccagcggaacgaaaggtgaagaaggaagcactgtcaatcagcgacccaagctttcgatctaatgaactttcctggatgtcgtttgcttccttccacgtacgcaaaaaaacacatattcagctccaatttcagcctctcgctgctgacgggatcttgttctatgctgcccaacacttgaaggcgcagtcgggtgattttttgtgcatctccctcgtgaacagttctgtgcaattgagatacaatttaggggatcgcacaatcatccttgagacccttcagaaagtgacgattaacgggtccacttggcatattatcaaggctggaagagtgggagccgaggggtatctggacctggacgggattaacgtgaccgagaaggcgagtactaagatgagctccctagacacaaacacagacttttacataggaggagtgtccagcctgaatttagtaaacccaatggcaattgaaaacgagcccgtaggcttccaagggtgcattagacaggtcatcatcaacaaccaggagctccagctgactgagttcggtgctaaggggggatctaatgtgggagactgcgatggcacagcttgcggttataacacatgccgcaatggcggagaatgtaccgtaaacggaacgactttcagttgcagatgtctgcccgactgggccggtaacacatgcaaccagtcagtaagctgcctgaacaacctttgcctgcaccaatctctgtgcatcccggatcagtcattttcgtatagttgcctatgtactctcgggtgggttggacgctactgtgaaaacaaaacatctttcagtaccgccaaattcatgggtaatagttacattaagtacatagatccaaactacaggatgcggaacctgcaattcacaactatttcactaaacttcagtactaccaagactgagggcctcatcgtatggatgggaatcgcgcaaaacgaggaaaacgattttctggcgatcggtctccacaaccagactcttaagatcgccgtgaacctgggggaaaggatcagtgtgcctatgagctacaataacggcacattttgctgcaacaaatggcaccatgtcgtagttattcaaaaccagactttaattaaggcttatatcaataactccctaattctatctgaggatattgacccacacaagaacttcgtggccctcaactacgacggaatctgctacctgggcggattcgaatacggaaggaaggtgaacatcgtaactcaggaaatttttaagactaacttcgtcgggaagattaaagatgttgtcttcttccaggaacctaagaatatcgagctgatcaagttggagggctataacgtctatgacggcgacgagcagaatgaagtgactta

SEQ ID NO: 222691 - DNA, 1785 bp, synthetic construct
  misc_feature 1..1785: note = Description of Artificial Sequence: Synthetic coding sequence
  source 1..1785: mol_type = other DNA
atgaccgataaaagtatcgtcattctcagtctgatggtgttccattctagcttcatcaacggtaaaacatgtcgaagacagctggttgaagaatggcacccccagccctcctcttacgtggtaaattggaccctgaccgaaaacatctgcctggacttttaccgggattgttggtttctaggagttaatactaaaatcgacaccagcggtaaccaagcggtcccacagatatgtcctctgcagattcaactgggggacatcctggtgatctcttctgaacctagcctccagtttcccgaaattaatctcatgaacgttagcgaaaccagttttgtgggttgtgtgcagaatactactactgaggatcagctcctgtttggctgtaggctgaaaggtatgcacactgtaaattccaagtggctctctgtgggaactcactactttattacagtgatggccagcggcccaagtccttgtcccttagggctccgcctgaacgtcactgtgaaacagcagttttgtcaggagagcttatcttccgaattctgttcgggacacggcaaatgcttgagcgaagcctggagcaagacttactcctgccattgtcagcctcctttttctggcaagtactgtcaggagctagacgcctgttcctttaagccatgcaaaaataacgggagttgtataaacaagagggaaaattgggacgagcaagcttacgagtgcgtgtgccaccccccattcaccggcaaaaattgttcagagatcattggtcagtgtcagccacatgtctgttttcacggaaactgttccaatatcacaagcaatagtttcatttgtgaatgcgatgagcagtttagtggtcccttttgcgaagtttccgccaaaccctgcgttagtcttctgttctggaaaaggggcatctgtccaaactcttccagtgcgtatacgtacgagtgtcccaaaggttctagttctcaaaacggagagactgatgtatccgagttttctctggtaccctgccagaatgggaccgattgtattaaaatctctaacgacgtaatgtgcatctgttcaccgatatttacagatcttctttgcaagtccatccagacatcatgtgaatcatttccactgagaaacaacgcgacttgcaagaagtgcgagaaggactacccatgcagctgcatttctggctttactgagaaaaactgtgagaaagctatagaccactgtaagttactgtccattaattgcctgaacgaagagtggtgcttcaatattatcggcagattcaagtacgtctgtattcccggatgtaccaaaaacccgtgctggttcctgaagaacgtttatctgatccaccagcacctgtgttattgtggcgtcaccttccacggcatctgtcaggataaaggccctgcccagttcgagtacgtatggcagctgggtttcgctggatccgagggggaaaagtgccaaggcgtgatagacgcctacttctttctggctgccaattgtactgaggacgccacctacgtcaatgatccagaagacaacaactcctcttgctggtttccacacgagggcacaaaggagatttgtgccaacggctgttcctgtctcagcgaggaggactcacaggaatacagatatttatgcttcctgaggtgggcagggaacatgtatctggaaaacacgacagacgaccaggaaaacgagtgtcaacacgaagccgtatgtaaggatgagataaatcgcccaaggtacctgtgtatcatttag

SEQ ID NO: 222692 - DNA, 9497 bp, synthetic construct
  misc_feature 1..9497: note = Description of Artificial Sequence: Synthetic coding sequence
  source 1..9497: mol_type = other DNA
atgacagacaagtctatagttatcttgtctttgatggtatttcatagtagctttatcaacgggaaaacttgccgcagacagcttgtggaggaatggcatcctcaaccttcatcttacgtggtgaactggacactcacagaaaatatctgccttgacttctatagggattgctggttcttgggtgttaacactaaaatcgacaccagtgggaaccaggcggtcccccaaatatgtcccctgcagatacaactgggggatattctggtgatttcctctgaacccagcctgcagttccctgagattaacctgatgaatgtgtccgaaacaagcttcgtgggctgcgtacagaacaccactactgaggatcagctgttgtttggatgtcgcctaaaaggtatgcatacagtgaattctaagtggctatctgtcggcactcattacttcatcactgtgatggcgtctggcccaagcccctgccctctggggctcagactgaacgttaccgtaaaacagcaattctgtcaggaaagtttaagctcagagttttgcagcgggcatggcaaatgcttaagtgaagcttggtccaaaacgtactcatgtcactgtcaaccacctttctccggtaaatactgccaggagctcgacgcgtgtagttttaaaccctgtaagaacaacggctcctgcattaataagcgagagaattgggacgaacaggcatacgaatgcgtgtgccacccaccgttcacaggaaaaaattgttccgaaatcatcgggcagtgtcagccgcacgtgtgtttccatggaaactgctcaaatattacaagcaacagctttatttgtgaatgcgatgagcaattctcagggcctttctgtgaggtgtcggccaagccgtgcgtgagtctcttattctggaagaggggcatttgtcccaactcgtcttccgcatacacttacgagtgtcctaaggggagctcttcccagaacggggagacggacgtaagcgaattttctttggtgccatgtcagaacggcacagactgcattaagatctctaatgatgtaatgtgcatctgcagccccatctttaccgatcttctttgtaaatccattcaaacctcctgcgaatcttttccactgcggaacaatgcgacctgcaagaagtgtgagaaagactacccctgctcatgtatatccggctttacagaaaaaaattgcgaaaaggcaatagaccattgtaaacttctctctataaactgcctaaacgaagaatggtgcttcaacataattgggaggtttaaatatgtgtgcattccaggatgtactaagaacccatgctggttcctgaaaaatgtgtacctgatccaccaacatctttgttattgcggcgtaaccttccatggcatttgtcaagacaaaggacccgctcagttcgagtacgtgtggcaactgggtttcgcaggctctgagggtgagaagtgtcagggcgtaatcgacgcatacttctttctggccgcaaactgcaccgaagatgctacatatgtgaacgaccccgaggataacaactcctcttgttggtttccccatgagggcaccaaggaaatctgtgccaatggctgttcttgtcttagtgaagaagactcccaagaataccggtacctgtgcttcctcaggtgggcagggaatatgtacttggaaaataccaccgacgaccaagaaaacgaatgtcagcatgaggcagtgtgcaaagatgaaataaatcggccaaggtgctcctgcagtttgagttatataggaaggctgtgcgtagtcaacgtcgattactgtttgggcaaccatagtatcagcgttcacgggctgtgtctggccttaagtcacaactgcaactgctcaggactccaacggtatgagaggaatatctgcgagatagacaccgaggactgtaaaagcgcaagctgtaagaacgggacgacctcaacccatctcagggggtatttctttcgaaaatgtgttccaggattcaagggaacgcagtgtgagatcgacattgacgaatgtgcttcccacccatgcaagaacggcgctacgtgcatcgatcagcccggaaactacttttgtcagtgtgtccctcctttcaaggttgtcgatggcttctcctgtctatgtaatccgggatacgtgggaatcaggtgcgaacaggatattgacgactgtatacttaatgcctgtgaacacaatagcacctgcaaggacctgcatttgtcttatcagtgcgtgtgtctgtccgattgggaggggaacttctgcgaacaagaatctaacgagtgcaagatgaacccctgcaagaataacagtacctgtaccgatctttataaaagttatcggtgtgagtgtacctccgggtggaccggacagaactgttcagaagaaattaacgagtgtgatagcgatccgtgtatgaatggcggactttgccacgagtccactattcctggacagtttgtctgcctgtgtcccccattatacaccgggcagttctgtcaccaacggtacaacctctgtgatctcttgcacaacccgtgtcgaaataactccacatgtctggctttagttgatgctaatcagcactgcatatgccgcgaagagtttgaaggtaagaattgcgagattgacgtgaaagactgtctgttcctgtcttgccaagattatggcgattgcgaggatatggtgaacaatttcaggtgcatttgcagacccggatttagtggctctctctgcgagatcgagattaacgagtgttcgagtgagccctgtaagaataacggcacgtgtgtcgacctcacaaacagatttttctgcaattgtgaacctgagtatcacggtccattttgcgagttggatgtgaataaatgcaaaatatccccctgtctagacgaggagaactgcgtttacagaactgatgggtacaactgcctgtgtgccccaggatacaccgggattaattgtgagataaaccttgacgagtgcttgtccgagccttgtctgcatgacggagtgtgcatcgatggaatcaaccactatacctgcgactgtaagtccggctttttcggtactcattgtgagacaaacgctaatgactgtctatctaatccctgtttgcatggccgatgcaccgaactcatcaacgagtatccttgtagctgcgacgccgacggcacctccacacaatgtaagattaagatcaatgactgtaccagtataccctgcatgaatgaaggattctgtcagaaatccgctcacggctttacgtgtatttgtcccaggggttatacaggggcttactgcgagaaatctatcgacaactgcgccgagcccgaacttaactccgtcatttgtctgaacggtgggatctgtgttgatgggcctggtcacacatttgattgtcggtgcttgcccggtttctctggacagttctgcgaaattaatattaatgagtgctcctcaagcccatgtttgcacggcgctgattgcgaggatcatatcaacgggtatgtgtgcaagtgtcaaccaggatggagcgggcatcactgcgagaacgaactcgagtgcatcccaaactcttgcgttcatgaactgtgtatggaaaatgagccaggatctacatgtctttgcacacccggatttatgacttgtagcataggattgttatgtggcgacgagatccgaaggataacatgtttgacacctatcttccagagaacagatcctatctctacccagacctacaccattccgcctagtgagactcttgtatccagctttccatcaatcaaagctacacgaatacctgctatcatggacacttacccggttgaccaaggaccaaagcagacaggaatcgtgaagcacgacattctgccaacaacaggcctggctacattgagaatttccactcccctggaatcttacctgctacaggaactgattgtcactagagagctctcagcaaaacactcattgctgagctcagcggacgtctcctcaagtagatttctcaactttggtataagagatccagcccaaatagttcaggataagacttcggtaagccacatgcccatccgtaccagcgccgcaactttgggattcttcttccctgaccgtagagctagaacccctttcatcatgtcctccctgatgtctgacttcatattccctacccagtctctgctgttcgagaactgccagacagtagcactgtcagctacccctaccacatccgttatcagatctatcccaggggcagatatagagctgaatcggcagtcactcttgtcccgcggttttctcctgatagcagcctccatcagcgccaccccagtagtctctcgcggagcccaggaggatatcgaggagtactctgctgattctttgataagcaggagggaacattggcgcctgttgtctcctagtatgtctccgatcttccccgcaaaagttatcattagcaaacaggtaactatcctgaacagttccgccttgcacagattcagcacaaaggcctttaacccctctgagtaccaggcaataaccgaggcctcgagcaaccagagactcaccaatattaagagtcaagccgcagactccctgagggaattgagccagacctgcgcaacgtgctcgatgaccgagatcaagtccagccgcgagttttcggaccaggttctacactcaaaacaaagtcatttttatgagacattctggatgaactcagctatcctggcaagctggtatgcccttatgggggctcaaactataacttccggccacagcttctcctctgccacagaaatcacgccatcagtggccttcaccgaggtcccaagtttgtttccaagcaagaaaagcgctaagcgcaccatcctgagttcaagcttggaggagtccatcacactatcttccaatctcgacgtcaacctgtgcctcgacaagacttgcctgagcatagttccttcccagacaataagctctgacctaatgaatagtgatcttaccagtaagatgactaccgatgaactatccgtctcggaaaacatcctgaagctgctgaagattagacagtacggaataacgatgggaccgaccgaggtgctgaatcaggaaagtctcctggatatggaaaaatcaaaagggagccacaccctctttaagctacaccctagcgattcatcattggactttgagcttaatctccagatatatcctgatgtaactctcaaaacttattccgagataacccatgcgaatgattttaaaaacaatctgcccccactcacaggatcagtgcccgacttctcggaagtaactactaatgtggcattttacaccgtgtcggcaactccagcactctcaatccaaacttcgagctctatgagcgtgatacggccagactggccctattttaccgactacatgacatctctgaagaaggaggtcaaaacatcctctgagtggtcaaaatgggagttacagccttcagtgcagtaccaggagtttcctacagcatctcgccatctaccattcacccggtccctgacgttgagttcacttgagagcattctcgcaccccaacgtcttatgattagtgactttagttgcgtaaggtactatggggattcctatttagaattccaaaatgtggccttgaaccctcagaacaacatctctctggagtttcagaccttcagctcgtacgggttattgctgtatgtaaaacaggattccaatctggttgacggattctttattcagctgttcattgagaatggaacccttaaataccacttctactgtcccggagaggcgaagttcaagagcattaacacaaccgtccgagtggacaatggacagaaatatacactcttaatcagacaggagctagatccgtgcaacgctgagcttacaatcttgggcaggaatacacagatttgtgagagtattaaccacgtcctggggaagccgctgccgaagagtgggagtgtatttataggaggattcccagatcttcacgggaagattcagatgcccgttcctgtcaagaattttacaggctgcatagaggtgattgaaattaacaactggcgatctttcatcccctctaaagccgtgaagaactatcacatcaacaactgcagatctcagggctttatgctcagccccaccgcttcgtttgtcgatgcaagcgatgtaacacagggcgtggacacaatgtggacttctgtctctccatccgtggcagcccctagtgtctgccagcaggacgtgtgtcacaacggcggtacctgtcatgcaatatttcttagctctggcatagtgtcctttcagtgcgattgcccgcttcactttactggcaggttctgtgaaaaagacgccggtctgttctttccttcctttaacggcaactcttacctcgagctccccttcctgaagttcgtcctggagaaagaacacaatagaactgtgacaatctatcttacgatcaagacgaacagcttaaatggaactatcctgtattccaatggcaacaactgcggaaaacagttcctccatctttttctagttgaaggccgaccctccgttaagtacggatgcggaaacagtcagaatattcttacagtatcagcaaattatagcatcaacactaacgccttcactcccattacaatcagatatactacgcctgtcggcagcccaggagttgtttgtatgatcgaaatgacggccgacggaaagccacctgttcagaaaaaagacactgagatatcacatgcctctcaggcctattttgagtcaatgttcctagggcacattcccgctaatgtccagattcataagaaagccggtcctgtgtacggttttcgtgggtgtatattagacctccaggtcaataacaaagaatttttcatcatcgatgaggccaggcatgggaagaacatcgaaaattgccatgtcccctggtgcgcacaccacctgtgtagaaataatggcacatgcatcagcgataacgaaaacctgttctgcgaatgccccaggttatacagcggcaagctctgccagttcgcctcttgcgagaataacccttgcgggaacggcgctacatgtgtgcctaaatccggaaccgatatcgtgtgtctctgtccgtacggcaggtcagggcctctctgtacggacgcaataaatattactcaacctcggttttccggaaccgatgcatttggctacacctcattcctggcttattcacggattagcgatatttcttttcactatgaattccacttgaaattccagctggcaaataaccactctgctctgcagaacaatttgattttttttaccggccagaaaggacatggcctgaacggcgacgattttctggctgtgggcctactgaacgggagtgtagtgtattcttacaatcttgggtccggcattgcatccattcggtcagaacccctgaacctctccttgggcgtgcacacagtccacctcggaaaatttttccaggagggctggctgaaggtcgatgaccataagaacaaatccatcattgcccctggcaggctagttggtcttaatgttttttctcagttctatgtcggcggatatagcgagtacactccagacctgctgccgaatggcgctgattttaagaatggctttcaggggtgtattttcactctgcaggtaagaactgaaaaggacggtcactttaggggactcggaaacccggaagggcacccaaacgctggcagatcagttggccaatgccatgcgagtccctgcagccttatgaaatgcgggaatgggggaacctgcattgagagcggcacttcagtgtactgcaactgtaccacagggtggaaaggctccttctgcacagagaccgtgtcaacctgcgatccagagcacgaccctccacatcactgctcgcgcggtgccacctgtatttctctgccacatggttatacatgtttttgccctctgggtaccaccggaatctattgtgaacaggccttaattctgattgttatcctggaaaaaccgaagccggcagaaagaaaagttaaaaaggaggccctgagtatcagtgacccttcctttagaagtaatgagctgtcttggatgtcctttgccagcttccatgtgcggaagaagacgcatatccagctgcagttccagccgcttgctgcggatgggatcctcttttatgcagcccagcacctcaaggcccagtccggggactttctgtgtatctccctggtgaattcctccgtgcagctgcggtataatcttggggacaggacaataattctcgaaactctacaaaaagtaacaatcaacggatccacctggcatatcatcaaggccggacgggtcggagccgaaggatacctggatcttgatggcattaatgtaaccgagaaggctagtaccaagatgagtagtctggatactaatacagatttttatatcggcggtgtgagtagtctgaatctggtcaacccaatggctatcgagaatgaaccagtgggttttcagggctgtatcagacaggtcatcatcaataaccaggaacttcaactgaccgaattcggcgcaaagggcggttccaacgttggcgattgcgatggaacagcgtgtgggtataatacttgccgtaatggcggagagtgcaccgtgaacggcacaacgttttcctgcaggtgtttgccagattgggccggtaatacctgtaaccagagtgtgtcctgcctgaacaacctgtgcctccaccaaagtctttgtataccagatcagagtttcagctactcctgtctgtgcactcttggatgggttggcagatactgtgagaacaaaacctcttttagtactgctaagttcatgggcaacagctacataaaatacatcgatccgaactaccgtatgaggaatctgcaattcaccactattagtttaaacttcagcactactaaaaccgaaggattaattgtgtggatgggtatagctcaaaatgaagaaaacgatttcctggctatcggactccacaatcagaccttaaaaattgccgtgaatctcggtgaaaggatatctgttcctatgagctacaacaacgggacattttgctgtaacaaatggcaccatgtggttgttatccaaaaccagactcttattaaagcttacattaataacagtcttattctgagcgaggacatcgatccccacaagaatttcgtggctctaaactacgacgggatctgctacctcggcggtttcgagtacggtcgaaaggtgaacatagtaacacaggaaatcttcaaaacaaatttcgtgggaaagatcaaagacgtcgtgttctttcaggaaccaaagaatatagagctgataaagctcgaggggtataatgtttatgacggcgatgaacagaacgaggtcaccta

SEQ ID NO: 222693 - DNA, 9434 bp, synthetic construct
  misc_feature 1..9434: note = Description of Artificial Sequence: Synthetic coding sequence
  source 1..9434: mol_type = other DNA
atgaccgataagtcaatcgtgatcttgtctctaatggtctttcacagtagttttatcaatggaaaaacatgccggcgtcaactcgtggaggagtggcacccccagccaagttcatatgtcgttaactggacattaaccgagaacatctgcctggacttttatagggattgttggtttctgggtgtgaacactaagatcgatactagcggtaaccaagctgtcccacaaatctgccccctccagatccaactgggagacattctggtgatctcctcagaaccctcactgcagtttcctgagattaacctgatgaacgttagtgagactagcttcgttggctgcgtgcagaatacgacaactgaagatcagctactgttcggctgtagactgaagggaatgcacaccgtaaacagcaagtggttgtccgttgggactcattacttcattacagttatggcctccggcccaagcccatgcccactcggattaaggttgaacgtgaccgttaaacaacagttctgtcaggagagcttgagctccgagttctgctctggacatggaaagtgtctatccgaagcttggtccaagacctattcttgccactgccagcctcctttctctggaaaatactgtcaggagttggatgcttgttcatttaaaccctgtaaaaataatggcagctgcataaataagcgggagaactgggatgagcaggcgtacgagtgcgtgtgccaccccccatttacaggcaaaaactgcagcgagatcatcggccagtgccagccacacgtgtgttttcacggaaactgctccaatattacttcgaattccttcatctgtgagtgtgacgagcagtttagcggacccttctgcgaggtcagcgctaaaccatgcgttagcctgctcttttggaaacggggtatttgccctaatagtagcagcgcttatacttatgaatgccctaaagggtcctcctcacagaacggggagaccgacgtaagtgagtttagtttggtgccctgccagaatggcaccgactgcattaagattagcaacgatgtgatgtgtatctgttctcccatatttacagatctgttgtgcaagagcattcagaccagttgcgagtcgttccctctgcgtaacaacgccacatgcaagaaatgtgagaaagattacccctgcagttgcatcagcggattcacagaaaagaactgcgagaaggcgatcgatcattgtaagctgctcagtataaattgtttgaacgaggagtggtgcttcaatataattggccgtttcaaatacgtctgtatcccgggatgcacaaaaaacccttgctggtttctcaagaatgtttatctaatccaccagcatctgtgctattgtggggtgacatttcacggcatctgccaagacaaaggacctgcccagtttgaatatgtgtggcagctgggctttgccggtagtgagggtgagaagtgtcagggcgtcatcgatgcatactttttcctggccgctaactgcacagaggacgctacatatgtgaacgatcctgaggataataacagttcgtgctggttcccccatgaagggaccaaggaaatctgtgcaaatgggtgcagctgtctctctgaggaagactcacaggagtaccggtatctgtgcttcctgaggtgggccggtaatatgtatctggagaacaccacagacgatcaagaaaatgagtgccagcacgaagccgtgtgcaaggacgagataaatcgccctcggtgctcatgttcgctgagctatataggacgattgtgtgtggtgaatgtcgattactgcttaggaaatcactcgatttccgtgcacggcctctgtctggccctctcccacaattgcaactgttcaggcctccagagatacgagcgcaacatctgtgagattgatacagaagactgcaagagcgctagctgcaagaacgggacaaccagcacacatctcaggggctacttcttccggaagtgcgtcccaggatttaaggggacacagtgcgaaatcgatatagatgagtgtgcctcgcatccctgcaaaaatggagccacatgcatcgaccagccaggaaactatttttgccaatgcgtgcccccatttaaggtcgtcgacggcttcagttgcctgtgtaacccgggatacgtcgggatccgatgtgagcaggatatcgacgactgtatactcaacgcatgcgagcacaactctacctgtaaagacctgcacctgagttatcagtgcgtctgtctcagcgattgggaggggaacttctgcgagcaggagtcaaacgaatgcaagatgaacccctgtaaaaataacagcacttgtaccgacctttacaaaagctaccgatgcgagtgtacctctggatggaccggccaaaactgtagtgaagaaatcaacgaatgcgatagtgatccctgcatgaatggaggcctgtgccacgagagcacaatcccgggtcagtttgtatgtttgtgcccacccctgtacactggacagttttgccaccagcgatataacctatgcgatttgctgcacaacccttgtcgtaacaattccacgtgcttggcattggtggatgctaaccagcattgtatctgcagggaggagtttgaagggaaaaactgcgagattgacgtcaaggattgtttattcctcagctgtcaggattacggcgactgcgaggacatggtaaacaacttccggtgtatctgtaggccaggcttctccggcagtttatgcgagattgaaatcaacgagtgctctagcgagccgtgcaagaacaatgggacttgcgtcgatctgacaaatcggtttttctgcaactgcgaacccgaatatcatggaccattctgcgaactcgacgtgaataaatgtaaaataagtccttgtttggacgaggaaaactgtgtataccggacggatggctacaattgtctttgtgcccctggttatactggaatcaactgcgagatcaacttggacgaatgtctgtctgagccgtgcttgcacgatggggtgtgcatagatggcatcaaccactatacatgtgattgcaagtctggcttcttcggaacccattgcgagacaaatgcgaatgactgcctttctaacccatgtctgcacggtaggtgcactgagcttatcaatgagtacccttgttcttgcgacgccgacggtacctccacacagtgcaaaattaaaattaacgactgcacttccataccgtgcatgaacgaaggcttttgtcagaagagcgctcatggtttcacctgcatctgccccagaggctacacaggagcttattgtgaaaaaagcatcgacaattgcgccgagcctgagctgaattctgtcatttgccttaatggagggatttgcgtcgatggaccagggcacacttttgactgtcggtgcctcccaggattcagcggccagttctgcgagattaatatcaatgaatgctccagctccccttgtcttcatggcgctgactgcgaagatcacatcaacggctatgtctgcaaatgtcaacctggttggagcggccatcattgtgagaatgaacttgagtgcatcccaaacagctgtgtccatgagctctgcatggagaatgagcccggatccacatgcctatgtacgcctgggttcatgacttgcagcattggactgctatgtggagatgaaatccggaggatcacatgtttaacaccaatctttcagaggacagacccaattagtacccagacctacaccatccctccatcggaaactctcgtttcttcattcccgagcataaaggcaactagaattcctgctataatggacacgtaccctgtggaccagggcccaaagcaaaccggaattgtcaaacacgatattctgcccacaacaggcttggctacccttagaatatctactcccctggagtcctacctcttgcaggagctgatcgtgactagggagctatcagcaaaacactctctgctctcctcagctgacgtgagctcatcacggttcctgaactttggaatcagggacccggcacaaattgtccaggataaaacaagtgtcagtcacatgccaattcgcacctcagccgcaaccttgggttttttcttcccagaccgcagagcaagaaccccctttattatgagctccctgatgtccgattttatatttccgacacagagcctcttgttcgagaactgccaaacagtcgccctgtctgcaaccccaactacaagtgtcataaggagcataccgggtgccgacattgagttaaatcggcaaagcttactcagtcggggattcctgttgatcgccgcttcaatctctgctacacctgtggttagcagaggggcacaggaggatatcgaggaatactctgccgatagtttaataagcaggcgagagcattggagactattgtccccctccatgtcccccatattcccagcgaaagtgataatcagcaagcaggtcaccatacttaacagtagtgctctgcatagattttccaccaaggcgttcaacccatccgagtatcaggcaatcacggaggccagtagcaatcagagattaacaaacataaagtcacaggccgctgatagcttgagagaattgtctcagacatgtgccacttgcagcatgacagagattaagtccagcagagaatttagcgaccaggtgttgcattccaaacaaagtcatttctacgagacattttggatgaactccgctattttggcgtcatggtacgccctgatgggagcacaaacgataacatccgggcattccttttcatccgcaacagaaataacgccctccgtggcctttacagaagtgccatcactgtttcctagcaagaagtccgcaaaacggactattctgtcgagctcattggaggagtcaattactctttctagtaatctggatgtcaacctttgcctggataaaacctgtctctcgatcgttcccagtcagacaatcagttcagatctcatgaattcagacttaactagcaaaatgaccactgatgagctgtctgtgtcagaaaatatccttaagttgcttaagatcaggcagtacggaattactatggggcctactgaggtgttgaatcaggagagcttactggacatggagaagtcaaagggttctcacacactgttcaaacttcacccatcggacagctcccttgactttgagctgaatctccagatttacccagatgtgacccttaagacatactctgaaattactcatgccaatgactttaaaaacaaccttccccctctcaccggatcagtacccgattttagcgaggttaccacaaacgtggccttctacacagtaagcgccacccccgctttatcaatccagacttctagtagcatgtcagtgattagaccggactggccgtactttacagattatatgacctccctaaaaaaagaggttaagactagttccgaatggtccaagtgggaactgcagcccagcgttcagtatcaggagttccctaccgcaagtaggcatctcccctttacacgaagtttgaccctgtcctctctcgagtccatcctcgccccacaacggctaatgatcagtgatttctcttgtgtccggtactacggggacagctacctggagtttcaaaatgtagctctgaatccacaaaacaatatttcactggagtttcagaccttctcctcctacgggctccttctttatgtcaaacaggactctaacctggtggacggtttttttattcagctgtttattgagaacggcactctcaagtatcatttttattgcccgggagaggctaagtttaaatccattaacacgacagtgagagtggacaatgggcaaaaatacacacttttaattcggcaagagcttgatccatgcaatgccgagctgaccatcctggggagaaatactcagatttgtgaatccattaaccatgtgctgggtaaacccttgcctaagtccgggagcgtattcatcggagggttcccagatctccatgggaagatacagatgccagtccctgtcaagaatttcactggctgcatcgaggttatcgagattaataattggagatctttcatcccatcaaaagctgtgaagaattaccacatcaacaactgccgttctcagggttttatgttgtccccaaccgctagctttgtggatgcgagcgacgtgacccagggagtcgacactatgtggacctccgtgagcccctccgtcgccgctccgtcggtatgccagcaggacgtatgccataacgggggtacatgccatgcaatctttctatcaagcgggatagtctcattccaatgcgattgtcccctgcactttactgggaggttctgtgaaaaggatgcagggctcttttttcctagtttcaacggaaattcatacctggaattacctttcttaaagtttgtgctcgaaaaggaacacaacaggactgtcactatctaccttaccatcaaaacaaattctttgaacggtacaatcctatatagtaacggcaacaattgcggcaagcagtttctgcacttgttcttggtggagggcagaccctcagtgaaatatgggtgcggcaactcccaaaacatactgacagtgagcgccaattactccatcaacacaaatgcttttacacctatcacgatccgttataccaccccggtggggtcgccaggggttgtttgcatgattgagatgaccgccgatgggaagccccctgtacagaagaaggatactgaaatttcacacgcctcccaggcctatttcgaatctatgttcctgggacacatccctgcaaatgtgcagattcataagaaagcaggtcctgtgtatgggtttcgtggttgtatcctcgatttgcaggtgaacaataaggagtttttcattattgacgaggctcggcatggaaaaaatatcgagaactgtcacgttccatggtgcgcccaccacttgtgcagaaacaatggcacatgcataagtgataacgagaacctgttttgcgagtgcccaagactgtatagcggcaaactgtgtcaattcgcttcctgcgaaaacaacccatgcggaaacggagcaacctgtgtgccaaagtctgggacagacatcgtgtgcttatgtccctacggccgaagtggcccactgtgtaccgacgctatcaatatcacccagccaagattctccggaaccgatgcttttggatatacttcctttctcgcctatagccggatcagcgatatctcttttcattatgagtttcaccttaagttccagttggctaataatcactcagcattacagaacaacctcatcttttttaccgggcagaagggccacggcttaaatggggatgattttctggcagttggacttctgaacggcagcgtggtgtactcttacaacctcggcagtggtatagcgtccattagatcagagccactgaatttgtccttgggcgtgcacacagtgcatctgggaaagttctttcaggagggctggctcaaggtggatgatcataagaataagtctatcattgcacccggtaggctggtgggtttgaatgtgttttctcagttttatgtgggagggtactccgaatatacaccagatttactgccgaatggagccgattttaagaatggattccagggttgcatctttacgcttcaagtgagaaccgagaaggatggtcactttcgcggactgggcaaccctgagggccatcctaatgcaggtaggagcgtcgggcagtgtcacgcatccccatgcagccttatgaagtgtggaaacgggggaacgtgcatcgagagcgggacaagtgtctactgcaactgcacaacgggttggaaaggatctttttgcacagagactgtgagcacatgtgatccagaacacgatccccctcatcactgtagccgaggcgcaacatgcatcagcctgccccatgggtacacatgtttctgcccgctgggcacgaccgggatttactgcgaacaggccctcagcattagcgacccttcttttaggtcaaacgagctcagctggatgtcttttgcaagtttccatgtccgaaagaaaacgcatatccagcttcagtttcaaccgctcgcagctgacggtatcttgttctatgcagcccagcatctgaaagctcaaagtggcgattttctctgtatctccttggtaaattctagcgttcagctgagatataacttaggcgatcgtaccatcattcttgagacacttcaaaaagtgacaataaacgggagtacttggcacattatcaaggctggacgcgtcggcgctgagggctacctggaccttgacggaattaatgtgacagaaaaggcatccaccaagatgtcaagtctggatacgaacaccgatttctacataggaggagtgagttctctgaaccttgtaaacccaatggctatcgagaacgaaccagtggggtttcaggggtgcattcgccaggtgattatcaacaaccaggagttacagctgaccgagtttggtgccaaggggggaagtaacgtgggtgattgcgatgggactgcgtgcgggtacaatacctgccgaaatggaggggagtgcacagtgaatggtaccactttctcttgccgttgtctacctgactgggccggaaacacttgcaaccagtcagttagttgcctgaacaatctatgtctgcaccagtctctgtgcatcccagaccaaagcttcagttacagctgtctgtgtactctgggctgggtggggagatactgtgagaacaaaacttctttttcaaccgctaagtttatgggtaatagctacatcaagtatatcgatcctaactaccgcatgcggaacctgcagtttacaactatcagtctgaatttctcgaccacgaagaccgaaggtctgattgtatggatgggaatagcacagaatgaggaaaatgactttctagcgatcggactccataaccaaaccctcaaaatcgctgtcaatctgggggagcgcatatctgtgcccatgtcatataacaacgggaccttttgttgcaataagtggcaccacgtagtggtgatccagaatcagactctgatcaaggcatacatcaacaacagcctgatactttccgaagacatagaccctcataaaaattttgtagccttaaactatgatgggatttgttatctgggtggctttgagtacggcagaaaggtgaatattgtgacacaagaaatcttcaagactaattttgtgggaaaaatcaaggacgtagtcttcttccaggagcccaagaacatcgagctgattaagctcgaaggatataatgtatatgatggggatgaacaaaacgaggtcacgta

SEQ ID NO: 222694 - DNA, 1785 bp, synthetic construct
  misc_feature 1..1785: note = Description of Artificial Sequence: Synthetic coding sequence
  source 1..1785: mol_type = other DNA
atgactgataagtcgattgttatcctgtcactgatggtgtttcattcaagtttcataaacggcaagacttgccggagacagctggtggaggagtggcaccctcagccttctagttacgtggtcaattggactcttacagaaaatatatgccttgatttttatcgtgattgttggttcctgggggttaatacaaaaattgacacgtccgggaaccaggctgtgccccagatttgccctctgcagattcagctcggggacatactggtcattagctccgagccatcactacagttcccagaaattaacctgatgaatgtgtccgagacaagtttcgtggggtgtgtgcagaacactaccacagaggaccagctgctttttggttgcaggcttaaaggcatgcatactgtgaatagcaagtggctgagcgtcggtacccattacttcatcacggtaatggcatctggcccatctccctgtccgttgggtctaagacttaatgtgaccgtgaaacagcagttctgccaggagtcactatctagtgagttctgcagcgggcatggtaagtgccttagcgaggcctggtctaaaacctattcatgtcattgtcaaccacctttcagtggcaagtactgccaagaactggacgcatgctcattcaaaccctgcaagaataatgggtcctgtatcaacaaacgcgaaaactgggacgagcaagcatacgagtgtgtgtgccacccacctttcacggggaagaattgtagcgagataatcggacaatgccaacctcacgtatgcttccacggaaattgttcaaatataaccagtaactctttcatttgtgagtgcgatgagcagtttagcggtcctttctgcgaggtgagtgcaaaaccatgcgttagcttactgttttggaagcggggaatctgccccaactccagctccgcgtacacctacgagtgtccgaaaggctcttcttcacagaacggggagaccgacgtgagcgagttctctttagtgccatgccaaaatggcacagactgtatcaaaataagtaacgatgttatgtgcatctgttctcctatatttacggatctcctatgtaagtctattcaaacctcatgtgagtcgttccccttaaggaataatgcaacatgcaagaagtgtgagaaagactatccctgctcttgcatctcagggtttacggaaaagaactgtgaaaaggcgattgatcactgtaaacttctttccatcaattgccttaatgaggagtggtgtttcaatatcatcgggagattcaaatatgtgtgtatccctggatgcaccaaaaatccatgctggtttctcaagaacgtttatttgattcaccagcacctttgttattgtggagtaactttccatggaatatgccaagataagggcccagcccaattcgagtatgtctggcaattagggttcgccggttcggagggcgaaaagtgtcaaggtgttattgatgcatattttttcttggctgccaattgcactgaagatgcgacgtacgtcaatgatcctgaggataacaactcgagctgctggtttcctcatgagggcaccaaagagatatgtgccaatggctgttcctgcttaagcgaggaggactcccaggagtacaggtacctgtgcttcctgaggtgggccggaaacatgtaccttgagaacaccaccgacgatcaggaaaacgagtgtcaacatgaggccgtctgcaaggacgagatcaaccggccaaggtacctctgcataatttag

SEQ ID NO: 222695 - DNA, 1860 bp, synthetic construct
  misc_feature 1..1860: note = Description of Artificial Sequence: Synthetic coding sequence
  source 1..1860: mol_type = other DNA
atgactgataaatctatagtgattctgagtctgatggtcttccattcttcctttatcaacggaaagacctgtcgacggcaattggtcgaggagtggcacccccagccctcaagctatgttgtgaattggactttaactgaaaatatctgtttggacttctatcgtgactgttggtttctgggggtgaatacgaaaattgatacttctggcaaccaggccgtccctcagatctgtccactccagatccagttaggggatatcctggtgatcagctcagaaccctcgcttcagtttcctgagatcaacttgatgaatgtgagcgagacatctttcgtgggttgcgtccagaataccacgactgaggaccagctcctgtttggctgtcggctgaagggtatgcacactgtgaacagcaagtggttatcagtggggacccactatttcataactgtcatggcttctggtccaagcccctgtccactgggtctaaggctcaacgtgacagtcaaacagcagttttgccaggagtcactgtccagcgagttttgttccggacacggaaagtgcctgtccgaggcctggtcgaagacttactcctgtcattgtcaaccacccttcagcgggaagtattgtcaggagctggatgcttgctcattcaagccttgtaagaacaatggaagttgcatcaataaaagagaaaactgggatgagcaggcctacgaatgtgtgtgccaccctcccttcactggcaagaactgcagcgagatcattgggcagtgtcagccacacgtgtgttttcatgggaattgcagtaatataacctccaacagctttatctgtgaatgtgacgaacagttttcagggccattctgcgaagtgagcgctaagccctgtgtaagcctcttattttggaagagaggtatctgtcccaacagcagcagtgcctacacatatgagtgccctaagggctctagctcacaaaacggggagacggatgtgtctgaatttagtctcgttccatgccaaaatggtactgactgtattaagatatcaaatgatgttatgtgcatttgcagccccatatttaccgatctgttatgcaagagtatacaaacatcctgtgaatcatttcccctccggaacaacgccacctgtaagaaatgcgaaaaagactatccctgtagctgtattagcggctttacagaaaaaaactgtgagaaagctattgaccactgtaagctcctctcaataaattgcctgaatgaggaatggtgctttaatatcattggtcgcttcaaatacgtttgtatccccggttgtactaagaatccgtgttggttccttaagaatgtctacctgattcatcagcatctttgttactgtggggtgacctttcacggaatatgccaggataaggggccagcacaatttgaatacgtctggcagctggggttcgccggaagtgaaggcgaaaagtgtcagggcgtgatagatgcatatttctttctggcagccaactgtaccgaagacgcaacctacgttaatgatcctgaggacaacaatagtagctgttggtttccacatgagggaacaaaggagatttgtgccaatgggtgttcgtgcttaagcgaagaggattctcaagagtatcgttatttgtgtttcctgcggtgggccggaaatatgtacctggaaaataccacggatgaccaggaaaacgaatgccagcatgaggccgtctgtaaggacgagatcaaccgcccacggcgaattctgaacaccgtgatcccccaccaaatccagcagcacatcgagcgctttattcagcacgaccaggtaggtttcatcgtcagaatttag

SEQ ID NO: 222696 - DNA, 1764 bp, synthetic construct
  misc_feature 1..1764: note = Description of Artificial Sequence: Synthetic coding sequence
  source 1..1764: mol_type = other DNA
atgggctgggacctaggcaccaggctgttccagagacaggagcaaagatccagattgagcagaatatggctggagaagactagggtttttctagagggcagcacacgcacacccgctctcccacactgcctgttttggttactccaggtgccatccacccaagacccgctctttcctggctacggccctcagtgtcctgtcgatctggccggacccccttgtctcagaccactgtttggcggacttgggggatactggcgcgctttgcagagggggagggaggggcgaacaatgacgtcccgggcaagtgagctatctcccggaagatcggttacagccggtattattatcgtgggcgatgagatcctgaagggccatacacaggatactaacacgttcttcctctgtcggactcttagaagcttgggcgttcaggtatgccgcgtgagcgtggtgcctgatgaggtcgccacgatcgccgctgaggttaccagtttctctaaccggttcacccacgtgcttacagcaggcggtatcggacccactcatgacgatgtcactttcgaggccgtcgctcaggcgtttggcgacgagctgaagcctcaccccaaattagaagctgcaacgaaagctttaggcggagagggatgggagaaactatctttagtcccgagctcagccagactgcactacggcaccgacccttgtactggccagcctttccgattccccttggtcagtgtgcggaatgtctacctcttccctggaatccccgagctgcttaggagagtccttgaagggatgaagggcctctttcagaatcctgccgttcagttccactcaaaggagctatacgtggcagcagacgaagccagtattgccccaatattagctgaagcacaagcacacttcgggcgtcgactgggtctgggatcttacccagactggggctctaactactaccaggttaagttgacgcttgactcagaggaagaaggtcctctcgaagagtgtttggcgtacctgacagcacgactccctcaggggagtctggtgccatacatgccgaacgccgtggagcaggcctccgaagcagtgtataagctcgctgagtctgggtcctccctcggaaaaaaggtagccggagcacttcagacgatcgaaacatcgctggctcagtattctttgactcaactgtgtgtggggtttaatgggggtaaggactgtacagcgctactgcatctgtttcatgctgcggtgcaacgaaagctgcccgatgtccctaacccactgcagattctgtacattcgtagtatatctccttttccggagctcgagcaatttctgcaagacactatcaaaagatacaatcttcagatgctcgaagctgagggtagcatgaagcaggccctgggtgaactgcaggcgaggcaccctcagcttgaggctgtcctgatgggcacccggaggaccgacccatactcatgctctctgtgtcctttttccccaaccgaccctggatggcccgcattcatgaggataaatcccctgctggattggacgtatagagatatctgggatttcctgcggcagctgttcgtgccctattgcatcctgtatgacaggggctataccagcttgggatctcgggaaaacaccgtgaggaaccccgcacttaaatgtttatcccccggagggcatccaacttatcggccagcatatttactggagaatgaagaagaggagcggaacagcagaacttag

SEQ ID NO: 222697 - DNA, 513 bp, synthetic construct
  misc_feature 1..513: note = Description of Artificial Sequence: Synthetic coding sequence
  source 1..513: mol_type = other DNA
atgaagggactgtttcagaatccagccgtgcagttccactcgaaggaactctacgtggccgctgatgaggctagcatcgcccctattctggccgaggctcaggctcactttgggagacgcctcggattagggagttatccggattggggctctaactattatcaagtgaaactgacactggacagtgaagaagaaggcccacttgaggaatgtttggcttatctgacagcccgactaccccaggggtccctggtgccttacatgccgaacgccgtcgaacaagcgtctgaggcggtgtacaaacttgccgaatccgggaattacttaatgttccaaacaccttcccggtcctgtattagtgccgcatctcccttgtctctgtcttggaattccttctacagaacattgagtagagagcaggccattccagagaatcagatcgccagccctccatcagaggcaaagggcgcagaggaaccctggatgggaccgtttcctggccagcaagggtag

SEQ ID NO: 222698 - DNA, 1473 bp, synthetic construct
  misc_feature 1..1473: note = Description of Artificial Sequence: Synthetic coding sequence
  source 1..1473: mol_type = other DNA
atgaccagtcgcgcatctgagctatctcccggacgtagtgttacagcaggaattatcattgtgggagatgaaatcttaaagggtcatacccaggatacaaacaccttcttcctctgtaggaccctgagatcattgggggtgcaggtgtgccgcgtgagcgttgttcctgacgaagtggcaacgattgccgcagaagtcacatccttttccaaccgcttcacacatgttctgacagccggaggtatcggacctacgcacgatgatgttaccttcgaggccgttgcccaggccttcggcgatgagctcaagccgcatccaaaactggaagcagcaactaaggctctcgggggagaggggtgggaaaaactgtccctggttcccagctctgcacgactacattacggtacggacccttgcacaggacaaccgttcaggttccccctggtgagcgtcagaaacgtttacctgtttccaggtattcccgagctcctacgcagagttctcgagggaatgaagggtctctttcagaatcccgcagtgcagttccatagtaaagagctctatgttgcggctgacgaagcctctattgcacctattctggcagaggctcaggcgcacttcggaaggcggcttggtctaggctcatatccagattggggcagcaattattatcaggtgaaactcacgctggactccgaagaggagggacccttggaggagtgtctggcctatttaacagctcggcttcctcagggcagcctggtgccttatatgcctaacgccgtggaacaagccagcgaggctgtgtataagctggctgagagcggcagttcgcttggtaagaaagtcgcgggagcactgcagacaattgaaacctccctggcacagtattcgcttacacaactttgtgtcggattcaatggcggaaaagactgcactgccctactccacttgttccacgccgctgtgcagcgcaagcttccggatgttcctaatccacttcagatcttatatattcgttccatctcaccttttcctgagctagagcaattcctgcaggacaccattaaaagatataacctacagatgctggaagcagaggggtctatgaaacaggccctgggtgagcttcaggctcgacacccccaattagaggccgtgctgatgggcacacggaggacggatccatactcttgctctctttgccctttcagcccgaccgatccaggatggcccgcatttatgcggatcaatcccctgctggattggacgtatcgcgacatctgggactttctgaggcagttgttcgtgccatattgtatcctgtatgaccgtggctacacctccttgggatcacgggaaaatacggtcaggaatccagcactgaaatgcttatccccgggaggccacccaacctaccggcctgcttatcttctggaaaatgaggaggaggaacgcaattcaaggacatag

SEQ ID NO: 222699 - DNA, 387 bp, synthetic construct
  misc_feature 1..387: note = Description of Artificial Sequence: Synthetic coding sequence
  source 1..387: mol_type = other DNA
atgcttgaagccgaagggtctatgaagcaagctttgggcgaattacaggccaggcatcctcagttagaggccgtcctcatgggtacacgcagaaccgacccttattcatgtagcctatgtccgtttagccccactgaccctggctggcccgcattcatgcgcatcaatccactgttggattggacctaccgcgatatctgggattttcttagacagctgttcgtgccttattgtattctgtacgatcggggttataccagcttgggtagccgcgagaacaccgtacgcaatcctgcgctcaaatgcctgagccctggcggacatcccacctacagacccgcatacttgttggagaatgaggaagaggaaagaaactcacgcacctag

SEQ ID NO: 222700 - DNA, 885 bp, synthetic construct
  misc_feature 1..885: note = Description of Artificial Sequence: Synthetic coding sequence
  source 1..885: mol_type = other DNA
atgcagccctcatcctccacaccccctctccacccatactccactgacggccttatcttccctttcaatcctcagggacacacgcaggacactaacacctttttcctgtgcagaacactgcggtcccttggagtgcaggtctgtcgcgtgagcgtggtgccggacgaggtggctaccattgccgctgaagtcacttccttctccaatagattcactcacgtccttactgctggaggaatcggaccaacacacgacgacgtgacttttgaagccgtcgcccaggcgtttggtgatgaactgaagccccatcctaaactcgaggctgccacaaaggcgttagggggagaagggtgggagaaactctccctggtgccctcaagcgcaaggcttcactatggtaccgatccatgcacaggccagccatttaggtttccccttgtgagcgtgagaaacgtgtatctctttcctggcatacccgagctcctacgacgggtcctcgagggcatgaagggtctcttccagaatccagccgttcaattccattctaaggaattgtacgtggcggcagacgaggccagcattgccccaatcctggcagaagcccaggcccactttggacgcaggcttgggctaggcagttatcctgattggggaagtaactattaccaagtcaagctgacactggacagcgaggaagaaggtccactggaggaatgtttggcctacctgacagcacgacttcctcagggatcattagttccttatatgccaaatgctgtagagcaggcttctgaggctgtatataaattggcggagtccggcagagacctgatggaagagggccattacgcccagtcacattggtggcaccctcgaagccagtag

SEQ ID NO: 222701 - DNA, 1341 bp, synthetic construct
  misc_feature 1..1341: note = Description of Artificial Sequence: Synthetic coding sequence
  source 1..1341: mol_type = other DNA
atgacatctagagcctccgagctgtcccccggtaggagcgtgaccgctggcataattatagttggtgatgagatcctgaaaggccacactcaggacacaaacactttcttcctttgcagaacgcttcgcagtttaggcgtccaagtgtgtcgtgtttcagtggtcccagatgaagtggccacgatcgctgcggaagtcacctcattctctaatcgcttcacacatgtgctgacagccggtgggattggaccaactcacgatgatgtgaccttcgaggcggtggcccaggcattcggcgacgagctgaagccgcaccccaaactcgaggccgctacaaaagcgctcggcggtgagggatgggaaaaactgtcgctggtgccgagctccgcacggctgcattatggaaccgacccgtgtacaggacaacccttccggtttccgttagtaagcgttcgaaacgtctacctgttccctgggatccccgaacttctccggagggtcctcgaaggtatgaagggactttttcaaaacccagccgtccagttccattctaaggagctgtacgtggcagctgacgaagcttcaatcgccccaatcctggccgaggcccaggcgcactttggcagacgtctcggtctggggtcttaccctgactggggcagtaattactaccaggttaagctgactctcgatagcgaagaagagggaccactggaggagtgtttggcctatctgaccgccagactccctcaggggagccttgtgccctatatgcctaatgctgtggaacaagccagcgaagcagtatacaaactggccgagagtggcagtagcctcggcaaaaaagttgcaggggcactccaaacgattgagaccagtttggcccaatactcccttacccaactctgtgttggattcaacggtgggaaggactgtacagcactcttgcacctgttccatgctgcagtgcagcgcaaacttccagacgtcccaaaccctctgcagatcctgtatatcaggtctattagtcctttccctgagctcgagcagtttctccaagatactataaaaagatacaacctgcagatgttggaagctgagggttctatgaagcaagccttaggggagcttcaggctcggcaccctcagctggaggccgtcctcatggggactcgccgaacggatccgtacagctgttcactttgtccattctcccctacagaccccggatggccagcgttcatgcgaatcaacccactcctagactggacttatagagacatttgggactttctgaggcagcttttcgtaccttactgtattctgtatgatagggggtag

SEQ ID NO: 222702 - DNA, 1371 bp, synthetic construct
  misc_feature 1..1371: note = Description of Artificial Sequence: Synthetic coding sequence
  source 1..1371: mol_type = other DNA
atggggtgggatctcggtacaaggttgttccagagacaggagcagagaagccgactttctcgaatctggctggaaaagacacgggtcttcctggagggaagcacccgcactcctgccctcccccactgccttttttggcttctccaggtcccctcgacacaagatcctctatttcctggctatggtccccagtgtccagtggatcttgccggtccaccgtgtctgagacctctgttcggaggcctgggaggatactggcgagctttgcagagagggagggaagggcgaactatgacttccagggcgtcagagctctcccctggccgaagcgtgaccgcaggcattattattgtcggagatgagattctgaagggtcatactcaagacaccaataccttcttcctgtgcagaactttacgtagtctgggcgtgcaggtttgtagagtttctgtggtgcctgatgaggtggcgaccatcgcggctgaagtcacctctttttccaatcggttcacccatgtcctgaccgctgggggtattgggccaactcacgacgacgtgacatttgaggccgttgcccaagccttcggggacgaacttaaaccacatccaaagttggaggccgctacaaaagcgttaggaggcgaaggatgggagaaactctcgttagtgccatcatctgcacgcttgcactatggaacagatccttgcacggggcagcccttcagattcccactggtgtctgtcagaaacgtgtatctgttccctgggattcccgaactgcttaggagagtgcttgagggcatgaagggactctttcagaacccagctgttcagtttcattctaaggaactttacgtggctgccgacgaagccagtattgcaccgattctggcagaggcccaggcacacttcggtagacgattgggactggggtcgtatcccgattggggaagcaactactatcaggtaaaactcacattagacagcgaagaagagggtccactggaggaatgtcttgcatacctgacagcgagactccctcagggttctctggtgccctatatgcctaacgccgtggaacaggccagtgaggcagtgtataagctggcggaatcgggctcgtcattagggaagaaagtggctggcgctctgcagactattgagacctctctggcgcaatattcactcacccagttgtgcgtaggctttaatggtggaaaggattgcactgcactgctgcaccttttccacgctgcggtccaacgcaagctccctgacgtgcctaatcccctgcagattctttacattcggtctatctcaccatttccagagctcgagcaatttctccaggacacaatcaaacgctattag

SEQ ID NO: 222703 - DNA, 1017 bp, synthetic construct
  misc_feature 1..1017: note = Description of Artificial Sequence: Synthetic coding sequence
  source 1..1017: mol_type = other DNA
atgcagccctccagcagtacccccccactgcatccttattctaccgacgggcttatatttcctttcaatccgcagggacacactcaggatacaaataccttctttctgtgccgaaccctgagatcgttgggcgtacaggtgtgccgggtgagtgtggtaccggatgaggtggcaacaatcgcggcagaggtcacctcctttagtaatagattcactcatgtcttgactgccggtggcatcggaccgacccatgatgacgtgaccttcgaggccgtcgcccaagctttcggtgatgaactgaagccacatcccaaacttgaagccgctaccaaggcgctcggcggagagggttgggagaaactctccctggtaccaagctccgcaagactccattacggtaccgatccatgtaccggccagccattccgtttcccactggtcagtgtgaggaacgtgtacttattcccaggcatacctgaactcctgcgtagggtactggaggggatgaaaggactgtttcagaatccagcagtacagtttcattctaaggagctgtatgttgctgcggatgaagcgtcaatcgctccaatactcgcagaggcacaggcgcacttcggacgacgcttagggctgggcagttatcccgactggggtagcaattactaccaggttaagctgacgctggattcggaggaggagggcccactagaagaatgtctcgcttacctcacagctaggttgccccaaggcagtctggtcccgtacatgcccaacgcagtggaacaggcatccgaggcagtatataagctcgctgagtctggaaattacctaatgtttcagacaccgagcaggtcctgcattagtgccgcatcaccactgagcctgtcctggaattctttttaccggacactctctagagagcaagccatcccggagaatcagattgcctcacctccatctgaagccaagggtgccgaagaaccctggatgggtcccttccccggtcaacagggatag

SEQ ID NO: 222704 - DNA, 1461 bp, synthetic construct
  misc_feature 1..1461: note = Description of Artificial Sequence: Synthetic coding sequence
  source 1..1461: mol_type = other DNA
atgatccgccgagtcttgccgcatggcatgggacgcggacttctgactcggcgtccaggcacccgtagagggggattctcactagactgggacggaaaagtttccgagatcaagaagaagatcaaatccattctgcccggtcgctcgtgtgacctgttgcaggatacttcgcacctcccaccggagcactccgacgtggtcatagtggggggaggcgttctggggctttccgtggcttactggcttaagaagctcgaatctagaaggggagctattagggtcctggtggtggaacgagaccatacctattcccaagcctccaccggactgtccgtcggtgggatctgtcagcagttctccctgccagagaatatccaattgtcactgttttcggccagtttcttacggaatattaacgagtatctcgccgtcgtggatgcccctccactagatctgcgcttcaatccgtcgggctaccttctgttagcatctgaaaaggacgcagctgctatggagagcaatgtcaaagtgcagcggcaagaaggtgccaaagtgtcattaatgtcccctgaccagttgcggaataagtttccctggattaacaccgagggtgtggccctcgcttcatatggcatggaagatgagggatggttcgacccatggtgtctcttgcagggcctgcggaggaaggtacagtccctcggcgtactgttctgtcagggagaggtgactcgcttcgtgtcttcctcgcagcgtatgctgactaccgacgataaggccgtcgtgctcaagcgcatccacgaagtgcacgtcaagatggacaggagtctggaataccagcccgtggaatgtgcaatagttataaacgccgctggggcttggtccgctcagatcgctgcgctagctggagtcggcgagggccctcccggtactctgcaggggaccaaactcccagtagagcctcggaagcggtacgtgtacgtatggcactgtccacagggtcctggtctggagactcctctcgtggctgatacaagcggtgcttattttcggagggagggtctaggctctaactaccttgggggtagaagccctactgagcaagaggagcccgaccctgcaaaccttgaagtagaccatgacttctttcaggacaaagtgtggccacatctcgccctgcgtgtgccagctttcgaaactctgaaggtgcagagcgcatgggctgggtattatgactacaataccttcgatcaaaacggcgtcgttggccctcaccccttagtagtcaacatgtacttcgccactgggttctcaggacatggactgcagcaggccccaggaataggcagggccgttgccgagatggtgctcaagggacgctttcagaccattgacctaagcccattcctgttcactcgcttttatctgggcgaaaagattcaggaaaacaacatcatttag

SEQ ID NO: 222705 - DNA, 951 bp, synthetic construct
  misc_feature 1..951: note = Description of Artificial Sequence: Synthetic coding sequence
  source 1..951: mol_type = other DNA
atggagagcaatgtcaaggtccagcgccaggaaggggctaaggtgtcgttaatgtcccctgatcagctgagaaacaagttcccatggattaacaccgaaggcgtggccctggcatcttatggtatggaggatgaaggttggttcgatccatggtgtctgctgcagggactccgacgaaaggtacaaagcctgggggttctcttttgccagggtgaggtgacacgatttgtgtcaagcagtcagaggatgcttacaaccgacgataaagctgtcgtgctgaagcgcattcatgaggttcatgtcaagatggacaggtccctcgaatatcagccagtagagtgtgctatcgtgatcaacgccgctggggcttggagcgcacagatcgccgctctcgctggcgtcggtgaagggcctcccggtaccctgcagggaaccaaactcccagtggagcccaggaagaggtatgtgtacgtttggcactgtccacagggacctgggctggaaaccccactggttgcagatacaagcggcgcttacttccggagggagggactgggcagtaattatttaggtgggcgatcccctaccgagcaggaggagcccgacccagccaacctcgaagttgaccatgatttctttcaggacaaagtctggccacatctcgctttgcgcgtgcctgcttttgaaactctgaaagtgcagagtgcctgggcaggctattatgattacaacaccttcgatcaaaatggggtggtcggtcctcacccccttgtggtcaatatgtactttgcaaccggattctcagggcatggccttcagcaggcgcctggtattgggagggccgtggccgagatggtcctgaaaggacgtttccagactatcgatctgtccccgtttttgtttacaaggttctatctgggagaaaagattcaggagaacaatatcatctag

SEQ ID NO: 222706 - DNA, 1419 bp, synthetic construct
  misc_feature 1..1419: note = Description of Artificial Sequence: Synthetic coding sequence
  source 1..1419: mol_type = other DNA
atggcccacaccgggcgaacagtcgggagactgggcgagggtgattgggatggtaaagtctcagagatcaagaagaaaatcaaaagcatactgccagggcgaagctgcgacctcctccaggatactagccatctgcctcctgaacactccgatgtcgtgattgttggtggtggcgttcttggtcttagtgtggcttactggctaaagaagctggagagtcggaggggcgctatccgggtactggtcgttgagcgcgaccatacttattcccaggcatccactggcctgagcgtggggggtatatgccagcagttcagcttgccagaaaacatccagctttccctgttcagcgctagtttcttgcgcaacattaatgagtacctggcagtggtggacgctccccctctggatctgaggttcaatccgtctggctacctgttgcttgcctccgagaaggatgcagccgcaatggagagcaatgttaaggtgcagagacaggaaggagcgaaggtgagcctgatgagccctgaccaactgcggaacaaatttccttggattaacacggaaggagttgcgctggcctcatacggcatggaggacgagggctggtttgacccttggtgtctactccagggtctgcgtaggaaagtgcagtctttgggcgtactgttttgccagggggaagtcacgcgcttcgtttcttcgagccagcgcatgctgacaactgacgacaaggcagtagtgctgaagaggatacatgaagtgcacgtcaaaatggacagatccctagagtaccagcccgtagaatgcgctatcgtgattaacgccgctggagcttggagcgcccagatcgcagcactggccggtgtaggggagggaccgcctgggaccctccagggcacgaagctgcctgtggagccccgaaaaagatatgtttacgtatggcactgtccacagggacccggactcgagacacctcttgtcgccgatacaagcggggcttacttcagacgcgaaggattagggtctaattacctgggcggacggtccccaactgagcaggaagagcctgaccccgctaatctcgaggtggatcatgactttttccaggacaaagtgtggccacatctagcgctaagggttcccgcattcgagactttaaaggtgcagtcagcctgggctggctattatgactataatacctttgaccaaaacggagtggtgggcccacacccactcgttgtgaacatgtacttcgccacggggtttagcggccacggtcttcagcaggcgcctggtattggccgagccgttgctgaaatggtcctcaagggccgattccaaaccattgacctctcaccctttctgtttacacgcttctacctcggagagaaaatccaagaaaacaatatcatctag

SEQ ID NO: 222707 - DNA, 501 bp, synthetic construct
  misc_feature 1..501: note = Description of Artificial Sequence: Synthetic coding sequence
  source 1..501: mol_type = other DNA
atggcccagaggctgctgctaaggaggttcctagcaagcgtcatctctcgaaagccgtcacaagggcagtggcctcccctgacttcgcgggctctgcagacaccccagtgcagtcctgggggtctgaccgtcactcctaacccagctcggactatttataccactcggatatccctgactacatttaatattcaggacggacctgatttccaggatcgggtggtgaattccgagactcccgtggttgttgattttcacgctcagtggtgcggtccctgcaaaattctgggaccccgactggagaagatggtcgcaaaacaacacggtaaggttgtaatggccaaagttgatatcgacgaccacacggatttagcaatcgaatatgaagtgtctgctgtgccaacagtcttggcaatgaaaaacggtgacgtggtcgacaagttcgttgggattaaggacgaggaccagctggaggcttttttgaagaagctcatcggttag

SEQ ID NO: 222708 - DNA, 2055 bp, synthetic construct
  misc_feature 1..2055: note = Description of Artificial Sequence: Synthetic coding sequence
  source 1..2055: mol_type = other DNA
atgggactctcagctgccgctcccctttggggacccccaggcttgctgctggctattgctctgcatccagccctgtccgtccctcctcgcagagattactgtgttctgggggcaggccctgctggactgcagatggcatactttttgcagcgagcgggaagagactacgctgtgtttgagcgagcccctaggcctggaagtttttttaccagataccctagacatagaaagcttatctccatcaataagcgatatactggtaaggcaaacgcagaatttaatctgcggcacgattggaactcattattgagccatgatccgagactcctgtttcggcactactcccgagcctatttccctgacgcgagagacatggtgagatatctgggggattttgccgacaccctgggactccgagtgcaatataacactactattgctcacgtcactcttgacaaggaccggcaggcctggaacgggcattactttatcctcaccgaccaaaaaggtcaggtccaccagtgtagtgttttattcgtggcaaccggactgtccgtgcccaaccaggttgacttccctggatctgagtatgcagagggctatgagtccgtgtcggtggatcccgaagattttgtgggacagaacgtgctcatcctggggagaggtaattcggcctttgaaactgccgaaaacattctaggcgtaaccaattttatccatatgctctcacggagtagggtcagactctcttgggcaacacactatgtcggggacctgcgtgctatcaataacgggctgctggacacctaccagctcaagagtttggacggcttactggagagtgatctgaccgaccttgccatcctcaaggactccaaaggtaaatttcatgtcactcctaaattttttttggaggaggcaaataccaatcaatcagccgactccataacactgccacaggacgataacgacaattttgccatgcgagttccctacgaccgcgtaattcggtgcttgggctggaatttcgacttcagcatatttaataaaagccttcgtcttaacagcggtaacgcctttgggaaaaagtaccctctaattcgcgctagttacgagagcaaaggctcacggggactatttatcctggggacagcatctcatagcgttgactataggaagtccgcagggggatttattcacggctttcgctacactgtgcgggcagtacatcgactcctggaacatcggcatcattccgtaacctggccagctactgagctgcctatcactcaactcacctcctctatcgtgcggagagtgaatgaagccagcggtctatatcagatgttcggagttctggctgacgtaatcctgctcaaagaaaattcgaccgccttcgaatatctggaagagttccctattcagatgctcgcccagctagagacgctcacgggccgaaaggccaagcatggtttgtttgtcataaatatggagtatggacgcaattttagtggccctgacaaagatgtgtttttcgacgatcgttcagtaggccatactgaagatgcttggcagtccaattttctgcaccctgtgatctactattaccggtacttaccaacagaacaggaagtgaggtttcggccagctcactggcccctgcctcgacccacagctatccatcatattgtggaggactttctgacagactggacagctcccatcggacacattcttcctctccggagattcctcgagaattgcttggatacagacctgaggtctttctacgctgaaagttgcttcctcttcgccctgaccagacaaaagctccctcccttctgtcagcagggctacctgagaatgcaggggctggtgtctacggagagcctgtggcaacaccgggttgagtcacgtttgttgcgagactatgctcccaccggcaggagactggaggacagcagtcagcagctcggggatcaggagcctctaggatcacctctggcgccaggacctttggcccagtcagtggactccaacaaggaggaattgtag

SEQ ID NO: 222709 - DNA, 2055 bp, synthetic construct
  misc_feature 1..2055: note = Description of Artificial Sequence: Synthetic coding sequence
  source 1..2055: mol_type = other DNA
atggggctgagcgcggctgctcccctgtggggacctccaggcctcctgctggcgatagctcttcatcctgccctgtctgtaccccctcgtcgcgattactgtgtgctcggcgctggtcctgcagggctgcagatggcctacttcctccaacgggcagggagggactatgctgtgtttgagagggctccacggccaggatccttttttactaggtatccgcgtcaccgaaagctgatctcgatcaataagcgctacaccggcaaagccaatgccgaatttaatttaaggcacgattggaactctctgctatctcacgatccgagattgctgttccgacactactctcgcgcttacttccctgacgccagagacatggtaaggtatctcggcgactttgcagatactctgggcttgagagtgcagtataacacaacaatcgcccacgtcaccctcgacaaggaccggcaagcttggaatggacactactttatcctgactgaccagaaagggcaggtgcatcagtgcagtgtcctgttcgtggctaccggactgagcgtccccaaccaggtggacttcccgggatccgaatacgctgagggctacgaaagtgtatcagtcgacccggaggattttgttggtcaaaacgtacttatcttaggcaggggtaatagcgccttcgagactgccgaaaacatcctgggtgtgaccaatttcatccacatgttgagcaggtctcgcgttagactgtcctgggcaacccactacgtcggagatctcagagcaataaacaatggtctgctcgacacctaccagttaaagtctctcgatggactattggagtcggatctgacagaccttgccatcctgaaagattcgaagggaaaattccatgtgactcccaagttcttcctcgaggaggctaacacgaaccagagtgccgattccatcacactcccacaggacgataacgacaatttcgctatgcgtgttccatatgaccgagtcatcagatgtctaggatggaactttgattttagtatctttaataaatcattacgacttaattcagggaacgccttcgggaagaaatatcccctgatcagagcttcttacgagtcaaaaggtagcaggggcctgtttatcctcgggaccgcctctcacagcgtggattaccggaaatccgcgggaggtttcatccacggttttcgctacacagttcgggcagtgcaccgactgcttgagcacagacaccactccgtaacgtggcctgcgactgaactgccaattacccagctgacctcaagtatcgtgcgaagggtcaacgaggctagcggtctgtatcagatgttcggcgtgctggctgatgttattctgttgaaggaaaatagtaccgccttcgaatatctcgaggagtttcccatccaaatgctggctcagctcgaaactttgacaggccgtaaggccaaacatggactgttcgtcatcaacatggagtatgggaggaatttctcaggccctgataaagacgtgttttttgatgaccgatccgtaggtcacacagaagacgcttggcagagcaactttctgcatccagttatttactactaccgttacctgcccacagagcaagaagtacgctttcgaccggctcattggcccctccctagacccactgccattcatcatatcgtggaagactttctcactgactggactgcccctatcggacacatcctaccactgagacgattcctggagaactgccttgatacagatctccggagtttctatgccgaatcttgtttcctgttcgcattaacgcgccagaaactgcccccattttgtcagcagggatacctccgcatgcagggactcgtcagcaccgagtcgctgtggcagcatcgcgtcgagtcaagactgctaagggattacgcaccaaccgggagacgcttggaagacagttctcagcagctgggagatcaggagcccctaggcagtccactcgcccctggaccgttggcccagtcagtggactcaaataaggaagagctgtag

SEQ ID NO: 222710 - DNA, 261 bp, synthetic construct
  misc_feature 1..261: note = Description of Artificial Sequence: Synthetic coding sequence
  source 1..261: mol_type = other DNA
atgggcctatcagccgctgccccactgtggggaccaccaggcctactactcgcaatagctttacacccagctctcagcgttcctcctcgtagagactattgcgtgctgggagccggtcccgctggactgcagatggcctattttctccagcgggctgggagggattacgctgtgtttgagcgcgctcctcgcccaggctccttcttcaccagatatcccaggcacaggaagttaatctcaattaataagcgatacacttag

SEQ ID NO: 222711 - DNA, 729 bp, synthetic construct
  misc_feature 1..729: note = Description of Artificial Sequence: Synthetic coding sequence
  source 1..729: mol_type = other DNA
atgtttctgctaagcggagacccttgctttaagaccccccctagtacagcaaaatccatctctatccccggtcaggattctagcttgcaactgacctgcaaggggggaggcactagctcgggcggaagctcaacaaattcgctaaccggttcccgccctccaaaagccagacctacgatactctcctcgggtctgccagaagagcccgatcaaaacctctcttcgcctgaggaggtttttcactctggacactcacgtaactctagctacgcctctcagcagtccaagatatccggatactctaccgagcactcaagaagtagtagtttgtcagacctgacacacagaagaaacaccagcacttccagcagcgcatcaggcggactgggtatgactgtggaaggccctgaaggaagtgagagagagcaccgtccacctgaaaagccgccaaggcctccacgtcctctacacctgtctgaccgctcgtttcggagaaaaaaagattctgtggaatcccatcctacatgggtggacgacactcgaatcgatgctgatgccattgtggaaaagattgtccagtcacaagactttaccgatggctcaaataccgaggatagcaatctccggctgtttgtcagccgggatggctccgcaacactcagtggcatacaactcgctaccagggtctcttctggcgtttacgaacccgtggtcatcgaatctcactag

SEQ ID NO: 222712 - DNA, 1155 bp, synthetic construct
  misc_feature 1..1155: note = Description of Artificial Sequence: Synthetic coding sequence
  source 1..1155: mol_type = other DNA
atggcatttctgatgaaaaagaagaagttcaaattccagaccacgttcactctggaagaactaaccgccgttcctttcgtgaacggagtcttgttttgcaaagtgagactacttgacggcggtgattttgtgtctctttcatcccgggaagaggtccaggagaattgcgtccgctggaggaaacgcttcacatttgtgtgtaagatgagtgctaacccagccaccggccttttggatccatgtgtatttcgtgtatctgttaggaaagagttgaagggcggtaaggcatactcaaagctcggatttgcagacttgaacttggccgagttcgccggatcaggaagtacagtgcgatgctgtctcctggaaggctacgacacgaaaaacacaagacaggacaattctatccttaaagttaccatcggcatgttcctgctctccggagatccttgcttcaaaacccctccctcaaccgctaagtcgatcagtataccgggacaggactcctcactgcagctgacctgtaaaggcggtggtacaagctcaggaggcagctctactaatagcctgactggtagccgtccaccaaaagcgaggcctacaatcctgtccagtgggctccctgaggagccggaccagaatttgtccagcccggaggaggtttttcactctggtcacagcagaaactcctcttacgcctctcaacaatctaagatctccggttacagtacggaacattcacgctcctcgagcctgtcggacctaactcacaggcggaatacttccacgtcctcatcagcttccgggggtctggggatgacagtggagggaccagagggcagtgagcgcgaacatagacctccagaaaagcctcccagaccgccacggcctctgcacttgtcggacagatccttccgtcggaagaaggactccgtcgagtcacacccaacatgggtcgatgataccagaattgatgccgacgccattgtcgagaagatcgtgcagagccaggatttcactgacggaagtaacacagaagattcaaatctaaggctgtttgtgtccagggacggatcagccactttatcgggcatccagttggccacacgagttagtagcggagtgtacgagcctgtcgtcatagagagtcactag

SEQ ID NO: 222713 - DNA, 435 bp, synthetic construct
  misc_feature 1..435: note = Description of Artificial Sequence: Synthetic coding sequence
  source 1..435: mol_type = other DNA
atgtattctgaaattcagagagagagagccgatatcggcggacttatggcaagaccagaataccgggaatggaaccccgagctcataaagccaaaaaaactcctgaacccagtgaaggcatccagatcacaccaagaactgcatcgagaactgctgatgaaccacaggcgaggactcggcgtcgattctaagccggaactgcaaagggtgctggaacacagacgcaggaatcagctcattaaaaagaagaaagaagaactggaagcaaaaaggcttcagtgcccattcgaacaggaactgctaaggaggcagcaacgcctgaaccagcttgaaaagccacctgagaaggaagaggatcatgcccctgagttcattaaggtgcgtgagaatttacgcagaattgcgaccctcacaagcgaggaacgcgaactctag

SEQ ID NO: 222714 - DNA, 435 bp, synthetic construct
  misc_feature 1..435: note = Description of Artificial Sequence: Synthetic coding sequence
  source 1..435: mol_type = other DNA
atgtattccgaaatacagagagaaagggctgacatcggaggactgatggcacggccagaataccgcgagtggaatcccgaactgattaagcccaagaaactgctcaatccagtcaaagcatcacgctcccaccaggagctgcatcgagaacttctgatgaaccatcgcagaggactaggcgtcgactctaagcccgaactgcagagggtgcttgagcacagaagaaggaaccagctgatcaagaagaagaaggaagagcttgaagctaagcgactccagtgcccctttgaacaggagctcctgcggaggcagcagcggttgaatcagcttgaaaagccaccggaaaaggaggaagaccatgcgcctgaattcattaaagtgcgcgagaaccttcgccgaatagccacattgactagcgaggagcgggagctgtag

SEQ ID NO: 222715 - DNA, 519 bp, synthetic construct
  misc_feature 1..519: note = Description of Artificial Sequence: Synthetic coding sequence
  source 1..519: mol_type = other DNA
atggcccagcggctgggagagtgggcacgaggcccttcagatgccactgggctctatcgcgctgtgctcctccggtcagcagccatgtacagcgagattcagagagagagggctgacatcggagggctcatggcaagacccgagtacagggagtggaaccccgagctcattaaacctaagaagttactaaatccagtcaaggcttcccgatcacaccaggaactccatagagaattactcatgaatcacaggaggggtttaggagtggactctaagcctgaactgcagagggtgcttgaacacagacggagaaaccaactaattaaaaagaaaaaagaggaacttgaggcaaagcgcttgcaatgtcctttcgaacaagagcttctccggagacagcaaagattaaaccagttagagaagccgccagagaaggaagaagatcacgcacccgaatttatcaaagttcgcgagaacctgcgaagaatcgcaaccctgactagcgaggaaagggaactttag

SEQ ID NO: 222716 - DNA, 408 bp, synthetic construct
  misc_feature 1..408: note = Description of Artificial Sequence: Synthetic coding sequence
  source 1..408: mol_type = other DNA
atgtacagcgagatccagagggagagagccgacatcggaggcctgatggcgagaccagagtaccgagagtggaatccggaactaatcaagcccaaaaagttgctcaaccccgtgaaggcatcgaggagtcaccaggaacttcatcgagagttgttaatgaatcatcgcaggggattaggcgtggattcgaaaccggagctgcaacgtgtcctggaacatcggaggagaaaccagcttattaagaagaagaaagaagagctcgaagcaaagcggctgcagtgcccctttgagcaggagttgctgagacggcagcagcgtttgaaccaggtcggggatgggcaccctgccggtaccacacacccaccaggactgtcctcaagagaggaactttgctgcggccattcatag

SEQ ID NO: 222717 - DNA, 318 bp, synthetic construct
  misc_feature 1..318: note = Description of Artificial Sequence: Synthetic coding sequence
  source 1..318: mol_type = other DNA
atgtactctgagatccagcgggaacgggcagacatagggggactcatggccagaccggagtaccgcgagtggaacccagaactgattaagccaaaaaagttactaaatcccgtgaaagcctcccgctcccaccaggaactgcatcgggagttgctcatgaatcacaggaggggactgggcgttgatagcaagcccgaactccagcgtgtccttgagcaccgccgtcggaaccagttgatcaaaaaaaaaaaagaggagctggaagcaaagcgtctccagtgtccattcgaacaggaactgcttcggcgacagcagtag

SEQ ID NO: 222718 - DNA, 528 bp, synthetic construct
  misc_feature 1..528: note = Description of Artificial Sequence: Synthetic coding sequence
  source 1..528: mol_type = other DNA
atgggggcagcccaggggaaaaagaaaacatattctccccaggcccgtttccactcagaaaatgaaaagcagcgcagaaatggatccgccgctatgtatagtgaaatacagagggaaagagctgacataggtgggcttatggcaagacccgaatatcgtgagtggaatcccgagctcatcaaaccaaagaagttgcttaatccagttaaagcctcccgctcgcaccaggagctgcacagggaacttttgatgaatcacagacgcggtttgggggtggactccaaacctgaattacaacgggttttggaacatcggagacgcaatcaattaattaagaaaaaaaaagaggagctggaggcaaaaaggctgcagtgcccatttgagcaggagctactcaggagacagcagcggctgaatcaactcgaaaaacccccagaaaaggaagaagatcacgcaccagaattcatcaaggtgagggaaaatcttaggcgcatcgcgacactgactagcgaagagagagaactctag

SEQ ID NO: 222719 - DNA, 789 bp, synthetic construct
  misc_feature 1..789: note = Description of Artificial Sequence: Synthetic coding sequence
  source 1..789: mol_type = other DNA
atggcgcctggttcacctccaggccctgccatcgctactatgaagttaaatgaacggtccctggctttttacgctacatgtgatgcccctgttgataacgcgggatttttgtataagaagggcggtcggcacgccgcttaccatcggagatggttcgttctccggggtaacatgctgttttatttcgaggacgcggcttcccgcgaaccggtgggtgtgatcattttagaagggtgcactgtggagctggtggaggctgccgaggagtttgcctttgcagtgaggttcgccggaacacgcgcaagaacttatgtgttggcagccgagtcccaggacgcaatggaggggtgggtgaaggctctaagccgcgctagttttgactaccttagactcgtggtacgggagctggagcagcagcttgcggctgtgagaggcggtggtggcatggctctcccgcagccccagccccagtcactcccactccccccaagtctgccatccgctttggcgcctgtcccatcgctgcctagcgctccagcccctgtccctgccttacccctgccaaggcgtccttctgcactgccacctaaggaaaacggctgtgccgtgtggagtacagaagccactttccgacctggacctgagcctccccctcctccaccccgaagaagagcttctgctccccacggtcccctggatatggccccatttgcgagactgcatgaatgctacgggcaggaaatccgcgctttgcgcggacaatggctgtcctccagagtgcaaccctag

SEQ ID NO: 222720 - DNA, 750 bp, synthetic construct
  misc_feature 1..750: note = Description of Artificial Sequence: Synthetic coding sequence
  source 1..750: mol_type = other DNA
atgaaacttaacgagcgaagtctcgctttctacgctacctgtgacgctcctgtggataacgctgggttcctgtacaagaaagggggaagacacgccgcataccacagaagatggttcgtcctgcgtggcaatatgttattctacttcgaagacgccgcatctcgcgaacctgtgggcgtaattatcctcgaaggctgtaccgttgaattggtggaagccgctgaggagttcgcctttgctgtgagattcgcaggcaccagagcaagaacgtatgtcctggcagcagagtctcaggacgccatggagggttgggttaaagcattgtctagggcctccttcgactacttaaggttggtcgtcagggagctcgaacagcagttagctgcggtgcggggtggcggagggatggctttgccccaaccccagcctcagagtttgccactgccaccctccttgccgtccgcactcgcccctgtgccatcactgccctccgcgccagcgcctgttcctgccctgcccctacctagaaggcctagcgcccttccccctaaggagaacggatgtgccgtatggtccactgaagcgacattcagacccggtcctgagccccctcctccacctcccaggaggagagcttctgccccacacggccctttagacatggcaccgttcgctcgactgcacgaatgctacggccaggagatccgggctctgcgcggacagtggctgagctcacgagtccagccttag

SEQ ID NO: 222721 - DNA, 267 bp, synthetic construct
  misc_feature 1..267: note = Description of Artificial Sequence: Synthetic coding sequence
  source 1..267: mol_type = other DNA
atgaaactcaacgagcgttccctcgctttctatgcgacttgcgatgctcccgtcgataacgccggttttctgtataagaaaggcggaaggcatgctgcctaccacagacggtggtttgtgctcagaggtaacatgctgttttattttgaggacgcagcatctagggagcctgtgggtgttatcattttggtggctgtcgccttgtggccgagagccctaagcgtgtccccatggtggcttagtcagggttctccagacacaccttag

SEQ ID NO: 222722 - DNA, 849 bp, synthetic construct
  misc_feature 1..849: note = Description of Artificial Sequence: Synthetic coding sequence
  source 1..849: mol_type = other DNA
atgcaagctagctgcacccgacgagtgggcggaacaaggcctaccacaggagccggatcatgctgtgctgggacttgcagctccacgagccgaactttgcccgctgtttccccgtgggccagcagttcgtggcgtgccgctctctggtcctggtggcggcctccacgtagctctccctctctgtgcgcccttagaggtcccggtagagctccgacttgctggccccttcgtgtgaggatgccttggagggccggaagcaggccctgccgagtgcctgcaagtaccacttgtgggtggtggtgtgcatcatggtctagctcctggagactctacgtggcaggtgtggcctggccttgccctagcccatcaccttctccatgcccatgtcctaggccatgtccactcccctggccccagagccacccgtgtctcctgccccaacccagatcacagccttgtccctgccctgctggccctgttccatcaaggccaagaagaatggccgcattaagcggagccttgagacctccatctggcctcgatccctcacccctgcaccataggttggcagccggtcctagacaccctaccggaccttggacctggccgccttcccctggttgcactagcgccatggccaggcgaagtggcccttgtgtcgcctccggatccgcggctggatcaagtcctgaggcaacccgcgctcccgtcttaggaggccacaaactgtatgcactgtgggataggccaggacctggagagaccggtggcgcagatcccgaaggtaatcacggccaggggtggccgcctggcccagagtggcctggttttggaggctgcagactctag

SEQ ID NO: 222723 - DNA, 354 bp, synthetic construct
  misc_feature 1..354: note = Description of Artificial Sequence: Synthetic coding sequence
  source 1..354: mol_type = other DNA
atgaagttaaacgagaggtctcttgccttttatgcgacttgcgacgccccagttgacaacgccggttttctgtataagaaggggggaaggcatgccgcttatcacagaagatggttcgttctcagaggcaacatgctgttttacttcgaggacgccgcatcccgagaacccgtgggcgtgattattctggaagggtgcactgtggagctcgtcgaggccgctgaagagtttgcctttgctgtccgcttcgctgggactcgcgctcggacgtacgtattggctgccgagtcccaagatgccatggaggggtgggtaaaagccctgtcacgcgcttccttcgactacctccggtag

SEQ ID NO: 222724 - DNA, 750 bp, synthetic construct
  misc_feature 1..750: note = Description of Artificial Sequence: Synthetic coding sequence
  source 1..750: mol_type = other DNA
atgaagcttaatgagcggtcactcgccttttacgcaacctgcgacgcccctgtagacaatgctggcttcctgtacaagaaaggcggaagacatgcggcataccatcgcagatggtttgttctgagaggaaacatgctgttctactttgaagacgctgctagccgggagcctgtaggcgtgattatcctcgaaggctgtacagtcgaacttgttgaggctgctgaggaattcgcatttgctgtccgttttgccggtaccagagccagaacctatgttctcgccgcagagagccaagacgcaatggagggttgggtgaaagcgttgtcccgtgcgagctttgattatctccgactcgtggtgagggagctcgagcagcagctcgccgcagtaaggggcggtggaggcatggcgctgccccagccacagccacagagtctccccctcccgccatcgttaccttccgcccttgcacctgtaccaagccttccctccgctccagcccctgtccccgcacttcctctgccaagacgaccctccgccctgcctccaaaagaaaacggctgcgctgtgtggagcacggaagccacttttcgccctgggcctgagccccctccaccacccccaaggcgacgtgcttctgcgccacacggccctctggatatggccccatttgctagattgcacgagtgctacggccaggagatccgggcactcagaggccagtggctctctagccgcgtccagccttag

SEQ ID NO: 222725 - DNA, 750 bp, synthetic construct
  misc_feature 1..750: note = Description of Artificial Sequence: Synthetic coding sequence
  source 1..750: mol_type = other DNA
atgaagctgaacgagagatcattggccttctacgccacctgcgacgcccctgttgacaacgccggtttcctgtataagaaggggggtaggcatgctgcataccacaggaggtggtttgttctgcggggaaatatgctgttttacttcgaagacgcagcctctcgtgaacccgtaggcgtcattattttggagggctgtactgtggagctggttgaagcagccgaagaatttgctttcgcggtgcggttcgctggaacccgcgcaagaacatacgttttggcagctgagtcccaggacgctatggagggctgggtaaaggccctgtcccgagcctcctttgattacttaagattggtcgttagagagctagagcaacagctagccgctgtcagaggcggaggaggcatggccctcccacagccccagccacagtccctgccacttcctcctagtttgccatctgccctggccccagttccgagccttccttccgctcccgcaccagtcccagctctgccattaccaaggcggccaagtgcacttccccctaaagagaacggttgtgcagtgtggtctaccgaagcgacatttcggcctggcccagaacctccaccaccaccgccaaggcggagggccagtgcccctcacggaccacttgatatggctccgtttgctagattacacgaatgttatgggcaggagattcgtgcactcaggggccaatggctcagctctcgggttcagccatag

SEQ ID NO: 222726 - DNA, 225 bp, synthetic construct
  misc_feature 1..225: note = Description of Artificial Sequence: Synthetic coding sequence
  source 1..225: mol_type = other DNA
atgaaactgaatgaaagaagtctcgctttctatgctacctgtgacgctccagtcgataatgccggattcctctacaagaaagggggacgccacgctgcttatcatcggaggtggtttgttctgagagggaacatgctgttctacttcgaggatgccgctagccgcgagcctgtgggagtgataatcctggagggatgcaccgtggagcttgtcgaggccgcatag

SEQ ID NO: 222727 - DNA, 243 bp, synthetic construct
  misc_feature 1..243: note = Description of Artificial Sequence: Synthetic coding sequence
  source 1..243: mol_type = other DNA
atgaagctcaacgagagatccttggcattctacgctacttgcgatgctcctgtggacaacgcagggtttttgtacaagaaggggggtagacacgccgcataccaccgcagatggttcgtgctaagagggaatatgctgttttattttgaggacgctgcctcaagggagcccgttggcgtgattatcttagaagggtgtactgtagagttggtggaggccgctgaggagtttgctttcgcctag

SEQ ID NO: 222728 - DNA, 780 bp, synthetic construct
  misc_feature 1..780: note = Description of Artificial Sequence: Synthetic coding sequence
  source 1..780: mol_type = other DNA
atgaaacttaatgaacgctctgtggcacactatgcgctttccgactcaccggcagaccatatgggtttcctgcgaacgtggggaggtcccggtacacctccaaccccgagtggaacaggcaggagatgttggttcgtacttaagggcaatcttctgtttagctttgagtcccgggaggggcgagccccactgtctttagtggtccttgagggctgtactgtggaacttgccgaggccccagtgcctgaagagttcgcctttgccatctgtttcgacgcgccaggggtaagaccgcatttgttagctgccgaagggccagctgctcaggaggcatgggtgaaagtccttagtcgagcctccttcggctacatgagactcgtggtgagagaattagaaagtcagctccaagacgcaagacagtccctcgctctccagaggagatcgagttggaaaagtgtcgcaagtcggtgtaagccacaggcccctaaccatcgggcagcgggtctcgaaaacggtcattgtctgtctaaggactcctcaccggtcggtctagttgaggaagccggaagccggagcgctggttggggtctggctgaatgggaactgcagggccctgccagcctgctcctgggcaaaggtcagtcccccgtatcccctgagaccagttgcttttccacgctgcacgactggtatgggcaggaaattgtggagctgcgacaatgttggcagaagcgcgctcagggtagccacagcaagtgtgaggagcaggaccgcccttag

SEQ ID NO: 222729 - DNA, 327 bp, synthetic construct
  misc_feature 1..327: note = Description of Artificial Sequence: Synthetic coding sequence
  source 1..327: mol_type = other DNA
atgaaactcaatgaaagatctgtcgcacactacgcgctcagtgacagccccgcagaccacatgggcttcctacgaacctgggggggacccggaacaccccctacgccaagcggaacaggtaggcggtgttggtttgtgctgaagggcaacctgttgttttcattcgaatctcgggaaggccgagcccctttgtctttggttgtcctggaaggctgcaccgtcgagctggcggaggcgccagtcccggaggaatttgctttcgcaatctgtttcgatgcacctggggtcagaccccacttgctggcagccgagggcccagcagcttag

SEQ ID NO: 222730 - DNA, 729 bp, synthetic construct
  misc_feature 1..729: note = Description of Artificial Sequence: Synthetic coding sequence
  source 1..729: mol_type = other DNA
atgaccattcccggaggaaccccatcactaaagatcctctggcttaatcaggaaccggaaattcaagttaggagactcgacacactgctcgcatgttttaacctgtcgagtagtcgcgaagagcttcaggctgtggaaagtcccttccaagctctgtgctgcctattgatttacttattcgtgcaagtggatactctgtgtttggaggacctccacgcctttatcgcccaggcactctgtcttcagggcaagagcacctctcaactggtcaacctgcagccagactatatcaatcccagggccgtgcagctgggttctctgctcgtgaggggcctgaccacactcgtcctggtcaattccgcgtgtggattcccatggaagaccagtgatttcatgccttggaatgtcttcgacgggaagctgtttcatcagaaataccttcagtcagagaaaggatacgccgttgaggtgctgctggagcaaaaccgtagcagactcactaagttccataatttgaaagccgtcgtatgcaaggcctgcatgaaggaaaatagaaggatcacggggagagcccactggggatctcaccacgcaggacgctggggtaggcaggggtccagctaccaccgaaccggctctggctacagtcggtccagccagggccagccctggcgcgatcagggccctggatcccggcagtacgagcacgatcagtggaggagatactag

SEQ ID NO: 222731 - DNA, 2733 bp, synthetic construct
  misc_feature 1..2733: note = Description of Artificial Sequence: Synthetic coding sequence
  source 1..2733: mol_type = other DNA
atgggtgtacgcggactgcagggattcgttgggagcacatgcccacatatatgcacagttgtgaattttaaggaactcgctgaacatcatagatccaagtaccccggttgcacccctaccatcgtggtggacgcaatgtgttgccttagatattggtacacccctgagtcgtggatatgtggtggccagtggagagagtatttcagtgcactcagagattttgtgaagaccttcacggccgcaggaatcaagttaatcttctttttcgacggtatggtggagcaggacaaaagagatgaatgggtgaagagaaggctcaaaaacaaccgggaaatatcccgcattttccactacattaaatctcacaaagagcaacctggcagaaatatgttcttcattccaagcggcctggctgtgtttacaaggttcgccttgaaaaccctgggacaggagacgctgtgcagtctgcaggaggctgattatgaggtagctagctatggcctacagcacaattgcctgggaatactgggcgaggacaccgactatctgatctacgatacgtgtccctacttttcaattagcgaactctgtctggagagcctggatactgttatgctttgccgcgagaagttgtgcgagtcattgggcttgtgtgtggctgacctacccctgctagcctgtcttttgggaaacgacatcatccccgaagggatgttcgagagctttcgctataagtgcctgtccagctacacctctgtgaaagagaattttgacaagaagggcaatatcatcctggccgtgtccgatcatatcagtaaggtgctttatttataccagggcgaaaagaaactggaagaaatcttgcccctcggtccaaacaaggccctattctacaaaggaatggcaagctacttacttcccggtcagaagagcccctggttctttcaaaagccgaaaggagtcatcactctggacaagcaggttatttcaacatcgagtgacgctgagagccgggaggaggtcccaatgtgcagcgacgctgaaagtagacaggaagtgccaatgtgcaccgggccagagagcagacgagaggtcccggtttacacggattcagagcctcgtcaagaagtgccaatgtgcagcgaccccgaacccaggcaggaggtaccgacctgcactggcccagaatcccggagagaagtccccatgtgctccgatcccgaaccgcgacaggaagtaccaatgtgcaccgggccagaggccaggcaagaagtgccaatgtacaccgacagcgaacctcgtcaagaggtcccaatgtacaccgactcggagccccgtcaggaagtgcctatgtacaccggaagcgaaccgcgtcaagaagtccccatgtacaccggcccagagtcccggcaggaagttcctatgtataccggtcctgaatctcgtcaggaagtgctaattagaactgaccctgagtccagacaagagattatgtgcactgggcacgagtcaaaacaggaggtccccatctgcacagatccaatctccaagcaggaagactcaatgtgcacccacgcagagataaaccaaaagctgcctgtcgcgaccgactttgaattcaaactagaagccctgatgtgtaccaatccagagattaaacaggaggaccctaccaacgttggccctgaggtgaaacaacaggtgactatggtttccgacactgagatcctcaaagtagcacgaacccaccatgtgcaggccgagtcttacctggtctataacattatgagcagcggggagatcgagtgttcaaataccctcgaagacgagttggatcaggcacttccatcacaggctttcatctatagaccaatccggcagagggtgtattcactgctattggaagactgccaagatgtgactagcacatgcctagcagtcaaggagtggttcgtgtaccccggtaatccattgcgccaccccgacctggtcagacctcttcaaatgacaattccaggcggaacgccgtccctcaagatcctgtggctgaaccaagaaccagagatccaggtgcgtcgtctggacaccttgctggcatgtttcaatttgagctccagccgggaggagttacaggccgtcgagagtccattccaggccttgtgttgcctgctcatctatctttttgtgcaggttgacacgctctgcctcgaggacctccatgcttttatcgctcaggccttatgtctgcagggaaagtccacaagccaacttgtcaacttacaaccagactacattaaccccagggcagtccaactgggctccttactggtcagaggcctgacaaccctggtccttgttaattccgcctgcggttttccttggaaaacgtccgactttatgccatggaatgtattcgatggcaagctctttcaccagaaatacttgcagagtgaaaagggctatgccgtggaggtgctgctggaacagaacaggtctagacttacgaagtttcataacctgaaagctgtggtatgtaaggcctgtatgaaagagaaccgacgcatcactggcagggcccactggggctctcaccacgccggacggtggggccgacagggtagctcctatcacagaacgggaagtggctactctagaagctctcagggtcaaccttggcgggatcagggacccggaagccgacagtacgagcacgatcagtggagacggtattag

SEQ ID NO: 222732 - DNA, 2802 bp, synthetic construct
  misc_feature 1..2802: note = Description of Artificial Sequence: Synthetic coding sequence
  source 1..2802: mol_type = other DNA
atgtttggacccagaggcagtacttctgcaggtgcagggcgtaaagagattctgagtcgatcctctgtcatgggcgttaggggtctgcagggctttgtggggagcacctgcccccacatatgtaccgtggtgaatttcaaagagcttgcggagcaccacagaagcaagtacccaggctgtacaccaacaattgttgtggatgcgatgtgctgcttgcggtactggtacacacccgaatcatggatttgcggtggacagtggcgggagtactttagtgccctgcgggattttgtgaagactttcaccgccgctggcattaagctcatttttttttttgatggaatggtggagcaagacaagagagatgagtgggttaaacgaagactgaaaaacaatcgtgaaatctcccgaatctttcattacattaagagtcacaaggaacagcccggtcggaatatgttcttcattccatctggtctcgcagtgtttacacgcttcgccctgaaaacacttggccaggagaccctgtgctctctgcaggaagctgactatgaagtcgcttcctatggcctgcaacataactgcttggggatcctgggggaagacaccgactacctgatctacgatacatgtccatattttagtatctcagaattgtgcctagagtctctagacactgtgatgctgtgtcgggagaaattgtgcgagtctttgggtttgtgcgtcgccgacctcccactccttgcatgtcttttagggaatgacataatacccgaagggatgtttgagtcattccgttacaagtgtctgtcaagctacacctcggtgaaagaaaatttcgataaaaaaggtaatattattttggccgtcagcgaccacatctcgaaagtgctgtacctgtatcagggtgagaagaagctcgaagagatcctcccactgggacccaacaaggccctgttctataaagggatggcctcatacttgctccccggtcagaaatccccttggttctttcagaagcctaagggggtgattacgttggacaagcaggtaatctccaccagctcggacgccgaatctagagaagaggttcctatgtgttccgacgctgagtcacgccaggaggtgccaatgtgtactggcccagaaagccgcagagaagtaccagtatacaccgactcagagcctcgccaggaggtgcctatgtgcagtgatcctgagcctaggcaggaagtgcctacatgcactgggccagagtctcgtcgggaggtacctatgtgctccgaccctgaacccaggcaggaggtccccatgtgtacagggcctgaggcaaggcaagaggtgcctatgtatacagattctgaaccgaggcaggaggttccaatgtacaccgactccgaacctcgccaggaagttcccatgtatactggcagtgagcctcgtcaggaagtgccgatgtacactggacccgaaagtcggcaggaggtgccaatgtacaccggtcccgaaagtcgccaggaagtgctcatccggacggaccccgaatctaggcaggagatcatgtgcaccgggcatgaaagtaaacaggaggtgccaatttgcacagaccccatcagtaaacaagaggactctatgtgcactcatgcggaaatcaatcagaagctgccagtggcaacagatttcgagttcaaactggaagctctcatgtgcaccaatcctgagatcaaacaggaagatcctactaatgtgggcccagaagttaagcagcaggttacgatggtgagcgacactgagattctgaaggtagccaggacccaccacgtgcaggcagaatcctacctggtttacaacattatgtccagcggagagattgagtgcagcaatacgcttgaagatgagctagatcaggcactaccttcccaggcgttcatatacaggcctatccgccaaagagtgtattccctgctcctggaagactgtcaggacgttacctcaacctgcttggccgttaaggagtggtttgtgtacccagggaatcctctgagacacccagacctcgtacgaccactacaaatgacaatcccaggcggtacaccgagtctaaagatcctctggctaaaccaagaacctgagatccaggttaggagactggacaccctgctggcttgcttcaatctgagttcgtccagagaggaacttcaggccgtggagtctcctttccaagccctctgttgcctccttatctacctctttgtgcaagtggacacattatgcctggaggaccttcatgctttcatcgctcaggctctgtgcctgcagggaaaatccacttctcagctcgtgaatctgcagcccgattacatcaacccacgggctgtgcaattgggcagtttgttggttcgagggttgaccaccctcgtgcttgtgaactccgcctgcggttttccatggaagacctcagatttcatgccgtggaacgtctttgatggcaaactatttcatcagaaataccttcaaagcgaaaaggggtacgccgttgaagtcctactagagcagaatcgcagcagactgaccaaattccataaccttaaggccgtggtgtgcaaggcctgcatgaaggagaaccggcgaataacaggtcgagcacactgggggagtcaccatgcgggacgctggggccgtcagggctcctcgtaccacagaacaggcagtgggtattctaggtcatcccagggccaaccttggcgagaccagggacccggatcacgacagtatgagcacgatcaatggagaaggtattag

SEQ ID NO: 222733 - DNA, 2769 bp, synthetic construct
  misc_feature 1..2769: note = Description of Artificial Sequence: Synthetic coding sequence
  source 1..2769: mol_type = other DNA
atggacaggcagatgatcctgtctagaagcagcgttatgggggttcgcggactccaagggtttgtgggctccacctgcccacatatctgtacggtggtgaacttcaaggaactcgctgaacaccatcggtcaaagtatccgggatgcactccgaccatcgtggtggatgcaatgtgttgtctgcgttactggtacacacctgagtcctggatctgcgggggtcagtggagagagtatttctccgctctgagagattttgtaaaaaccttcactgccgcagggattaaactcatattctttttcgatggaatggtggaacaggacaagcgtgatgagtgggttaaacgacgactgaaaaacaacagggaaatctcacgtatcttccactacattaagtcccacaaggagcagccgggtagaaatatgtttttcatcccctcaggactggctgtgttcactcggttcgccctgaagaccctgggacaagagacactttgtagcctgcaggaggccgactatgaggtggcatcgtacggtctgcagcacaactgcctggggatcctgggagaagatacagactacctcatctatgatacctgcccatacttcagcattagcgaactttgcctggaatctctggatacagtgatgctctgcagagagaagctctgcgagtctctgggcttgtgtgtggccgacttgccgctacttgcttgtcttttagggaatgatataataccagaaggcatgttcgagtcctttcgatacaagtgtctgagcagctataccagtgtcaaggagaatttcgacaagaaggggaatattattttggctgtatccgatcatataagcaaagtgctgtacctgtatcagggagagaagaaactcgaggagattctgcccctggggccaaataaagccctattctacaagggtatggctagctatctgttgcccggacaaaaatcaccatggttcttccagaaacccaagggggtgataaccctcgacaagcaggttatctccacttcttcggacgccgagtctagggaggaagtgcctatgtgtagcgacgcagagagtcggcaggaagtacctatgtgcaccgggccagagtcacggagggaggtgccagtttacaccgactccgaacctcgccaagaggtgcctatgtgtagtgatcccgaacccagacaagaggtgcccacctgcactggtccagagagtcggcgagaggtgccaatgtgttcagatcccgagcccaggcaagaggtacccatgtgtacgggaccggaagctagacaggaagtacctatgtatacagacagcgaaccacgacaggaggttcctatgtatacagactcagagccccgtcaggaggtacccatgtacacagggtcggaaccaagacaggaggtccccatgtacacagggcctgaaagcagacaggaggtccctatgtataccggccctgagtctcggcaagaggtgctgattagaactgatcctgaaagccggcaggaaatcatgtgcaccggtcatgaatccaaacaagaagtgcccatctgcaccgaccccatttctaagcaggaagatagcatgtgcacacacgccgagatcaatcaaaagttacccgtggccaccgactttgaattcaagttggaggcgctgatgtgcactaatcccgagattaaacaagaagaccctacgaatgttgggccagaagtcaaacagcaggtgaccatggtcagcgacaccgaaattctgaaggtcgcacgcacacatcatgtgcaagcagagagctatctggtctataatatcatgtcgtccggagagatcgaatgttctaatacgctggaagatgaactcgaccaagcactaccctcacaggcctttatttaccgtcctatcaggcagcgagtgtatagcctcctcctcgaggattgccaggacgtcaccagcacatgtctcgccgtgaaagagtggttcgtctaccccggaaatcccttaagacatcccgaccttgtgaggcccctgcagatgacaattcccggtggtaccccatcacttaagattctgtggctgaaccaggaacctgagatccaggtgcgcagactcgataccctgctggcctgctttaacctttcaagttcccgcgaagagctccaggcggtcgagtcaccatttcaagctctgtgttgtttactgatttatctgttcgtccaggtcgataccttgtgcctggaggacctgcacgcatttatcgcccaggcgctctgtctgcaggggaagtccacctctcagctcgttaacctccagcctgattatatcaatcctagagctgttcaactcggctctctgttagtacggggacttaccaccctcgtactggtaaactccgcctgcggcttcccctggaaaactagtgactttatgccgtggaacgtgttcgacggcaagctgttccaccagaagtacctccaaagcgagaaaggctatgccgtggaagtgctattggaacagaatagatcccggctgacaaagttccataacctgaaggctgtcgtgtgcaaagcttgcatgaaggagaataggcggatcaccggcagggctcattggggatctcatcacgcaggacggtggggacgacaggggtctagttatcatcggaccggcagcggttactcccgctccagtcagggccagccgtggcgggatcagggaccaggctctcggcagtacgaacacgaccagtggcggcgttactag

SEQ ID NO: 222734 - DNA, 3291 bp, synthetic construct
  misc_feature 1..3291: note = Description of Artificial Sequence: Synthetic coding sequence
  source 1..3291: mol_type = other DNA
atgggagttcagggttttcaggagttcttggaaaaacggtgccctggcgctgtggtccctgtcgacttgctgaagctggctcggaccgtgagccggcagcagcagcagcagcatctgcaccggcagctgccacccaccgccgctctcgcgcctggggctcccagggccgcaagagggagcgtgcccctccagccccctcttcctcctgctgccctcggtgcctactctggtggcgcaggtcctatcaggcaccaccatcctgcacatcattttcatcatcacggtcaagcccaacctggcctgcatcctcctctgccaccaccccctccccctcagctgccgggagccagggtgctggtcgacgctggcagcgcccttcctcgtctctacggaggataccaaactgactgggtttgcggtgggcagtggaacgccatgttagggtacctaagcgcactgtgtcaagcttgcgcgtatcctggaggggacggactggagctggtcgttatgttccctggcggtctcggcaaagacagattggcggaatgggggaggcgttgccaggccgaacggcagaccgctcagctcatcgtggggcacgttggaaacaaagggaccccacctcccagagcctggtttctcccaccagcttgtctgagccactgtgtcagactggctcttatcagattccgcgtcaaggtctttcagtcactggaggatcaccatttagaagtggtagccttcttccgcgagaatggatttcacggcctgttggcacacgacagtgaatacgctttgtacaatattcctagctactattctagtcatgccttaaagctgtcttggaatggcaagaatctgaccacaaaccagtttctcatgcaggaggtagctaaacaattagggctgaagcgaatgaacttcccgatcttcgccgctctccttggcaaccacatcctgcctgacgaagacctggccgcttttcactggtcactgctgggccctgaacaccctctcgcctctctgaaggttagagcccatcaattagtgctacccccatgcgacgtggttatcaaggccgtgtcagagtacgtgagctccatcaaggatccttcaaacctggatgtggtgggtaaggacgtgttcaagcagagccaaagcaggacagaagacaaaatcgaaagattcaagaaggccgtggaatattattccgtgacgactaaactgagtagtcttccagtcgggccaagcttccttggattccggaacaaccgattgggcaaccccccactccctcggaatcaggtggggactattagcgcaggcaaaccaatgttttcacaccaggtgcctcagaaagtaaaataccccccaccatttcccgtcggaccaaatagcagtctgttattctcgagtcacgccttgggcgagtcccacgccttttctgaagaccccatgttgcagaattctcctttcgccaactgggcggttagctacgattccagtgccagtcagttccccaattacctcccaagtaaagcttcaccccctttaggccctgacagtagccacagttcctccagcgacggcgatgagcccaatggtgccagcagcgatcatattacggaggcttttcatcaccagcctgagtggggtaacccaaacagggatcgtgggagttgggctcagcctgtggataccggggtgagtgaggcctcactgggcgacggggaacctcacatccctagcctgctgtccatgtcgacccggaatcatatggatattaccattcctccactccccccagtggccccagaggttctaagagtcgctgagcatagacatagacggggtttgatgtatccttacatctatcatgtcttgacaaaaggagagatcaagattccggtctgcattgaggatgagtgcaacatggagctgccgccagccgcactcctcttcaggagcgcaagacagtacgtctacggggtgctctttagcttagctgagacccaacggaaaatggaaagactggcaatgagacgcagactgccagtggaggttccctctgtaatcctgaaggaatggagcgcctacaagggcaagtcaccacagacccccgagctagtgtccgcattaactttcagggagtggacttgccctaacctgaaaaagctatggttaggaaaagctgtggaggacaaaaatcgcaggatgagggcctttctggcctgtatgaagtcagacacccctagcatgctgaacccggcaaatgtgccaacacacctcctgctgatgtgttgtgtgttaagatacatggtccaatggcctggtggtcgtattctgcaccggcacgagttagacacttttctggcccaagctgtctcgacacaactgtatgagccagacaggctccaggaattgaaaatagagaagctggacgctcggggaattcagctagccgcactgttcatgtccggggtcgacactgcattgttcgccaacgacgcctgcggtcagcctgtcccttgggagcattgttgtccctggatttacttcgacggcaagctgtttcagtctaaactcattaaggccggtcgagagagggtgtctctggtggagctttgtgatggccaggccgacctggccactaaagtcgaaaaaatgcggcagtccatactagagggcgtgaacatgaaccatccaccaccaagcgcactgctgccgagcccaacattcgtcccccctatggtgccctctctgtaccccgtcagtctctatagccgcgctatgggttccatgcctctcccaccgcaaggacgatctaggggattcgcgggtctgcaccctatcccaccccagggcggaaaactggaaatcgctggcatggtggtgggtcagtgggctggctcccggagttcgcggggaaggggctccttcggcatgcaggtggtttcagtcgggggacccggaaaaggccacggcaaagaacagactggtaggggcagcaagggacacaagaagggaaataaacagggctcttcggatggcgtgtcgaaatctcttgaactccaccaggggaggagccgaagtcaggtcaatggcaactcaggtgctctcatcaaggaggaaaagtctgaccacaggctccccgctccaagtcaatgtgccctgtcccgggacagcaacgagtgcaacaatgggaatagatatttgcccatgaacaaccgagagaagaatcacttgcaagaacagaaactcgaaactgtggctcaaaggaaagaggactag

SEQ ID NO: 222735 - DNA, 717 bp, synthetic construct
  misc_feature 1..717: note = Description of Artificial Sequence: Synthetic coding sequence
  source 1..717: mol_type = other DNA
atgggcgtgcaagggttccaggaatttctcgagaagcggtgtccaggagctgtcgtgcctgttgacctgctgaagctggcccgaactgttagtcgccagcaacaacaacaacatttacaccggcagttgccccctacggctgctttagcaccgggagcacccagagccgcacggggatcggttcctttgcagccccctctgccccctgctgccctcggtgcctacagtggcggagctgggccaatcaggcatcaccacccagcgcatcactttcaccatcacggacaggcgcagccgggactgcaccccccactgcctccaccccctcctccccagctccctggtgctagagttttggtggatgccggatcagccttgcctcgtctgtacgggggttatcagacagactgggtatgtggcggacaatggaacgctatgcttggttacctcagtgcactatgccaggcctgcgcctacccgggaggagatggactcgagctcgttgtgatgttccccggagggctaggtaaggaccggctggccgaatggggcagacgctgtcaggcagagaggcagaccgctcagttgattgtgggacacgtgggcaataagggcactccccctccaagagcctggtttctgcctcctgcctgtctgagccattgtgtcaggctggccttgatcagatttcgcgttaaacaggcagccatgttgtag

SEQ ID NO: 222736 - DNA, 3408 bp, synthetic construct
  misc_feature 1..3408: note = Description of Artificial Sequence: Synthetic coding sequence
  source 1..3408: mol_type = other DNA
atggagacccaaaaggacgaggccgctcaggccaaaggcgcagctgcatctgggagtacccgcgagcagaccgcagaaaagggtgccaaaaataaggctgcggaagccaccgaaggaccgacaagcgaaccttcctcaagtggtcccggaagactgaagaaaacagccatgaaactgtttggaggcaagaaaggcatctgtacacttccttctttcttcggcggtggacgcagcaagggctcaggtaagggttctagcaagaaaggactaagcaaatccaagacccacgatggtctgtctgaagcagctcacgggccagaggacgttgtatctgagggaaccgggttctccctacccctgcccgaattaccttgtcagtttcctagcagccagagcgcccacggcgcactcgagactggctctaggtgtaagacttctgtcgctggggctaccgagaaggcggtggcagagaagttcccctctatgccaaaacctaagaagggattaaaaggcttcttctcaagcattcggagacatcgtaagagcaaggtgacgggcgctgagcagagcgaacccggagccaaggggccagagcgtgtgcgggctaggccacatgagcatgtgtcgagtgctccacaggtcccatgctttgaggagactttccaggcccctagaaaagagaacgccaatccccaggatgccccaggccctaaagtgtcccctacaccagaacccagccctcctgctaccgaaaaaatggcatgcaaagaccctgagaagcctatggaagcttgcgccagcgctcacgtgcagccaaagcctgcgccagaagccagtagtcttgaggagcctcactctcctgagaccggggagaaggtggttgctggagaagtgaaccctcccaacgggcctgttggcgaccctctgagtctcctctttggcgacgtcactagcttaaaatccttcgacagtctcacggggtgcggcgacatcatcgccgaacaggatatggactctatgacggactctatggcctccggtggccaaagggcaaaccgtgacgggacgaagaggtccagctgcctagttacttaccaggggggaggggaggagatggccctgcctgacgacgacgacgaagaggaggaggaagaagaagaggttgaacttgaggaggaggaagaagaggtaaaagaggaggaggaagacgatgatctcgaatacctgtgggaaacagcacagatgtatcccaggcccaatatgaatctgggctatcatcccaccacttcccctggacatcacgggtatatgttgttggatcccgtgcgctcgtaccctgggctcgctcctggagagttactaacgccgcagagtgaccagcaagagtccgccccaaacagcgatgagggctactacgattcaactacgcccggatttgaggatgacagcggagaggctctcgggctcgtccggagggattgcctcccgcgagattcgtacagtggggatgctctgtatgaattctacgagcctgatgactccctggaaaattctcccccaggggacgactgcctctatgaccttcatggtcggtccagcgagatgttcgatccgttccttaactttgagccttttctgtcctcccgacctccgggagccatggagacggaggaagagagattggtgaccattcagaagcaactgttgtactgggagctgcggagggagcagcttgaagctcaggaggccagggcccgtgaagcccacgccagagaggcccacgctagagaagcatacactcgcgaggcttacggcagagaagcctacgctcgggaagcccacacttgggaagcccacggcagggaggcgaggactcgagaggcccaggccagagaagtccgatgtagggagacacaggtccgagaaacccaggctaggcaagaaaaacccgtcctggaataccaaatgcggcctttggggccatccgtaatggggctcgcagctggcgtgtcgggcacgagccagatcagtcatagaggcatcacatctgccttcccaactacagcatcctcagaacctgactggagagatttccggcctttggagaaaagatatgagggaacctgttccaagaaagaccaatccacttgcctcatgcaattgtttcaatccgacgccatgttcgagccagatatgcaggaagctaattttggcggtagccccagaagagcctacccaacatactcacctccagaagacccagaagaggaggaagtcgaaaaagagggcaacgctacagtcagctttagccaggccctagtagagttcacttccaatgggaatctcttcagcagtatgtcgtgttcaagcgatagtgacagctcatttactcaaaacctccctgaactcccccctatggtcacgttcgacattgccgatgttgagagagacggggaaggaaaatgtgaagagaatcctgagttccataatgacgaggacctagctgccagtctggaagccttcgaactaggatactatcacaagcacgcttttaacaactaccactccaggttttatcagggcctgccctggggcgtttcctctctgccacgttaccttgggctgcccggactgcaccccaggccaccgcctgctgcaatggccctgaaccgacggtcacgcagcctggacacagcagagaccctggaaatggaactctcgaatagtcatctggtgcagggctacttggaatcagacgaattacaggcgcagcaggaagactcggatgaggaggacgaggaagaggaagaaggagagtggtccagagattcacctctgtcactgtacacggagcctcctggagcctatgactggcccgcatgggcaccttgtcccctccccgtcggtccaggcccagcctggatcagtcccaaccagttggataggccgtcttcacagtccccctatcgacaggctacctgttgtatacctccaatgacaatgagcatcagtctgagcgttccagagtctcgcgctcctggcgagagcggcccacagctggcacgcccttcccacttgcatctgcccatgggcccttgttacaacctgcagccccaagcctcgcagtccatgagggcacgccctcgcgacgtcctgttgcccgtcgatgagccaagctgttctagttcatccgggggattctctccgagccccctgcctcaggcaaagccagtgggcataacacacggcattccccagcttcccagagtgcggccagagcacccgcaaccacagcctacacactacggaccttcttcactggacctatcgaaagagagagctgaacagggcgcttccctggcaacctcatactcgagcacggccatgaacggtaaccttgcaaagtag

SEQ ID NO: 222737 - DNA, 2415 bp, synthetic construct
  misc_feature 1..2415: note = Description of Artificial Sequence: Synthetic coding sequence
  source 1..2415: mol_type = other DNA
atggagacacagaaggatgaggccgcacaggccaagggcgcagccgcatccggttccacaagagagcaaacagcagagaaaggagctaaaaataaagccgcagaagctaccgaaggccctacttctgagccgagctcttcaggccctggcagacttaaaaaaacagccatgaaacttttcggaggtaaaaaaggcatatgtacattaccctctttcttcggagggggacgctccaagggcagtggcaaggggagtagcaaaaaagggttgtctaagagcaaaacacacgatggcttatcagaagctgctcacggccctgaggatgtggtctccgagggtacgggatttagcctccccctccccgaactgccgtgtcaatttcccagttcacaatcggcacacggggcactggagactggttccaggtgtaagactagcgtggcaggggcaaccgaaaaagctgtggccgaaaagttccccagtatgccaaaacctaaaaaaggattgaaagggttctttagttcaatccgccgtcatagaaaatccaaagttaccggagcggagcagtcagaacccggagccaaggggccagaaagagttcgggcacggcctcacgagcatgtgagctccgcacctcaggtgccttgttttgaagagactttccaagcaccacggaaagaaaatgccaacccccaggatgctcctggcccaaaagtgagccctacccctgaaccttccccacccgcaacagagaagatggcgtgcaaagacccagagaagccgatggaggcttgtgcctccgcgcacgttcaaccaaaacccgctcctgaagcgagtagtctggaggagccccattctccagagacaggcgaaaaggtcgtggctggcgaggtcaaccccccaaacggaccagtgggagatcctttgtcactgttatttggcgatgtgacttcactgaagagcttcgacagtcttactgggtgcggagacataatcgccgagcaagatatggatagcatgactgactcaatggcgagcggcggtcagcgtgcaaacagagatggcactaagagatcatcctgtctggtgacctatcaggggggaggggaggaaatggctttgcccgacgacgacgatgaggaagaggaagaagaggaggaagtggagttggaggaggaggaggaggaggtaaaggaggaggaggaagatgacgatctagaatacctgtgggaaaccgctcagatgtacccaaggcctaacatgaatctagggtatcaccccacgacttccccgggtcatcatgggtatatgctccttgaccctgttcggtcctacccaggcctcgcccctggcgaactgctgaccccgcaatcagaccaacaggagagcgccccaaactcagacgagggctattatgactcgaccacccctggcttcgaggatgacagcggcgaggcccttggtctggtgcggagagattgcttacctagggacagctattccggcgacgctctgtacgaattttacgagcccgatgactctctcgaaaattctccaccgggagacgactgcctttatgacctccatggccgtagtagtgagatgttcgatccatttttgaattttgaaccttttctcagctcccgtcctccaggggcaatggagacagaggaagagcggctggtgacgatccaaaaacagttgctttattgggaactgaggcgagaacagctagaagcccaggaggctcgggctcgggaggcccacgccagggaggcccatgccagagaggcctatacacgagaggcttacggcagggaggcctacgcgagagaagcgcacacgtgggaagctcacggacgagaggcacggactcgcgaagctcaggcacgagaggtgcgatgtagagagacgcaggttagagagacgcaggcacgacaagagaagcccgtcctagagtatcaaatgaggcccctcggcccttccgtgatgggactcgctgctggggtcagcggcacctcccaaatctcacaccgagggattaccagtgcttttcccaccactgcaagttccgagcccgactggcgcgactttagacccctggagaaacggtatgaaggcacgtgcagcaaaaaagaccaatcaacctgcctcatgcagttgtttcagagcgatgctatgttcgaaccagacatgcaagaagccaactttgggggttcccccagacgggcatatccgacgtacagtcccccagaggaccctgaggaagaggaagtggagaaggaaggcaatgccactgtatctttcagccaagccctagtggaatttaccagcaacggcaacctctttagttctatacgatgccccggtaccgaagacaaacgccaagtgacacaagcatgtgggacatggtag

SEQ ID NO: 222738 - DNA, 1566 bp, synthetic construct
  misc_feature 1..1566: note = Description of Artificial Sequence: Synthetic coding sequence
  source 1..1566: mol_type = other DNA
atgtttaccagcgagaaaggcgtggtggaggaatggctgagcgagttcaagacgttgcccgagacttcactgcctaactacgcaactaatctcaaagataagagctcattggtttcttccttatacaaagtgatccaggaacctcagagcgaactgttggagcctgtgtgccatcagctcttcgaattctatcgctccggcgaggagcaactcctgcagttcactctgcaatttctgcccgaacttatatggtgctacctggctgtgtccgcttccagaaacgtgcacagctccggttgtatcgaagcactgcttctcggagtgtacaatctcgaaatcgtagacaaacagggccataccaaggtgctgagctttaccatcccttctctgtccaagccgtcagtgtatcacgaacctagttcaattggaagcatggcgctgacagagtccgcgctgtctcagcatggtctatcgaaggttgtgtattcaggtccacacccccaacgggaaatgctcactgcacagaatcggttcgaggtgctgacgttcctcctgctgtgttataacgctgccttgacatacatgcccagcgtttctctacaatccctttgtcagatctgcagccgcatttgtgtttgcggttatcctcgccagcatgttaggaaatataagggcatttcttcccggattcccgtctcatccggctttatggtgcagatgctgactgggatctatttcgcgttttacaacggagaatgggatctcgcacagaaggcgctcgatgatattatttaccgtgcacaactggagctctacccagagccattgctggtggccaacgctatcaaagcctccttgcctcacggacccatgaaaagcaacaaggaaggtacacgctgcatccaggttgaaattacccccaccagctctcgcataagtagaaatgccgtcacttctatgagcattcggggacaccggtggaagcgacatgggaacaccgagttgaccggccaggaggagctgatggaaattagcgaagtggacgaaggtttctattctcgggctgcgtccagtacttcccagtcaggcctgagcaatagtagtcataactgctccaataagccttcgatcggcaagaatcacaggcgctctggcggtagcaagacaggaggcaaggagaaggagaccacaggagagtcatgcaaggaccatttcgctaggaaacaaactcagagagcacagtcagagaacttagagctgttgagtctcaaacgcctgaccctgactactagccagagtttgccaaagccgtcctctcacggcctggctaaaaccgccgctactgttttctccaaaagttttgaacaggtgtctggcgtgactgttccacataacccaagcagtgcagttggctgcggcgctggaacggatgcgaaccggttcagtgcgtgctctctgcaggaggagaagctaatatacgtgtctgaacgcacagaattaccgatgaagcaccaatcgggccagcagcggccacccagcatctctatcacgctgtctacagactag

SEQ ID NO: 222739 - DNA, 342 bp, synthetic construct
  misc_feature 1..342: note = Description of Artificial Sequence: Synthetic coding sequence
  source 1..342: mol_type = other DNA
atggacggcagggtgcagctgattaaagcacttctcgctctgcccataagacctgccacacggagatggagaaaccctatcccctttccagaaaccttcgacggcgatacagacagactgccagaattcatcgtgcaaactggctcctacatgttcgtggacgagaatacctttagcagcgacgctctgaaggtgacattcctcataactagactgaccgggcctgccctgcagtgggtgatcccgtatattaagaaagaatctccactgctcaatgactatcgtggctttttagcagaaatgaagagagtcttcggttgggaagaagacgaggacttctag

SEQ ID NO: 222740 - DNA, 2241 bp, synthetic construct
  misc_feature 1..2241: note = Description of Artificial Sequence: Synthetic coding sequence
  source 1..2241: mol_type = other DNA
atgggcgacgtgctgtccacacacctggacgatgctcggaggcagcacatcgcagagaagactggcaaaatccttaccgagtttctacagttttatgaagatcagtacggcgtggccttgttcaacagcatgagacatgagattgaagggacaggactaccccaggcccaattgctgtggagaaaggtgcctcttgatgagagaatcgtattctccggtaatctgtttcagcatcaggaagattctaagaaatggagaaacagattcagcctggtcccccataattatgggttagtcctgtatgagaacaaagcagcctacgaacgccaggtcccacccagggcagttatcaacagtgctggttataagatcctaacatctgtggatcagtacctggagttgattgggaacagcttacccggaaccacggccaaaagtgggtcggctcctatactcaagtgcccgacccagtttcctctcattctgtggcatccctacgctcgacattactacttttgcatgatgaccgaagctgagcaggacaagtggcaagccgtgttgcaagattgtatcaggcattgcaataacggcatccctgaagactcgaaggtcgaaggaccggcatttacagacgcaatacgcatgtatagacagagcaaagaactctacggaacatgggagatgctgtgtggaaatgaggtgcagattctgtccaacctggtgatggaagagttgggaccagagctgaaggccgagctcggaccacgcctgaaggggaaaccacaggagcgtcagagacagtggatccaaatcagcgacgccgtgtatcacatggtgtatgagcaagccaaggccaggttcgaggaggtcttaagcaaggtgcaacaggtgcagccagctatgcaagccgtgattcggacagatatggaccagattatcaccagcaaagaacatctggctagcaagattcgggcatttattctgccaaaggcggaggtgtgtgtacggaaccatgtccaaccttatatcccctccattcttgaggcactcatggtccccacgagccagggcttcacggaagtcagggacgtctttttcaaagaggtgaccgatatgaacctgaatgtgattaatgagggaggcattgacaagctcggcgaatatatggagaagctgtcccgtctggcataccatcccctgaagatgcagtcctgttatgaaaagatggaaagcctccgactcgacggattacagcagaggttcgatgtgtcctctacttccgtatttaagcagagagcccagattcacatgcgcgaacagatggacaacgctgtgtatacgttcgagacattacttcaccaggagctgggcaaaggacctacaaaagaagagctctgcaaatccatacagcgagtactggaacgggtcctcaagaaatatgattatgactcgtcaagcgttcggaagcgtttctttagggaggccctgttacagatctccatcccatttctgttgaagaaactggcgccaacgtgtaagtctgagctccctcggtttcaggaattaatatttgaagactttgcccgattcatcttggtggaaaatacttatgaggaggtcgtcctgcagactgtcatgaaggatattcttcaggcggtgaaagaagcagcagttcagcggaaacataacctgtatcgggattcaatggtgatgcataattccgatcctaacctccacctgctagcagaaggggctccaatcgactggggagaagaatactccaattcaggcggaggaggatccccttcaccatcgaccccggagtctgccactctaagcgagaagaggcgccgagccaaacaggtcgtatccgtggtccaggatgaggaagtggggttgccctttgaggctagcccagagtcacctcccccagccagccctgatggcgtgactgagattaggggattgctggcgcaaggcctccgcccagagtctccccctccagcaggaccattgctaaacggagcgcctgccggagagtctccgcagccaaaggctgctcccgaagcctccagtccgccagcctccccgctgcagcacctgctccctgggaaagccgttgatctcgggcctcccaaaccatcagatcaagaaacgggcgaacaagtcagctccccgtctagccaccccgcactccataccaccacagaagattcagctggagtgcaaactgaattttag

SEQ ID NO: 222741 - DNA, 2202 bp, synthetic construct
  misc_feature 1..2202: note = Description of Artificial Sequence: Synthetic coding sequence
  source 1..2202: mol_type = other DNA
atgggatggatgggagagaagactggcaagatcctgacagaattcctgcagttctacgaggaccaatatggagtggcactcttcaatagcatgcgccacgagatagaaggaaccggcctcccccaggctcagctgctgtggcggaaagtgccccttgacgagcgcatcgtgtttagcggtaatctctttcagcaccaagaggactctaagaagtggaggaacaggttttctctggtgccccataactacggcttggtcctatacgagaacaaggccgcatacgaaagacaggtccctccccgtgctgtgattaatagtgctggatataagatcctgacctccgttgatcagtatcttgaactgatcggtaattcacttcccggaacaacagcaaagtccggcagcgctccaattttgaaatgcccaacccagttcccactgatcttatggcatccttacgccagacattactatttctgcatgatgacggaggcggaacaggataagtggcaagctgtcttacaggattgcatcagacactgtaataacggcatcccagaagactctaaggttgagggtccagcttttaccgacgccatacgaatgtatcgacaaagtaaagaattgtatggcacatgggaaatgctgtgcggtaacgaggttcagatcctctccaacctcgttatggaggagctagggccagagctgaaagctgaactcggccctcgcctaaaggggaaaccccaggagcggcaaagacagtggatccagatcagcgacgcagtctatcatatggtctatgagcaggctaaagcaagattcgaagaggtgctttctaaggttcagcaggtacagccggctatgcaagcagttatcagaaccgatatggaccagatcatcaccagcaaggaacacctggcatccaagattagagccttcattttgccaaaggccgaagtctgcgttcggaaccacgtgcagccatacatccccagcattctggaggccctcatggttccgacaagtcaaggctttaccgaagtgagagacgtgttcttcaaggaggttacggacatgaacctgaatgttattaatgagggcggaatcgataaattaggcgaatacatggaaaaattgagccggctggcttaccacccactcaagatgcaaagttgctatgaaaagatggaatctctccggctcgatggcctgcaacagagatttgacgtgagcagtaccagtgtgtttaaacagcgggctcagatacacatgagagagcagatggacaatgccgtgtacaccttcgaaactcttcttcaccaagaattgggtaagggtccaacaaaagaggagttgtgtaaatctattcagcgtgtactagaacgcgtgctgaaaaagtatgactacgattcctcaagcgttagaaagcgtttttttagggaagcgctcttgcagatatcaataccattcctcctgaagaagctggctccgacgtgcaagagcgaactgcctcggttccaggaactgatttttgaggattttgcccgttttatattggtcgagaacacatatgaggaagtggtgcttcaaaccgttatgaaggatatcctccaggcggtgaaggaggccgctgtgcagcggaagcataatctctaccgggattcgatggtcatgcacaattcagatccaaaccttcacctgctagccgagggtgccccaatcgattggggcgaagagtacagcaactcaggcggtggaggtagcccatcccctagcactcccgagtcagctacgctaagtgaaaagcggaggagggccaagcaggtagtaagtgtcgtccaggacgaagaggtcggtctgccctttgaagcatcaccagaatccccaccgcctgcgagcccggatggggttacggagatcagaggcctcttagcccagggtctgcgccctgagtctcctccacccgcaggccctctgctcaacggcgctcccgctggagagtctccgcaaccaaaagcagccccagaggcatcttctccacctgcgagccccctgcagcacttgctgcctgggaaagccgtcgatctaggcccaccaaaacctagcgaccaggagactggggagcaggtaagctcgccctcctcacaccccgcactccacactaccactgaagactccgccggtgtccagaccgaattctag

SEQ ID NO: 222742 - DNA, 1191 bp, synthetic construct
  misc_feature 1..1191: note = Description of Artificial Sequence: Synthetic coding sequence
  source 1..1191: mol_type = other DNA
atggtacctacctctcagggttttacagaggtgagggatgtgtttttcaaagaagttaccgatatgaacctgaatgtcattaatgaaggaggaatcgacaaactcggggagtatatggagaagctgtcccgacttgcctatcaccctttaaagatgcagtcctgctacgagaaaatggaatccctgagacttgatggcctccagcaaagatttgacgtgtccagtaccagcgtgttcaaacaacgggcacagattcacatgcgcgaacaaatggacaacgctgtgtacaccttcgaaactctgttgcaccaggagctgggcaagggtccaacaaaggaagaactgtgtaagtcaatacaaagagtcctagaacgcgtgctcaagaagtatgactatgactcctcaagcgtcagaaaacgatttttccgcgaagctctgctgcagatctcaattcccttcctgcttaaaaaactcgccccaacgtgtaagagtgaactgccaaggtttcaggagctgatcttcgaagacttcgccagatttatattagtggaaaatacctatgaggaagttgtgctgcaaactgtgatgaaggacatcttgcaagctgtgaaagaggcagctgttcagcggaaacacaatctgtacagggattccatggtgatgcataactccgatcccaacctacacctgttagccgagggagctccaattgactggggggaagagtattcgaattccgggggaggcggttctccatcaccatcaacaccagagtccgccaccctctctgaaaaaagacgcagagccaagcaggtggtatctgtcgtgcaggacgaagaagttgggttaccctttgaggcgagccccgaaagcccaccccctgctagcccagacggcgtaactgagattagaggcctgttggcccaaggtctgcgacctgagtctccgcctcccgctgggccactccttaatggcgcaccagcaggggaatctccccagcccaaggcggctccggaagcctcatctcccccagcctctcctctgcagcacttacttccaggcaaagctgtggacctgggccctccaaagcctagtgaccaggagacaggagagcaggtaagttccccatcaagccaccctgcactgcatacaacgaccgaagattccgctggggtacagactgagttttag

SEQ ID NO: 222743 - DNA, 3072 bp, synthetic construct
  misc_feature 1..3072: note = Description of Artificial Sequence: Synthetic coding sequence
  source 1..3072: mol_type = other DNA
atgggggcaggagccctcgccatctgtcagtctaaagcagcggtgcgactgaaggaagatatgaagaaaattgtggcggtgccactgaacgagcagaaagacttcacctatcagaaactgtttggagtctctttgcaagagcttgaacggcagggactcacggaaaacggaattcctgccgtcgtttggaacatcgtagaatatctgacacaacacggtcttacacaagaagggctgtttcgcgtaaatgggaatgtgaaagtcgttgaacaactgagactgaagtttgagtcaggagtacctgtggagctcggcaaagatggggacgtgtgtagcgctgctagcctcttaaagctcttcctgcgcgagttgccagatagccttattactagcgccctgcaaccgcgttttatccaattattccaggatgggagaaatgatgtgcaggagtcctccttgcgcgatctcataaaagagcttcccgacacccattattgtctgctgaagtacctgtgccagttcctcacgaaagtcgccaagcaccatgtgcagaatcggatgaatgttcacaacctggccacagtgtttggcccaaattgcttccacgttcctcccggattagaagggatgaaggagcaagacctctgcaataaaatcatggcaaagattctggaaaattataacactctttttgaagtcgaatacacagaaaacgatcacctgagatgtgagaatctcgcacggctgatcatcgtcaaagaggtgtactacaagaattcattaccaattttattgaccaggggactagaaagagatatgcctaagccacccccaaaaactaagatcccaaagagcagatcagagggatccattcaagcccaccgcgtgctccagcctgagttaagcgacgggatcccccagctctccctgaggctgagttatagaaaggcttgcctggaggatatgaattcagccgagggcgcaatttcagccaagctcgtcccgtcatcacaagaggacgagcgcccacttagcccgttctacctgtcagcccatgtgcctcaggtgtcaaatgtatcagccaccggcgagctcctcgagagaacgatccggagcgctgtagagcagcatctttttgacgtaaataacagcggcggtcagtctagcgaagactcagagtccggcaccctctctgcttcttcagcgactagtgccaggcaaagacgcaggcagtccaaggaacaagatgaggtgagacatgggcgagataaaggactcattaataaggagaatacgcccagtggattcaaccaccttgatgactgtattctgaacacacaagaggtcgaaaaagtccacaaaaacacattcggttgcgccggtgagagaagcaagcctaagcgtcagaaatcctctacaaaactgtcagaactgcacgacaatcaggatgggttggttaacatggagtcgctcaactctaccagaagccacgaaagaaccggccctgacgacttcgaatggatgtctgatgaacggaaaggaaatgagaaggacggcggacatacccaacacttcgagtctcccaccatgaagatacaagaacatcccagtttatccgacaccaagcagcagcgcaatcaggatgctggcgaccaggaggagtcctttgtctccgaggttccccaaagtgaccttaccgcactgtgcgacgaaaaaaactgggaggagcctattccagcattcagcagttggcaaagagagaattccgatagcgatgaggcccacctcagccctcaggccggaaggctgatcagacagcttctcgacgaggatagtgatccgatgctttcgcccaggttctacgcttacggacagagtcggcagtaccttgacgacactgaggtcccaccttctccacccaactctcactcatttatgagaaggcgcagtagcagtttgggttcctacgatgatgagcaagaggacctcacccctgcacagctcacccgaaggattcagtcactgaagaaaaagataaggaagttcgaagatcgcttcgaagaagaaaagaaatataggccatctcacagcgataaagccgctaaccccgaggttctcaagtggactaatgatcttgccaagttccgcagacagctgaaagagagtaagctgaaaatttcagaggaggaccttacaccaagaatgagacagagatccaatacccttccaaagagcttcggttcccagctggaaaaagaagatgaaaagaagcaggaactcgtcgataaagccatcaagccttcagttgaggccacccttgagtccatccagagaaagctccaggagaagagagccgagagtagtcgacccgaagacatcaaagatatgacaaaggatcaaattgctaatgaaaaggtagctctgcagaaagctttattgtactatgagtcgattcacggcaggcctgttacaaaaaacgagagacaagtcatgaagcccttatacgacagatacaggttagtgaagcagatcttgagcagggcgaatacgattccaattattgggtctccaagtagcaaaaggcggtctcctttgttgcaaccgattatcgaaggcgagacagcgagtttcttcaaggaaatcaaagaagaagaagaaggttcagaagatgatagcaatgtgaagcctgatttcatggtgacgctcaagaccgacttctccgctagatgtttcttagatcagttcgaggacgatgccgatggtttcattagcccaatggatgataaaattccttctaagtgttctcaggatactgggttgagtaatcttcatgccgctagtatccccgagctcttagagcacctccaagagatgagagaagagaagaagcgcattcgaaagaagcttcgggacttcgaagacaacttttttagacagaatgggaggaacgttcagaaggaggataggacccccatggctgaggaatattccgagtacaagcacatcaaagctaagttgcgcctgcttgaagtcctcatctcaaagcgagacaccgacagtaaatcaatgtag

SEQ ID NO: 222744 - DNA, 2010 bp, synthetic construct
  misc_feature 1..2010: note = Description of Artificial Sequence: Synthetic coding sequence
  source 1..2010: mol_type = other DNA
atggcttgtgaaataatgcctttgcaaagctcgcaggaggatgagcgccctctgtccccattctacctctccgcacatgtcccgcaggtcagcaatgtctcagctaccggagagctattggaacgcaccattcgaagtgccgttgaacaacatctcttcgacgtgaacaatagcgggggtcagagcagtgaagactccgaatcaggaacattatctgcctccagtgccacctccgccaggcagagaaggaggcagtcaaaggagcaggatgaggttcgccacggtcgggataaggggctcatcaataaggaaaataccccttctggttttaatcaccttgatgactgcattctaaatacccaggaagtggagaaagtgcataagaataccttcggatgtgcaggtgaaagatcaaaaccaaagaggcagaagtcctctacaaaactttcagaactgcatgacaatcaagacgggctagttaacatggaatctttaaacagcactcgatcacacgagaggacagggcctgatgatttcgaatggatgtccgatgaaagaaagggcaatgaaaaagacggagggcacacgcagcacttcgaatcccctaccatgaagatacaagagcatccgtctctgagcgataccaaacaacagcggaaccaggacgccggagatcaggaagagtccttcgtttcggaggtgcctcaaagtgaccttaccgccttatgtgacgagaagaactgggaggagccgatcccagccttctcttcctggcagcgcgagaactccgatagcgatgaggcacacctctctccccaagccggacgactcattcgtcaactgctggatgaagactccgaccccatgctctcgccgaggttttatgcttacggacagagccggcagtatttggatgacaccgaagttcccccttccccaccaaactcacactcattcatgaggcgtagaagtagcagtctcggctcctacgatgacgagcaagaagacttgacaccggctcagctgactcgcagaattcagagtctgaaaaagaagattcgcaagtttgaggatcgatttgaagaggagaaaaagtatcggccaagccacagtgataaggccgctaacccggaggtcctgaaatggacaaatgacctcgctaaattccgtagacagttgaaagaaagcaagctcaagatcagcgaggaggatttgaccccacgcatgagacagagatctaataccctccccaagtccttcggatcccagctggaaaaggaagacgaaaagaagcaggaactggtggacaaggccataaagccctcggttgaggcgacactggagagtatccaacgtaagcttcaagagaagagggcagaatcctcccggcctgaggacattaaggacatgaccaaggaccagatcgcgaacgagaaagttgctctgcagaaagccctactgtactacgaatcaatacacggccgtcccgtgaccaagaacgaacgacaagtaatgaaacctctatatgatcggtatcgtctggtgaagcaaatcctgtctagagccaacacgattccaataatagaagaagaggaaggttcagaggacgatagcaacgtcaagcctgactttatggtaacgttgaaaacagacttcagtgccaggtgtttcctcgatcagttcgaggacgatgcagatggatttattagccccatggacgacaagattccatctaaatgttcccaggatactggcctgtctaaccttcatgcagctagcatccccgagctgttggaacatcttcaggaaatgcgtgaagaaaaaaagaggatacgtaaaaagctgagagactttgaggataacttctttcggcagaacggtagaaacgtgcagaaggaagaccgaactccaatggccgaagaatacagtgaatacaagcacataaaggccaaacttcggctgctcgaagtgctgatatcaaagagggatacggatagcaaatcgatgtag

SEQ ID NO: 222745 - DNA, 2094 bp, synthetic construct
  misc_feature 1..2094: note = Description of Artificial Sequence: Synthetic coding sequence
  source 1..2094: mol_type = other DNA
atggcttgcgaaatcatgcccctgcaatcttcacaagaagatgaaagacccctgagccctttttacctctctgctcacgtccctcaggtgagcaacgtctccgctaccggcgagttgttggaacgaaccatccgcagcgccgtggagcagcacctctttgatgtgaataatagtgggggacagtcttccgaggacagcgagtctgggacattatcagcctccagcgctacgagcgcacggcaaagacgacgccagtccaaagagcaagatgaggtacgccatgggcgtgacaagggacttatcaataaggagaatactccgagtggattcaaccacttggacgattgtatcttgaatactcaggaggtggaaaaagtccacaaaaacacgttcggatgtgccggagagagatccaaacctaaacgccagaagagctccaccaaactatccgaactgcacgacaatcaggatggcctcgtcaatatggagtcccttaacagtaccaggagccacgaacggactggaccagatgatttcgaatggatgagcgacgaaaggaaaggaaacgagaaagatggagggcatacccaacactttgagtctcccacaatgaagatccaggaacatcccagtttatctgacacgaagcaacaacgcaaccaggacgcaggtgaccaggaagaatcatttgttagcgaagtgcctcagagcgatttgacagctctgtgcgatgaaaagaattgggaggagcccattcctgccttttcgagctggcaacgcgagaattctgacagtgatgaggcccacctgtcccctcaggcaggccgacttatccgccagctgctcgatgaagactcggacccaatgttgtccccccgtttttacgcctatggccaatcccggcaatatttagacgacaccgaggtgcctccttctcctcccaacagtcatagctttatgcggcgaaggtcgtcttcactggggagctacgacgatgagcaggaggatctgacccctgcccagttgacgaggagaatccagtcattaaagaaaaaaatccgcaagtttgaggaccggttcgaggaagaaaagaagtacagaccatcacatagcgacaaagcggctaatccagaggttctgaaatggaccaacgacctggctaaatttcgccgtcagctgaaagaatccaaacttaaaatttccgaagaggatctgacccctcgcatgaggcagagaagcaacacccttcctaagtctttcggctcccagttggagaaagaagacgagaagaagcaagaattagtcgataaggccattaagccttcagttgaggcaacattggagtcaatacagcgaaaactccaggagaaaagggccgagtccagccggcctgaggatatcaaggacatgacaaaagaccagattgccaacgaaaaggtagccttgcagaaggcactcctgtattacgagtccatacacggccgacccgtgactaagaacgagcgccaggtcatgaaaccactgtacgaccggtatagacttgtgaaacagatcctgtcccgggcaaacaccattcccattatcgggagccccagctcgaaacggcgatcacctttattgcagccgataatagaaggcgaaacagccagcttcttcaaggagatcaaggaagaggaggaaggctccgaggacgactccaacgtaaagcccgactttatggtgaccctgaagactgatttttccgcaagatgctttctggaccaattcgaagatgacgccgacggctttatctccccgatggacgataagatcccatctaaatgctcacaggacaccggactcagtaacctgcacgcagcttccatccctgagctgcttgagcacctacaggagatgcgagaggagaaaaaaagaattagaaaaaagttgagagattttgaggacaactttttccgccagaacggcagaaacgtccagaaggaggatcgcacgcccatggccgaagagtatagcgagtataaacacataaaagccaagctgcgcttactggaggtactgatctcgaagagagacaccgattctaagtcaatgtag

SEQ ID NO: 222746 - DNA, 609 bp, synthetic construct
  misc_feature 1..609: note = Description of Artificial Sequence: Synthetic coding sequence
  source 1..609: mol_type = other DNA
atgggtgccggtgctttagccatttgccagtctaaagctgctgtgcgcctgaaagaggatatgaagaagatcgtggcagtgccgcttaacgagcagaaagactttacctaccagaagctgtttggggtgagcttacaagaattagaacggcagggtctcacggagaatggtataccagctgttgtttggaatatcgtggaatatctgacccagcacgggctgactcaggagggcctattccgtgtcaacggcaacgtgaaagtcgttgaacaacttcggctcaagtttgagtcgggcgttccagtggagcttggcaaggacggcgacgtgtgctctgccgcatcgctcttaaagttatttcttcgggaactgcctgatagcttgatcacatcggctttgcagcctaggtttattcaactgtttcaggatggtaggaatgatgttcaggagtcgtctttgagggacttgatcaaagagctcccagacacacattactgtctcctgaagtatttgtgtcagtttttaaccaaggttgcgaaacaccacgtgcaaaaccgtatgaacgtccacaatttggcaaccgtttttgggcctaattgcttccagtag

SEQ ID NO: 222747 - DNA, 1494 bp, synthetic construct
  misc_feature 1..1494: note = Description of Artificial Sequence: Synthetic coding sequence
  source 1..1494: mol_type = other DNA
atggcatcgccggcacctccagagcatgccgaagaaggatgccccgcacccgctgccgaggaacaggcccctccatcccccccacctccccaggcctctcccgctgagcgccagcaacaggaggaggaagcacaggaggccggtgccgctgagggtgcaggactgcaagtagaagaggcagcaggtcgcgctgctgccgcagttacatggctgctaggggagcctgtgttgtggctgggttgtcgagctgatgagctgttatcctggaagcggccactgaggtctctgttgggttttgtggcagccaacttgcttttttggttcttggcattgacaccttggagggtgtaccaccttatcagcgtgatgattttgggcagagtcattatgcagattattaaagacatggtgctatctaggacaagaggcgcacaactctggagaagtctgagtgaatcgtgggaagtgataaacagtaagcctgatgaacgaccaaggctttcacactgtatcgctgagtcctggatgaatttttccatttttctacaagaaatgtccttatttaagcagcagagcccgggtaagttttgtcttttggtctgttcggtttgtacttttttcaccattctcggctcctacattcccggagttattttgagttacctgttactcttgtgtgctttcctgtgcccgctatttaagtgtaacgacatcgggcagaagatctattctaaaattaaaagcgtcctcctgaaactcgacttcggaattggggagtacatcaaccagaagaaacgggagcggagcgaggccgacaaggagaagtcacacaaggacgacagcgagttagatttttccgcactgtgcccaaaaatttccctcaccgtcgctgccaaggaactcagtgtgtctgacacagatgtcagcgaagtatcatggactgacaacggcacttttaacctctctgagggctatacaccgcagactgacactagcgatgacttagaccgaccgtccgaagaggttttcagccgcgaccttagtgatttccctagcctggagaatggaatgggaacgaatgacgaggacgaactctctctcggcttaccaacagagctcaaaaggaaaaaggaacaactagattccggccacaggccatctaaagagactcaatcggccgcaggattgaccttacctttaaatagcgatcaaacctttcatctcatgtccaacctagcgggagacgtgatcacagctgcagttaccgccgcaatcaaggaccagctggagggtgtgcagcaagctctctcacaggctgcccctatcccggaggaggatacagacactgaggagggggacgattttgaactgttggaccaaagtgagctggaccagattgagtccgaactgggcctaactcaggaccaggaagcagaagctcagcagaacaaaaagagctccgggttcctgtctaatctcctagggggtcattag

SEQ ID NO: 222748 - DNA, 1071 bp, synthetic construct
  misc_feature 1..1071: note = Description of Artificial Sequence: Synthetic coding sequence
  source 1..1071: mol_type = other DNA
atgccagaaggagaagactttggccctggcaaaagctgggaggtgatcaactccaaacccgacgaacgtccaaggctgtctcattgcattgctgagagttggatgaattttagtatctttctccaggaaatgtcactttttaagcagcaatcaccaggcaagttttgcttactggtgtgctccgtttgcacatttttcaccatcctcgggagctatatccccggagttattctgagctatctcctgctcctttgcgcattcctttgtccacttttcaaatgcaatgacattggacagaagatctattcaaagatcaaatcagtcctcctgaagctggattttggcatcggggagtacattaatcaaaagaaacgcgagcggtcggaggctgacaaggaaaaatcacacaaggacgatagtgagctggatttcagtgctttgtgccctaaaatttcactgactgtcgcagccaaagagctttccgtgagcgacactgatgtgtcagaggtgagctggactgacaacggaacatttaatttgtccgaggggtatacccctcaaaccgatacgtcggacgatctcgacagaccatccgaggaagtgttttctagagatttatccgactttccctctctcgaaaacggcatgggcactaacgacgaggacgaactttctcttggattgccgacggagctgaagagaaagaaagagcaactggactccggtcaccgtcccagcaaagagacccagagtgccgcaggtctgactctgccgttgaacagcgaccagactttccatctgatgagcaacctggcaggtgacgtgatcacagcagccgtgactgccgctatcaaggatcagctggagggtgtgcaacaggctcttagtcaggctgcgcctatcccagaagaggacacagacactgaggagggagatgattttgagttgctcgaccaatccgaattggatcagattgagtcagaattgggtctaacacaagatcaggaagccgaggcacaacagaataaaaagtcctccgggtttttatcgaacctactgggtggacattag

SEQ ID NO: 222749 - DNA, 2151 bp, synthetic construct
  misc_feature 1..2151: note = Description of Artificial Sequence: Synthetic coding sequence
  source 1..2151: mol_type = other DNA
atggcaacaagccaccgggtcgccaagctcgtcgccagcagcctgcagacacccgtaaacccgataacaggcgctcgggtggctcaatacgaaagggaagatccgttgaaggccctagcagcagcagaagctatactggaggatgaggaagaggagaaagtggctcagcccgctggcgcttcagccgacctcaatactagcttcagcggcgtggatgaacatgcaccaatttcttatgaagactttgttaattttcccgacatccaccacagtaatgaggaatattttaaaaaagtggaggaacttaaagccgcacacatcgaaaccatggcaaagctggaaaagatgtatcaggacaagttgcatctaaaggaggtacagcctgtggtcatccgcgaagatagcctgagtgactcatccaggtctgtttcagagaaaaacagttaccaccccgtgtctctcatgaccagtttcagtgagccagaccttggccagagtagttccttatacgtaagtagcagtgaggaagaactgcctaatctggagaaggagtatccaaggaagaatcgtatgatgacatacgccaaggaattgataaataatatgtggactgatttctgcgtggaagattacatcagatgcaaggataccggctttcacgctgccgagaaaagaaggaaaaagcgcaaagaatgggttccaacaattaccgtgcccgagccctttcagatgatgattagagagcagaagaagaaagaagagtccatgaaaagcaagtccgacattgaaatggtccacaaggccctgaagaaacaagaggaggaccctgagtataaaaaaaaatttagagcaaacccggtgcccgcaagtgtgttcttgccattgtaccacgacctggtcaagcagaaggaggaaagaagacggtccctgaaagaaaaatcaaaagaggctcttttagccagccaaaaaccgtttaaattcatagcgagggaggagcagaaaagggccgcacgggagaagcagctgcgggactttcttaaatacaaaaagaaaacaaatcgtttcaaagctcggccaataccacgtagtacgtatggaagtaccactaatgacaaattaaaagaggaggagctataccgcaacctgcgtacccagctaagagcacaggagcatctgcagaatagctcgcccctgccgtgccgaagtgcctgcggttgtagaaatccacgatgtcccgagcaagctgtcaagcttaaatgtaagcacaaagtccgatgtccaactcccgacttcgaagatctaccagagcggtaccaaaagcatctgagcgaacataaatctccaaagttgctaacggtctgtaaaccctttgatctgcacgcatctccccacgcctccattaaacgggagaaaatcctggcagatattgaggcggatgaagaaaacctgaaagaaactcggtggccttatctctctccgaggaggaaatctcctgtcaggtgcgcaggcgtcaaccctgtaccatgtaattgcaacccacctgtgcccaccgtctcctctagggggcgagagcaggctgtgcggcgatctcttgaagaaaagaaaatgctggaagaggaaaggaatcgcattctcaccaaacagaagcagcgaatgaaggagctgcaaaagttgttgaccacacgagcaaaagcctacgatagtcaccaatcccttgcccagatcagcaagagtagagttaagtgtctgcgcaaatcagagaaagagcggatgagggagtatcaacgagaattggaggaaagggaagagaagctcaaaaaaaggcctcttcttttcgaacgcgttgcccagaagaatgctaggatggctgcagagaagcactactcgaataccctgaaagcactaggcatctccgatgaatttgtatcaaaaaaaggccagtctggaaaggttttagaatatttcaataaccaggaaacaaagtccgtgactgaggataaagagtccttcaatgaggaggagaaaattgaagagagagaaaacggcgaggagaattattttatcgatactaatagccaagactcctacaaagagaaggacgaggctaacgaagagagtgaagaagagaaatccgtggaagagtcacactag

SEQ ID NO: 222750 - DNA, 1983 bp, synthetic construct
  misc_feature 1..1983: note = Description of Artificial Sequence: Synthetic coding sequence
  source 1..1983: mol_type = other DNA
atggctaccagccacagagtggctaagctagtggccagttcacttcagactcccgtcaatcctatcaccggcgcaagagtggctcagtatgagagggaagaccctctcaaggccctcgctgctgctgaggcgatattggaagatgaggaagaggagaaggtggctcaaccagctggcgcatctgccgatctcaatacctcattcagtggcgtcgatgaacacgcaccaatctcttacgaggatttcgtcaatttcccagacattcaccatagtaacgaggagtacttcaaaaaggtggaggagcttaaagccgctcacattgaaaccatggccaagctggaaaagatgtatcaagataagcttcatttgaaggaggtccagcccgtggtcataagagaagattccctctccgattcttcacgatctgtgtcagagaaaaactcctatcatcctgtctcactcatgaccagcttcagcgagccagacctcggacagagttcaagcttgtacgtcagctcctctgaggaggagctgcccaatctcgaaaaagaatatcctcgaaagaacaggatgatgacatacgccaaggaactgatcaataacatgtggacagatttttgtgtggaggattacattcgatgtaaggacacaggattccacgcggcagaaaagcggcgtaagaagagaaaagagtgggttccaactatcacagtgcccgagccttttcagatgatgatccgtgagcaaaaaaaaaaggaggaatccatgaaaagtaagtcagatatagagatggtgcacaaagcccttaagaaacaggaagaggaccctgaatataagaagaagttccgggctaacccagttcccgcaagcgtgtttctgcccttgtatcacgacctcgtcaaacagaaggaggagcggaggcggagcttaaaggaaaagtccaaagaagctttactggcatcccagaaacctttcaaattcatagctcgcgaagagcagaaacgagctgcgagagaaaaacagcttcgagacttcttaaagtacaaaaaaaagacgaataggtttaaggcccgaccgatacccagatcaacctacgggagcaccaccaatgacaagctgaaagaggaagaactgtaccggaacctccgcacacagttaagggcacaggagcatctgcagaatagttctccactaccttgccggtcagcttgcgggtgtaggaaccctcgctgccccgagcaggccgttaagctcaagtgcaaacacaaagtgaggtgcccaacccccgactttgaagatttgccagagcgctaccagaagcatcttagcgaacataagtctcctaaactactgacagtctgcaagccatttgacttgcatgcctctccccatgcctctatcaaaagggaaaagattctggctgacatagaggccgacgaggagaacttgaaggaaactcgatggccatatttatccccccgacgaaagtccccagtgagatgtgcaggcgtgaacccagtgccttgcaactgcaaccctcccgtgcccactgtgtcatcaagaggacgtgaacaggctgtccgcaagtcagagaaggaacggatgagggagtaccagagagagctagaggaaagagaagagaaattgaagaaacggccactcctcttcgagcgcgttgcccagaagaacgcacgtatggcagcagagaaacattatagcaacaccctgaaagccctcggaataagtgacgaatttgtctccaagaagggacagagcggtaaggttctggagtattttaataaccaagaaaccaaatctgtcacagaggacaaagaaagtttcaatgaagaggagaaaattgaagagcgggagaacggcgaggaaaattatttcatcgacaccaactcacaggacagctataaggagaaggacgaagccaatgaggaatccgaggaggaaaagagtgtggaggaatctcattag

SEQ ID NO: 222751 - DNA, 645 bp, synthetic construct
  misc_feature 1..645: note = Description of Artificial Sequence: Synthetic coding sequence
  source 1..645: mol_type = other DNA
atgagcgtgccacagatacatgtggaagaagtgggcgcagaagagggggctggcgctgctgctccaccagacgatcatttaaggtcattgaaagccttgaccgagaaactgcgcttagagactcgtaggccctcttacctcgaatggcaggccaggttggaggagcacacttggccgttcccgagaccagcagccgagcctcaggccagccttgaggagggcgagaggggagggcaagagcccttgctccctctgcgtgaggctggacaacacccgcctagtgctcgatcagcttcacagggcgcaaggcctctgagcacaggaaagctggagggctttcaaagtatcgatgaagccatagcttggctgagaaaggagttaactgagatgcgcctgcaggatcagcagcttgcccgtcagctcatgcggctgagaggtgatattaataagctgaaaatcgagcacacctgtcgcctacaccgccgaatgctgaacgacgctacgtatgaactggaggaacgggacgaacttgctgacctattttgcgacagcccattggcgtcttccttcagcctatctacaccactgaaattaatcggggttactaagatgaacatcaattctcgacgtttcagcctttgctag

SEQ ID NO: 222752 - DNA, 1248 bp, synthetic construct
  misc_feature 1..1248: note = Description of Artificial Sequence: Synthetic coding sequence
  source 1..1248: mol_type = other DNA
atggccgctagtataagcggctacacgtttagcgccgtgtgcttccacagcgcaaacagcaatgctgatcatgaaggtttcctgttgggggaggtccgtcaagaggaaacattttcaattagcgactctcagattagtaataccgagttcttacaggtgatcgaaatccacaatcaccaaccctgtagtaagctcttttcattctatgattacgcctccaaagtaaatgaggagtctctggaccgcatcttaaaagaccgacgaaaaaaggtgatcggatggtatcgatttagaaggaacacccaacagcaaatgtcgtatcgcgaacaggtcctgcacaagcaactgacccgcatccttggagtgcccgatctagtattccttcttttcagcttcatttccaccgccaacaactcaacccatgctctggagtacgtcctgttccggccaaataggcggtataaccagagaatctcccttgctatccctaatttggggaatacatcacagcaagagtacaaagttagttccgtgcctaacaccagccagtcatatgctaaggtgattaaggagcacggcactgacttcttcgataaggacggagtgatgaaagacatccgagccatttaccaggtgtataacgctttacaggaaaaggttcaggcggtgtgcgcagatgtggaaaagtctgagagggtggtggaatcctgccaggcggaggtgaacaagctgcgcaggcagattacccaaaggaagaatgaaaaggaacaggaaaggagactgcagcaggctgtgctcagtcggcagatgccctccgaaagtctagatcctgccttttctccccgtatgcctagctccggattcgcagctgaagggagatccaccttgggagacgcagaagcatcggatcctccaccaccgtattcagattttcatccaaataaccaggagtcaactctgagccattctcgcatggaacggtccgtctttatgcccaggcctcaggccgtcggaagttcaaattatgcgagtacaagcgcgggtctgaaataccccggatcgggggcagacctgcctccgcctcaaagggcagctggggatagcggggaagatagtgacgactcagactatgaaaatctgatagacccaactgaacccagcaattccgagtatagtcacagcaaggatagcaggccaatggctcaccccgacgaagaccctcggaacacacagacaagtcagatctag

SEQ ID NO: 222753 - DNA, 3522 bp, synthetic construct
  misc_feature 1..3522: note = Description of Artificial Sequence: Synthetic coding sequence
  source 1..3522: mol_type = other DNA
atgaccagacggtgtatgccagcccgtcccggttttccatcatcccctgcacctggctcttccccaccccgatgccacttacgaccgggatccacggcccatgccgcagccggaaagcgcacagaaagtccgggagaccgcaaacaaagcattatcgatttcttcaaaccagccagcaaacaagataggcacatgcttgattcaccccagaaatccaacattaaatacggtggatcccggctgagtattactggcacggagcagttcgagaggaaactgtcttccccaaaagagagtaagccgaaacgcgttcctcccgagaaaagccctataattgaggcgttcatgaagggcgtgaaggagcaccacgaagaccacgggattcatgaatctaggcggccttgtctgtctctagcctctaagtacttagctaagggcactaatatttacgtgccttcatcgtaccatctcccaaaggaaatgaaaagcttgaagaagaagcaccggagccccgagagaaggaagtccctgttcatccatgagaataacgagaaaaacgatagggatagaggaaagaccaacgcagacagcaagaagcagaccacggtggccgaggcagatatatttaacaatagctcacggtcacttagcagccgttcatccctctcccgacaccaccctgaggaatctcccctgggcgctaaatttcagctaagcttggcttcatactgtcgcgaacgtgagctgaaacgactgagaaaggagcaaatggaacaacgtatcaactccgagaatagcttctcggaggccagctcgctgtcactgaagtcctctattgagcgtaagtacaaacccaggcaagagcaacgaaagcagaatgacataattcccggtaagaacaacctctccaacgttgaaaatggccacctgtccagaaagaggtcttcatcagactcatgggaaccgacttcagctgggtctaaacagaacaaattccctgagaagagaaagaggaattccgttgatagcgatctcaagtcaactagggagagcatgattcccaaagctagggaatcttttttagaaaagaggcccgatgggcctcaccaaaaggagaaatttattaaacatattgcattgaagaccccaggagacgtgcttagactcgaggacatcagcaaggagccatcagatgagacggacggatcatcagccggactggcaccctctaacagcggcaatagtggccatcattccaccagaaatagcgatcagatccaggtggctggtaccaaagagaccaagatgcagaagccgcacctgcctttgtcccaagagaaatccgccatcaagaaggctagtaacctacagaagaacaaaactgcctccagtacaaccaaagaaaaagaaaccaaattgcccctcctctctagagtgccatctgccggaagcagtctggttcctttaaacgctaaaaactgcgctctccccgtctcaaagaaagataaggagagatcttcatccaaagagtgttctggccacagcactgaatcgacaaagcataaggagcataaggctaagactaacaaggctgacagcaacgtgagctcgggtaaaatatccgggggaccactgcggtctgaatacggtacgccaacaaagtccccacctgctgctctggaggtcgtcccctgcatcccaagccctgctgctccctcagacaaggcacctagcgagggagagagttctgggaactccaacgctggatccagcgccctcaaaagaaagttaaggggcgacttcgactctgacgaggaatctctcggatataatctggattccgatgaagaggaagaaacactaaaatctttggaagagatcatggcccttaattttaatcagaccccagccgcaacaggtaaaccccctgcgctgagcaaaggcttacgtagccaatcaagcgactatactgggcatgtgcaccccggtacttatactaatacgcttgagagactagtcaaagaaatggaagacacacagaggttggatgagctacagaaacaacttcaggaggatatcaggcagggcaggggaatcaagtcgccaatcagaatcggcgaagaggactcaacagacgatgaggatggattgctcgaagagcacaaggaattcttgaaaaagttctccgttaccattgatgccattcccgaccatcatcctggtgaggaaatcttcaattttctcaatagcgggaaaattttcaatcaatacacactggacctacgggactcgggtttcatcggccagtccgcagtcgagaaactaattttaaagagcggaaagaccgaccagatctttctgactacccaggggtttcttacctcagcttaccattacgtacagtgtccagtgcctgtcctaaagtggttgttccggatgatgtccgtccataccgattgcatcgtgtcagtgcagattttgagtacactgatggagataacaattaggaacgatacatttagcgattctccggtgtggccctggattccgtccctctcagacgtcgccgctgtgttctttaacatgggcatcgacttccgcagcttattcccgctggaaaacctccagccggacttcaatgaagattatctggtgtctgaaacccagaccacctcccggggaaaagagagcgaagattcatcctacaagcctatctttagcactctgccagaaaccaacattctcaacgttgttaagttcttggggctctgcactagcatccatccggaggggtaccaggatcgcgagatcatgctcctgatcttaatgctattcaaaatgtctctggagaaacagttgaaacaaattccccttgttgacttccaatccctgttaattaaccttatgaagaatattcgcgactggaacactaaagtccctgaattgtgcctagggataaatgaactctcaagccaccctcacaacctgctttggcttgtccagctcgtgcctaattggacatccagggggaggcagcttcgccagtgcctatcactggtgataatctcaaaattactggacgaaaaacatgaggacgttccaaatgcaagcaacctccaagtgtctgtccttcatcgctatctagtgcagatgaaaccctcggacctgctgaaaaagatggtcctgaaaaaaaaggctgaacagccagacggaattatcgatgattctttgcatttggagttggaaaaacaggcttattacctcacatacatccttctgcacctagttggcgaggtaagttgcagccattccttcagcagcggccagagaaagcactttgtgctgttatgtggggcactcgaaaaacacgtcaaatgtgacattagggaagatgcccgtctattttacaggaccaaggtaaaggacctggtcgccagaatacacggcaagtggcaagaaattatccagaactgccggcctacacaggggcaactgcacgacttctgggtcccagatagttag

SEQ ID NO: 222754 - DNA, 3561 bp, synthetic construct
  misc_feature 1..3561: note = Description of Artificial Sequence: Synthetic coding sequence
  source 1..3561: mol_type = other DNA
atgactcgtcgatgcatgccggcacggcctggattccccagtagccccgctccgggatcaagcccacctcgctgtcatttacggccaggaagtacggcccatgccgctgcgggtaagcgcaccgaaagtcctggagatagaaagcagtccattattgatttttttaagccagcctccaaacaagatagacacatgttggacagcccgcaaaagtcaaacattaagtatggcggtagcaggctttctattaccggcacagagcagttcgagcgtaaattatcatcccccaaagaatctaagccaaaacgcgttccaccagaaaagtcacccatcatcgaggcatttatgaaaggggtgaaagaacatcatgaagatcacgggatacatgagagccgcagaccatgcttgtcactcgcgtccaagtatctggcaaagggaacaaatatctatgtgccgagtagctatcacctgcctaaagagatgaagagtcttaagaagaaacacaggagccccgagagacgcaaatcgctgtttatccatgagaacaacgagaaaaacgatcgggaccgcggtaagaccaatgccgacagtaagaagcagaccactgttgccgaggcagacatctttaacaattctagtaggagcctcagtagcagaagctccctgtccaggcatcatcccgaagagagccccctgggggcaaaatttcaactgagtcttgcaagttactgccgcgagcgcgagctaaagagactcagaaaggagcaaatggaacagaggatcaattctgagaactctttttccgaagcatcctctcttagtctcaagagtagtattgagcgaaagtataagccacggcaggaacagagaaagcaaaacgatataattcctggcaagaataacctgagcaacgtcgagaacggacacttgtcaagaaaaagaagctcaagcgattcatgggagccgacttctgccggttccaaacaaaacaaatttcccgaaaaacgaaagcggaactccgtggactcggatctgaaatccacccgcgaatccatgatccccaaagccagggaaagttttctggagaagaggcctgacggacctcaccaaaaggagaaattcatcaaacatattgcactcaaaacaccgggagatgtgctgaggctcgaggatatttctaaggagccttcagatgagaccgatgggagctccgcagggctcgcaccgagtaactcaggaaattccgggcaccactcgaccagaaatagcgatcaaattcaagtggcaggaactaaagaaacaaagatgcaaaagcctcacctgcctctgtctcaggaaaagtctgccattaaaaaggcatcgaatctgcagaagaataagactgcctcttcaaccacaaaggagaaggaaacaaagctgcccctcctcagtcgagttccaagcgccggatcgagccttgtgcctttgaatgcgaagaactgcgctctacctgtgtctaaaaaggataaagaacgaagcagttctaaggagtgcagcggccactcaaccgagtccaccaagcacaaggagcataaagctaagacaaataaggccgactccaatgtgtcctctggaaaaatatctggaggccctctccgctccgaatatggtactcccacgaagtctcctccagccgctctggaagtcgtaccctgcattccaagccccgcagctccctccgataaagcaccctctgagggggagtcaagcggcaactccaacgctggaagttctgcactcaagcgcaagcttcggggagattttgattccgatgaagagtcactggggtacaacctggattccgatgaggaggaggaaactttaaagtcgcttgaagaaattatggctttgaactttaatcaaaccccagccgcaacggggaaaccacctgcactcagtaagggactccggagccaatccagtgattatacaggtcacgtgcaccccggaacctacacaaacacattagagcgactggtgaaagaaatggaggatacacagcggctagacgagctccaaaagcaattgcaggaagacatccgacagggcagaggaataaagtctccaataagaatcggagaggaagattcgacagatgatgaggacggactcctggaggaacataaggaattcctaaaaaaatttagcgttacaattgatgcaatcccagatcatcatcctggagaagagatcttcaacttcctgaatagcggcaagattttcaatcagtatacccttgacctacgggacagtggatttattggacagagtgccgtggagaagttgatactcaaaagcggcaagaccgatcagatctttttgacaacccaagggtttctgacatccgcctatcattacgttcagtgtcctgtgccagtccttaaatggctgtttcgtatgatgtcagtccacactgattgtatcgtcagcgtgcaaattttatctacccttatggagatcactataaggaacgatacattctctgatagcccagtatggccttggatccccagcttatccgacgttgcagccgtatttttcaacatggggatcgacttccgatctctctttccactcgagaatctgcagcctgactttaatgaagattatctggtctcagaaacccagacgaccagccgtgggaaggaaagcgaggacagtagctataagcctatcttctctaccctacccgaaaccaatatactgaatgtagtcaagttccttggcctttgcaccagcattcaccctgagggttaccaggaccgcgagattatgctgcttatccttatgttattcaagatgtccttggagaaacagttgaagcagattccactcgtcgattttcaaagcctgctgatcaaccttatgaaaaacattagagattggaacaccaaggtacctgagctgtgcctgggaatcaatgaactgtcctctcacccccataatctgctctggctggtgcagctggtgccgaactggacctcccgtggcagacagcttcgtcagtgcctgagtctggtaattatttctaaactgttggacgaaaaacacgaggacgtgccaaacgccagtaacttgcaggtttctgtgctgcacaggtacctcgtccagatgaaaccctcagacctcctgaagaagatggttctcaagaagaaggcagagcaacctgacggaattatcgacgacagtctgcacctagaacttgagaagcaagcatactacctgacatatatcctcctgcatctcgtgggagaggtttcctgttcccacagttttagtagcgggcagcgtaagcattttgtgttactttgcggtgcacttgaaaagcatgtgaaatgtgatatcagggaagacgctagactattctaccggacaaaggtcaaggacctggtggccagaattcacggcaaatggcaggagatcattcagaactgcaggccaacacaggttagcttttgctacactattagttgcatcctgaacagcttcgcagaatggcacagcagctattgtctcaaatag

SEQ ID NO: 222755 - DNA, 2277 bp, synthetic construct
  misc_feature 1..2277: note = Description of Artificial Sequence: Synthetic coding sequence
  source 1..2277: mol_type = other DNA
atgacgcgcaggtgcatgcccgctcggccaggcttcccaagctcacccgcacccggatcttctcccccacggtgccacctcagacccggttctacggctcatgccgctgctggaaagcgtacagaaagccccggtgatagaaaacagtccattatcgatttttttaaaccggcttctaaacaagacagacatatgttggactcccctcagaaatctaacatcaaatatggcggaagccgtttgagcatcactggcacagaacagttcgagcgtaagttatcctcacctaaggagtctaaacccaaaagagttccccctgaaaagtcacccatcatcgaagcattcatgaaaggtgtgaaggagcatcacgaggaccacggtatccatgagtccaggcgtccttgcttaagcttggcctcaaagtacctggcaaaggggaccaatatttacgtacctagcagttaccaccttcctaaggaaatgaagtctctgaagaaaaagcataggagccccgagagaagaaagagtctcttcatacatgagaacaacgaaaaaaacgacagagatcgaggaaagaccaatgctgacagcaaaaaacaaactaccgtcgccgaagcagatatttttaacaacagcagccgatctctgagctccagaagcagcctgtctagacaccatccggaggagtctcccctgggggctaagtttcagctgtccctagcttcatattgccgcgaaagagagctcaagcggctgaggaaagaacaaatggagcaacggattaactctgaaaatagctttagtgaagcctcttctctatccctgaaaagtagcattgaaagaaagtacaagcccaggcaagagcaaagaaagcagaacgatattattcctgggaagaataatctgagcaacgtggagaatggacatctttcaaggaaaagatcaagttcggatagctgggagcctaccagtgctggcagtaagcagaacaaatttcccgaaaagaggaagaggaacagcgtcgactccgacttgaagtccacgagggagagcatgattcctaaggctcgtgaaagctttctggagaagcggcctgacgggcctcaccagaaagagaagtttataaaacacatcgctctgaagaccccaggcgatgttctacgcttagaagatatcagtaaggagccgagcgatgagactgacggctcatccgctgggcttgccccatctaatagcggcaactcaggtcaccactccactaggaactccgatcagattcaagtcgccggaacaaaggaaaccaaaatgcagaaacctcatttgcctctgagccaggaaaaaagcgccattaagaaggcctcaaatctgcagaagaacaagacagctagctcaacaactaaggagaaggaaacaaagctgccacttctgagccgcgtgccttccgccggatcttcactcgttccgcttaacgctaagaactgcgccctgcccgtaagtaagaaagataaggagcgtagcagcagcaaggaatgttccgggcacagtactgagtctacaaaacacaaggagcacaaagctaaaacaaataaggctgactccaacgtgtcctccgggaagataagcggagggccacttcgttccgagtacgggacgcctacaaaatcccctcccgctgcactggaggtcgtgccctgcatcccctcccctgccgctccctctgacaaggccccaagtgagggagaaagctctgggaattctaacgccggatccagtgcacttaagagaaagctgagaggcgacttcgactcagatgaagagtccctaggctacaatttggactctgacgaggaagaagagacgctgaagtctctggaggagattatggccctgaatttcaaccagacccccgctgccactgggaagcccccagcgctctccaagggtctgcgctcacagagctcggattataccggtcacgttcacccaggcacctatacaaatactcttgagaggcttgtcaaggagatggaagacacccagcgattcgttagtatcaagatcaatctccttaatctcaccttctgtctgtttgtctggctaacctttaatttgccctttctgaaaaatcacgaaaaactggcctgcattttggatagtgtagtcaattgcgtccggatcaggtatgttggacggacccagtggctcatgcccgtcatcacgaccctctgggagactcaggctaggctgctcgagcctaggagcagccgcctcaggtag

SEQ ID NO: 222756 - DNA, 675 bp, synthetic construct
  misc_feature 1..675: note = Description of Artificial Sequence: Synthetic coding sequence
  source 1..675: mol_type = other DNA
atgactcgcatcaccgagctgtggtcttcaccgcagtggaaagtaggcgcagaggtttgcggaaggcagatgcgggaacaaagaactgcagagcaatctgaaacgcagcgaacatggctctccatggcagctacattgcaatttttagtctgcttggtcgttgccatttgcctcttgtcaggagtgaccaccacccagccccatgccggacagccaatggattctacgagcgtgggaggtggccttcaggagcccgaagcgccagaggtgatgtttgagctcctgtgggcaggattggagttggacgtaatggggcagctgcacattcaagacgaagagctggcgtctacccaccctgggagacggctgcggttgctattacagcatcatgttccgagcgatttagagggcacggagcagtggctgcagcagttgcaggacctccgcaagggacctcccctaagcacatgggattttgagcacctgctgcttactggcttaagctgtgtataccgactgcacgccgctagtgaggccgaggagcgaggcaggtgggctcaggtgtttgcactactcgcccaggaaaccctgtgggacttgtgtaaggggttttgcccacaggacaggccaccctctctgggctcctgggcaagtatactggatcccttcccctag

SEQ ID NO: 222757 - DNA, 606 bp, synthetic construct
  misc_feature 1..606: note = Description of Artificial Sequence: Synthetic coding sequence
  source 1..606: mol_type = other DNA
atgcgcgaacaacgaacggcagaacagtctgagacacagcgcacttggctgtctatggccgctacactgcagttcttggtgtgcctagttgtggccatctgtttactcagcggagtcaccaccacccagccccacgccggacagcctatggatagcacgagcgtaggcggtggtctgcaggagcctgaagctcctgaagtcatgttcgagttgctctgggccggactggaactcgatgtcatgggacaactgcacatccaggacgaagagttggccagcacccatccaggccgtcgcttgcggctgctgctgcaacatcacgtccccagcgacctggagggcactgagcaatggctccagcagttgcaggatctgcggaagggcccaccgctttcgacttgggactttgagcatttactgcttactgggcttagctgtgtgtaccggctgcacgccgcttctgaggccgaggaaagaggcagatgggcacaagtgttcgctctgctcgcccaggagaccttgtgggatctctgtaagggcttttgcccccaggatagaccaccttctctgggaagttgggcctctattctagacccattcccctag

SEQ ID NO: 222758 - DNA, 1626 bp, synthetic construct
  misc_feature 1..1626: note = Description of Artificial Sequence: Synthetic coding sequence
  source 1..1626: mol_type = other DNA
atgcctgggctcagacgagacagactcctgacgctgttgctcctgggggcactgctcagcgcagacctttatttccacctgtggcctcaggtgcagcggcaactccgacctagggaacgtcccagaggttgcccctgtacagggagggcatcttcactggccagggactcggcagcggctgcatcagatcctggtacaatagtgcataattttagccgcaccgagcctcgaactgaaccagcaggaggcagtcactcaggtagctcttctaagctgcaggccttattcgcccatcctctctacaacgtccccgaggagcccccactcttaggcgcagaggactcgctactggcatcccaggaagctctgaggtactacagacgtaaggtggctaggtggaaccggcgacataaaatgtatagagagcagatgaacctcacttcactggacccccctctccagctcagattggaagcctcgtgggtgcagttccacctgggtatcaatagacacggattatacagcagatcctcaccagtggtgagcaagctgttacaggatatgaggcacttccccacaatctccgccgactattcccaagatgagaaagccctcctcggggcttgtgactgcacacagattgttaaacctagcggggtccacctcaagttagtgctacgcttttcagatttcggcaaggccatgttcaagccgatgcggcagcaacgtgacgaggaaacgcccgtggattttttttatttcattgatttccagcgacacaacgcggagatcgccgcatttcatctggaccgcattctggacttccgtcgggtgccccctactgttggtcggatagtcaacgtgaccaaggagatcctcgaagtcactaagaacgaaatcttacagtcagtgttcttcgtgagtcccgcaagcaatgtgtgcttctttgcaaagtgtccgtatatgtgcaagaccgagtacgccgtgtgcggcaatccacatctgctggaaggctcactttccgcctttctaccttctctcaacctagcgcctcgattaagcgtgcctaatccctggatccgtagttacaccctagcagggaaagaggaatgggaggtcaatcccctatactgcgatactgttaagcagatctatccatacaataactcacagaggttgttgaatgtaatcgatatggctatcttcgatttcctgatcggaaacatggatcgacatcattatgagatgtttaccaagttcggggatgacgggtttctcattcatctcgacaatgctaggggctttgggcgacatagccatgacgaaattagtattctgagccctttgtcacagtgttgcatgatcaagaaaaaaacactattgcacctccagttgctcgctcaggccgactataggttgtccgacgttatgagggagtcacttcttgaggaccaactatctccagtgctcactgagccccatctgcttgctctagataggcgcttgcagacaatacttcgcaccgtggagggctgcatagtggcacacggtcagcaatctgtgatcgttgacggaccagttgagcaactggccccagattccggccaggccaatctgacaagctag

SEQ ID NO: 222759 - DNA, 1023 bp, synthetic construct
  misc_feature 1..1023: note = Description of Artificial Sequence: Synthetic coding sequence
  source 1..1023: mol_type = other DNA
atgggaccgcctcacagcggaccaggtggtgtgcgcgtgggtgccttactgctcctcggcgtactcggcctcgtgtccggtctgagtctggaaccggtgtactggaacagcgccaacaagcgctttcaggctgagggaggttatgttctgtacccgcagattggcgacagactcgatttgctgtgtcctagagcgagacctcccggacctcatagctcccctaactatgaattctacaaattgtacctggtcggcggagcacagggccgtagatgcgaggccccaccagcaccaaacctgttgctaacgtgtgaccgaccagaccttgaccttcggtttaccattaagtttcaagaatactctccaaatctatggggccacgagttccggtctcatcatgattactatatcatcgctacgtcagacgggaccagagagggcctggaatccctgcagggcggagtgtgtctgacaagaggcatgaaagtgctccttagagtggggcagagtccacgcggaggcgcagttccaaggaagcccgtgtctgagatgcccatggaaagagaccgaggagctgctcacagcctagaacccggaaaagaaaacctgcccggtgaccccacaagtaacgcgacatctcggggagccgaggggcctctgccccctccttcgatgcccgctgtggcaggggctgccggtggcctggccctgctcttattgggcgtggccggtgcgggtggggcaatgtgttggagacgacgacgagcaaaaccctcagagtcgcgccaccccggaccgggatcctttggtagaggagggagtctgggacttggtggaggcggtgggatgggccctagagaagctgagcctggcgagttgggaattgccttgagagggggaggtgccgcagatccaccgttctgtcctcactatgagaaggtgagcggagattatggtcaccctgtttatatagttcaagatgggccaccacagtcaccacccaacatctattataaggtttag

SEQ ID NO: 222760 - DNA, 438 bp, synthetic construct
  misc_feature 1..438: note = Description of Artificial Sequence: Synthetic coding sequence
  source 1..438: mol_type = other DNA
atgttcacctcccccagtgagggtaaaccagggaatatggataggcatcactacgagatgttcacaaagttcggtgatgatggctttttgatacacctcgataatgcacgcggttttgggcgtcattcccacgacgagatctccatcctgtcgcccttgagccaatgttgtatgatcaaaaagaagactctgctgcatctgcaactgcttgctcaagctgattacaggttgtccgacgtcatgcgggaatccctgctcgaagatcagctatcccccgtgctgacagagccccatttgctagccctggaccggagattgcagacaatcctccggacagtcgaagggtgcatcgtcgcccacggccaacagtctgtgatcgtcgacggccctgttgagcagttagctcctgattctggccaagccaatctgactagttag

SEQ ID NO: 222761 - DNA, 1230 bp, synthetic construct
  misc_feature 1..1230: note = Description of Artificial Sequence: Synthetic coding sequence
  source 1..1230: mol_type = other DNA
atgaagcttaagcagagggtggttctgctggccatcctgttggttattttcatttttacaaaggtgttccttatagataacttagatacttctgctgctaacagggaggaccagcgggcttttcacagaatgatgacggggttacgcgtcgagttggcgcctaagttggatcacacactgcagagcccatgggagattgccgctcagtgggtcgtgcctcgcgaggtgtatccagaagaaacacctgagttgggggctgttatgcacgcaatggctactaagaaaatcatcaaagctgacgtgggatataaaggtacccagttaaaggccctgctgatcctggagggaggacagaaggtggtatttaagcccaaaagatattctagggaccacgtcgtggaaggggagccctacgcaggatacgatagacataacgcagaggttgcggcattccatctggatcgcatcctagggttccacagagctcccctcgtggtggggagatttgtcaatctgcggaccgagatcaaacccgtggcaactgagcaattgctctcaacttttctcacggtgggcaacaacacctgcttttacggaaagtgctattattgcagagagacagaacccgcttgcgccgatggcgacataatggagggatctgtcactctgtggctgccagatgtctggccgctgcagaagcaccgtcacccctggggcaggacgtatcgggaggggaaactggcgaggtgggagtacgatgagagttactgcgatgctgttaaaaagactagcccttatgactcggggcctaggctcctggatataattgataccgccgtctttgattacctgattgggaatgccgaccgacaccactatgaatcttttcaggacgatgagggagccagcatgttaattctgctggacaatgccaagagttttgggaacccgagtctggacgagcggtcaatattggccccactgtatcagtgctgcatcatccgagtttcgacctggaacaggcttaactacctcaaaaatggggtgttgaaatcggccctgaaaagcgccatggctcacgaccctatctcacccgtgctgtctgacccccatttggatgcggtggaccaacgcctattgtccgtgctggcgaccgttaaacaatgcactgatcaattcggcatggataccgtccttgttgaagaccgcatgcctctgtctcacttatag

SEQ ID NO: 222762 - DNA, 417 bp, synthetic construct
  misc_feature 1..417: note = Description of Artificial Sequence: Synthetic coding sequence
  source 1..417: mol_type = other DNA
atgaagctgaagcagcgcgtcgtactgttagccattctgttggtaatcttcatcttcaccaaggtatttctaatcgacaacttagacacgtccgctgcaaacagagaggatcagagggccttccacagaatgatgacagggcttcgagtggagttagcacctaagctggatcatactctgcagagtccatgggaaattgcggctcagtgggttgttccgagggaagtctacccagaggagactcctgaacttggggctgtgatgcatgcgatggctactaagaagatcattaaagctgacgtgggatacaaagggacccagctcaaagcgttattaattctggaaggcggtcagaaggtggtttttaagccgaaacggtattcaagggatcatgttgttgagggggaaccttattag

SEQ ID NO: 222763 - DNA, 1755 bp, synthetic construct
  misc_feature 1..1755: note = Description of Artificial Sequence: Synthetic coding sequence
  source 1..1755: mol_type = other DNA
atgaagatgatgctcgtgcgacggttcagagtgctaatccttatggtgtttttggtcgcttgtgcactccacatcgcattggatctcctccctcgcctggagcgacgaggcgcacggccatctggggagcctgggtgtagctgtgctcaaccggcagccgaggtcgccgcaccgggatgggctcaggtcagagggagaccgggagagccacctgcagcctctagcgctgctggagatgccggatggccaaataaacatactctaagaatcctgcaagacttttcatcagacccaagttctaacttgagcagtcactccctcgaaaaactgccccctgctgcggagccggcagagagggctctgcgcggaagagatcccggagccctaagaccccacgatcccgctcaccgcccactgcttcgtgaccctggccctaggcggtctgaaagccccccaggtcctggcggagacgcctctttactggccaggctctttgagcatcccctttaccgcgtggccgtcccccctctgactgaggaagatgttctcttcaatgtcaattccgatacacgtctctcacccaaggctgcagaaaatcccgactggccgcacgctggcgctgagggtgccgaattccttagtcccggtgaagcggcagtggatagttatccaaactggttaaagtttcatatcgggataaatcgctacgagctgtattccagacacaatcctgccatcgaggctctgctccatgatctcagtagccagcgcattacctcagtggctatgaagtctgggggaacccagctcaagttgatcatgactttccagaactacgggcaagcactgtttaaaccaatgaaacagacgcgggagcaggaaacccctcccgattttttttattttagcgactacgagcggcataacgcggagatcgctgcatttcacctcgataggatcttggactttagacgcgttcccccagtggctgggaggatggtcaatatgaccaaggaaattcgcgatgtgacaagagacaagaagctctggcgcactttcttcatcagcccggcaaataacatctgtttttacggtgagtgctcatactattgctccaccgagcacgccctgtgtggaaaacccgatcagattgaagggtccctggctgcgtttctgcctgacttgagcttggcaaaacggaaaacttggcgcaacccctggcggaggtcataccacaagagaaaaaaagccgaatgggaagtagacccggactactgtgaagaggtgaaacaaaccccaccttacgactcaagccaccggatcctggatgtaatggacatgaccatcttcgattttctgatgggcaatatggacagacaccactatgaaaccttcgagaaattcgggaatgaaactttcatcatccatctggacaatgggcgaggtttcgggaagtacagtcacgacgaactctctatcctagtcccgttgcagcaatgctgcagaattagaaagtccacataccttcgattgcagttactggcaaaagaagagtacaaactgtccttgttgatggcagagagtctgagaggcgaccaagttgctccagtgctgtatcagcctcatctggaagcgctggacaggcggctgcgcgtagtgctcaaggcggttcgtgactgcgtggaaagaaatggattacacagcgtcgtggatgacgatctggacaccgaacatcgcgcagcctcggccagatag

SEQ ID NO: 222764 - DNA, 3957 bp, synthetic construct
  misc_feature 1..3957: note = Description of Artificial Sequence: Synthetic coding sequence
  source 1..3957: mol_type = other DNA
atgatgaaccgaacaacaccggaccaagagcttgtgccagcctccgaacctgtgtgggaaaggccttggagcgtcgaggaaattcggaggagctctcaatcctggtcactcgcagctgacgccggactcctgcagttccttcaggaatttagccagcagactatttcacggacccacgaaattaaaaaacaggtggacggcctgattcgcgagaccaaggccacagactgtcggctccacaacgtctttaatgatttcctgatgctctctaacacacaatttatagagaatagagtatatgacgaagaagtggaggagccagtgctgaaggccgaggcagaaaaaacggaacaggagaagacaagggaacaaaaagaagtggatctgattccaaaggtccaggaggccgtgaactatggtctgcaagtgctagatagcgcattcgagcagctcgacattaaagctggaaactctgactctgaggaagatgatgccaatggacgtgtcgaactgatcctggagccaaaggacttgtacattgacagacctctcccatacctcattggctccaaactgtttatggagcaggaggatgtgggactgggcgagctgagtagcgaagagggtagcgtcggaagtgatcgcggatcaatagttgacacagaagaggagaaggaggaagaggagtcagatgaagactttgcacatcactctgacaacgagcagaatcagcatacgacgcaaatgtctgatgaggaggaggacgatgatggatgtgacctcttcgcagactccgagaaagaggaggaggacatagaagatatagaggagaatacgaggcctaagcgcagtagaccaacttctttcgcagacgagctggccgctagaataaagggcgatgcaatggggagagttgacgaagaacccactacactgcctagtggcgaggcgaaacctaggaagactctgaaggaaaagaaggaaagacgcaccccctccgacgatgaggaagataatctcttcgcccctcctaaactcactgatgaggatttctcaccattcgggtcaggtgggggtctattcagcggcggtaaggggctgtttgacgacgaggatgaggaatctgacctattcaccgaagcctcacaagatcgacaggcaggcgcaagcgttaaagaagaaagttcatcctctaagcctggaaagaaaatacccgctggtgccgtttctgtgttcctaggcgatacagatgtgtttggggcagctagcgtacctagtctgaaggaaccgcagaaacctgagcagcccacccctagaaaatctccctacggcccacccccaacaggtctgtttgacgacgatgatggggatgacgacgacgacttcttttccgcccctcactcgaaacccagcaagaccagaaaggtacagtccaccgcggacattttcggtgacgaagagggggacctttttaaagagaaggctgttgcctcccctgaggcaaccgtgagtcagaccgacgaaaataaagccagggccgagaaaaaggtgaccctttcatatagcaaaaatctgaagccgtcttcggaaaccaagacccagaagggcctcttctctgacgaagaagacagtgaggatctgtttagttcacaaagcgcctcaaatttgaaaggcgctagcctgctccccggaaaactgccaacttctgtaagcctgtttgacgacgaagatgaagaggataacctctttggaggcacagccgcaaaaaagcagactctatctctccaggcccaacgggaggagaaggctaaagccagtgaactcagtaagaaaaaggcttctgccttactgttctcgagcgatgaagagtggaatatcccagcctctcagacacacctggctagcgattcaagaagtaagggggaacccagggattccggcactctgcagtcccaggaggctaaagccgttaaaaaaacaagcctgtttgaggaagacaaagaggatgatttattcgccatagccaaagattctcaaaagaaaactcagcgcgtctctctgctgttcgaagatgacgtggactctggaggctctttattcggatcccctccaaccagcgtgccacctgccactaagaagaaggagacagtgagtgaagctcccccactcctgttctccgacgaagaggagaaggaagcacagcttggcgtgaagtcagtggataagaaggtagagtcagcgaaggagtcgctgaagttcggtcggacagacgtggctgagagcgaaaaggagggattactgactcggtccgcccaggagacggtgaaacacagcgatttgtttagttctagcagtccttgggacaaaggcaccaagccacggacaaagaccgtcctgtcgctattcgacgaggaagaggacaagatggaggaccagaacatcatacaagctcctcagaaagaggtgggaaagggatgcgatcctgatgctcatccgaagtcgaccggagttttccaagatgaggaactcttgtttagtcataaactgcagaaggacaatgatccagacgtcgatctttttgccggtaccaagaaaaccaagctgctcgaaccgtccgttgggtccctgtttggggatgacgaggatgacgacctgttttctagtgccaagtctcagcccctggtacaagagaagaagcgtgttgttaagaaggaccactctgtgaactcctttaaaaatcagaagcaccctgaatcgattcaagggtccaaggaaaaagggatctggaagcccgagactccccaggctaatcttgctatcaatccagcagctctgttgcctaccgctgcctcccagatttctgaggtgaagcccgttctacctgaacttgccttcccttcttccgaacaccggaggtctcatggccttgagagcgttccagtgctccccggatctggggaggctggagtttcctttgatctgccagcccaggcggatacactgcacagtgcaaacaaatctagggtgaagatgaggggtaagaggaggccgcagaccagagccgcaaggcggttggccgcacaggagagctctgaagccgaggatatgtctgtcccgcgaggacccatcgctcagtgggctgacggcgctatctccccaaacggacataggccccaacttagagcagcttctggcgaagacagtaccgaggaggccttggccgcagccgctgctccctgggaggggggtcccgttcccggagtagacacatcaccatttgccaaatccttgggccactctagaggtgaggcagacttgttcgatagtggcgacatctttagtacgggaaccgggagccaatccgtggaacgcaccaaacccaaagccaaaatcgctgagaatcctgctaatcctccagtgggaggcaaggccaagtcacccatgtttccagcgctgggcgaggcctcctccgacgatgacctgtttcagtcagccaagcctaagcctgctaagaagactaatccctttcccctcctggaggatgaggatgatctatttacggaccagaaggtgaagaaaaatgaaacaaagagttcatcccaacaggacgttatcctgaccactcaggatatttttgaggacgacatcttcgcaaccgaggccatcaagccctcacagaagacacgcgaaaaggaaaagacactcgaatcgaacctgtttgatgacaatatcgacatatttgcagatctgaccgttaaacccaaggagaagtccaagaagaaagtggaggcaaagtctatcttcgatgacgacatggacgacatattttctactggaattcaggcaaagaccactaaacctaagtccagatccgcccaagctgcccctgagccacgattcgagcacaaggtttccaatatcttcgacgaccctctgaacgcattcggcggtcaatag

SEQ ID NO: 222765 - DNA, 3789 bp, synthetic construct
  misc_feature 1..3789: note = Description of Artificial Sequence: Synthetic coding sequence
  source 1..3789: mol_type = other DNA
atgaaccgcactaccccggaccaggagttggtgccagctagcgagcctgtttgggaacgcccatggtctgtcgaggagataaggaggtcgagccaatcatggtctctggcagctgatgcaggaagggtttacgatgaagaggtggaagagcccgtcctgaaggccgaagccgagaagacagagcaggaaaagacaagagagcagaaggaggttgatcttattcctaaagtgcaggaggctgtaaactatggactccaggtgctggacagcgcatttgagcagttggatatcaaggctggcaatagcgactcagaagaagatgacgccaatggtcgggtcgagctgatcctcgaacctaaggacctgtatatcgatcgcccactcccttacttgataggttcaaagctttttatggaacaagaggatgtcggtttgggcgagctgtcctccgaggagggtagcgtcggttcggaccggggatccatagtagacacggaagaagagaaagaggaggaagagtcagacgaggacttcgcacaccactccgataatgagcagaaccaacacaccacgcagatgagtgatgaggaggaggatgatgatggctgtgacttatttgcggattctgaaaaagaagaagaagacatcgaggacattgaggaaaacacaagacctaaaaggtcgaggccaactagctttgccgacgagttagccgcacggatcaagggagacgcgatgggtagagtcgatgaagagcctaccacgctgccatctggagaagctaagcccagaaaaaccctgaaggagaagaaggagagacgcacaccttccgacgacgaagaggataatctctttgccccacctaagctgacggatgaggacttcagtccttttggctcagggggaggcttgttcagtgggggaaaagggctctttgacgacgaagatgaggagtccgatctgtttaccgaagcctctcaggaccggcaggcgggtgccagtgtgaaagaagaatcgtcctcatctaaaccgggaaagaaaatcccagcaggcgctgtgagcgtgtttctcggggacaccgacgtgtttggtgccgcaagtgttccttcactgaaagagccacagaaacctgagcagccaactccaaggaaatcgccctacggcccacctcctaccggattgtttgacgacgatgacggtgacgacgacgacgattttttttccgccccacacagtaagccctcaaagacacgaaaagtccagagtacagctgacatattcggcgatgaagagggagacctctttaaggaaaaggctgtagcaagccctgaagctacagtatctcaaaccgacgaaaacaaggctagagcagagaagaaggtcacactgtcatacagcaagaacctgaagcctagctccgaaacgaagactcagaagggcctgttttccgacgaggaggactccgaggacttgttttccagccaaagcgccagcaatctcaaaggtgcctctctgcttcctggaaaattgccaaccagcgtttcgttgttcgatgatgaggacgaagaggacaacctgttcggcggaacagcggctaagaagcaaacattgagccttcaggcacagcgagaggaaaaggctaaggccagcgaactctctaaaaagaaggcatccgccttgttgttttcctcagatgaggagtggaacattcccgcaagtcagactcacttggcatccgatagcagatccaagggcgaacctcgggatagcggcaccctgcagagtcaggaagcgaaagccgttaagaaaacctccctgtttgaggaggataaagaggacgatctgttcgcaatagcaaaagatagccaaaaaaagactcagcgcgtatccttgctgtttgaagatgacgtggacagcggaggctccctgttcggcagtccccctacttctgtgccgccagcaacaaagaaaaaggaaacagtcagtgaggctcctcctctcctttttagcgatgaagaggaaaaggaagcacagctcggggtgaaatctgtggacaagaaggtggaaagcgcgaaggagtctctaaaattcggacgtacggacgtggccgaaagcgagaaagaaggcctgctcacgagaagcgctcaggagacagtgaaacacagcgatttgttttctagctcaagcccctgggacaaaggcacaaagcctagaacaaagacggtgctgtcactgtttgatgaagaagaggacaaaatggaggatcagaatataatccaggctcctcagaaggaggtgggaaaaggatgcgacccagatgcccatcctaagtccaccggggttttccaagacgaagagctattgttcagccataagttacaaaaggataacgaccctgacgtggatctgtttgccggaaccaagaaaactaagctgctggaaccctctgtcgggtctctgttcggggatgatgaggacgacgaccttttcagtagtgccaagtcccaacccctcgtacaggaaaagaagagggtcgttaaaaaagatcactctgtgaattcatttaaaaatcaaaagcacccagaatcgatccagggatctaaagaaaaaggaatctggaagccggaaacccctcaggccaatctcgccattaatcccgctgccctcctccctacagccgcatcccagatcagcgaggtgaagcctgtgcttccagagctggccttcccctctagcgaacaccggaggtctcacggacttgagtccgtaccagtactaccaggctctggcgaggctggggtgagctttgacctgcccgcacaagcagatactctccattctgcaaataagagtcgcgtgaagatgcgcggaaagcgacgtcctcagactcgggctgctcgacggcttgccgctcaggaatccagcgaagcagaggatatgagtgtccctcggggaccaattgctcagtgggccgacggggctatttcaccaaatggacatcgtccccagttgcgcgctgctagcggggaggactccaccgaagaggctcttgccgctgccgcagccccatgggagggaggccctgtccccggtgtcgatactagccccttcgctaagagcttgggccacagccgcggagaggctgatttatttgacagtggcgacattttcagtactggcaccggatcccagagcgtagagcgtacaaagcctaaggccaagattgccgaaaacccagccaatcctccagtggggggaaaagccaaaagtcccatgtttcctgctctgggcgaagcgagttcagatgacgatttatttcaatcagccaagcccaaacctgcaaaaaaaaccaatccctttcctttgcttgaagacgaagatgacttgtttactgatcagaaagtgaagaaaaatgaaacaaagtcatcttctcagcaagacgtgatactcacaacacaagatatttttgaggatgacatcttcgcaacagaggctattaaaccatcacagaagactcgagagaaggaaaagaccctggaaagcaacctgttcgacgataacatcgacatattcgctgacttgacagtaaagcctaaagagaagtccaagaagaaggtcgaggctaaatctattttcgatgacgacatggacgacatatttagcaccggaatccaggccaaaaccactaaaccaaagtcccgctccgcacaggcagcccctgaacctaggtttgagcacaaagtttccaatatctttgacgacccactgaacgctttcgggggacagtag

SEQ ID NO: 222766 - DNA, 399 bp, synthetic construct
  misc_feature 1..399: note = Description of Artificial Sequence: Synthetic coding sequence
  source 1..399: mol_type = other DNA
atggaggatcaaaacattatccaggccccacagaaagaggttggcaagggctgtgatcctgacgcacatccaaaatccaccggtgtctttcaggatgaagaactgttgtttagtcacaagttgcagaaggacaacgacccagacgtagatttattcgccggaactaaaaaaaccaagcttctggaaccctctgttgggagcctgttcggggatgacgaggacgatgaccttttcagtagtgccaaaagtcagcccctggtgcaggagaagaaacgcgtggtcaagaaagatcacagtgtgaattcctttaagaaccaaaagcacccggagtcgatacagggaagcaaggaaaaggggatctggaaaccggagactccgcaagtccggaaccccttatag

SEQ ID NO: 222767 - DNA, 3963 bp, synthetic construct
  misc_feature 1..3963: note = Description of Artificial Sequence: Synthetic coding sequence
  source 1..3963: mol_type = other DNA
atgatgaatcgcaccacacccgaccaggagcttgtccccgcttcagagcctgtgtgggagaggccctggtcagttgaagagattagacggtcttctcaatcatggagcctggccgcagacgcaggcctcttgcaattcctgcaggaattttcacagcagaccatcagccgcactcatgagataaaaaagcaggtggacgggttgatccgcgagaccaaagctaccgactgccgcctgcataacgtgtttaatgacttcttgatgctgagcaatactcagtttattgagaatcgcgtgtacgacgaggaagtcgaagaaccagtactgaaagccgaagccgaaaaaacagagcaggagaaaacgagagagcaaaaagaggtggacctgatcccaaaagtgcaagaggccgtgaactacggtttgcaagtgttggactctgccttcgaacaattggacattaaggctggaaactcggactccgaggaggatgacgccaacggacgtgtggagctgatcctggagcctaaagacttgtatattgaccgacccctgccgtatttgattggaagtaaactcttcatggagcaggaagacgttggcttaggagagctctcttcagaggagggtagcgtcgggtctgatagaggctcaatcgtcgataccgaagaagaaaaggaagaggaagagtctgacgaggacttcgctcatcattcggataacgagcagaatcagcatacaactcagatgtctgatgaagaggaggacgatgacggctgtgacctgtttgctgattccgaaaaagaggaggaggacatcgaagacatagaagagaatacacgacctaaaagaagccgcccaacaagcttcgccgacgaactggcggcacggataaagggcgacgctatgggaagggttgatgaggaacccactactctcccaagcggtgaggcaaagcctaggaagaccctgaaggagaaaaaagagagacggacaccctcagatgacgaagaagacaatctttttgcacccccaaagctgaccgacgaagacttctctccatttggctcaggaggtggcctgtttagcggcggtaagggcctgtttgacgatgaagacgaggagtccgatctctttactgaggcctctcaagaccggcaagcaggggctagtgttaaagaggaaagctcctcgagtaaacctggtaaaaagatccccgcaggagcggtatccgtgtttctcggagacacagatgtgtttggcgctgcttctgtcccgagtctgaaagaaccacaaaagccggaacagcctactccacgcaaatccccgtatgggccacctccaaccggacttttcgatgacgacgacggcgatgatgatgacgacttctttagtgcgcctcacagtaaaccaagtaaaacgcggaaggtgcagtcaacagcagacattttcggtgacgaggagggcgatctattcaaggagaaggcagtcgcaagccccgaggctactgtatctcagactgatgaaaataaggcacgagccgagaaaaaggttacactgtcttactctaaaaacttaaaaccaagcagtgagacaaaaacccaaaaaggcctcttctctgatgaagaagatagtgaggacttattttcttcccagtccgctagtaatcttaagggtgctagtctccttcccggtaaacttcccactagtgtctctttattcgatgatgaggacgaggaagataatctgtttgggggtaccgccgctaaaaaacagacgctgtcactacaagcccagcgcgaggagaaggcaaaagcaagtgagctgagcaagaaaaaagcctcggcactgttgttcagcagcgacgaggaagaccagtggaatattcctgcttcccaaacgcatttggcatctgactctaggagtaaaggcgaaccccgagattctggaaccttacagtcccaggaggcaaaggcggtaaagaagacttccctgtttgaggaggacaaagaggacgatctgtttgcgatcgccaaggactcacagaagaagacgcagcgggtgagccttctgttcgaggatgacgtggacagcggaggatcactgttcgggtcgccacccacaagtgtgcctcctgccacaaaaaaaaaggaaaccgtatctgaggcgccacccctgcttttctctgacgaagaagaaaaggaggcgcagttaggggtcaaatctgtggataagaaggtggagtcggcaaaagagtctctgaagtttgggagaacagacgtggccgaaagcgaaaaagagggactgctgactcgtagcgcccaagagaccgttaaacatagcgatcttttctcctcttcttctccttgggataaaggcacaaaaccaagaaccaagacggtgctgagcctgttcgacgaggaggaagataagatggaagaccagaacatcatccaagcaccccaaaaagaggttgggaaagggtgtgaccccgatgcccatcctaagtcaaccggcgtctttcaggacgaagagttgttgttctctcacaaattacagaaagataacgatcccgacgtggacctcttcgctggtacaaagaagaccaagttattagaaccatccgtaggcagtctgttcggtgacgatgaggatgatgatctcttttcgagcgccaaatcccagccacttgtccaagagaaaaagcgagttgttaagaaggatcacagtgtgaattcctttaaaaaccaaaaacacccagaatcaatacaaggcagcaaggagaagggcatctggaaaccagagactccccaagccaatcttgccattaatccagctgccttgttgcctactgctgcatcacagatctcagaggttaagcccgtgctccccgaattagcgttcccatcaagtgagcacagaagaagtcacgggctcgagagtgtgcccgtcttgcctggcagcggcgaggctggtgtcagcttcgatcttcctgcgcaagctgacacgctgcacagtgccaataaatcacgcgtaaagatgcggggaaaacgtagaccccagacccgtgcagcacgcaggctcgctgcccaggagtcgtccgaggcagaggacatgagcgtgccacgcggaccgattgcccagtgggctgacggagccatcagtccaaacggtcacagaccccagctacgtgccgcttccggcgaggacagcaccgaggaggctctggcagctgctgctgcaccatgggagggcggacccgtgcccggtgtggatacctctcctttcgcgaagtcactcggacatagccgcggtgaggccgacctgtttgactccggcgacatattctctaccggcacaggcagccaaagcgtggagagaaccaagcccaaggcaaagatagccgaaaatcccgctaacccccctgtcgggggtaaagccaagtcccccatgtttccagctctgggggaggcttcttctgatgacgatctattccaatccgcgaaacccaagcccgcaaaaaagaccaacccattcccattacttgaagatgaggatgacctgtttactgatcagaaggtcaagaagaacgaaaccaaaagcagtagtcagcaggacgtgattctgacgacccaggacattttcgaggatgatatttttgccaccgaggcaatcaagccctctcagaaaacacgcgagaaagaaaagaccctggagagcaatctgtttgacgataacattgacatttttgccgatttgaccgttaagcctaaagaaaaatccaaaaagaaggtggaggcaaaatcaatctttgatgacgatatggatgatatcttcagcaccggtattcaggccaagaccaccaaacccaagtccaggtctgcacaggcggcacctgaaccaaggttcgagcacaaagtttcgaatatattcgatgatcccttgaatgcctttggtggccagtag

SEQ ID NO: 222768 - DNA, 4026 bp, synthetic construct
  misc_feature 1..4026: note = Description of Artificial Sequence: Synthetic coding sequence
  source 1..4026: mol_type = other DNA
atgatgaacagaacaactccagatcaagagctggtccctgccagcgaacccgtgtgggaaaggccctggagcgtggaagaaatcagaagatcgagccaatcatggagtctggccgcagatgccggtctgttacaatttctccaggaattctctcagcaaaccatctcgcggacacacgaaatcaaaaaacaggtggacggtctgatccgcgaaaccaaagcaacagactgccgcctccacaacgtgttcaacgattttctgatgctttccaatactcagtttatcgagaatcgggtctacgatgaggaagtagaagagccagtgttaaaggctgaagccgaaaaaacagagcaggagaagacacgggaacagaaggaggtggacctgatccctaaagtccaggaggcggtgaattatggactacaggtgctggattctgctttcgaacagctggacattaaagcaggcaactccgactcagaggaggacgacgcaaacggcagagtggagctgattcttgagcccaaagacttgtatatcgatagaccactgccttacttgattgggagtaagctgtttatggaacaagaggatgttggcctgggggagctgtcctctgaggagggcagtgtgggctcagaccggggatctatcgttgatacagaagaagaaaaggaagaggaagaatctgacgaagattttgcacaccactccgataacgaacaaaaccagcacactacccagatgagtgatgaagaagaagatgacgacggctgtgacctatttgccgacagcgaaaaagaagaagaggatatcgaggatatagaagagaatacgcggccaaagcggtccagacctaccagcttcgcggacgaactcgctgctagaatcaagggcgatgcaatggggagagttgacgaggaacccaccacgctccccagtggggaggcaaagccccgaaagaccctgaaggagaagaaggagagaagaactccatctgatgatgaagaggacaatcttttcgcccctcctaagttgactgatgaagatttttcaccatttggaagtggcggaggcctgtttagcggtggtaaaggcctcttcgatgatgaggacgaggagagtgacctgttcaccgaggccagccaagatcggcaggcaggagcttcggtaaaggaggaatcaagttcttccaagccgggaaagaagatacctgccggtgctgtcagcgtctttctaggtgacaccgacgttttcggagcagcgtccgttcccagcttgaaggagccccagaagcctgagcagcccacccctcgaaagtctccgtatggaccaccacccacgggacttttcgatgacgacgatggggatgacgatgacgacttcttttccgccccacactcaaagccatcaaaaacaggtaaagtgcagtcgaccgctgatatcttcggagacgaagagggtgatctgtttaaggagaaggccgtggcctcgcccgaagcaactgttagccagacggacgaaaataaagcccgagcagagaagaaagtgacccttagttactcgaagaacctgaaaccatcatctgagaccaaaacacaaaaaggtctgttctccgacgaggaggactccgaagatctgtttagtagccagtctgcgagtaatctgaaaggagcatccctgctgcctggcaagctccccaccagcgtctcactttttgatgacgaggacgaggaagataacctgttcggagggacagcggcaaaaaagcaaactttatccctgcaggctcagagagaagaaaaggccaaagcatcagaactctccaaaaagaaagccagtgcactgttgtttagctctgatgaggaagatcagtggaatatccccgcttcacagactcacttggcaagcgactcacgttctaagggggagccacgcgatagcggcaccttgcagagtcaggaagccaaagccgtgaagaaaaccagtctcttcgaagaggacaaagaagacgacttgttcgctattgccaaggatagtcagaaaaagactcagcgcgtctcgctgttattcgaagatgacgttgacagtggaggcagcctgttcgggtctccgccaacgtccgtgcctccagcaacgaagaaaaaggagacagtatcagaagccccacctctgctattttctgatgaggaggaaaaagaggcccaactgggtgttaagtccgtcgacaagaaagtggagtccgctaaggaaagcctgaagtttggtaggaccgacgtggcggagagcgagaaagaaggactgctcaccagatccgcccaagaaacagttaaacacagtgacctgttctcctcttcaagcccttgggacaaggggaccaagcctcgaacaaagacagtattgtcactttttgatgaagaagaagacaagatggaagatcagaatattatccaagctccacagaaagaagtgggcaaagggtgtgaccccgacgcccaccctaagtccaccggtgtgtttcaggacgaggagctgctgttctctcataaactccagaaggataacgatccggacgtggatttgttcgctggaacgaaaaagacaaaattgcttgaaccatccgtgggctcactgttcggtgacgacgaggatgatgatctgttttcttcagcaaaaagtcagccattggtccaggagaaaaaacgggtggttaagaaggatcatagcgtgaattcatttaaaaaccagaagcatcccgagtctattcagggctccaaagaaaaagggatatggaaaccggaaacaccacaagattcaagtggcctggccccatttaagacaaaggagccctccacacgcattggtaagatccaggccaatttggcaattaaccctgctgccttacttcctaccgccgctagccagattagcgaggtgaagcccgtgctgcctgaactcgcttttcccagctcggaacatcgacggtcccacggtttagaatccgtgccagtgctccctgggagcggagaagcaggagtgtctttcgatctgcccgcacaggctgataccttgcattccgcaaataaatctcgcgtcaagatgagaggcaagcgaagacctcagacccgtgccgctcgccgtttggcggcacaagagtcgtcagaggctgaggacatgtccgtgcctcggggtcctatcgcgcagtgggccgacggtgctatctctcccaatggccaccgcccacagctcagagcagcctctggtgaggattccaccgaggaggcgttggctgccgcagccgcaccttgggagggcggtcccgtgcccggtgtggatactagcccttttgcaaagtccctgggacacagcagaggagaagcagacctattcgattcgggcgacatcttttctactgggaccgggtcccagtccgtggaacgcaccaaacccaaagccaagattgccgaaaatcctgcaaatccgccagtagggggaaaggccaaatcacccatgttcccagctctgggagaagctagcagcgatgatgatcttttccaaagcgccaagccgaagcccgctaaaaaaacgaacccttttcccctgctggaggacgaggacgacctgttcactgatcagaaggtgaagaaaaatgaaacgaagtcttcctctcagcaggatgtgattctgaccacccaagatattttcgaagatgacatattcgccacagaagcaattaaaccctcacaaaaaaccagggagaaggaaaagaccctcgaaagtaacttgttcgacgacaacattgacatattcgccgatcttaccgtgaaaccgaaagagaagagcaaaaaaaaagtcgaagcaaagagcatatttgatgacgatatggatgacatcttctcaactggaatccaggccaaaactacaaaaccaaagagcagatccgctcaagcagctcccgaaccgcgtttcgagcacaaggtgagtaatatattcgacgatcccctcaacgcatttggaggacaatag

SEQ ID NO: 222769 - DNA, 840 bp, synthetic construct
  misc_feature 1..840: note = Description of Artificial Sequence: Synthetic coding sequence
  source 1..840: mol_type = other DNA
atgatgaacaggaccacgccggaccaggaactggtgccagcttctgagcccgtttgggagcggccttggtcggtggaagaaattcgcaggtcttctcagtcttggtctttggctgctgacgcaggcagagtatacgatgaagaagtagaggagcccgtcctgaaggcagaagcagagaagaccgagcaggagaagaccagagaacaaaaggaggttgacctcatccctaaagtgcaagaggctgtaaactacggacttcaggttctcgattccgcctttgaacagcttgacataaaggcgggtaattctgacagtgaggaggacgatgccaatgggcgtgtggagttgattctcgagcctaaagatctatacatagaccggccattgccctacctgatcggttcaaagttattcatggaacaggaggacgtgggactgggagagctttcctcagaagaggggagtgtggggtcagaccgcggtagtatagtggacacagaggaggaaaaggaagaggaggagagcgatgaggactttgctcatcactccgataacgagcagaaccagcatacaactcagatgtccgatgaagaagaggacgacgacggctgcgatctgttcgccgattcagagaaagaggaagaagatatagaagacatagaggagaacaccagacccaaacgaagtcgtccaacatcgttcgcagatgagcttgctgccagaatcaagggagatgctatgggtagggtggacgaagaaccaacaactttgccttccggtgaagctaaaccacgcaagaccctgaaggagaaaaaagaaaggcgtacgccttccgactag

SEQ ID NO: 222770 - DNA, 3762 bp, synthetic construct
  misc_feature 1..3762: note = Description of Artificial Sequence: Synthetic coding sequence
  source 1..3762: mol_type = other DNA
atgcccaggctgtccggtaaatctgtgagagtttacgacgaggaagttgaagaacccgtcctcaaagcagaggcggagaagaccgagcaggagaagacacgggagcaaaaggaggtcgacctgatacccaaggttcaggaggctgtgaattatgggctgcaggtccttgattctgcctttgagcaattggacatcaaggcgggaaacagtgactctgaggaggatgatgccaatgggcgagtggaactgatactagaaccaaaggacctatatatcgaccggcctttgccttaccttatcggtagtaagttgttcatggagcaagaagacgttggacttggcgagctctctagcgaggaaggttccgtagggagtgatagagggtcaatagtcgataccgaggaggaaaaggaggaagaagaatcagacgaggattttgctcaccacagcgataatgagcagaatcagcataccacacagatgagcgatgaagaagaggatgatgatggttgtgacctgttcgccgactcagaaaaagaggaggaggacatagaggacatcgaggagaacacccggccaaagagaagcaggccgaccagctttgccgacgagttagccgcacgcatcaagggcgatgctatggggagggtcgacgaggaacccacaacgttacctagcggcgaggcaaagccaaggaaaactttaaaggaaaaaaaggagaggagaaccccctctgacgatgaggaggataatcttttcgctccacccaaactgaccgacgaagacttttcccctttcggatccgggggtggcttgttttccggaggcaaagggctgttcgacgatgaagatgaggagagcgatttattcacagaggcctcccaggacagacaagctggggcttccgttaaagaggagtcctcatcctccaagcccggaaagaaaatcccggcaggcgctgtatccgttttcctcggagacaccgatgtgtttggcgcagcatctgtgccaagtcttaaggaaccccaaaagcctgaacagcctactccccgaaaatccccttatggtccccctcccactggcttatttgatgacgacgatggcgatgatgacgacgactttttctcggcgcctcattctaagcccagcaagactggtaaggtgcagtcaaccgcagacatttttggggacgaagagggggaccttttcaaagagaaagccgtagccagtccagaggccaccgtatctcaaactgacgagaataaggctcgtgccgaaaagaaggttactctttcttactcaaagaacctcaaaccttcatccgagactaagacccagaaaggcctgttcagcgatgaggaagactctgaggacctttttagctcccagagtgcaagcaacctaaagggtgcctcactcctgcctggaaaactccccacctcagtttctttgtttgacgatgaggacgaggaagacaacctatttgggggaactgccgcaaagaaacaaacccttagtcttcaggcccagcgggaagaaaaagccaaagcatccgaactgtctaagaaaaaagctagtgcgttgctgttctcaagcgacgaagaggatcaatggaacatcccagcgtcacagactcatctggccagtgatagcaggagcaaaggagaaccaagagacagtggcacacttcagtctcaggaggcaaaggcagttaaaaagacctctctgtttgaggaggacaaggaggatgatttgtttgctatcgccaaagatagccagaaaaaaacgcagagagtatccctgctcttcgaggacgacgttgattccgggggaagtctgttcgggtcaccgccaacttcagtgccccctgccactaagaagaaggaaacggtgtctgaggcaccacctctgctgttcagtgacgaggaagagaaggaggcccaattgggcgtaaaatcagtggacaagaaggtcgagtccgcaaaagagtccctgaaattcggtagaacggatgtcgcagaaagcgaaaaggaggggctgctcaccagatctgcacaagagaccgtgaaacactccgacctgttcagttcgagtagcccttgggataaaggcacgaaacccagaacaaagacagtgctgtccttgttcgatgaagaggaggataagatggaagaccagaatatcatccaggccccacaaaaggaggtgggtaaggggtgtgatcccgatgctcacccaaagtctacaggggtgtttcaggacgaagagctgctgttcagccacaagctgcagaaggacaacgatcctgatgtagatctgtttgccggtacgaagaagaccaagctcctcgaacccagtgttgggagtctgttcggggacgacgaggatgatgatctcttctcctctgccaagagccagccactggtacaagagaagaagagagtggtgaagaaagatcattctgttaactcatttaaaaaccagaaacacccagagagtattcagggttcaaaggaaaagggtatctggaagccagagactccccaggacagttccggcctcgcgccatttaaaacaaaagagccgagcacaaggatcggtaagatccaggcaaacctcgccatcaaccccgcagctctgcttccgacagccgcttctcagataagtgaagtgaagccagtactgcctgagcttgcattcccctcctccgaacacagacggtcgcacggcctcgagagcgtcccagttcttccaggatctggcgaagccggtgtgtcattcgatctgccggctcaggctgacaccttgcacagtgcaaataagagtcgtgtgaagatgcgcggtaaaagacgtcctcagacccgtgccgcacgaaggctggccgcacaagaatcttctgaagctgaggatatgagcgtgcctcgtggccctatcgcccagtgggccgatggcgctatttctccaaacggtcatcgccctcagctaagggccgcttctggcgaggactctactgaagaggctttggcagccgcagccgcaccatgggaaggcggaccagtacctggagtggacacatccccttttgccaaatcactaggacattctagaggtgaggctgatttattcgactcaggcgacatattctctacaggaaccgggagccagtcagtagaaaggacaaagccaaaagcaaaaatcgcggagaatcccgctaatccgcctgtcggagggaaagccaagagccccatgtttcctgccctaggagaagcctccagtgacgatgatctgttccagtccgctaaacctaagccagctaagaagaccaatcctttcccactgctggaggacgaggatgatctttttaccgaccagaaggtcaagaagaacgagacgaagtcaagttcgcaacaggatgtgattctcaccacccaggatatctttgaagacgatatcttcgctactgaagccatcaaaccttctcagaaaacgcgggaaaaggaaaagacactggagagcaaccttttcgacgataacattgacatcttcgcagacctgacggtcaaacctaaggagaagtctaagaagaaagtggaagcaaaatccatctttgacgacgacatggatgatatcttttccaccggcattcaggccaagacaactaagcctaaaagccggtcagcccaggccgcaccagaaccaagatttgagcacaaggtgtccaatattttcgacgacccgttgaacgctttcggcggacaatag

SEQ ID NO: 222771 - DNA, 3738 bp, synthetic construct
  misc_feature 1..3738: note = Description of Artificial Sequence: Synthetic coding sequence
  source 1..3738: mol_type = other DNA
atgatgaatcggaccacccccgatcaggagctcgtgcccgctagcgagcccgtatgggaaagaccctggagcgtggaagaaattcgacgctcatctcaaagctggtctttggcagcggacgcaggcctgctgcagttcctgcaggagttttcccaacagaccatttcccggacacatgaaatcaaaaagcaggtggatggtctcattcgtgaaacaaaggcaacggactgtaggctgcacaatgtattcaacgacttcttgatgctgtctaacacacagttcatcgagaaccgggtttacgacgaggaggtggaggagccagtcctgaaagccgaagcagagaagacagagcaggaaaaaactagagagcaaaaggaagtcgacctaatcccaaaagtgcaggaggcagtcaattatggtctgcaagtcttggattccgccttcgaacagctggacataaaggccggtaactcagacagcgaggaggatgacgcaaatgggagagtggagctgatcctggagccaaaagatctatacatcgacagaccgcttccctatctcatcggctccaagcttttcatggagcaggaagatgttggcctgggagagttgtcatcagaagagggatctgtgggctcagacagaggatcgatcgtcgataccgaggaggaaaaggaagaggaggagtccgacgaagatttcgcacaccacagcgataatgaacaaaatcaacatactacccagatgtctgacgaagaggaagacgatgacggatgcgatctgttcgccgatagtgaaaaagaagaggaggatatcgaagacattgaagaaaatacacgcccaaaacggtcccgccctacatccttcgcagatgagctggctgcccgaatcaaaggcgatgctatgggcagagtcgacgaggagccaaccaatgaagaggataacttgttcgcccctccaaagctaacagatgaagacttctcaccattcggtagcgggggtggcctgttcagtggaggaaaaggcttgttcgatgatgaggacgaagagagcgatctctttacggaggcctctcaggacagacaggccggtgcatcggtaaaggaggagagcagtagttctaaaccgggaaagaaaattcctgccggtgccgtatctgtattcctcggggacacggatgtcttcggtgctgcttctgtgcctagcctgaaggagccacagaaacccgagcagcctactccaaggaagtccccttacggacctccacccactggcctgttcgatgacgacgatggggatgacgacgatgatttctttagtgcgccacacagcaagcccagtaaaacccgaaaggttcagagtactgcagatatcttcggagatgaggagggagaccttttcaaggaaaaagccgtcgcctcaccagaggcgaccgtgagtcaaaccgacgaaaataaagcccgagccgagaaaaaggttacactgagttatagcaaaaacctcaagccttcctcagagacaaaaacacagaaaggcctgttcagcgacgaagaagactccgaggacttattttctagccagtcagcttccaatctcaagggagcttctctattgcccggtaagctgccaacctcagtttcactgttcgatgacgaggacgaggaagataacctttttggaggaacggccgctaaaaagcagactctgtccttgcaagctcagagagaggagaaagcaaaggctagcgagctgagcaagaagaaggccagcgctttgctgttctcaagcgacgaggaagaccagtggaacatccctgcctcccagactcatctcgctagtgactccagaagtaaaggagagccaagagattccggcaccttgcagagtcaagaggcaaaggcggtgaagaagacttctctgttcgaggaggacaaagaggacgacctgtttgcgattgctaaggactcccagaagaaaactcagagggtttccctcttatttgaggatgatgtggatagtggtggatctctgtttgggagcccgccaacctcagtcccaccagccacaaaagagggcctactcacaagaagcgcccaagaaaccgtgaagcactcggatcttttttcctcatcctcgccttgggataaggggaccaagccccgaacgaaaacagtcttgagcctttttgacgaggaggaggacaagatggaagaccaaaacatcatccaggctccacagaaggaggtgggaaaaggatgtgatcccgacgcgcatcccaagtcaaccggggtgttccaggatgaagagctgctgtttagtcacaagttgcagaaagacaacgaccctgatgtggacctgttcgccggtacgaagaaaaccaaactgctggaacctagcgttgggtccctatttggggatgatgaagacgacgatttgtttagtagtgccaaaagccaacccttagtacaagagaagaaacgcgtagtgaagaaagatcactcagtcaactcttttaagaaccagaaacaccctgagtccatacagggcagcaaagagaagggcatttggaaacccgaaacaccccaggccaatctggcgatcaatcctgccgctctccttcctacagctgcgtcccagattagcgaggtaaaacctgttttgcctgagctggcctttccgtcttccgaacaccgaagatcacatggcctcgaatccgtcccagtgctccccggttcaggcgaagctggcgtgagttttgacttacccgctcaagctgatactctccattcagctaacaagagccgggtgaagatgaggggaaagagaagacctcagacccgcgctgcacggagactggccgcacaggagagtagcgaagccgaagatatgagcgtgccacgcggaccaattgcacagtgggctgatggcgcaatctctcccaacggtcaccgccctcagcttcgggctgcgtccggggaggattccactgaggaggctctagcggcagcagcagccccatgggagggcggtcccgtgccaggtgtcgacacctctcccttcgcaaaatcactggggcatagccgcggagaggcagacctgtttgactcaggcgacatctttagcacaggcactggctctcagtctgtggagcgtaccaaacctaaagcaaaaatcgctgaaaatcctgccaacccacctgtgggtgggaaagccaaatcacccatgtttcccgcactgggagaagcctccagtgatgatgatctgttccagtccgctaagcccaaaccagctaaaaagacaaacccatttcctctgctcgaggacgaagatgatctcttcaccgatcagaaagtgaagaagaatgaaaccaagtcatctagccagcaggacgtgattctcaccactcaggatatcttcgaggacgatattttcgctactgaggccatcaaaccttcccaaaaaacacgggaaaaggagaagacgctggaatccaacttgtttgacgataacatagatatttttgctgacctcaccgttaagcctaaggagaagagcaagaaaaaagtggaagccaaaagcatctttgacgacgacatggatgacattttttccaccggaattcaggcaaagacgactaagccgaaatccaggtcggctcaagctgctccagagccaaggtttgagcacaaggtgtcaaatatttttgacgaccctttaaatgcctttggagggcagtag

SEQ ID NO: 222772 - DNA, 3840 bp, synthetic construct
  misc_feature 1..3840: note = Description of Artificial Sequence: Synthetic coding sequence
  source 1..3840: mol_type = other DNA
atgatgaatcgtaccacacctgaccaggagttagttccggcttcagaacccgtttgggagcgcccatggagtgttgaggagattagacggagctcacagtcctggtcgttggccgcagacgctggactgcttcagtttctgcaggagttctcacagcagactatatctcgcactcacgaaattaaaaaacaggttgatgggctgatccgtgaaaccaaggcaacagactgcagactgcataatgtcttcaatgactttttgatgctatccaatacccaatttattgagaatcgagtgtatgatgaggaggtggaggagccagttttaaaagccgaggctgagaaaacggaacaggagaaaacacgggagcagaaggaggttgatctgatccccaaggtgcaggaagccgtgaactatggcctgcaggtgctagactctgccttcgagcagcttgatatcaaagcagggaactctgactctgaggaggatgacgcgaatggtagagttgagctcattttggagccaaaagacttgtacatcgatcggccacttccatatctgatcgggtcaaaactattcatggagcaagaggatgtgggactgggggaactttcttcagaagaggggagcgtgggatcagatagaggatccattgtggacacagaggaggagaaggaggaagaagagtccgatgaggacttcgcacatcacagtgataacgagcaaaaccagcatactacccagatgagcgacgaagaggaagacgacgacggctgcgatctcttcgctgattcagaaaaagaggaggaagacatcgaagatatcgaggagaacacacgtccgaagcgctcaaggccaacatcgttcgcagacgagctggcagcgagaatcaagggggatgccatgggcagggtggatgaagagcctaccaccctcccatcaggcgaagctaagccgaggaagaccctgaaggagaaaaaagaaaggagaacgccctctgacgatgaggaggacaatttatttgctccacccaagctgaccgatgaggacttcagcccgtttggctctggaggtggactgttcagcgggggaaaaggtctttttgatgatgaggatgaagagtccgacctctttactgaagcatcccaagatcgccaggcaggggcatctgtcaaggaagaaagttctagtagtaaaccgggaaagaagattcctgccggagccgtgagcgtttttttgggggacacagatgtcttcggggctgccagcgtgccctctctgaaggaaccacagaaaccagagcagccaaccccacgaaagagcccctatggacctcctccaaccgggctctttgacgatgatgacggcgatgatgacgacgacttcttctccgctccacatagcaaaccttctaaaaccaggaaggtccaaagtacagccgacatttttggggatgaagagggagacctgttcaaggagaaggcagtggctagtccagaggctaccgtgagccagacagacgaaaacaaggctcgcgcagagaagaaagtaacattatcttactctaaaaatctgaagccttcctcagagacaaaaacccagaaagggttgtttagcgacgaggaagattcagaggatctattcagcagtcagtctgccagtaacctcaagggagcgtctctcctgcctggcaagttgccgacctctgtgagtctgttcgacgacgaagatgaggaagataacctctttgggggaactgctgcgaaaaagcagactctctccctgcaggcccagcgcgaagaaaaggctaaggctagcgaactgtccaaaaagaaagcttccgctctcctttttagcagtgatgaggaggatcagtggaacattcccgcaagtcaaacccacctagcctctgactcgagatctaaaggcgagccaagagattctgggacgctgcaaagtcaggaggccaaggccgtcaagaagacaagcctgtttgaggaggataaggaggatgatttgttcgccatcgccaaagatagccagaaaaaaacccagcgcgtctcactgctgtttgaggacgacgtcgattccggaggtagcctgttcggatcccccccaacctccgtgccccctgccaccaaaaagaaagagactgtctccgaggcaccaccactgctgttttccgatgaagaagagaaagaggcacagcttggtgtgaaaagcgtcgataaaaaggtggagtctgccaaggagtcattgaagttcggaaggaccgatgtagcagagtctgagaaggagggtttgctaacacggtccgctcaggagacagttaaacacagtgaccttttctcaagctcctcaccctgggataaagggaccaagcctaggaccaagaccgtgctttccctctttgatgaagaagaggacaagatggaggaccagaacattatccaagccccacaaaaggaagtgggtaaaggttgcgaccctgatgcccatcctaaaagcaccggtgttttccaggatgaagaattgctattctcccataagctacagaaggacaacgatcctgacgtcgacctgttcgctggcaccaagaaaactaagttacttgagccgtctgttggaagcttgtttggggacgatgaagacgacgaccttttttcttctgcgaaatcacagcccctggctaaccttgccattaacccggctgccctgctacctacagctgctagtcagatctcagaggtgaaacctgtcctgccggagcttgcttttcccagctctgagcatagacgctcacacgggttggagagcgttcctgtacttcccggaagtggcgaagccggagtctcctttgacctccccgctcaggcggatacactgcactccgcgaacaaaagcagggtaaagatgaggggcaagaggcgtcctcaaacccgggctgccaggcggcttgctgctcaggagtcctcggaggccgaggatatgtctgtccccagaggtcccattgcccaatgggccgatggtgctatttcacctaatggacacaggccacagctcagagcagccagcggagaggacagtactgaggaggctctggcagcagcagcagctccttgggaaggagggcctgttcccggagttgatacgtccccttttgccaaatctctggggcattcaagaggagaggcagatctcttcgacagcggagacattttttctactggcactgggtcccagtcggtggagaggaccaaacctaaagccaagattgctgaaaaccctgcgaatcctccagtaggagggaaagctaagtcgccaatgtttcccgctctcggggaagcgagttcagacgatgacctgttccaaagcgccaagcctaagcccgcaaagaagactaaccccttccccctgttggaggatgaggatgacttatttaccgaccagaaagttaagaagaacgagaccaaatcctccagccagcaggacgtaatcctgacgacccaagatatcttcgaggatgatatctttgctactgaggctatcaagccctcgcagaagactcgcgagaaggaaaaaacgttggagtccaatctgttcgatgataatatcgatatttttgccgatctaaccgttaagcctaaggaaaagtctaaaaaaaaagtggaggccaagagtattttcgatgatgatatggatgatattttttcgacaggtatccaggccaagacaaccaaaccaaagagcagaagcgcccaagccgctcccgaacccagatttgagcacaaggttagtaatatctttgacgaccccctcaatgcctttgggggtcagtag

SEQ ID NO: 222773 - DNA, 1329 bp, synthetic construct
  misc_feature 1..1329: note = Description of Artificial Sequence: Synthetic coding sequence
  source 1..1329: mol_type = other DNA
atggccgagggggaaggttacttcgccatgtccgaagacgagctggcttgctccccttatatacctttagggggagattttggcggaggagacttcggcggaggcgatttcggcggaggagacttcggtggtggtgggtctttcggagggcactgcctcgattattgtgagtcacccacggcacactgcaacgtgctgaactgggagcaggttcagagactggatggtatcctatccgagacaatacctatccacggcaggggaaactttcctacactcgaactccaaccgagcctaatcgttaaggtggtcagacgcagattggcagagaaacgtataggagtccgcgacgtgcgcctgaacggttcagccgctagccatgtgctgcaccaggatagcggcctcggttacaaggatttggatttgatcttttgtgctgacttaaggggcgaaggggagttccagacagtgaaagacgtagtgctggattgtctcctggattttctgcccgagggggtaaataaggagaagatcactcccctaacactgaaagaggcttacgtgcagaagatggttaaagtttgtaatgactcagatcgttggagtctcatttcactgagtaacaactccggtaagaatgtcgagcttaaatttgtggacagcctcagaagacagtttgaatttagcgttgattcatttcaaattaaattagactctctgctccttttttatgaatgctccgagaatccaatgaccgagaccttccacccaacaattattggagaatccgtttatggagatttccaggaagcgtttgaccacctttgtaacaagataatagcaacgaggaatcctgaggaaatcaggggcggaggcctgcttaaatactgcaatctattggtgcgtggctttcggcctgcatcagacgaaatcaaaacactgcagaggtatatgtgctccaggttctttattgacttttccgatattggcgaacaacaaagaaagcttgaaagttacttacagaatcactttgtgggtctcgaggataggaaatacgaatacctgatgacgttgcacggcgtggtcaacgagtccacggtttgtctaatgggacacgaacgcaggcagactctcaacctgatcactatgctggccatacgcgtcctcgcagatcagaacgtgatccctaacgttgcaaatgtaacctgttactaccagcccgctccctacgtcgccgatgcaaatttcagtaactactatatagcacaggtgcagcctgtgtttacatgccagcagcagacatactccacgtggctgccttgtaattag

SEQ ID NO: 222774 - DNA, 1176 bp, synthetic construct
  misc_feature 1..1176: note = Description of Artificial Sequence: Synthetic coding sequence
  source 1..1176: mol_type = other DNA
atggcagaggagtctagttgcactcgggactgcatgagcttttcagtgctaaattgggaccaggtctcgcgcctacacgaggtcctcaccgaggttgtaccgattcacggtcggggaaattttccaactctggagattaccttaaaagatatagtccagaccgtgagaagccggctcgaggaggctggaatcaaggtccacgacgtgaggctcaatgggtccgccgctggacacgtgctcgtcaaagacaatggcctggggtgtaaggatctcgaccttattttccacgttgccctcccaaccgaggcagagtttcagcttgtgagggacgtcgtgctgtgttcacttttgaacttcctgccggagggggtcaataagctcaagatatctcctgtgacgctgaaggaggcctacgtccagaagctggtgaaggtgtgcacggacaccgaccggtggtccttgatcagcttatcaaataaaaacggaaagaatgtggagctgaagtttgttgactcgattcgcaggcaattcgagtttagtgtggactccttccaaatcatcctggactctctgcttttcttttatgattgctcaaataaccctataagtgagcattttcatccaaccgtgattggggagtccatgtacggagattttgaggaggccttcgaccacctgcagaatcgccttattgctaccaaaaatccggaagaaatccggggtggagggcttctcaagtatagcaatctacttgtccgagatttccgacctacagaccaggaggagatcaagacactcgaacggtatatgtgttccagattctttattgattttcccgatattcttgaacagcagcggaagttggaaacttatcttcagaatcatttcgccgaagaggaacgctccaagtacgattatctaatgatcctcagacgggtcgtgaatgagtcgaccgtctgtctgatgggccacgagagaagacaaaccctcaatctgatttctctcctggctctgcgagtgctggccgagcagaatattatcccttcagcgacaaacgtcacttgctattatcagccagccccttatgtctccgatggcaatttctccaactactatgtcgcgcaccccccagtgacttattcccaaccatatcccacctggttgccatgtaattag

SEQ ID NO: 222775 - DNA, 2340 bp, synthetic construct
  misc_feature 1..2340: note = Description of Artificial Sequence: Synthetic coding sequence
  source 1..2340: mol_type = other DNA
atgcagcaggctctcgagctagccctggaccgtgcagaatacgtcatagagtcagctaggcagagacccccaaagcgaaaatacctcagttccggtagaaagagtgtgttccagaagttgtacgacctatacatcgaagaatgtgagaaggagcctgaggtcaaaaaactgaggagaaacgtcaatcttcttgaaaaacttgtgatgcaggagacactttcttgcctagtcgtaaacctctatccaggaaatgagggctatagccttatgctgcgcggtaaaaatggatctgatagcgagacgattagactgccttacgaggaaggagagctgctcgaatacctcgacgctgaagaactacctcccatcctcgtggacttgttagagaagagtcaggtgaacatctttcactgtggctgtgtgattgccgaaattcgtgattaccgccaatccagcaatatgaagagccctggctatcaaagccggcatatccttttgaggccaactatgcagactctgatatgcgacgtgcactctatcacaagcgataatcataagtggacacaggaggacaagctgttgctcgagagccaactcattctggccactgcggagcccctctgtttagaccccagtatcgccgtgacatgtaccgccaatagattgctatacaacaaacaaaaaatgaatacacgacctatgaaacggtgtttcaagagatactcccgctcctctctgaacagacaacaggacctgagtcattgccctccccctccgcaactgagattgttagactttctgcaaaaaagaaaggaacggaaagcagggcaacactacgacctgaaaatcagtaaggcagggaactgcgtggatatgtggaagagatccccctgcaatcttgccataccctccgaagtggatgtggagaaatatgctaaggttgagaagtctatcaaatcagatgacagccagcctacagtgtggccagcacacgatgtcaaggatgactatgtgtttgaatgtgaggcaggcacccagtaccagaagaccaagctgacaatcctgcagagcctaggggaccccctgtactacggtaagatccagccctgtaaggctgacgaggaatcggatagccagatgagcccttctcactcgagtacggacgaccacagcaattggttcattatcggttcgaagaccgatgcagagagagtggtcaatcagtatcaagaactggtgcagaacgaggccaaatgccctgtcaagatgtcacactcttctagtgggagcgcatctctttcacaggtgtctccaggtaaagaaactgaccagacagagacagtgtccgtccagtcttcagtgttaggaaagggtgttaagcatagaccaccaccaataaagctgcctagctcatccggtaacagttcttccgggaactactttactccccagcagacctcctctttcctaaagagccctacccctccaccaagtagcaaaccaagtagcatacctagaaagtcgagtgtggatctgaaccaagttagtatgctcagcccagctgccctgtctcccgcatcatccagccagcgaacaacagcaactcaggtgatggctaatagcgccggactgaacttcatcaatgtcgtcggctctgtatgcggcgctcaggcccttatgagcggaagtaacccaatgctaggatgcaacaccggagctatcaccccagccggtatcaatctctcaggactcctgcctagtggtggactcttgccaaacgccctgcccagtgccatgcaggcggctagccaggcaggggtcccattcggcttgaagaatacttctagcctgcgacctctgaatttgctgcagttgccaggtgggtccctgatctttaacactttgcaacaacagcagcagcagttgtctcagtttaccccccaacagccacagcaaccgacaacttgttcacctcaacagccaggtgaacagggctcggagcaaggaagcacttcccaggaacaggctttgagcgctcagcaggccgctgtgatcaacctgacaggagtagggagtttcatgcaaagccaggcggcagtcctgagccagctcggctccgccgaaaacaggccagagcaatcgctcccacagcaaaggtttcaactgtcctccgccttccagcagcagcaacagcagatacagcagctgcgcttccttcagcaccagatggccatggcagctgccgctgcccagaccgcccaactgcaccaccaccgtcacactggaagccagagcaaaagtaagatgaagcgcggaacgcccacaaccccaaaattttag

SEQ ID NO: 222776 - DNA, 2202 bp, synthetic construct
  misc_feature 1..2202: note = Description of Artificial Sequence: Synthetic coding sequence
  source 1..2202: mol_type = other DNA
atgcaacaggcgctggaattagcgctggaccgggcagagtatgtcatcgagtcagctcgccagcgccctccaaagcgaaagtacctttcatctgggcgtaaatcagtctttcaaaagctatatgacctgtacatcgaggaatgcgagaaggaaccagaggtcaagcagaagctgcgtcgcaatgtgaaccttctagagaagctggtgatgcaggagacactgagttgcctcgtggtgaacctgtatcctggcaatgagggctactccctaatgctgcgtgggaaaaacggaagtgattcagaaacaattcgcctgccatacgaggaaggtgagctgctggagtaccttgacgcagaagagctccccccaatcctggttgacctgctggaaaagagtcaagtgaacatattccattgtggctgtgtgatcgctgagattagggactaccggcagtcctccaatatgaagagcccaggttatcaaagccgccatatcttactgcggccaaccatgcagacgctgatctgtgacgtgcactcaattacgtctgacaaccataaatggacccaggaagacaagctcctattggagtcacagctgatccttgctacggctgagccactatgcctggacccaagcatcgccgtgacttgtacagcaaataggctcttgtataacaaacagaaaatgaataccaggcccatgaagcgctgttttaagagatattctaggagctccctgaatagacagcaagaccttagccactgtcctcctcccccacagctgcggctgctcgacttcctgcagaagagaaaggaacggaaggcaggacagcactacgatcttaaaataagcaaagccggaaattgtgtcgatatgtggaagagatctccatgtaatcttgccatacccagtgaagtcgacgtagaaaagtatgcgaaggttgaaaagtcgataaagagcgatgactctcagccaacagtgtggcccgctcacgatgtgaaagatgattacgtgttcgagtgtgaggccggtacccagtatcaaaaaacgaagctgaccatcctgcagtctctgggcgaccctctttactacggaaaaatacagccctgtaaagccgacgaggagagtgattctcagatgagtccaagccattctagtaccgatgaccactcaaactggtttattatcgggtcgaaaaccgacgcagagcgcgtcgtgaatcagtatcaggagcttgtgcagaatgaggccaaatgtccagtcaagatgagtcattcttcttccggaagtgctagtttaagtcaggtgtctcctggtaaggaaacagaccaaacagagaccgtctccgtgcagtcgtccgtgctcggcaagggtgttaaacatagaccccctccaataaaactcccttcttcctcaggaaacagcagcagcggaaactacttcaccccccagcagacctcctccttcttgaagagtccaacgcctccgcctagttcaaagccgtcaagcatccctcggaagtcatcagtcgatttgaaccaggtgagcatgctgtccccggctgcccttagcccagcaagctctagtcagagaaccactgccactcaggtgatggcgaactctgccggattgaatttcattaacgtagtcggaagtgtatgtggcgctcaggcattaatgtcagggagcaatccaatgctcgggtgtaatacaggggctattacccccgctgggatcaacctcagtgggctgcttcctagcgggggtctgctgccgaacgctcttccaagtgccatgcaggccgcatctcaggccggtgtaccattcggcttgaagaataccagtagtctgaggcccctaaacctccttcagttaccaggaggcagcctcattttcaatactctgcagcaacagcagcaacagctgagccagtttactccacaacagccccaacagcctaccacatgttcacctcagcagcctggggagcagggatccgagcagggctcaaccagtcaggaacaggccctaagtgcccaacaggcagctgtcataaatcttacaggcgtgggaagtttcatgcagtctcaggccgctgccgtggccatcctggcagcctctaatggttacggttcaagcagcagcacgaacagctccgctacatccagtagtgcatatagacagcctgtcaagaaatag

SEQ ID NO: 222777 - DNA, 2202 bp, synthetic construct
  misc_feature 1..2202: note = Description of Artificial Sequence: Synthetic coding sequence
  source 1..2202: mol_type = other DNA
atgcagcaggctctggaattagccctcgatagagcagaatatgtaattgaatccgctcggcagaggccacccaaacgtaagtatctcagcagcgggcgtaagagcgtgttccagaagttgtacgatctatacattgaggagtgtgaaaaggaacctgaggttaagcagaagctacggcgaaacgtgaatctgcttgaaaaactcgtcatgcaagaaaccctgtcctgcttggtcgtgaacctgtatccaggtaacgagggatactcactcatgctaagaggcaagaatggttccgacagcgaaactatcagactgccctacgaggaaggagaactgctcgagtatcttgatgccgaggagctgcctccaattctcgttgacctacttgagaagagccaggttaacatttttcattgtggatgtgttattgccgaaatcagagattataggcagtcgtctaacatgaagtcccctggctatcagtcccggcacatcctgttgagaccgactatgcaaacacttatttgtgacgtgcactccattacatccgataatcataagtggacccaggaagataagctgctcctggagagccagctaatcctcgcgacagcggagcccctttgtttggacccatccatagccgttacatgcacagccaatcggctgctctataataaacagaagatgaacacacggccaatgaagaggtgtttcaaacgttattctagatcatcactcaatcggcagcaggacttgagccactgccccccaccccctcagctgaggctactggatttcctccaaaagcgtaaggagaggaaagctggccagcactatgacctcaagataagcaaggccggtaactgcgttgatatgtggaagcgatccccctgcaatctggctattccaagtgaagtggatgttgagaaatatgccaaagttgagaagagtatcaagtccgacgactcccagccgacagtctggccagcacatgatgtgaaagatgattatgttttcgagtgtgaggccggaacgcagtaccagaaaacaaagctcaccatcctgcagtcgctgggagatccattatactatggcaaaatccagccatgtaaagccgacgaggagagtgatagccagatgtccccttcgcattcaagcaccgatgatcattctaattggttcatcattggttcaaagacggatgcagaacgggtcgtaaatcagtatcaggaattggtgcaaaatgaagccaagtgtcctgtcaagatgtcgcacagttcttccggttcagcctccctctctcaggtgtcgccgggaaaggagaccgatcagaccgagaccgtgtcagtacaaagttctgtgttgggaaagggtgttaagcatcgccctccacctattaaactgccttcaagcagtgggaactccagttctgggaattactttactccacagcagacttcgtcgttcctgaaatcgcccaccccaccgcctagtagtaaaccatccagcatcccacgcaagtccagtgtcgacttaaaccaggtctctatgctttcccctgccgctctgtccccagcatcatcttctcagaggaccactgcaacccaggtgatggcaaactctgcaggattaaactttatcaatgtggtcggcagcgtatgcggcgcacaggctctgatgagtggtagcaatccaatgctagggtgtaatacgggcgctataacccctgcgggtatcaacctgtcgggtctgctgccttccggaggcttacttcccaatgcccttcccagtgccatgcaagccgcatcccaggctggggtgccctttggactgaaaaacacatcatcactaagacctttgaatttgctgcagcttcctggtggaagtctgatctttaatacactccagcaacagcagcagcagctttcccagttcactccgcagcaacctcagcaacctacaacttgtagccctcagcagcccggagaacagggcagcgagcaggggtccactagccaggaacaggccctatcagcacagcaggctgccgtgataaatcttaccggggtgggctcttttatgcagagccaggcagctgcagtggcaatcctggctgcatcgaatggctacggatcatcttcgtcaactaatagctccgctacatcctcctccgcttatcggcagcccgtgaaaaagtag

SEQ ID NO: 222778 - DNA, 2202 bp, synthetic construct
  misc_feature 1..2202: note = Description of Artificial Sequence: Synthetic coding sequence
  source 1..2202: mol_type = other DNA
atgcaacaagctttagagttagctttggatagggctgagtatgttattgagtccgcgaggcagcggcctccgaaacgcaagtatctttctagcggaaggaaaagcgtattccagaagttgtatgatttatacattgaggagtgcgagaaggaacctgaagtgaaacagaaactgcgcagaaacgtgaatctgctggagaaactggtgatgcaggagaccctctcctgtcttgttgtaaatctttacccaggcaatgaaggctacagcctcatgctgagggggaaaaacggaagcgatagtgaaacaattagactcccatatgaggaaggtgaattactcgagtatctggacgcagaggaactaccccctattctggtggacttgctggaaaagtctcaggtcaacatttttcactgtggatgcgttatagcggagattcgcgactacagacagagctctaacatgaagtcccccggatatcaatcacgacatatcttgctgagacctacaatgcagaccctcatctgcgatgtgcactccatcacgagtgacaaccacaagtggactcaggaggataaactgttgcttgagagtcaactaattttagcgaccgctgagccgctgtgcctcgacccttctattgctgtaacatgcactgctaaccgcttgctgtacaacaaacaaaagatgaacacccgacccatgaaaagatgttttaaacgctactctagatctagtttgaacagacaacaggatttgtcccactgcccgcctccgcctcagctgcggctgctagatttcctgcagaagcgcaaggaacgcaaagcgggacagcactacgacttgaagatttccaaggctggcaactgcgttgatatgtggaaaagatcaccctgtaacctggccatccctagtgaggtggatgtcgaaaaatatgccaaagtagaaaagagtatcaaaagcgacgatagtcagccaacagtgtggcccgctcatgatgttaaggatgactatgtgttcgagtgtgaggccggaactcagtatcaaaagaccaagctcacaatcctgcaatccttgggagacccactttattacgggaaaatccagccgtgcaaggctgacgaagagtcagattctcagatgagcccgagccacagctccacagatgatcactccaattggttcatcatagggagtaagaccgatgcagaacgggtcgtgaatcaatatcaagaattggtgcagaacgaggctaaatgcccagtcaagatgagtcattcttcatctggctcagcctctctgagccaggtaagtccagggaaggagacagatcagacggaaacagtcagcgtccaaagctcagtgctcggtaaaggcgtgaaacaccgcccaccacccattaaactcccttcctcctcgggcaacagcagctctggaaattatttcacccctcagcagacctcttcgttcctcaagtcacctaccccgccaccatcctccaaaccgagttccatacccagaaagtccagtgttgacttgaaccaagtctcaatgctatcccccgctgcgctttcaccggcaagcagcagtcagcgaactaccgccacccaggtgatggccaatagcgccggactgaatttcatcaacgtcgtggggagcgtttgcggggcacaggctctaatgagcggtagtaatcccatgctaggctgcaacactggggctatcacaccagcgggaattaacctgtccggtttattaccctctgggggactcctcccgaacgcccttccatcagctatgcaggccgcttctcaggcaggcgtccctttcggccttaagaacacctctagcctccgtcctttaaatctgctgcagctgcctggaggatcactcatttttaacaccctgcagcaacaacaacagcagttgtctcagtttaccccccagcagccccaacaaccaactacctgcagtccccagcagccaggcgagcagggttcagagcagggatctacgagccaagaacaggctttaagcgctcagcaagcagccgtcatcaacctgactggagtcggctcttttatgcagtcgcaggcagcagctgtcgctatcttggcggcatccaatgggtatggttcctcatcctccacaaattcgagtgcaaccagctcttctgcgtaccgccaacctgtcaaaaagtag

SEQ ID NO: 222779 - DNA, 2217 bp, synthetic construct
  misc_feature 1..2217: note = Description of Artificial Sequence: Synthetic coding sequence
  source 1..2217: mol_type = other DNA
atgcaacaggcgctggagttggcccttgatagagctgagtacgtgatcgagtctgctcggcagcgcccaccaaagcgcaaatacctgtctagcggccgtaagtccgtctttcagaaactgtacgatctctacatcgaagagtgcgaaaaagagccagaggtgaagaagctgaggcgaaatgttaacttactggagaagttagttatgcaagaaactctctcctgtctggtggttaatctctaccctgggaacgagggttactcacttatgctgcgaggaaagaatggcagcgactccgaaacaatacgcctgccatatgaggagggggagctcctcgaatatctagacgcggaagaacttccacctatcttggttgacctgctggagaaatcccaggtaaacatatttcattgcggctgtgtcatagccgaaatcagagactacaggcagtccagcaacatgaaaagtcctggctatcagtcgcgccatatcctccttagacccaccatgcagactctcatctgcgacgtacactcaattactagtgataatcacaaatggacccaagaagacaaattgctcctggaaagccagctgatcctggccactgcggaacctttgtgcttggacccaagcattgccgttacatgtacagccaacagactactgtacaataaacagaagatgaatacccgccctatgaaacgctgctttaaaaggtactccagatctagcctgaataggcagcaggacttgtcccattgccccccacctccccaactccgcttactggacttccttcagaaaagaaaggaacgaaaagccggacagcattacgacttgaagatcagcaaggccggaaactgcgtcgatatgtggaaacggtcaccgtgcaatctcgcaatccctagtgaagtggacgtagagaagtacgccaaggtggagaagtccataaagtcggacgatagtcagcctaccgtctggccggctcatgatgtgaaggacgactacgtgttcgaatgtgaagccggtacccaatatcagaaaacgaagctgaccattttacagagtttaggcgaccctctctattatggcaaaatccagccatgtaaagccgatgaggagtctgactcccagatgagcccgtcgcattcatctacagatgaccattcaaattggtttatcatcgggagcaaaaccgacgccgagcgagtcgttaatcaataccaagagctcgtccaaaatgaagctaaatgtcctgtgaagatgtcccattcgtccagcggaagcgcaagtttgtcacaggtgagccccggtaaggaaactgatcaaaccgagacagtatccgtgcaaagctctgttcttggaaagggcgtcaaacatcgacccccacctatcaaattaccttccagttcagggaacagttcatcgggtaattatttcacccctcagcagacttcaagcttcctaaagagtccaacccccccacctagcagcaaaccatcttctattccccgtaagagcagcgtcgacctgaaccaggtctccatgttatcccctgcggcactatctccagcaagtagttcccagcgcacgactgcaacccaggtaatggccaattcagctggcctgaacttcattaacgtagtgggctccgtgtgcggcgctcaggccctcatgtccggatccaacccaatgctcggctgcaatacaggcgcaataacgccagcgggtatcaatctctcgggtctgcttccctccggtggtctgcttccaaatgctttgccatcagctatgcaagctgccagccaggctggcgttccctttggcctgaaaaatactagttcccttcgccctcttaatctgctgcaacttccgggagggagtctaattttcaacactctgcaacaacaacagcagcagctgagccagtttacacctcagcagccacagcagccaaccacttgcagtccccaacaacccggagagcagggttcagaacaggggagcacctcacaggagcaggcccttagcgcacagcaggctgcagtgataaatctgacgggggtcgggagtttcatgcagagccaggctgcagccgtcgcaatcttagctgcctctaatgggtatgggagctcctccagcaccaacagctccgcgactagttcctccgcctacagacaacccgatacgcgcgctctaaatcaaaagaactag

SEQ ID NO: 222780 - DNA, 1497 bp, synthetic construct
  misc_feature 1..1497: note = Description of Artificial Sequence: Synthetic coding sequence
  source 1..1497: mol_type = other DNA
atgtatgtgatcgaaagtgcgcgacagcgaccccctaaacgcaaatacctaagcagtgggcgaaagtccgtttttcagaaattgtacgacctgtatatcgaggagtgcgaaaaggagcccgaggtgaaaaaactgcggagaaacgttaatttactggaaaagctggttatgcaggaaaccttatcttgtctagtggtgaacctttacccaggcaacgaggggtactctctgatgctccggggaaaaaacggatctgactcggaaaccatacgcctcccctacgaagaaggagagctcctggagtacttagatgccgaggaacttcctcccattctcgtggacctgctggagaaaagccaggttaacatcttccactgcggctgcgtcattgccgaaataagagactacagacagtctagcaatatgaagtcacctgggtatcaatccaggcatatattgctgcgtcctacaatgcagaccctgatctgcgatgtgcattcaataacaagtgataaccataagtggacccaagaggataagctgcttttggaatcccagctaattctagccacagcggagccactatgcctggacccctccattgccgtgacatgcaccgcaaacaggttactttacaataaacagaagatgaatacaaggcctatgaagagatgtttcaaaaggtatagtaggtcttcactgaatcggcagcaggacctgtcccactgccctcctccgcctcagctgcggctcctggatttcctccagaagcgaaaggagcggaaggccggacaacactatgatcttaagatctcaaaggcaggaaattgcgtggatatgtggaagaggtcgccatgcaacctcgctatcccctcagaagtagacgacgtgaaagatgattacgtgttcgaatgcgaagccggaacgcagtatcagaaaacgaagcttaccattctgcagtccctcggtgaccctttgtattacgggaaaatccagccgtgcaaggcagacgaggagtctgactctcagatgagcccttctcacagctctaccgatgaccattcaaattggttcatcattggctcaaaaacagacgctgagcgagtggtcaatcagtaccaagagcttgtgcaaaatgaggcaaaatgtccagtgaagatgagccactcttcatctggctccgcgtcactttcccaggttagccccggaaaggaaaccgaccaaaccgagacagtttccgtccagagctccgtgcttgggaagggggtgaaacacaggcctccacccataaaactgccttcatcttcagggaattctagtagcggaaattatttcaccccacagcagacttccagctttttgaagagtcctactccacctccttcatctaaaccttcttctattccccgaaaaagttctgttgatctcaatcaggtgagtatgttgtctccagcagcactgtcccccgcatcttcatcccagaggcacgagtcatag

SEQ ID NO: 222781 - DNA, 678 bp, synthetic construct
  misc_feature 1..678: note = Description of Artificial Sequence: Synthetic coding sequence
  source 1..678: mol_type = other DNA
atgctgctgacgctggctggcggtgccctgttttttcctggactgttcgctctctgcacctgggcgctgaggaggtcccagcccggttggtcccgcacagactgtgtgatgatcagtactcggctggtttctagcgtgcacgctgtattggcaaccgggtccggtattgtgataatccggtcgtgcgacgacgtaattaccgggcgacattggcttgctcgagagtatgtatggttcctgattccatacatgatctatgactcttacgcgatgtatttgtgtgagtggtgtcgtaccagggatcagaatagagctccctcgttgacgttgaggaatttcctgtctagaaatagactgatgataactcaccacgccgtgattctgttcgtcctggtcccagtcgctcagctgaaacagcagcacaccctcctgtacaaggtcaatggtatcctgaccctggccaccttcctgagctgtcgcattctgttgttccccttcatgtattggtcgtacggtcgccaacagggactctccctccttcaagtccctttctccatccctttttactgtaacgtggctaatgcgttcctggtcgcgcctcagatctattggttctgcctgctatgcagaaaggccgtgcggctttttgacactccacaggcaaaaaaggacggctag

SEQ ID NO: 222782 - DNA, 774 bp, synthetic construct
  misc_feature 1..774: note = Description of Artificial Sequence: Synthetic coding sequence
  source 1..774: mol_type = other DNA
atgctgctcaccctggccggtggcgcactcttttttcccggattattcgccctgtgcacgtgggctctgcgaagaagccagcctggatggagccgaactgattgtgttatgatctctacacgcctggtcagttccgtacacgctgttttagccaccggctccggaattgtaattattcgctcatgcgatgacgttatcactggacgccactggttggctagagagtatgtgtggtttctgattccttacatgatctacgactcatacgcaatgtatctctgcgaatggtgcaggacacgagaccagaatagagctccgagcctcacacttaggaactttctgtctagaaataggctgatgataactcatcatgctgtgattctgtttgtgctcgtacccgttgcgcagaggctgaggggggacctgggggatttttttgtcgggtgcatttttacagcggagctgtcaacaccatttgtgagcctgggtagagtgctgatccaattgaaacagcaacatacgctgctgtacaaagtcaacggcatcctgacattagcaactttcctgagttgcaggatcttactgtttccatttatgtattggagttacggtcgtcagcagggccttagcttgctgcaggtacctttcagcatccccttctactgcaacgttgccaacgcctttctggtcgcaccccagatctactggttttgtctgctatgccggaaggcagtgaggttgtttgataccccccaggcaaaaaaagatggctag

SEQ ID NO: 222783 - DNA, 993 bp, synthetic construct
  misc_feature 1..993: note = Description of Artificial Sequence: Synthetic coding sequence
  source 1..993: mol_type = other DNA
atgattagtacccgataccgccgtagacgagatgcaccgaggggcccaggcagatgcccaccacaccccacacgaccacgaggccctggacggaaaagaggagctgccggatctcccggtgctgcccctagcgcctcacgacgcccagaattcccaaagccgctgcgcgtgctaccgtggagggagaggggcagaggaggaagggagtggcccatgtcactgcgatctccactccccacatctgcctgcggttggggtgagtcaggtaggagacccggtcgcgctccctgcgggcctcggaccgggctgagcgctagagcagttctgtccgccagagccaggcttgtgagctctgttcatgccgtattagccacgggctccggaattgtgatcatccggtcttgcgacgatgtgattacgggcaggcattggcttgccagggagtacgtttggttcctgataccttacatgatttatgactcctatgccatgtacctgtgtgagtggtgccgcactcgggatcagaatagggccccatctctgacccttaggaatttcttgtcccgaaatcgcctgatgatcacgcaccacgctgtcatactgttcgtgctggtgccagtcgcacagagactccggggagatctcggagacttcttcgttggctgtatctttacagcagaactttccactcccttcgtctcgctggggagggtgctaatccagctaaaacagcagcacactctgttatacaaagtgaacggaatactaacactcgctacttttctatcatgccgaattctgcttttccctttcatgtactggtcatacggccgacagcaaggcttaagcctgcttcaggtgccgttctccatcccgttctactgcaacgtggcaaatgcatttcttgttgcccctcaaatctattggttttgtttactatgtcgcaaggccgtcaggcttttcgacacccctcaggctaaaaaggatggctag

SEQ ID NO: 222784 - DNA, 741 bp, synthetic construct
  misc_feature 1..741: note = Description of Artificial Sequence: Synthetic coding sequence
  source 1..741: mol_type = other DNA
atggaggctccagaagcagctgaggggggactgcagagaggagcacggagagccgcaggggctagaagccagggtgcgctcccctctggagaagtgcatcacggcggagtgaagctcgggatgagaagcataccaatagccacagcgtgtacgatttaccataaattcttttgcgaaaccaatcttgacgcatatgacccatatctgatcgccatgtcatcaatttacttggctgggaaggttgaagagcaacaccttagaactcgtgatattatcaacgtgtctaatcggtacttcaatccaagcggggagcctctggagctagactcgaggttttgggagcttcgcgacagtatagtacagtgcgaacttctcatgctgcgagtgctgcggttccaagtgagcttccaacatcctcacaaatatctgctgcactacctcgtgagcctgcagaattggctcaacagacactcttggcagagaacaccagtcgccgttacggcgtgggcactgttgcgcgatagttatcacggagcactgtgccttaggttccaggcccagcatatagccgtggcagttctgtatctggccctacaggtgtacggagttgaggtccccgcagaggttgaggcggaaaaaccctggtggcaggtgttcaacgacgacctgacaaagcctataatagataacatcgtgtcagacctgattcagatttacacaatggacacggaaattccatag

SEQ ID NO: 222785 - DNA, 585 bp, synthetic construct
  misc_feature 1..585: note = Description of Artificial Sequence: Synthetic coding sequence
  source 1..585: mol_type = other DNA
atggaagccggtgtgaaactcgggatgaggtctatacctatcgccactgcttgtactatctaccacaagttcttctgcgagacaaatctggacgcctatgatccatacctgatcgcaatgtctagcatatacctggcaggtaaggtagaagaacagcacttaagaaccagggatattatcaatgtttcgaacaggtactttaatccaagcggtgaacccctagaactagacagccgcttctgggaacttagggacagcatagttcaatgcgagcttctcatgctgagagtgctgaggtttcaggtttcgttccagcaccctcacaagtacctgctgcattacctggtttcactgcagaactggctgaaccgccactcgtggcaacggactccagtggctgtcaccgcctgggccctgctccgcgattcttaccatggagccttatgcctcagattccaagcccaacatatcgctgtcgctgtgctgtatctggcactgcaggtatatggagttgaggtgcctgccgaggtggaggcagaaaagccttggtggcagatttatacaatggatacagaaatcccctag

SEQ ID NO: 222786 - DNA, 681 bp, synthetic construct
  misc_feature 1..681: note = Description of Artificial Sequence: Synthetic coding sequence
  source 1..681: mol_type = other DNA
atggaagctccggaggctgcggagggtggactgcagcgcggagctagacgcgctgccggagcccgatcccaaggcgcacttccatcaggtgaggtgcatcatggaggggtaaagcttggtatgagatctataccaattgctactgcctgcacaatctaccataagttcttctgtgagacaaacctcgacgcttatgacccttacctcattgccatgagctccatttatctggccggtaaggtcgaggaacagcacctccggacccgtgacatcattaacgtgagcaacagatactttaatccaagtggggagccactggagctggactctagattttgggaactccgggattctatagtgcagtgcgagctcttgatgctcagagtgctcaggtttcaagttagttttcagcatcctcataagtatctgcttcactatctggtctctttgcagaactggctgaataggcactcttggcagcgtacacctgtggccgtgacagcctgggctcttctccgcgactcctatcacggggctctgtgtctgcgttttcaggcccaacacatcgccgtggcagttctgtacttggctctgcaggtctatggcgtcgaagtcccagctgaagttgaagccgagaagccctggtggcagatatacaccatggatacagaaataccttag

SEQ ID NO: 222787 - DNA, 645 bp, synthetic construct
  misc_feature 1..645: note = Description of Artificial Sequence: Synthetic coding sequence
  source 1..645: mol_type = other DNA
atggaggctggtgtgaagttgggaatgagaagcatcccgatagctacggcatgtacaatctaccataaattcttctgtgaaaccaatctggatgcttacgacccctacctcatcgcaatgagctctatttaccttgcgggtaaggttgaggaacagcacctgcggacgcgggatattattaacgtgtcaaacaggtacttcaatccttccggtgagcccctggaactggacagtcgattttgggaactcagagattcgatcgtgcagtgcgaattgctgatgctaagagtgttgcgtttccaggtgagtttccagcaccctcacaaatatttgttacattacctcgtgtcactccaaaactggcttaaccggcactcgtggcagagaactcccgtggccgtgactgcttgggctcttcttcgtgacagctatcacggcgctctgtgcttgagatttcaggctcagcatatcgctgtcgccgttctgtatctggcactccaagtatacggcgtggaggtgcctgctgaagtagaggcagagaagccctggtggcaggtcttcaatgatgacttgactaagccgataatcgataacatcgttagcgatctgattcagatctacacaatggacaccgaaatcccctag

SEQ ID NO: 222788 - DNA, 741 bp, synthetic construct
  misc_feature 1..741: note = Description of Artificial Sequence: Synthetic coding sequence
  source 1..741: mol_type = other DNA
atggaagcccctgaaggaggaggaggtcccgctgctagagggcctgaaggtcctgcccctgaagctcgggtccattttagggttgcacgttttatcatggaggcgggagtgaagctgggtatgcggtccattcccatcgcaacggcttgcaccatataccacaagttcttttgcgagacgaacctggatgcctatgacccttatctgatcgccatgtcctccatctacttggccggaaaggtggaagagcaacacctgagaactagggacatcattaacgtcagcaaccggtattttaatccctctggtgagccgttggaattagactcacgattctgggagctccgggatagtatcgtccagtgcgagcttctgatgcttagagtactgcgcttccaggtgtccttccagcacccccacaagtacctactgcactatctggtttcattacagaactggcttaaccggcactcctggcagcgaacgcccgttgccgtgaccgcttgggcacttctgagggatagctatcatggcgcactctgcctgagatttcaggctcagcacatcgcggtggcggttctctatctcgcattgcaggtatatggagtagaagtaccagccgaagtggaagccgaaaaaccatggtggcaggttttcaatgatgacctaactaagccgataatcgataacatagtgtccgacctgattcagatctacactatggacaccgagatcccgtag

SEQ ID NO: 222789 - DNA, 429 bp, synthetic construct
  misc_feature 1..429: note = Description of Artificial Sequence: Synthetic coding sequence
  source 1..429: mol_type = other DNA
atggaagccggagttaagctgggaatgagatctatacccattgccacggcatgcacaatctaccataaatttttctgcgaaacaaacttagacgcgtacgatccctacctcatcgcaatgtcgtccatctacttggccggtaaagtggaggaacagcacctccggacaagggatataataaacgtcagtaaccgcttcatcccttggactcaacgctctcccaaggtgctagcccaggcctgccctaaacggtcacccggttggtccgctgcttggggccactgtcaccacgttgcaatgacggcagggccacataggacctcttgggaggactggctgtgttgctggcgacgggctggtgagggcaatggtatgttgcccttgtgtcagtcgttggaggtggccgtccaggtgatggtcggagcctag

SEQ ID NO: 222790 - DNA, 285 bp, synthetic construct
  misc_feature 1..285: note = Description of Artificial Sequence: Synthetic coding sequence
  source 1..285: mol_type = other DNA
tgagccggaaaagtagaagagcagcacctgcgaactagagatattattaatgtcagcaaccggtactttaatccctccggcgaacctctcgagctcgactcccgattctgggagctgcgcgatagtatcgtgcagtgtgagctactcatgctgcgggtgctgcgatttcaggttagctttcagcaccctcataaagtctttaatgatgacttgactaagccaatcatcgacaatatcgtgtcagacctgatacagatctataccatggacacagagattccttag

SEQ ID NO: 222791 - DNA, 366 bp, synthetic construct
  misc_feature 1..366: note = Description of Artificial Sequence: Synthetic coding sequence
  source 1..366: mol_type = other DNA
tgacggtactttaatccatctggcgagccactcgaactcgattcacgcttctgggagctgcgtgacagcattgtgcagtgcgagctcctgatgctcagagtgttgcgctttcaggtgtcctttcagcaccctcacaaaaattggctgaaccgccattcctggcagcggactccagtggctgtaactgcatgggctttgttaagggactcataccacggtgctctttgcctccggttccaggcacagcatatagccgtagccgtgctttatctggccctccaagtgtatggagtggaagtaccggctgaagtcgaagcagagaaaccctggtggcagatctacaccatggatacagagataccctag

SEQ ID NO: 222792 - DNA, 3207 bp, synthetic construct
  misc_feature 1..3207: note = Description of Artificial Sequence: Synthetic coding sequence
  source 1..3207: mol_type = other DNA
atgttagtcggctcacagagctttagccccggtgggccaaacggtattatcaggtctcagagtttcgcaggtttttcagggcttcaggaacggcgtagcagatgtaactcatttatcgagaactcaagtgcactcaagaaaccgcaggctaagctgaagaagatgcacaacttgggtcataaaaacaataatcctcccaaggagccccagcccaagcgtgtggaggaagtgtatagagccctgaagaatggtctagacgagtatctggaagtgcatcagactgaattagataagctcactgcccagctcaaggatatgaaaaggaattccagactgggggtgctgtacgacctggacaaacagatcaaaacgatagagcggtacatgcgtcgactcgagttccacatctccaaggttgacgagctgtacgaggcatactgcattcagcgcagactccaggacggtgcctcaaaaatgaagcaggcatttgcgacctctcctgcctctaaggccgcacgtgaatctctaactgagatcaatagatccttcaaggagtacaccgaaaacatgtgcaccatcgaagtcgagctcgagaacctactaggggaattctcgatcaagatgaaagggctggctggatttgcccgtctgtgtccgggagatcagtatgagattttcatgaagtatggtcggcagaggtggaaactcaaggggaagatagaggtgaacggcaagcagtcatgggacggcgaggaaactgtgttccttccccttatcgtgggattcatttcaattaaagtgaccgaactaaaaggcctcgcaactcacatcctcgtaggcagcgttacctgtgagaccaaagagttgttcgccgcaagaccgcaagttgttgccgttgacatcaacgacctcggtacaattaaacttaacttggagattacatggtatccctttgatgtggaagatatgacagcctcgagcggcgcaggaaacaaggccgctgcccttcagcggagaatgtctatgtacagccaggggacaccggaaactccaacatttaaggatcactccttctttcgctggctgcacccttctcccgataagccgagaagactgtccgtgctcagcgcacttcaagatacattctttgcgaaactgcatcggtctcgctccttcagtgacctgccttccctacgtccatcgcccaaggcggtacttgaactgtactccaatctaccagacgatattttcgagaatggaaaggcagccgaagagaaaatgcctctcagcctgtcattttcagacctccccaacggggactgtgccctcaccagccattccacaggaagtccttcaaacagcacaaatcctgagatcactatcacacctgcggaattcaatctgtcatccttagctagccagaatgagggaatggacgataccagttctgcctcttccaggaatagtctgggggaggggcaggaaccgaaaagtcatctgaaggaggaggaccccgaagaaccaagaaagccagccagcgcaccaagcgaagcttgccgaagacaaagttcaggcgctggcgcagagcacctgttccttgaaaacgatgtcgccgaagcccttctccaggagtctgaggaggcatctgagctcaagcccgtggagcttgacacgtcagagggcaatatcactaaacagctcgtaaagagactgaccagcgccgaagtgccaatggcaacagatcgtctcttgagcgagggctctgtgggaggggaatctgagggatgccggtcctttctcgacggctccctggaggatgcttttaacggactgctgcttgctctagaaccccacaaggagcaatacaaagagtttcaggatctgaaccaagaggtgatgaacctggacgacattctgaagtgtaagcccgcagtttccaggtcacgatccagctcactgagcttgactgtggagagcgccttggagtcatttgattttttgaacaccagtgatttcgatgaagaagaagatggggacgaggtctgtaatgtgggaggcggtgcagacagcgtgttttctgatacagaaaccgagaagcattcttaccgcagcgtgcatcctgaggcacggggacatctttccgaagcattgacggaggataccggagtaggaacgagcgttgccggatccccgctgcccctcaccactggaaacgagtcgctggatataacaattgtgagacacctgcagtattgtacccagttggtacagcaaatagtattctcctccaagactccctttgtggccagaagccttttggaaaaacttagtcggcagattcaagtgatggagaagctggctgctgtgagtgatgagaatatcgggaatatcagctctgtcgtcgaggccatacctgagtttcacaagaagctgagtctgcttagcttctggaccaaatgttgtagtcccgtgggagtatatcacagccccgcagatagggtgatgaagcagttggaagctagctttgccagaactgtaaacaaggagtatcccggtcttgcagatccggtgttccgcacactagtctctcagattttagatcgcgctgaacccctgttgtccagcagcctgtcttccgaggtggtaacggttttccaatattactcatactttacatcacacggtgtgagcgatctcgagtcctatttgagtcagcttgccaggcaggtgtccatggtgcagacccttcaatctctgcgcgacgaaaaactcctccagactatgtctgacctcgccccttccaacttactagcgcagcaggaagttcttagaacactagctctgttattgacacgcgaggacaacgaagtgagtgaggcggttaccctatatctggctgctgccagcaagaaccagcactttcgagagaaagccctcctctactactgcgaggccctgaccaagacaaatctgcagttacagaaagccgcatgcctcgctctgaaaattttagaggccacagagagtatcaagatgctcgtcaccctatgtcagagcgatactgaagagatcaggaacgtagccagcgagaccctgctgtctctcggtgaagacggccgactagcttatgagcagctggacaagttccccagggactgtgttaaagttggcggacggcatggaaccgaagtcgccacagccttctag

SEQ ID NO: 222793 - DNA, 1776 bp, synthetic construct
  misc_feature 1..1776: note = Description of Artificial Sequence: Synthetic coding sequence
  source 1..1776: mol_type = other DNA
atgctggtgggaagccagtctttctccccagggggacctaacggaattattcggagtcagagttttgccggattctcaggcctgcaggagcgaagatctcgctgtaattctttcatcgagaattcatcagccctcaagaaacctcaggctaaattgaagaagatgcacaacctcggccataaaaacaataatccacccaaggagccccagcccaaaagagtggaggaggtctaccgggcactaaagaatggcctggacgaatacttggaggtacaccagacagaactggacaagctgacagcccagctgaaggatatgaaaaggaactcccgcctgggtgttctgtatgacctcgataaacagataaaaactatagagcgctatatgaggagactggaatttcacatcagcaaggtggatgagctgtacgaagcctactgtattcagcgaagattgcaagatggggcttccaagatgaagcaggctttcgcaaccagcccagctagcaaggccgctcgcgagagcctgacagaaatcaatcgctcttttaaggaatacaccgaaaacatgtgcactatcgaggtggagctggagaacttattgggagagttctccatcaaaatgaaaggcctggctggcttcgccaggctttgccccggagaccagtacgaaatcttcatgaaatacggacgccagcgttggaaactcaaagggaaaattgaagtcaacggtaaacagtcatgggacggcgaggaaactgtgttccttcccctcattgtgggttttataagtatcaaagtgaccgaactcaaaggactggctactcatattttggttgggtctgttacgtgcgaaaccaaagagctgttcgctgcccgaccccaggtggttgctgttgatattaatgatctcgggactatcaaactgaacctggagattacctggtacccattcgatgtagaggatatgacagcctcctccggcgctgggaataaagccgctgcgctgcagaggcgcatgtcgatgtattctcagggcacgcctgaaactcccacattcaaagaccattctttcttctcaaatctgcctgacgacatcttcgaaaacggtaaggctgcagaggagaagatgccactgtccctcagcttctctgacctgcccaacggggactgcgccctgacatcccacagcacgggctcacctagtaactctactaatcctgagatcactatcaccccagccgaatttaacctgtcatccctcgcgtcccagaatgaaggaatggatgacacctcatcagccagcagtcggaattcactgggagaaggacaggagcctaagagtcatttgaaagaggaggaccctgaagagccaaggaaacccgcaagcgcaccttcagaggcatgtagaagacagagctccggagccggtgccgagcacctgttcctggagaatgatgtcgctgaagccctcctgcaagagagcgaagaagcaagcgaacttaaaccggtggagctagacacatccgaggggaatattacgaagcagctagtcaagagattaactagcgccgaggttcccatggctacagaccgcctgctgtctgagggttcagtaggcggagagtcagagggatgtcggagtttcctggacggtagcctggaagatgcattcaacggcttgctgttggccctagagccgcataaggaacagtataaagaattccaggacctcaatcaagaggtcatgaatctggatgatatactgaaaaagtag

SEQ ID NO: 222794 - DNA, 1944 bp, synthetic construct
  misc_feature 1..1944: note = Description of Artificial Sequence: Synthetic coding sequence
  source 1..1944: mol_type = other DNA
atggtgttaccctcacggcttcattggattaggaatcgtccttggagagataggataagacgcagacagcttaacagactgccaactagattacctgagattatgctagtgggaagccaatccttcagtcctggtggcccaaacggcatcattcgaagccagtccttcgcgggattcagcggcctccaggaacggagaagccggtgtaattctttcatagaaaattcctccgctctcaaaaaaccgcaagccaagttgaagaagatgcacaacctgggacacaaaaataacaaccccccaaaagaaccgcagcccaagagagtggaagaggtgtatagagccttgaagaacggtctcgacgagtatctcgaggttcaccaaactgagctcgacaaactgacagcccagctgaaggacatgaaaaggaatagtagattaggggtgctgtacgacctggataaacagatcaaaaccatcgaacgctatatgaggcggttagagttccatatatctaaggtagacgagctgtatgaagcatactgcatacagcgtagactgcaagatggtgcctctaaaatgaaacaggcctttgctacaagtcctgcctccaaggcagcacgggaaagcctcacggagatcaatcgttcttttaaggagtacacagagaatatgtgcacaatcgaggttgagctggagaatctcttgggagaattttcaatcaaaatgaagggtttggcaggattcgcgcgtctttgcccaggcgatcagtacgaaatttttatgaagtatggccgacagagatggaagctgaaaggcaaaatcgaagtgaacggtaagcagagctgggacggtgaggagacggttttcctgccactgattgtagggtttatttctattaaggtcactgagctgaaggggctggccactcatatccttgtgggcagtgttacatgcgaaaccaaggaattattcgcagcacgaccccaggttgtcgcagtggatattaacgaccttggcacgattaagctgaatttagaaatcacttggtatcctttcgatgtggaggacatgaccgccagcagtggtgcaggcaacaaagccgctgcccttcagaggaggatgagcatgtactcacagggcacaccagagacccccactttcaaggatcactctttcttcagtaacttacctgatgacattttcgagaatgggaaggcggctgaagaaaagatgcctctttcgctctcattcagcgatctaccaaacggcgattgcgctctgacaagccacagtaccgggtctccaagtaatagtaccaacccggagatcaccattaccccagctgaattcaatttgtcttcactcgctagtcagaatgaaggaatggacgacacctctagcgcttcaagccgcaacagtttgggagaggggcaagagcctaaatcacacctgaaggaagaagaccctgaagagccgagaaaaccagctagcgccccttcagaagcctgcaggcgccagtcctctggggctggcgcagagcacttgtttctggaaaatgacgtcgctgaggctctgctccaggagagtgaagaggcctccgagctaaaacccgtggagttggacacatctgaaggcaacatcacgaaacaactggtgaaacgacttacctccgcagaagtgcccatggctacagacaggctcctgagtgaaggctccgtaggcggagaatccgaggggtgccgctctttcctagacgggagcctagaggacgcttttaacggattgttactggctctcgagccccacaaggagcagtataaggagttccaggaccttaatcaggaggtgatgaacttggacgatatcctgaaagacgctaaacatttggatgatcagaagctgaatggagcggcatcttggactgagatcaccgaaggagaatag

SEQ ID NO: 222795 - DNA, 3144 bp, synthetic construct
  misc_feature 1..3144: note = Description of Artificial Sequence: Synthetic coding sequence
  source 1..3144: mol_type = other DNA
atgcagttcttcgacgccgaggagctgctggtggatgaagaagatgacgttttcggagagggattgccaacgagactgcctgagatcatgctcgtcgggtcccagtctttctcccccggtggcccaaacggaattatacggagtcagtcgttcgccggattctctggcctccaggaacgccgttcacgatgtaactcgtttattgaaaattccagcgctctgaaaaagcctcaggccaaactgaaaaaaatgcacaacctgggccacaagaacaacaaccccccaaaagagccgcagccaaaaagggtggaagaagtctatagggccctaaagaatggtctggacgaatacctcgaggtgcaccaaaccgaactggacaaattaacagcccagcttaaagacatgaagcggaacagtaggcttggtgtgttgtatgatctcgataaacaaatcaaaaccattgagaggtatatgcggcgactcgagtttcatatatcaaaagtggatgaactgtacgaagcttactgcattcagcgtagactgcaggacggggcttccaagatgaagcaggcgtttgcgaccagccccgctagcaaagctgctcgggagtccttaaccgagataaatcgcagcttcaaggaatataccgaaaacatgtgtacgattgaggtcgaactggagaacctgctgggagagttttctattaagatgaaggggttggccggttttgctcggctttgccccggagatcaatatgaaatctttatgaagtacggtcgtcagcgatggaagctgaagggcaagatcgaggttaatggaaagcagtcatgggacggcgaggaaactgtattccttcctctaatagtgggatttatcagtatcaaagtgaccgaactgaagggcctcgccacccacatcctggtcgggtctgtcacatgcgaaaccaaggaactctttgccgctagacctcaagtagttgccgttgatatcaatgaccttggcactatcaagctcaacctggaaattacatggtacccatttgatgtggaagacatgacagcttctagcggcgcaggcaacaaagccgctgctctgcagcgccgtatgtctatgtacagtcagggcacgccagagacacccacatttaaagatcactcatttttctctaacctccctgacgacatcttcgagaatggaaaagccgcagaggaaaaaatgcctctgtccctcagtttctcagatctcccgaacggagattgcgccctgacaagccattccactggctcaccaagtaacagcacaaatcccgaaattacgattacacccgctgagtttaatttaagttctctggctagccagaatgagggcatggacgatacctcatccgcctccagtcggaacagcctcggcgagggccaggaaccaaagagtcacctgaaagaggaagatcctgaggaaccaaggaaacccgcttcagcacccagtgaggcgtgtcgccgtcagagctctggcgcaggggcagaacacctcttcctggaaaatgacgtcgccgaagccttgctccaggagagtgaagaggcaagcgaactgaagccagtggagctggatacttcggagggaaacatcaccaagcaactcgtgaagcgccttacaagcgcagaggttcccatggctaccgatagattgctgtcggaaggctctgtcggaggcgaatctgagggctgtcgtagttttctcgatggctccctggaagacgcctttaacggattgctgctggcgctggagccccataaggagcagtataaagagtttcaagacctcaaccaagaggtgatgaatctggacgacatcctgaaatgcaagcccgcagtgtcccggtctcggtcgagtagcctaagccttaccgtggaatccgccctggagtctttcgactttttgaacactagcgacttcgacgaggaagaggatggggacgaggtctgcaatgtgggcggaggagccgatagcgtcttttcggatacagaaactgaaaaacattcataccgcagcgtacacccagaggcaagaggccatctgagcgaggcattgaccgaagacacaggggtcgggactagcgtcgctggaagtccactacccctgaccacaggcaacgagtccctagacattaccatagtccggcatctccagtactgcacacagttggtgcaacagatcgtgttctccagcaagacaccctttgtagctcgcagcctcctcgaaaagctgtcgaggcagatccaggtaatggagaaattagctgcggtgagcgacgagaatatcggcaacataagctctgtggtggaagcaatcccagagttccacaagaagcttagtctgctgtcgttttggacaaaatgctgctcgcccgttggcgtttaccacagccctgcagaccgagtgatgaaacaactcgaagcttcattcgccaggactgtgaataaggagtacccgggactggcagatcccgtcttccgaaccctggtgagccagatccttgatagggccgaaccattactgagctcctccttatcgtccgaagtggttaccgtgttccagtactattcttacttcaccagccatggggtgtctgacctggagtcctatctgtcccagctggccaggcaggtcagcatggtgcagaccctccagtccctaagagatgagaaacttctgcagacaatgtccgatctggcgccatcaaacctcctggcccagcaggaagtgctgaggacactggccctgctcctaacaagggaagacaatgaagtatccgaagccgtaaccctgtacctggccgcagcctctaagaaccagcatttccgggaaaaagcgctcctgtattattgtgaggcactgacaaagacaaacctgcaattgcagaaggcggcttgcctggcactgaagatcctggaggcaactgagtctattaagatgctcgtcaccctgtgccaatccgacactgaggagatcagaaacgtggcatctgaaaccctgctctctctgggcgaggatggacggctagcttatgagcagctggataaattcccacgggattgtgtgaaggttggaggccgacacggtacggaagttgccactgcgttctag

SEQ ID NO: 222796 - DNA, 1842 bp, synthetic construct
  misc_feature 1..1842: note = Description of Artificial Sequence: Synthetic coding sequence
  source 1..1842: mol_type = other DNA
atgttggtaggctcccagtcattctcacccggaggacctaacggcatcattagatctcagtctttcgccggattcagtggcctgcaggaaagaagatcaagatgcaactctttcatagaaaatagctcagccctgaagaaaccccaggcaaaactgaagaagatgcacaatctaggtcacaaaaacaacaatcctcccaaagaaccccagcccaagcgggtcgaggaagtgtacagggccttgaaaaatggtttggatgagtacctggaggtacaccagactgaactcgataaactgaccgctcagctcaaagatatgaaaagaaattccaggctgggagtcctctatgatctcgataagcagattaaaaccatagagcgttatatgcggaggttagagtttcacatttcaaaggtggatgagctctacgaggcttattgcatccagaggagactgcaagatggtgccagcaaaatgaaacaggcgtttgcgacctctcccgctagtaaggcagccagagaatcactaaccgagattaaccggtcgtttaaagagtataccgagaacatgtgcaccatcgaggtcgagttggagaatctgcttggcgaattcagcatcaagatgaagggcctggccggattcgcgagattatgtcccggagaccaatacgagatttttatgaaatacgggaggcaaagatggaagctgaagggcaagatcgaggtgaacgggaagcagtcctgggacggagaagagaccgtcttcctgccgctcattgtgggtttcatttctatcaaagtcaccgaactcaaagggctggcaactcacatcttagtgggatccgttacctgtgaaactaaagagctgttcgcagccaggccccaggtcgtggccgtagatatcaatgacctggggacaataaagctgaacctggagatcacatggtatccattcgatgtggaggacatgacagcgagcagtggagccggtaacaaggccgcagcactgcagagaaggatgagtatgtacagccagggcacacccgagacacctacgtttaaagaccatagcttcttctcaaacctccccgatgacatcttcgagaatggaaaagcggcagaagagaagatgccacttagtctctccttcagcgacctcccaaatggggactgcgccctgaccagccactccacaggcagcccatctaactctaccaatcctgagattaccatcacacccgctgagttcaacctgtcttctctggccagccagaacgagggaatggatgatacaagctcagcttctagcaggaatagtttgggggaggggcaggaacctaaatcacacctcaaggaagaagatccagaagaaccgcgtaagcctgcctccgccccttccgaggcatgcaggcggcagtcatccggtgccggagcagagcacttattccttgaaaacgatgtcgcggaggcactgctgcaggaaagtgaagaggccagcgaactgaagccagttgaactggatacaagtgagggcaacataacaaagcaacttgtcaaaagacttacctccgcagaagtgcccatggcgacagatcgcctgttgtctgagggatcagtgggcggagagtcagagggttgtaggagctttttggatggtagtctcgaggacgcattcaacggattactgctagccctcgagccgcacaaggagcaatacaaggagtttcaggatttaaatcaggaggtgatgaatctggacgacattctaaaggacgccaagcacctggacgaccagaagctaaatggagctgcttcctggacagagatcacggagggagaatag

SEQ ID NO: 222797 - DNA, 2673 bp, synthetic construct
  misc_feature 1..2673: note = Description of Artificial Sequence: Synthetic coding sequence
  source 1..2673: mol_type = other DNA
atgtccgcaaataactcacccccttcagcccagaagagtgtgctcccaacagccatacccgcagtgctcccagcggcttccccctgctccagtccaaaaacaggactgagcgcccgactttctaacggatccttctctgcacccagtctgactaattcaagagggagtgtccacactgtatctttcctgcttcagatcgggctcacacgagagagtgtcaccatcgaggcccaagagctgtctctttcggctgtgaaggacctcgtctgcagcattgtgtatcagaaatttcccgagtgcggtttcttcggaatgtacgacaagattttgctatttcgccatgacatgaacagtgaaaacatcctgcaactgataacctctgctgatgaaatccacgaaggagacctcgttgaggtggtgctttcagccctggctaccgtagaagactttcaaatccggccacataccctgtacgtccacagctataaagcacccacattttgcgattattgcggggagatgttgtggggtctagtacgacagggactgaaatgcgaagggtgcggccttaattaccataaacggtgtgcattcaaaattccaaataactgcagcggcgtacgcaaacgtcgcctttccaacgtgtccctgcccggacccggtctttcagtccccaggccattgcagcctgaatacgtggccttaccaagcgaagagtctcacgtacaccaggaacccagcaaaaggatcccttcgtggagcgggcgacccatttggatggaaaaaatggtgatgtgccgcgttaaggtccctcataccttcgccgtgcacagctacacacggcctacgatctgccagtactgtaagagactcctcaagggactcttccggcaggggatgcaatgcaaagactgtaagtttaattgtcataagcgttgcgcttctaaggttccccgtgactgcctcggagaagtcactttcaacggcgagccctctagcctggggactgacacagatatcccgatggacatagataacaacgatataaacagtgacagctcacgtggccttgacgataccgaggaacccagcccccctgaagataagatgttctttctggacccctccgatctggacgttgagcgcgacgaggaggctgtaaaaacgatcagtccttccacctctaacaatattcctttgatgagagtggtgcagtctataaagcacacaaaacgaaagtcttccacaatggtgaaagagggctggatggtgcattacacatcgcgggataatctcaggaaacggcactattggcggttggacagcaagtgtttgaccctcttccaaaatgagagcggcagcaaatattacaaggagatccccttgagcgagatactgcggatctcctcccctagagatttcacgaacatttctcaagggtcaaacccccattgtttcgagatcataactgacactatggtgtatttcgtcggggagaataatggcgactcgtcgcataatcccgtccttgcagccaccggggtcggcctggacgtggctcaatcttgggagaaggctatccgtcaggccctcatgccagtaacgcctcaggccagcgtctgcacaagtccgggtcagggaaaagatcacaaggacctcagcacgtctatatcagttagcaactgccaaatccaggaaaatgtcgatatttccactgtatatcagatcttcgccgatgaggtactcggaagcggccaatttggcatcgtctatggcggtaagcaccggaagactggtagagacgtggctatcaaagttatcgacaaaatgagattccccacaaaacaggagtcacagctcagaaacgaagtggctattttacagaatttgcatcaccccggaatcgtgaatcttgaatgtatgtttgagacgcccgagcgcgtctttgtggttatggagaaactacatggagatatgttggaaatgatcttaagctctgaaaagagcagactgcctgagcgtatcaccaaatttatggtgactcaaattttggtggctctcagaaacttgcacttcaaaaatatagttcattgtgatttgaagcctgaaaatgtgcttctggccagcgccgagccgtttccccaggtgaaactctgcgattttggctttgctagaataatcggagaaaaatcattcaggagatctgtcgttggtactcccgcttacctggcacccgaggttctgcgttctaaggggtataatagatctctcgacatgtggagtgtcggcgtgataatctacgtatctctcagtgggacattcccgttcaacgaggatgaggatatcaatgaccagattcagaatgccgctttcatgtacccgcctaacccatggagggaaatctcaggagaagctattgacctcatcaacaatctgcttcaggtgaagatgaggaagaggtactccgtggacaagtcgctatcccatccctggctccaggactatcaaacctggctggatctgcgcgaattcgaaacgagaataggtgagaggtatatcacgcatgagtctgacgatgctaggtgggagatccacgcttacactcataacctggtttatcccaaacacttcattatggcccctaaccctgacgatatggaggaggatccttag

SEQ ID NO: 222798 - DNA, 1233 bp, synthetic construct
  misc_feature 1..1233: note = Description of Artificial Sequence: Synthetic coding sequence
  source 1..1233: mol_type = other DNA
atgccgtatagcacaaacaaggagttaattctcggcataatggtgggaacagcgggtatttccctgctgctgctatggtatcacaaggttaggaagcccggtatcgcgatgaagcttccggagttcctgagcttagggaatacctttaattccataacactgcaggacgagattcacgacgaccagggcacaacagtcatctttcaggagagacagctgcagatactggaaaagttaaacgagctgctgacaaacatggaagagctgaaggaagagatcaggttcctgaaggaggccattccaaaactggaagaatacattcaggatgaactgggaggtaaaattacagttcacaaaattagtcctcaacaccgagccaggaagcgtcgactgcccaccattcagtcctcggctacctctaattcttctgaagaggctgagagcgagggcggttacatcaccgctaacaccgataccgaagagcagagctttcccgtgccgaaagcttttaacactcgcgtagaggaactcaacctggatgtcctcctgcaaaaagtggaccatcttagaatgtctgaaagcgggaaaagcgagagcttcgagttgctgagagaccacaaggagaaattccgcgacgagatagagttcatgtggaggttcgccagagcatacggcgacatgtacgagctctctacgaacactcaagagaaaaagcactatgccaacatcggcaaaacgctgagtgaacgcgctattaatagagcacctatgaatggacactgtcatctgtggtatgctgtgttgtgtggatacgtgagtgagttcgaaggacttcagaacaaaattaactacggacacctgttcaaagagcatctcgacattgctattaaacttttgcctgaggagcccttcttatactatctcaaaggaaggtactgctacactgtgagtaaattgagttggatcgagaagaaaatggccgcaacactgttcggcaagattcctagctcaaccgtgcaggaggcgctgcacaactttctgaaggcagaagaactttgcccagggtactctaatcccaactatatgtatctggctaaatgctataccgacttagaggagaaccagaatgctctgaaattctgcaatctggccctgctcctgcctactgtgacaaaagaggacaaagaggcgcaaaaggagatgcagaagatcatgacatctctcaagagatag

SEQ ID NO: 222799 - DNA, 1233 bp, synthetic construct
  misc_feature 1..1233: note = Description of Artificial Sequence: Synthetic coding sequence
  source 1..1233: mol_type = other DNA
atgccatactccacgaataaagaactaattctcggaattatggtagggacggccggaatctcactgcttttactctggtatcacaaggtgaggaaacctgggatcgcgatgaagctgccagaatttctgagcctgggcaatactttcaatagtataacccttcaggacgagatccacgatgaccagggcacaacagtcattttccaagaacgtcagctgcagatactcgagaaactcaatgaattgcttacaaacatggaagagctcaaagaagaaatccggttcctcaaggaggccatcccaaaattagaagagtatattcaggatgagctgggagggaaaatcacagtgcataaaatttcacctcagcatagagccagaaaaagaagactccccactatacagagcagcgcaacctcaaatagtagtgaagaagctgagtccgaaggaggctatatcactgcaaataccgacaccgaggagcagagcttccctgtgcctaaagccttcaacacgagagtggaggagttgaatctggatgtgctgctgcagaaagtggaccatcttagaatgagtgaaagcgggaagagcgagtcctttgaacttttaagagaccataaggaaaaatttagggatgagatcgaattcatgtggcgatttgcacgcgcttacggcgacatgtatgaattaagtactaatacccaggaaaaaaaacactacgcaaacataggcaaaacactgtctgaacgagctatcaatagggcccctatgaatgggcactgccacttgtggtatgccgtcctatgtggctacgtatctgaattcgagggactccaaaataaaatcaactacgggcacctattcaaggaacatctggacatagctataaagctgctccctgaagagccttttctctactacctcaagggtaggtactgctataccgtatccaagctctcgtggatcgagaaaaagatggcagcaacgctatttggtaagatccctagtagcacagtgcaagaggctctccacaacttcctgaaagccgaggaattatgccccggatacagtaacccaaattacatgtacctggccaaatgctatactgacctggaggaaaatcagaacgcactcaagttttgcaacttggccctgctccttcccactgtcacgaaagaggataaggaggcccaaaaggaaatgcagaaaatcatgacatccctgaaacggtag

SEQ ID NO: 222800 - DNA, 528 bp, synthetic construct
  misc_feature 1..528: note = Description of Artificial Sequence: Synthetic coding sequence
  source 1..528: mol_type = other DNA
atgccctacagcactaacaaagagcttatccttgggattatggtggggactgccggaatatctttgctgctgctgtggtatcacaaggtgaggaaacccggaatcgctatgaaactccctgagttcctttccctagggaatacttttaactctataactctacaagatgagatccacgacgaccagggaaccactgttatcttccaggagaggcaactccaaatactcgagaaactcaacgaactgttgacaaatatggaggaattgaaagaagagatcagatttctcaaagaagctattcctaaactggaagaatatattcaagacgaactggggggtaaaataacagtgcacaaaatctcaccacagcatagggccaggaagcgacgactgcctactatacaatccagcgctacttccaattcatctgaggaggccgagagcgagggtggctatatcacagcaaacacagatactgaggaacagagcttccccgtgccaaaagcttttaacacaagggtcgagtag

SEQ ID NO: 222801 - DNA, 798 bp, synthetic construct
  misc_feature 1..798: note = Description of Artificial Sequence: Synthetic coding sequence
  source 1..798: mol_type = other DNA
atgggcaaatgtcttcgctatatcaccgctaacaccgatactgaggaacagagctttcctgtgccaaaggccttcaacacccgggtagaagaactgaacttagatgtcctgcttcagaaagtggatcatctgagaatgtctgagagtggtaagagcgaatcgtttgaactattacgagatcataaggaaaagttcagagatgagattgagttcatgtggcgctttgccagagcttacggcgatatgtatgaactcagcaccaatacacaagagaaaaagcattatgctaacataggaaagaccctgagcgagcgggcaatcaaccgtgcacctatgaatgggcactgccatttatggtacgctgttctttgcggatacgtttctgaatttgagggactccagaataagataaactatggtcacctttttaaggaacacttagatatcgcaattaaactgctgcctgaggaacccttcctgtattatcttaagggcagatactgctatacagttagcaagctgagttggatcgaaaagaaaatggctgctaccttgtttggtaagattcctagttcaacagttcaggaggcactgcacaactttctgaaagcagaagaactctgccccggatattctaatcccaactatatgtatctggcgaagtgttacacagaccttgaggaaaatcagaacgctttgaaattttgcaatctggccctcctgctgccgaccgtgacaaaggaggataaggaagcccagaaagaaatgcagaaaatcatgactagcctgaagaggtag

SEQ ID NO: 222802 - DNA, 453 bp, synthetic construct
  misc_feature 1..453: note = Description of Artificial Sequence: Synthetic coding sequence
  source 1..453: mol_type = other DNA
tgagtgctgtgcgggtacgtgtctgagtttgagggtctgcagaacaagatcaactatgggcacctcttcaaggagcatttggatatcgctatcaaactgctgccagaggaacccttcctctactatttgaaagggagatattgctacactgtcagtaaattgtcatggatcgaaaagaaaatggcagcaacgctcttcgggaaaattccaagctcgacggtgcaggaagccttacacaactttcttaaagcagaagaactgtgcccgggatattctaacccaaactatatgtatctggcaaaatgttacaccgacttggaagagaatcaaaacgccttgaagttctgcaacctggccctccttttgcccaccgtgaccaaagaggataaggaagcccagaaggagatgcagaaaatcatgacttcgctgaaacgcctaagaaaaacaaagtag

SEQ ID NO: 222803 - DNA, 717 bp, synthetic construct
  misc_feature 1..717: note = Description of Artificial Sequence: Synthetic coding sequence
  source 1..717: mol_type = other DNA
atgggtaagtgcttgcgatacatcactgcaaacacggacacagaggagcaatcctttcctgtgccgaaggccttcaacacacgcgtagaggagctgaatctggacgtgttgttgcagaaggtcgaccacttaaggatgtctgaaagcggtaagagcgagagtttcgagttgcttagggatcataaagagaagttcagagacgagatcgaatttatgtggagatttgctcgggcatacggcgatatgtatgagttgagcacgaacacacaggagaagaaacactatgctaacatcggcaaaacattaagtgaacgagcgatcaaccgagccccaatgaatggacactgtcacttatggtatgctgttctgtgtggctacgtctccgagttcgagggacttcagaataaaattaactacggtcacctgtttaaggagcatttggatatcgctataaaacttctgcccgaagagccattcctgtattaccttaagggtagatactgctacacagtctccaagctgtcatggatcgaaaagaaaatggcagcaaccttgttcgggaagattccgtcttccactgttcaggaagctctgcacaacttcctgaaagccgaggaactctgtccaggctacagcaatccaaattacatgtacctggcgaaatgctataccgatcttgaagagaatcaaaacgccctcaaattctgtaacttatag

SEQ ID NO: 222804 - DNA, 1413 bp, synthetic construct
  misc_feature 1..1413: note = Description of Artificial Sequence: Synthetic coding sequence
  source 1..1413: mol_type = other DNA
atgtcaagacttggggcattgggtggcgcaagagccggactgggcctgctccttggcacggctgccggactgggttttctgtgcctcctgtacagccaacgttggaagaggacgcagcgccacggtcggtctcagagtctccctaacagtctggattacacccagacctccgacccaggccgtcacgtgatgttgttgcgagcggtgcctggtggtgctggcgatgcaagcgtactgcctagtctgccgagggagggtcaggagaaagttttagatcggctggatttcgtgctcacctcactggtggcattgcgaagggaggtggaggagctgcgcagcagcctgaggggactggcgggagaaatcgtcggcgaagtgcggtgccacatggaagaaaatcagagggtcgccaggcggaggaggttcccatttgtccgcgaaagatcagatagtacagggtcctctagcgtgtattttaccgcgtcctcaggggcaacctttactgacgccgagtctgaaggcggatacaccacggctaatgcagaaagcgacaacgagagggactctgacaaagagagcgaagacggcgaagacgaggtgtcctgcgagacggtaaaaatgggtaggaaggactcgttggacctggaggaagaggcagcttccggcgcttcatctgcccttgaggccggtggcagctcaggcctcgaagacgtcttaccactcctgcagcaggcggatgagctccaccggggagatgaacagggaaaacgcgagggatttcagttactgttgaacaacaagttggtctacggttcgagacaggatttcctctggcgcctcgcaagggcttactcagatatgtgcgagctgacagaggaggtgtccgagaaaaagagctacgccctggatggcaaggaggaagccgaggccgcactggagaaaggtgacgagagtgccgattgtcacctatggtatgcagtgttgtgtgggcagcttgctgagcacgagagtatccagagacgcattcagtcgggtttctcgtttaaagagcacgtcgacaaggctatcgccttgcaaccagaaaatccaatggctcactttcttttgggtcgctggtgttatcaggtatcacatctttcttggctagagaaaaagaccgctaccgctcttctcgagagtccgcttagcgccacggtcgaggatgccttacagtcattccttaaagctgaagagcttcagcccggattcagtaaagctggcagggtttacattagtaagtgctatcgagagctgggaaaaaatagcgaggccaggtggtggatgaaattggcacttgagctacccgatgttaccaaagaagacttggctatacagaaagacttggaagagttagaagtgattcttagggattag

SEQ ID NO: 222805 - DNA, 1413 bp, synthetic construct
  misc_feature 1..1413: note = Description of Artificial Sequence: Synthetic coding sequence
  source 1..1413: mol_type = other DNA
atgtcacgcctaggtgcactgggtggcgcaagggcaggtctggggctgctgcttggtacagccgctggactgggcttcctgtgtcttctctatagccaacggtggaagaggacccaacgccatgggaggagtcagtctctacctaatagcctggactatacccagaccagcgaccccggaagacacgtcatgttgctgcgtgctgtgccaggcggtgccggagatgcctctgtgcttccgtcacttcctcgcgaaggccaggagaaagtcctcgatcgtctggatttcgttctcacatctctggtcgcgctccggcgtgaagttgaagagctgagatcctccctacgcggacttgccggagagattgtgggagaggtgcggtgccatatggaagagaaccagcgcgtcgccaggaggcgcaggttcccatttgtgcgagagaggtctgacagtacagggagctcctcggtgtactttacggcaagcagcggtgcgacctttacggacgccgaaagcgagggcggatacacaaccgccaacgctgagtccgataacgagagggactctgacaaggaatccgaggacggcgaggacgaggtgagctgtgagactgtgaaaatggggaggaaagactcccttgaccttgaggaggaagccgcaagtggggcttcatccgcactggaggcgggaggctcatcaggactggaggatgtattgccactgctgcagcaggcagatgagctgcaccggggagacgagcagggcaaacgtgaggggtttcagctgctgctcaataacaagctggtgtatggctccaggcaggacttcctttggaggttggcaagggcttactccgatatgtgtgagttgacggaagaggtctccgaaaagaagagttacgccctcgatggtaaggaagaggctgaggctgctttggagaagggcgacgagagcgccgattgtcacctttggtatgcagttctgtgcggacagctggccgagcacgagtccatccagcgacgcattcaaagcggattctcgttcaaggagcacgtagataaggccattgcccttcagcccgaaaatcctatggcccactttctccttggtcgatggtgttaccaggtaagccatctaagctggctggaaaaaaaaactgcaaccgccctactggaaagcccattgtcagcgacagtggaggatgcgctgcaatcattcctgaaggccgaagaactgcagcctggtttttcgaaagcaggaagggtgtatataagcaagtgctaccgagaactcggtaagaactcagaggcccgttggtggatgaaactcgcgctggaactgcccgacgtcactaaggaggacttagcaatccagaaggacctcgaggaactcgaggttatcctgagggactag

SEQ ID NO: 222806 - DNA, 1224 bp, synthetic construct
  misc_feature 1..1224: note = Description of Artificial Sequence: Synthetic coding sequence
  source 1..1224: mol_type = other DNA
atgttgctccgcgctgttcctgggggtgctggcgatgcctcggtgcttcccagcctgcctcgggaaggtcaggagaaggttctggatagactcgatttcgtactgaccagtctggttgctcttcggagagaggtggaagagctaaggtccagcctccggggactcgctggtgaaatcgttggagaggtgcggtgccatatggaggagaatcagcgggtggctagaaggcggaggtttccgtttgtgcgtgagaggagcgattctactggatcatcaagcgtatatttcacagcctcatctggtgcaacctttaccgatgccgaaagcgagggtggctataccacggctaatgctgaatccgacaacgaacgggactctgacaaggagagcgaggacggggaagacgaggtgtcatgtgagacagttaaaatgggcaggaaagactctttggacttagaggaggaggccgctagtggcgcttcaagcgcactcgaagctggtggctcttctggcctggaggacgtgctgccactgttgcagcaagccgatgaacttcaccgcggtgatgaacagggtaaaagggaaggcttccagcttctactcaacaataagctggtgtatgggagtaggcaagatttcctgtggcgcttggcgagagcgtacagcgacatgtgtgagctcacagaggaggtgtccgaaaaaaagtcgtacgctctggacggtaaggaagaggcggaagccgcactcgagaaaggtgatgaatccgccgactgtcacctttggtatgctgtgctgtgtggccaacttgctgagcatgagagcatccagagacggattcagagtggtttcagttttaaagagcacgtcgacaaagccattgccttgcaaccggagaatcctatggctcatttcctactagggcgatggtgctaccaggtctcacacttgtcttggttggagaagaaaaccgcaaccgctctcttggagagtccgttgagtgctactgtcgaggacgccctgcagagcttcttgaaggccgaagagctgcagcctgggtttagtaaagctggccgtgtatacatcagcaagtgctacagggaacttggcaaaaacagcgaagcgaggtggtggatgaagctggcacttgagctgccggacgtgacaaaggaagacctggccattcagaaagacctggaagagctggaagtcatcctccgagactag

SEQ ID NO: 222807 - DNA, 864 bp, synthetic construct
  misc_feature 1..864: note = Description of Artificial Sequence: Synthetic coding sequence
  source 1..864: mol_type = other DNA
atgagtaggctgggcgctttaggcggagcccgagctggcctggggctgcttctgggcactgctgctgggctgggctttctgtgcctcttatattcccagaggtggaaaaggactcaacgacacggacgatcccagtccctccccaactcactcgactacacacaaacatctgatcctgggagacatgtcatgctgttaagggcggtccccggaggtgctggtgacgcaagtgtgttgccctctctacccagggaagggcaggagaaagtgctggaccggctggacttcgtgctaaccagcttagtcgctctgagacgtgaggtggaggagctgaggtctagcctgagagggctcgctggggaaatcgtcggcgaggtacgctgccacatggaggagaaccagagggtcgcccgtcgcaggcgcttccccttcgtgcgcgagcggtctgattccacaggctcttcatcagtgtacttcaccgcatcctccggggcaacgttcaccgacgctgagtctgagggcggttacacaacagccaatgccgagtcagataacgaaagagatagtgataaagagtcagaggacggcgaggatgaggtatcatgtgagacggtcaaaatgggtcggaaggattccctcgatctggaagaggaggcagcctccggagcatcaagcgcattagaagctggaggaagttctggcttagaagatgtgctgcccctgcttcagcaagccgatgagttacatcgaggagatgagcaagggaaacgcgaagggttccagctgctgctgaataacaagcttgtttatggctcccggcaggactttctgtggcgattggcacgggcttatagtgatatgtag

SEQ ID NO: 222808 - DNA, 945 bp, synthetic construct
  misc_feature 1..945: note = Description of Artificial Sequence: Synthetic coding sequence
  source 1..945: mol_type = other DNA
atggcactggccgcaaggctctggcgcttactacccttccgtcgaggagcagcccctggctcaagattgcccgctggcactagcgggagcaggggccattgcggcccttgtagattcaggggttttgaggtcatgggcaaccccggaactttcaagcgcggactgctgctctcggcactgagctatctcggctttgagacctaccaggtgatctcccaagccgcagtggtgcatgcaacagcaaaagtggaagagatcctggaacaggctgattatctgtacgaatcgggagagaccgagaagctgtaccagctgctgacccagtataaggaaagtgaggacgctgaattactctggcggctcgccagagcttctagggatgtcgctcagctcagccgaacgtcagaggaggagaagaagctcttggtctacgaagccttagagtacgccaagagggctctagagaaaaacgaatctagctttgcttcgcacaagtggtacgccatttgcctgagtgatgtgggagactacgaagggataaaggccaagatagcaaacgcctacattatcaaggagcacttcgagaaagcgatagagctcaaccccaaagacgcaactagcattcatctcatggggatctggtgctacacattcgctgaaatgccatggtaccagcgaagaatcgccaaaatgttattcgccacccccccttcatccacctatgagaaggcactggggtattttcaccgggctgagcaggtcgacccaaacttttatagtaagaatctgctcttgttgggaaaaacatatcttaaactgcataataaaaaactagcagcattctggctgatgaaagctaaagattaccctgcccacaccgaggaagataagcaaattcaaacggaggccgcacaactcctaacttcttttagtgaaaaaaattag

SEQ ID NO: 222809 - DNA, 855 bp, synthetic construct
  misc_feature 1..855: note = Description of Artificial Sequence: Synthetic coding sequence
  source 1..855: mol_type = other DNA
atggctctcgccgcaagactgtggcgtctgctgccttttaggcgcggagccgctcctggcagcaggctgccagcgggaacatctggctcacgcggacattgcggcccttgcaggtttcggggattcgaagtgatgggcaatcctggtactttcaaacgcggactcctgttatccgctctgagttacctgggctttgaaacataccaggtgatcagccaagcagctgtggtccatgcaacagccaaagtggaggagattctggagcaggcagattacctgtatgagtcaggcgagacagagaagctctaccagctgctcactcagtacaaagaatccgaggatgccgaacttctgtggagattggcgagggctagtcgggacgtggcccaactatctagaaccagcgaagaggaaaagaaactcttggtatacgaggctcttgaatacgcaaaacgggctctggagaagaatgaaagcagcttcgcaagccataagaaggccatagaactgaacccaaaggatgctacatctatccacttaatggggatctggtgttacaccttcgcggaaatgccctggtaccagcgtcgtatcgctaaaatgctgttcgccacgcccccaagctccacttatgagaaggccctgggttatttccatcgggctgagcaggttgaccctaacttctacagcaaaaacctcttactgctcggaaaaacttaccttaagctgcataataagaaattggccgctttctggctgatgaaggctaaagactaccctgcacacactgaggaggataagcagatccagacagaggctgctcagctgctcacatctttcagcgagaaaaactag

SEQ ID NO: 222810 - DNA, 3540 bp, synthetic construct
  misc_feature 1..3540: note = Description of Artificial Sequence: Synthetic coding sequence
  source 1..3540: mol_type = other DNA
atggcgagaaggagccagtccagttcccagggagacaatccccttgcacccggttacttgcctccgcactacaaggaatattatcgcctggctgtcgacgcactggctgaagggggtagtgaagcgtactcacggtttttggcgacggagggagcgcctgacttcctatgccctgaggagttagagcatgtttctcggcacctgagaccaccgcagtatgtgactagggagccccctgaaggctctctgctggacgttgacatggacgggtcctccggaacttactggccggtcaattcagatcaggcggttccagagctggacctggggtggccattaacctttggattccaggggaccgaagtgacaacacttgtgcagccgcctccacccgacagtccaagtatcaaagatgaggcacggcgtatgatcagatccgctcagcaggtggtggctgtagtcatggatatgtttaccgacgtggacctgctgagcgaggtcttggaggcggcagctcggagggtgcctgtctatatactcctcgatgagatgaatgcacagcatttcctggacatggccgacaagtgcagagtgaatctgcagcacgtggacttcctgagagtgagaacggtagccggacccacttactattgcaggacgggaaagtcatttaagggccacgtcaaggaaaagtttctgctagtggattgcgcggtcgtcatgagcggatcttatagttttatgtggagtttcgaaaagattcatagatctctcgctcatgtcttccaaggggagctggtcagcagcttcgacgaagaattccgcattctcttcgcccagtcagagcctctggtccccagcgccgcagcactagccagaatggacgcatacgctctggccccatacgcgggagcgggtcccctggttggtgtaccaggggtgggcgctcctacacctttttcattccccaaaagggctcatcttctgttccccccacctcgcgaggaaggactcgggttccctagctttcttgaccctgatagacatttcctctctgccttcagaagggaagagcccccacgcatgccgggaggagccttggaaccccacgccggtctgcggcctctttctcgcagactggaggccgaggcaggtcccgcaggagagctggccggtgcccgtgggttttttcaggctcgccatttggagatggacgcattcaagcggcatagcttcgcaacagagggggcaggcgctgtggagaactttgctgccgcaaggcaggtgtcccggcagaccttcctgtcccacggcgacgatttcagattccagaccagccattttcacagggaccaactttatcagcagcagtaccagtgggatccgcagctgaccccagccagaccccagggacttttcgagaagctccgcggagggagagccggttttgccgatccggacgacttcacgctaggcgctggcccacgctttccggaactgggcccagatggacaccagaggctagactacgtcccatcgtccgcctcccgggaggtgagacacggttctgacccagcctttgcccctggacctcggggactggagccatcaggagccccacgcccaaatctgactcagcgatttccatgccaagccgctgccagacctggccctgaccccgctcccgaagcagagcctgagcgcagagggggacctgagggaagagcaggactgagacgctggcggctcgcctcatacttgagcggatgccatggtgaggatggcggtgatgatggcctgccagcacccatggaggcggaagcatatgaagatgatgtcctggcacccggtggcagggccccagctggtgatcttctcccttccgcctttcgagtcccagcggcatttccaacaaaggtccctgttcctggcccagggtcaggcggaaatggccctgagcgggaaggacctgaagagcctggtctcgctaagcaagacagctttaggagtagattaaaccccctagtacagcgctcctcccggctgaggtcgtccctcatttttagcacaagccaagctgaaggggctgccggagcggctgccgcaacagagaaggtgcagctgctccataaagaacagactgtgtcagaaaccctggggccaggcggagaagccgtgcgatccgccgcttctacgaaagtcgctgagctccttgagaagtacaagggcccagcacgagaccctggtggcggagctggggctatcactgtggcaagccacagcaaggcagtggtgtcacaagcttggcgagaggaggtcgccgcacctggtgccgtgggaggagaacgacgcagtttggagtcttgcctgctggatctgcgagacagtttcgcccagcaactacaccaagaagcagaaaggcaacctggggcagcctctctcaccgcggctcaactcctggataccttgggtcgcagcgggtcggatcgacttcccagtagatttctctccgcacagtctcattcaacgagccctcagggtctcgatagtccactgcctctggaaggatctggcgcacatcaggttctccataatgagagtaagggcagccccacgagtgcctatcctgagagaaaaggtagtcctactccagggtttagcactcgcagaggctcccccactaccggcttcatagagcagaaaggcagtccaacctcggcctatcccgaaagacgtggttctccggtgccccctgtccccgagcgcagaagctcccctgtcccacctgttcccgagagacggggatccctcaccttaactatctccggggagagtcccaaagcaggtcctgccgaggagggaccatccgggccaatggaagtgcttcgaaaaggtagtctccgcctgcggcagctcctgagtcctaagggggaacgcagaatggaggacgaaggtggatttcccgtgccgcaggagaatgggcagcccgaatctccaagacgtctgtctttgggacagggagactccacagaggctgcgaccgaggaacggggtccacgtgcacggttgtcttctgctaccgccaatgctctgtactcttcaaacctgagagatgacactaaggccattcttgagcaaattagtgctcatggccagaagcatcgggctgttcccgcaccctctcccggacccacacacaacagtcccgagctggggagaccaccagccgctggggtgctggccccagacatgtccgataaggataaatgcagtgccatcttcagaagtgatagtttagggactcagggaagactcagcaggacgctgcctgcaagcgccgaggagcgcgaccgcctgcttcgtcgcatggagtctatgcgaaaagaaaagagagtttattctcgcttcgaagtgttttgtaagaaggaggaggccagtagtcctggcgctggcgaggggccagctgaagaaggaactcgggacagtaaggtggggaaattcgtccccaaaattttgggaaccttcaaaagcaagaagtag

SEQ ID NO: 222811 - DNA, 933 bp, synthetic construct
  misc_feature 1..933: note = Description of Artificial Sequence: Synthetic coding sequence
  source 1..933: mol_type = other DNA
atggggaaccaggtcgagaagctgacacatctgagttacaaggaggtacccacagccgatcctaccggagtggacagagacgacgggccaaggatcggcgtatcctacatttttagcaacgatgacgaagatgtggagccccagcctccccctcagggcccagatggtgggggactgcccgacggtggagacggcccacctccgcctcagcctcagccttacgatcctcggttacacgaggttgaatgctctgtattttaccgggacgaatgtatttaccagaagtcattcgccccagggtccgccgctctgtctacttacacccccgaaaatctcctgaacaaatgcaagcctggcgatctggtggaatttgtcagccaggctcaataccctcactgggcagtgtacgtgggcaactttcaggttgtgcatcttcatcgactggaggtgatcaactctttccttacggacgcttctcaggggcgtagaggccgagttgtgaacgatctatatagatacaaaccgttgagctcgtctgctgtggttcgcaacgcattggctcacgtcggcgcaaaggaaagggaattgtcctggcgaaactctgaatccttcgctgcttggtgccgctacggtaaaagagagttcaaaataggaggagagttaaggatcggtaaacagccatatcgtctgcagattcaactgtctgctcagaggagccacactctggaattccaatctctggaagatcttattatggagaagcggcgaaatgatcagataggccgagccgcagtcctacaggaacttgcaacccatctccaccctgccgagcccgaggaaggcgacagtaacgtggccagaactacaccacccccaggccgtccccctgcacccagctctgaagaggaggacggcgaggccgtggcccactag

SEQ ID NO: 222812 - DNA, 999 bp, synthetic construct
  misc_feature 1..999: note = Description of Artificial Sequence: Synthetic coding sequence
  source 1..999: mol_type = other DNA
atggaacctgtgggccgaaagcgcagtcgtaaggctgctaaagcgcaactcgaggctcaggtaactgccgctcagggggctaccaaggagggatctggaatcgcctcaaacttccctgggcagcccactatggagcctgttggccgaaaacgtagccggaaggccgctaaagcccaattggaagctcaggtgagggctgctcctgccaagaagcataccggaaaggacccagtgcgggatgagtgcgaagaacgcaatcccttcactgagactcgcgaggaagatgttactgatgagcacggagagagagaaccattcgccgagaaggacgagcacactggtatccacactatgaaactggagcatattgctgctgacatcaagaaaggtctcgctgcaaagagagaaatgataaagatcgacaaagcggcttataggaagaccaaaaacacaatcgagagggcccttaagaaaaaacaactgaaaagacagaagagggactaccgccatactagaaagttattaaacgttctgaaagaatacatcgctgagaaacagaaagacgatgaggccgaggaagctgaagctgccgctgctgccgcagaggctgctgctgcagccgaagctgcagctgccgctgctgaggtcatagttgtggaggacgaagaagaggaggagaaggaggaggaggaagaaaaggaagaggaagaagaggagggagaagaagaaggagggggtgaggagggagaggagggtggcggaggtggagagggagaggaaaccgaggaggaagaggaagaggaagaagaagaagaagaggaggagcagataaaggcatttcaggagaaacagaaaagatggcagcagcccacaggagtgcggtcctggagattgcgggaaatgaaacccttgttggaacagttgctcaaagccgctaaagacaccaaagacaactattgcatcatctcttctagcgaggaatcagaattggacaattag

SEQ ID NO: 222813 - DNA, 999 bp, synthetic construct
  misc_feature 1..999: note = Description of Artificial Sequence: Synthetic coding sequence
  source 1..999: mol_type = other DNA
atggaaccggtcggacggaagcggagtcggaaagcagctaaggcgcagctggaagcccaggtgaccgctgcccagggggctaccaaagaggggagtggcatcgcctccaattttcctggccaacctactatggagccagtaggaagaaagaggagccggaaagccgctaaagctcaactcgaagcccaggtgagggccgctcccgctaaaaaacatactgggaaagaccccgttagagacgagtgtgaggagcggaaccccttcaccgaaactagagaggaggatgtaacggatgaacacggagagcgcgaacctttcgcagagaaggacgagcacaccggcatccatactatgaagctggagcatatcgcggctgatatcaaaaaggggctggctgccaagagggagatgatcaagattgataaagcagcatatcgtaagacaaaaaatacgattgaacgcgctctaaagaaaaaacagctgaaacgacaaaagcgtgactatcgccatacacggaagcttctgaacgttttgaaggaatacattgcagagaagcagaaagatgacgaggccgaagaagctgaagccgctgccgcagcagctgaggctgcagccgcagcagaagcggcagcggctgccgcagaagtgattgtggtagaggatgaagaagaagaggagaaggaggaggaggaggaaaaggaggaggaagaggaggagggcgaagaagagggcggaggtgaagagggtgaagaaggagggggaggcggagagggcgaggaaactgaagaggaggaggaagaggaggaagaagaggaggaggaggagcagatcaaggcattccaagagaagcagaagcgttggcagcagcccacaggggtccgttcttggcggctgcgcgagatgaagccactgctagagcaactgctcaaagcagccaaagacacaaaagataactattgcattatctcttcctctgaggaaagcgagttggataactag

SEQ ID NO: 222814 - DNA, 561 bp, synthetic construct
  misc_feature 1..561: note = Description of Artificial Sequence: Synthetic coding sequence
  source 1..561: mol_type = other DNA
atggcagcttggggcaagaaacacgctgggaaggaccctgtaagggatgagtgcgaggaacggaacagattcacggagacccgcgaagaagatgtaaccgatgagcacggcgaacgggaaccctttgcagaaactgacgagcatacaggtgctaatactaagaagcctgaagacacagctgaggacctcaccgcaaagcggaagcggatgaagatggacaagacttgctcaaagactaagaacaagagtaagcacgctctgcgcaagaagcaactgaagcggcaaaaacgggactatatacatagcctgaagctcctaaacgtgctagaggagtacatcaccgacgagcagaaagaggaggaagaggaggaaggggaggaagaggaactgattagaatttttcaggaacagcagaagaaatggcagcagtaccgatcagtacgacgtgagaggctgaaggaaatgaaattattgcgggatcaatttgtaaaggcgctggaggattttgaagacctctgtgaccgggtgttttctgatgaggacagcgaactggacaactag

SEQ ID NO: 222815 - DNA, 681 bp, synthetic construct
  misc_feature 1..681: note = Description of Artificial Sequence: Synthetic coding sequence
  source 1..681: mol_type = other DNA
atgccgggtttcctcagtttcctgtcagtctctctccgatcccccggatccggaatagccagtagctttcccggtcaacctgctaccgatccggttggtcgccgagcggctaaagcacagctggaggcgcagtttatggccgcatggggaaaaaaacacgccggtaaagatcctgtgagagatgaatgtgaggagcgcaaccgcttcaccgagactcgggaggaggatgtgactgacgagcacggtgagagggagcctttcgctgagaccgatgagcacaccggggctaacaccaagaaacccgaggatacagctgtgggggctaacaatttcaagaattaccccgtacacatcggggtgagttccgagcagcatatcctgctggactgttctctttcacggcagaaacgcgattacatccattctctgaaactcctgaatgtcctcgaggagtacattactgatgagcagaaggaggaggaggaggaggagggcgaggaggaggagttgatcaggatattccaggaacaacagaagaaatggcagcagtaccgctccgtgagaagagagcggctgaaggaaatgaagttactgcgagatcagtttgtgaaggcactggaggatttcgaggatctctgtgatagagttttttccgatgaagatagtgaactcgacaattag

SEQ ID NO: 222816 - DNA, 561 bp, synthetic construct
  misc_feature 1..561: note = Description of Artificial Sequence: Synthetic coding sequence
  source 1..561: mol_type = other DNA
atggccgcatggggcaagaagcacgccggaaaagatccagtcagagacgagtgcgaggagcgcaatagatttaccgaaacaagggaggaggacgtcacggatgagcacggcgagcgggaacccttcgccgaaacagatgaacacaccggagccaacactaagaaaccagaagacacggctgaggacttgaccgccaaacgaaagcggatgaaaatggacaaaacctgttctaagacaaagaacaagtcgaagcatgccttgagaaaaaagcagctgaagaggcaaaagcgcgattatatacatagcctgaaactgcttaacgtcctggaggagtacattacagacgaacaaaaagaagaagaggaggaggagggggaagaagaagagctgatcagaatcttccaggagcagcaaaaaaagtggcagcagtatcgctccgttcgaagggaacggctgaaagagatgaaattactgcgggatcagttcgttaaagctttagaagattttgaagatctgtgcgaccgggtttttagcgacgaagacagtgagctggataactag

SEQ ID NO: 222817 - DNA, 501 bp, synthetic construct
  misc_feature 1..501: note = Description of Artificial Sequence: Synthetic coding sequence
  source 1..501: mol_type = other DNA
atggcagcaaaggaccagctggaggtacaagttatggccgctcaagagatggagcttgcaggcaaagaccctgtgagtcacgagcacgaggagcgtaagcccgtgactgaaaccaaggagggagacgtgacagacgagcatggcgaacggggttcctttgctgagaccgacgaacacacaggcgtcgacaccaaagaactcgaggatatcgcagctgacataaaggagcacctggccgctaagagaaaaaggattgaaaagatagccaaggcctgctccgagataaaaaaccgcataaagaacgttctcaggaccacacagcttaagcgccagaaacgggactatcggataagcctaaagctcccaaacgttctcgaagagttcatcactgatgaacagaaggacgaagagggggacggcgagaaggaggaacagatcaagattttccaggaacagcagaaacgctggcagcaagatggaaaaggtactgaaagggattag

SEQ ID NO: 222818 - DNA, 501 bp, synthetic construct
  misc_feature 1..501: note = Description of Artificial Sequence: Synthetic coding sequence
  source 1..501: mol_type = other DNA
atggccgctaaagatcagctggaagtacaagtcatggctgcccaggagatggaactggcaggaaaggaccccgtctctcacgagcatgaggagcgtaagccagtcaccgagacaaaggaaggtgatgtgacggatgagcacggagaaagaggaagttttgccgagaccgacgaacacaccggcgtggacacaaaggaactggaagatatcgctgccgacatcaaagaacatctcgccgcaaagcgtaaaaggattgaaaaaattgctaaggcatgctctgagattaaaaaccgtatcaagaacgtgctgcggaccacccagctcaaacggcaaaaaagggactatcggatatctcttaagctccccaatgtgctggaagagttcataacagatgaacagaaagatgaggaaggcgacggagaaaaggaagagcaaataaaaatttttcaggaacaacagaaacggtggcagcaggatggaaaaggcaccgagcgcgactag

SEQ ID NO: 222819 - DNA, 381 bp, synthetic construct
  misc_feature 1..381: note = Description of Artificial Sequence: Synthetic coding sequence
  source 1..381: mol_type = other DNA
taggacgtcaccgacgaacacggggaacgcggtagtttcgctgagacggacgagcacacaggggtggatacaaaggaattagaggatatcgccgctgatataaaggagcatttggctgccaaacgcaagagaattgagaagatcgccaaagcttgcagcgaaataaaaaaccgcattaagaacgtgcttcgaacaacacagctgaaacggcagaagagggattaccggatttcacttaagttaccaaacgtgttggaggaattcattaccgacgaacagaaggatgaggagggcgacggcgaaaaggaggagcaaatcaaaattttccaagagcagcagaaacgatggcagcaagacggcaaaggcactgagcgcgactag

SEQ ID NO: 222820 - DNA, 387 bp, synthetic construct
  misc_feature 1..387: note = Description of Artificial Sequence: Synthetic coding sequence
  source 1..387: mol_type = other DNA
atggcggcaaaagaccagcttgaagttcaagtcatggcagctcaggagatggaactggctggcaaggaccccgtgtcacacgagcatgaggagcggaagcccgtcactgaaacgaaggagggcgacgtcaccgatgagcatggcgagcgcggaagctttgctgaaactgatgagcacaccggggttgacacaaaggagttggaggacatagctggaatgttctacgagttgttcgtggtgtatgagaactgctttcaaccatacaacccttactccaggttgtacgaactggtcgacgacaaaacagtccttaacgccttctttagctatatagcatttaacgtgatttgtcttattatctttctgacctatttcttcaattgctag

SEQ ID NO: 222821 - DNA, 1395 bp, synthetic construct
  misc_feature 1..1395: note = Description of Artificial Sequence: Synthetic coding sequence
  source 1..1395: mol_type = other DNA
atgatggcacggagagacccaaagccaggggctaagcgcttggtccgagcccagacgctccaaaagcaaaggagggctccggtgggccctcgagccccacctcccgatgaggaggatccacggctcaaatgcaagaactgcgaggcctttggccataccgctcgcagtacacgctgccccatgaaatgttggaaagcagccctggttcccccaaacttcggtgagaaagaaggcaaggagaacctcaagccctggaagccacaggttgaagccaacccgggacccttaaacaaagataagggggagaaagaagaaagaccacggcctcaggacccacagaggaaggccctgctccacatattttcgcgaaagcctccagagaagccactgcccaaccagaagggttccactgagagttctgactacttacgtgtcgcttcagggcctatgcctgtgcacaccacctccaagcgtccccgagtcgacccggttctgtccgaccggagtgctacagagatgagcgaccgcggttctgtgctggcatctctgtccccgctgcgcaaggcttccttgagttcatctagtagcctcggacctaaagagaggcagaccggggctgcagctgatatcccacagaccgctgtgaggcaccagggccctgaaccgctgttggtggtaaagcccacacacagctccccagctggaggctgtcgtgaagtcccacaggcggcaagtaagacccatgggctcctgcaggctgtcagtccacaagcacaggacaagaggccagcagtcacatcgcagccatgcccccctgctgccacccatagtctgggcctgggcagtaatctctcttttggccctggagctaagcggtcagctccagcacctatacaggcgtgccttaattttccaaaaaagcctaggttgggacccttccagataccagagtctgcaattcagggcggagaacttggcgctcccgaaaacctgcagccacctcctgccgcaactgagctggggccaaggacctcgccccagacaggcactcggacccccgctcaagtgcttagtggtgatcggcagccgccacattccagaccttgtctgcccaccgcgcaggcttgcacgatgtcgcaccatcccgcagcatcccacgacggggcacagccactccgagtgctgttcagaagattagaaaacggccgatggtccagcagtcttcttactgccccaagctttcacagtcccgagaaacctggagcttttctggcacagtccccccacgtgtccgagaaaagtgagggtccttgcgtcagggtcccccctagtgttctttatgaggatctgcaggttccatcaagttctgaagatagtgattcagacttggaatag

SEQ ID NO: 222822 - DNA, 45 bp, synthetic construct
  misc_feature 1..45: note = Description of Artificial Sequence: Synthetic coding sequence
  source 1..45: mol_type = other DNA
atgatggcgagaagagatccgaagccaggcgctaagagactttag

SEQ ID NO: 222823 - DNA, 1395 bp, synthetic construct
  misc_feature 1..1395: note = Description of Artificial Sequence: Synthetic coding sequence
  source 1..1395: mol_type = other DNA
atgatggcaaggagggatcctaagcccggagctaagaggctagtgcgcgctcaaacactacagaaacagcggcgagcgcctgtcgggcctcgggctcctccaccggatgaggaagatcctagactgaaatgtaagaactgcgaagcctttggccacacagctcggagtacccgatgccccatgaaatgctggaaagctgccttggtccctcccaactttggcgagaaagaggggaaggagaacttaaaaccctggaagccgcaagtggaggcgaatccaggcccactgaataaggataaaggagaaaaagaggaacgacccaggccacaggacccccaaaggaaggccctgctccatattttttcacggaagccaccggagaagcctctgcccaatcagaagggcagcacggagagcagtgactatttacgcgttgctagtgggcctatgccagtccatacgaccagtaagcggccaagggtggatccagtactgagcgacaggagtgcaactgagatgagcgatagaggaagcgtgttagcaagtctgtcccctctgaggaaggcctctctctccagtagctcaagcttaggtcctaaggagcggcagactggcgctgccgctgatattccccagaccgccgtgaggcatcaggggcctgagccgctgctagtcgttaaaccaacacactccagcccagcaggaggatgcagggaagtgccacaggccgcttcaaagacacatggccttctgcaggctgtcagcccgcaggcacaagacaagcggccagcggtgacatcccagccatgtcctcctgctgcaactcacagcctcggtctgggatccaacctatcatttggccctggggcaaaacgctcagcgccagcccctatccaggcctgcctgaattttcccaagaagccccgactggggccatttcagattcccgagtctgctatacagggtggagagctgggggcacctgagaatctgcagccccctcctgcagcgacagaattggggccacgtaccagcccgcagaccggtacgcggactccagcccaagtgctgtctggagaccgccagccaccccacagtcgtccctgcctgcctacagcgcaggcctgcacaatgtctcatcacccagccgcatcgcatgacggtgcacaacctctcagggtgctgtttcggcgattagagaacgggagatggtccagcagcctacttacggccccaagcttccattccccagagaagcctggggcttttctggcccagtccccacatgtctctgaaaagtccgaaggtccgtgtgtacgcgtccccccttctgtgctgtacgaggacctgcaggttcccagctcctccgaagattctgactccgacctggaatag

SEQ ID NO: 222824 - DNA, 1143 bp, synthetic construct
  misc_feature 1..1143: note = Description of Artificial Sequence: Synthetic coding sequence
  source 1..1143: mol_type = other DNA
atggctgtaactgaggccagcttacttagacagtgccctttgttgttgccacaaaatagatcaaagaccgtctatgagggttttatctccgcccagggccgtgactttcatctcaggatcgtccttccagaggatttgcagctcaaaaacgccaggctcctctgctcttggcagttgcggacaatcctctctgggtaccacagaatagtgcaacagcggatgcagcacagccctgatttaatgtctttcatgatggagcttaagatgctgttggaggtagccctcaaaaataggcaggaattgtatgcccttcccccaccgccacagttttattcatccctcatcgaggagatcggaaccctgggatgggacaagctggtgtatgcagatacatgtttcagcacaatcaagttaaaggccgaagacgcaagtggcagagagcacctgattactctcaagcttaaggctaagtatcccgctgaatcccctgattatttcgtagactttcctgtacctttctgtgcctcctggacaccccaagtgaattcacctcagtcatctctcattagtatttactcccaattcttggctgcgattgagagtctcaaggcattctgggatgtgatggatgagattgatgagaaaacttgggtgctagagccggaaaagcctcctcgcagtgccactgcccgaagaattgcactgggcaataatgtatctatcaatattgaggtcgatccgaggcatcctactatgctgccagaatgcttctttctcggggctgatcacgtggtgaagccattagggatcaagttatccagaaatatccacctttgggatcccgaaaattctgtgctgcaaaacctgaaagacgtactagaaattgatttccctgccagggctattctggagaaaagcgatttcaccatggactgcggaatttgttatgcatatcagctcgatggcaccatacccgaccaggtgtgtgacaattctcagtgtggccagccgtttcatcaaatctgcctgtacgaatggctcagagggctgttaacctctagacagtcgtttaatatcatcttcggagaatgtccctattgttcaaagcctattactctgaaaatgtcagggagaaagcattag

SEQ ID NO: 222825 - DNA, 2580 bp, synthetic construct
  misc_feature 1..2580: note = Description of Artificial Sequence: Synthetic coding sequence
  source 1..2580: mol_type = other DNA
atgacgagcaagcaggcaatgtcttccaacgaacaagagcgtctgttatgctacaatggggaggtactcgtcttccagctgtccaagggaaacttcgccgataaagaaccaaccaaaacccctatccttcatgttaggaggatggtgtttgacaggggcaccaaggttttcgtccaaaagagcacagggttttttacaatcaaagaagaaaacagtcatttgaaaatcatgtgttgcaattgtgtgtccgacttccgtactggtattaatttgccttacatcgttattgaaaagaataagaaaaataatgtatttgaatactttctgctcattctccacagcacgaataagtttgagatgcggctcagtttcaagctcggctacgagatgaaggatggtcttcgagtgttaaacggacctttaattctttggcgacacgttaaagccttcttctttattagctcccaaacaggaaaagttgttagtgtcagtgggaacttcagctctatccaatgggctggagagattgagaatttggggatggtgctactggggctaaaggaatgctgcctgtctgaggaggagtgcactcaggaaccaagtaaatccgattacgcaatctggaacacgaagttttgtgtgtattcactggagtctcaggaagtgctgagcgatatctatataattcctcccgcatactcttctgtagtaacctacgtacacatctgtgcaaccgagataatcaagaaccaactgagaatttcactgattgccctgaccagaaagaaccagctcatttctttccaaaacgggacgcctaagaatgtctgtcaactcccctttggagatccatgcgcagtgcagcttatggatagtggcggtggaaatttgttttttgttgtcagtttcattagcaataatgcatgcgcggtgtggaaagaatccttccaggtcgcagctaaatgggagaagttgtccctggtgctcattgacgacttcatcggctctggcactgagcaggtcttactgctgtttaaggatagcctgaattctgactgcctgaccagttttaaaattactgatcttggcaaaatcaactatagttccgaaccttctgactgcaacgaggatgacctcttcgaggacaagcaggaaaacaggtatttagtagttccgcctctcgagaccgggctcaaggtatgcttcagttccttcagagaactaagacagcacctactcctcaaggagaaaattattagcaaatcttataaggctctgatcaacctggtgcagggtaaggatgataacacttcgtcagctgaggaaaaggagtgtctggtgccgttgtgtggcgaagaggaaaatagcgtccatatcctggacgaaaaactttccgataactttcaagatagtgagcaactggtggagaagatttggtatcgcgtgatagatgattctctggtcgtgggagtgaaaactacttcgtcactcaagctcagcctgaacgatgtgaccttatccctgttaatggatcaggctcatgactccaggtttagactgctgaaatgtcagaaccgtgtgataaagctctccactaacccttttcccgcaccttacctcatgccttgcgagattggtttggaggccaagagagtcacacttaccccagattctaaaaaagaggagtcctttgtgtgtgagcatccgagcaagaaagagtgcgtccagattatcactgcggtgacaagcctgtcccctttgttaaccttttccaaattttgctgcactgtgttactgcaaatcatggagagggagtccggcaattgtccgaaagaccgctacgtcgtgtgtggcagagtctttctgtccctggaagacttatctactggcaaatacctgttgacgtttcccaaaaagaagccaatcgagcacatggaagaccttttcgctctgctcgcagctttccacaaaagttgtttccagattacaagcccagggtatgctctgaacagcatgaaggtctggctacttgagcacatgaagtgcgagatcatcaaagaattccccgaggtatatttctgtgaacggccaggctccttttacgggacactgtttacctggaaacaacgaactccctttgaaggaatcctcatcatctactctcggaaccagacagttatgttccaatgcctgcataacttaatacggattctgcccatcaactgtttccttaaaaatctcaaatctgggagtgaaaacttccttattgataacatggctttcacacttgaaaaggagctggtcacgctctccagtcttagcagtgccatagctaaacacgaaagcaatttcatgcagcggtgtgaggtgagtaagggaaagtccagcgtggtcgctgcagctctcagtgatcggcgtgaaaatatccatccatacaggaaggaattacagcgggaaaaaaaaaagatgctgcagaccaatttgaaagttagtggcgcactgtatagagagattactctgaaggtggccgaggtgcagcttaagtccgactttgccgcacagaagctgagcaacctgtag

SEQ ID NO: 222826 - DNA, 2580 bp, synthetic construct
  misc_feature 1..2580: note = Description of Artificial Sequence: Synthetic coding sequence
  source 1..2580: mol_type = other DNA
atgacaagcaagcaggccatgtcgagcaatgagcaggaaagactgctgtgctataacggtgaggtcctggtattccagctctctaagggaaacttcgccgacaaggagcctacgaaaacccccatattgcacgttagaagaatggtgtttgatcgtggtaccaaggtgtttgtccagaagtccacgggtttcttcactatcaaagaggagaattctcacctcaaaatcatgtgttgcaattgcgtgtcggactttaggactggaattaacttgccctacatcgtgatagaaaagaacaagaagaacaacgtttttgagtactttctcctgattctccattcaactaataagtttgaaatgagactcagttttaagctgggatatgagatgaaggatggtctgcgagtgctgaacgggcctctgatactgtggcgccacgtgaaggcgttctttttcatcagcagccagaccggtaaagttgtttcggtgtccggcaatttcagtagcatccagtgggccggagagattgagaacttgggcatggtgcttttaggcttgaaggaatgctgtctctccgaggaggagtgcacccaggaaccgagcaagtcagattacgccatctggaatactaagttctgtgtgtactcactcgaatcacaggaagtactcagtgatatctatataattccgcctgcatatagttcagttgtgacatacgtacatatctgcgctaccgaaatcattaagaatcagctacgcatcagcctgatagctctgactcgaaagaaccagcttataagtttccagaacggaaccccaaaaaacgtgtgtcagctgcctttcggcgacccctgtgccgtgcagctcatggattcagggggagggaatctgttctttgtggtcagctttattagtaacaatgcttgcgcagtgtggaaggagagctttcaggtcgccgcaaagtgggaaaagctgagcttggtcctcatcgacgatttcatcggatcagggacagaacaggtgttgttactgtttaaagatagtctgaactcagactgtttaaccagttttaaaattaccgacctgggcaaaatcaattacagctccgagccatcagattgcaacgaagacgacctttttgaggacaagcaggagaatcgatacctggttgtgccgccacttgaaacaggcctcaaggtttgcttctctagctttagggagcttaggcaacatctgttattaaaggagaaaataatctctaagagctacaaggctctgatcaatctggtccagggcaaggacgacaatacttcatccgcagaagaaaaagagtgccttgttcccctgtgcggggaggaagagaattctgtgcatattctagatgaaaagttgtccgataactttcaggatagtgagcaactcgtcgaaaaaatctggtatagagtgattgacgactccctggtcgtgggggtcaagaccacatctagcctaaaacttagcttgaacgacgttacactatctttgctgatggaccaggcccacgacagccggttccgcttgctgaagtgccaaaatcgcgtgattaagctaagtaccaacccattccctgctccatatctgatgccttgcgagataggcctagaggccaaacgagttacactcactcccgattctaagaaggaagaatcatttgtttgcgagcatccttctaagaaagagtgcgtgcagattattaccgctgtgacatccctctccccactgttgactttctcaaagttctgctgtaccgtgctattgcagattatggagcgggaaagcgggaactgccccaaggataggtatgtggtatgtggcagggtgttcttgtcactggaggatctgagcaccggaaagtacctacttaccttcccaaagaagaaaccaatcgagcatatggaagacctgttcgctcttctcgccgctttccacaagagttgctttcagatcacatctcccggatatgcactcaacagcatgaaagtctggctcttagaacacatgaaatgcgaaatcattaaggaattcccagaggtctatttctgtgaaaggcccggtagcttctacggcaccctgttcacctggaagcagagaaccccctttgaaggcatccttattatttactctagaaaccaaacagtaatgttccagtgccttcataacctgatcagaatcctccccataaactgctttctgaagaatctgaaaagcggctctgagaacttcctgattgacaatatggcctttaccctcgagaaggagctcgttacactttcttcattgtccagtgcaatagcaaaacacgagtcaaacttcatgcaaagatgcgaagtctccaaggggaaaagcagcgtggtggccgctgctttgagcgaccggcgagaaaacatccatccgtatcgaaaagagctgcagagagagaagaaaaaaatgcttcaaaccaatctcaaagtcagcggggcattataccgcgaaatcactcttaaagttgcagaggtccagctcaagtctgatttcgctgcgcaaaaattgagcaatctgtag

SEQ ID NO: 222827 - DNA, 2457 bp, synthetic construct
  misc_feature 1..2457: note = Description of Artificial Sequence: Synthetic coding sequence
  source 1..2457: mol_type = other DNA
atgacttctaagcaggctatgagttctaatgaacaggaacgtctgctgtgttacaacggcgaagtcttagtgttccagctttcaaagggcaactttgctgataaagagcctaccaaaactcctatcctgcatgtccggcgaatggtcttcgaccgcggaactaaagtgtttgtgcagaaaagcacaggattctttacaataaaagaagagaactctcatctcaaaatcatgtgctgcaattgcgtctccgacttccgaaccgggattaatctgccttacatagttatcgagaagaataagaagaacaatgtctttgaatacttcttactcatcctccacagtactaataagttcgagatgcgcctcagcttcaagctggggtacgaaatgaaggatggccttcgggtcctgaacggcccactcattctctggaggcacgtaaaagccttcttttttatcagcagccagactggtaaggtcgtatcggtgagcggtaacttttcatcaattcagtgggccggagagatcgaaaacctcggcatggtgctcctaggtttgaaggaatgttgcttgtcagaagaggagtgcacccaggagccatctaagagcgactacgcaatatggaacaccaagttctgcgtctactcacttgagtctcaagaagtgctgagcgacatatatatcatcccaccggcatactctagtgtggtcacttacgtgcatatctgcgcaaccgaaatcataaaaaatcaacttaggatcagcctcatcgctctaacgagaaagaaccaacttatcagctttcagaatggtacgccaaagaacgtatgtcaactgcccttcggagacccatgtgctgtgcaactgatggattcggggggtgggaatctattctttgtggtttcctttatcagtaataatgcctgcgctgtgtggaaggagtcgttccaagtggctgcaaaatgggagaagctctccctagtcttgatagacgacttcatcggatccgggacagagcaggttctcttactttttaaggattcacttaattccgactgtcttacgtcatttaaaatcactgaccttgggaagattaactacagcagtgagccatccgattgcaatgaagacgacctcttcgaggacaagcaggagaacagatatctcgtggtgccacctcttgagactggacttaaggtctgctttagctccttccgcgaattgagacaacatttactgctgaaagaaaaaattatctccaaaagctacaaggctctcatcaacctcgtgcaggggaaggatgacaatacgtcctccgctgaagagaaggaatgcttagtgccgctttgtggggaagaggaaaattctgttcatatcctcgacgagaaactttccgataacttccaggactcagagcaactggtggagaagatctggtatcgcgttattgacgacagtctggtggttggagttaaaacaactagctcgctgaaattgagcctgaatgatgtcaccctctccttactcatggaccaggcccatgatagtcgcttccgcctcctgaagtgccagaaccgggtcatcaagctgtccaccaacccgtttcctgcgccatacctcatgccatgtgagatcggattggaagcaaaacgcgtgacacttactcctgattccaagaaggaagagagctttgtgtgtgagcacccaagtaaaaaggaatgtgtgcagataatcacagctgttacgtctctcagtcctctgttgaccttttccaagttttgctgcacagtgttactgcagataatggaaagagagagcggaaattgccctaaagaccgctacgtggtgtgcgggcgtgtctttctgtctttggaggacctgtccacaggtaagtacctcctgacattccccaagaaaaaacccatcgagcatatggaggatcttttcgccctgctggccgctttccataagtcctgtttccagatcacatcgcctggttacgctctgaattccatgaaagtgtggctccttgagcacatgaaatgcgaaattattaaggagtttccagaagtgtacttctgtgagcgtcctgggagtttctatggaacgctgttcacatggaaacaaagaaccccctttgagggtatactgataatttactcaaggaaccaaaccgtgatgtttcagtgcttacacaacctgatacgaatattacccatcaactgctttctgaaaaacttgaagtctgggtccgaaaatttcctgattgacaacatggcgttcactctggaaaaagagttagtcactctctcctctttaagctctgcaattgcaaagcatgaaagtaatttcatgcaaagatgcgaagtcagcaagggtaaaagctctgttgtggctgctgctctgtctgacagacgcgagaacatccatccttatcgaaaggagctgcagagatag

SEQ ID NO: 222828 - DNA, 1677 bp, synthetic construct
  misc_feature 1..1677: note = Description of Artificial Sequence: Synthetic coding sequence
  source 1..1677: mol_type = other DNA
atggcccaagattccgtggatctgtcctgcgactaccagttctggatgcagaagctgagcgtgtgggatcaggcgagcaccctggaaactcagcaggacacctgcctgcatgttgcgcaattccaggagttcttgcgaaaaatgtatgaggccttaaaagaaatggattcgaacaccgtgatcgagcggttcccgactataggccagctcctggcaaaggcttgttggaaccctttcattctggcctatgatgaaagccagaagattctgatctggtgcctctgctgtctgatcaacaaggaaccccagaattcaggccagtccaaactaaacagctggatccaaggcgttcttagtcacatcttgagcgcattaagatttgacaaagaagtagcattatttacacaagggttaggatacgcacctattgactattatccaggccttcttaagaacatggttctctctctggcatccgagttgagagagaaccacctaaacgggtttaatacccaaaggcgtatggcgcctgagcgagtggcctccttgagtcgcgtttgcgtgcccttaataacccttacagatgtcgacccactagtagaagccttgctcatctgccacggacgcgaaccgcaagagatcctacagcccgaattcttcgaagccgtcaacgaagccatcctgctgaagaaaatcagcctccctatgtctgctgtcgtgtgtctctggcttcgccatctgccctcactggagaaggcaatgttgcacctgtttgagaagctcatatcatctgagcgcaattgtctgcgcaggatcgagtgtttcattaaggatagctcccttccccaggcagcatgccatcctgcaatttttagagtggttgatgagatgttccgatgcgcgctcctggagaccgacggagccttggaaattattgctaccatccaggtgtttacacagtgttttgtagaagctctggagaaagcttccaagcagctgagatttgccctgaagacttactttccctatacatctccttccctcgctatggtactcctgcaggacccgcaggacatcccacgagggcactggctccagaccctgaagcacatcagtgaactccttcgcgaagctgttgaggatcagacacatggctcttgcggtggacccttcgagagttggttcctctttatccactttggcggatgggccgagatggttgcagaacagctcctgatgtcagctgccgaacctcctacagccttgctttggctccttgctttttactacgggcctagagacggcaggcagcaacgggctcaaactatggtgcaggttaaagccgttctgggacacttgctagccatgagcaggagttcatcactatccgcccaggatctgcagacagtcgctgggcagggcaccgacacagatctcagggctccagctcagcaacttatacggcacctcctcctcaacttcctactctgggccccaggagggcataccattgcctgggatgtcattacacttatggcccatactgcagagatcacgcacgagatcatcgggttcctcgaccaaacactgtatcggtggaataggttaggcatcgagagtcccaggagcgaaaaactggcacgagagctgttgaaggaactgcgtacccaggtgtag

SEQ ID NO: 222829 - DNA, 1677 bp, synthetic construct
  misc_feature 1..1677: note = Description of Artificial Sequence: Synthetic coding sequence
  source 1..1677: mol_type = other DNA
atggctcaggacagcgtcgatctttcctgcgactaccagttttggatgcagaagctgtctgtatgggatcaagcctcaaccctggaaacacagcaagatacatgtctccatgtggcccagttccaggagttcctgcgcaagatgtatgaagcgctaaaggaaatggactccaacacagttatagagagattccccaccattggacagttgttagcgaaagcttgttggaaccctttcatattggcttacgatgagtcccagaaaatcttaatttggtgcctctgttgtctcatcaataaagaacctcagaatagcggccagagcaagctgaattcctggatccagggagtgctgagccatatcctatccgccctgcgcttcgataaggaggtggccctgttcacccagggtttgggttacgctccaattgattactaccccggtctattgaagaatatggtgctatctctcgcttctgaactcagagagaaccaccttaacggattcaacactcagcgcagaatggccccagagcgagttgcatccctttccagggtgtgcgtacctttgatcactctcaccgacgtagatccactggtggaggctttgctgatttgccatggacgagagcctcaagagattctgcagcccgagttcttcgaggccgtcaacgaggccatcctgctgaagaaaatcagcttacccatgtctgccgttgtctgtctctggctcaggcatttaccaagtctggagaaagccatgctacatctatttgagaagctgatctcctctgaaaggaattgccttagacgcatcgagtgcttcattaaagattcaagtcttccgcaggctgcctgtcatcccgcaatattccgggtggtggatgagatgttcaggtgtgctctactcgagacagacggcgcactggaaattatagcaacaatccaggtgttcacccagtgtttcgtggaggccttggaaaaggcaagcaagcaactaagattcgctttaaaaacttactttccctacacttccccttcacttgcaatggttctgttacaagacccccaagatatccctcgcggacactggctacagaccctgaaacatatctctgagctgttacgggaggccgttgaggaccagacccacggtagctgtggcggaccctttgaaagttggttcctgttcattcattttggaggctgggcagaaatggtagccgaacagctcctgatgagtgcagcagagcctcccaccgcactgctttggcttttggcattttactacggccctcgagacggaagacagcaaagggcccaaacaatggtgcaagtgaaggcggtcctggggcacctgcttgcgatgagtagatcctctagcttatccgcacaggatttgcagactgtggcgggacaggggactgacaccgatctgcgggcacccgctcagcagcttatccgtcacctgttgttgaactttcttctctgggcgccagggggtcatacaattgcctgggacgtgatcacactgatggctcataccgccgagatcacgcacgaaataattggattccttgaccagacattgtataggtggaaccggctcggtatcgagtctccaaggtcggaaaagttggcccgagagctgctcaaagaactacggacccaggtgtag

SEQ ID NO: 222830 - DNA, 453 bp, synthetic construct
  misc_feature 1..453: note = Description of Artificial Sequence: Synthetic coding sequence
  source 1..453: mol_type = other DNA
atggcccaagatagtgttgacctgtcgtgtgattaccagttctggatgcaaaaactgtcagtgtgggatcaggcctctaccctggaaacacagcaggatacgtgtctccatgttgcccagtttcaggagttcttacggaagatgtacgaggccctcaaggaaatggattccaacacagtaatagagcgctttcccaccattggtcagctcttggcaaaagcctgctggaacccctttattctggcttatgacgaatcacagaaaatcctgatatggtgtctgtgttgcctgataaataaagaaccgcagaacagtggtcagagcaaactgaacagctggattcagggtgtgctgtcccacattctgtcagcccttcgcttcgataaggaagtggcgctgttcacccagggcttgggctacgcgccaatcgactactaccccggacttttatag

SEQ ID NO: 222831 - DNA, 4416 bp, synthetic construct
  misc_feature 1..4416: note = Description of Artificial Sequence: Synthetic coding sequence
  source 1..4416: mol_type = other DNA
atggtcagcaagcgaaggctgagtaaatcagaggataaggagagcctgacagaggatgccagcaagacgcgaaagcagcccctgagcaagaaaaccaagaaaagtcatatcgctaacgaggtggaggaaaacgattccatttttgtcaaactgctcaaaatctctggtataatcctgaagactggggaatcccaaaaccagttagccgtggatcagatcgcattccagaagaaactgttccagacacttagaaggcacccatcctaccctaagattattgaggagtttgtttccgggttggagtcctacattgaggacgaggattcattcagaaattgtctgctgagttgcgagcgattgcaagacgaagaggcatctatgggggcaagctactcaaagtctctcattaaactcctgctggggattgatattctccaacctgccatcatcaagaccctctttgaaaagctcccagagtacttctttgaaaacaagaactccgacgagattaacattccacgcctgattgtgtctcagctcaagtggctcgatagagtggtggatgggaaagacctcaccacaaaaatcatgcagttgatatcgatcgctccggaaaacctacagcatgatatcataacaagcctgcctgagatactcggagactctcagcatgccgacgtgggtaaagagttgagtgacttgctcatagaaaacaccagtctgactgtgcccattctggatgtcttgtccagcctgcgtttggatccaaacttcttgttaaaagttcgacagctcgttatggacaagctctcatcgataagactcgaagacctgcctgtcatcattaaatttattcttcactccgtcactgcgatggacacccttgaggttattagtgaattgagagagaagctggacttgcaacattgtgtgctcccatctaggctgcaggcctcacaggtaaaattgaagtcaaagggacgggcaagcagctccgggaatcaggagagcagtggccagtcctgcattatcctgctctttgacgtcattaagagtgccattaggtacgagaaaactataagtgaggcatggataaaggctattgagaacaccgctagtgtgagcgagcataaagtgttcgatctggttatgttattcatcatttatagtaccaacacgcaaactaaaaaatacatcgatcgagtgctccgcaacaagatacgtagcgggtgtatacaggaacagctactgcagagtacgttctctgttcactacctagttctcaaagatatgtgtagcagcatcctcagcctggctcaaagcctgctgcattctcttgaccaatctatcatctcattcggcagtctcctgtacaagtatgcttttaagtttttcgatacttattgccagcaggaggtggtgggagctctggtcacccatatttgctctggcaacgaagccgaagtcgacaccgctttagatgtgcttctcgaactggtggtcctgaacccatccgccatgatgatgaatgcagtctttgtaaaagggatccttgattaccttgataacatcagcccacagcagattcgcaaattgttttatgtcctctctacattagccttcagtaagcagaatgaggctagttctcacatccaggatgatatgcatctcgttattaggaagcaactgtcttccacagtgttcaagtacaagctgatagggattattggtgccgtgacaatggccggaattatggccgcagaccgcagcgaatcgccctcccttacacaggaacgagccaacttgtccgatgagcagtgtacacaagtcaccagccttttgcagctggtacactcctgttcggaacagtcccctcaggcatctgcgttatattacgacgaattcgccaatctgatacagcacgagaagctcgacccaaaggccctcgagtgggtggggcataccatctgtaacgactttcaagatgcttttgtggtggactcttgtgttgtcccggaaggtgatttccctttccccgtgaaagccctctacgggctggaggagtacgacacccaagatggcatcgccataaacctgcttccgctgctgtttagtcaggacttcgcaaaagacggagggccagtgacatcacaggaatctgggcagaagctggtgtccccactctgtctagcaccatactttagactgcttaggctttgcgtagagagacaacataatgggaacctcgaagaaattgatggactactggattgcccgatttttctgactgacctggaaccaggcgaaaaactagaatccatgtctgccaaagagcgttctttcatgtgcagcttgatatttctgacacttaactggtttcgcgagatcgtgaacgctttctgtcaggaaacttctccagaaatgaagggtaaggtcctgaccaggttgaagcatattgtcgaactgcagatcattctggagaaatacctagctgtcacccccgattacgtgcctcctttggggaactttgatgttgaaacactggatatcacgccacacactgtgacagccatcagtgccaagatccgaaagaaaggaaagatcgagcggaagcagaagaccgatggatccaaaacatctagttcggacacgctaagtgaagaaaagaactccgaatgtgatcctactcctagccatcggggacaattgaacaaggagtttactggtaaggaggagaaaacgtccctgctccttcataactctcatgcattttttagggaattagatattgaagttttcagcatcctacactgcgggctcgtcaccaaatttatcctggacactgagatgcatacggaagcaaccgaggtggtccaactgggccctcccgaactgctgtttctgctggaggatctgtctcagaaactcgagagcatgctaacaccgcctatcgcacgacgggttccatttctgaaaaataagggcagtaggaacataggatttagccacctgcagcagcgttctgctcaggagattgtgcactgtgtgttccagctcctgaccccaatgtgcaaccatctggagaacattcacaattatttccagtgtctggcggcagagaatcatggggtggtggatggccctggagttaaggtgcaggaataccacattatgtcttcctgctaccagagattgctgcagatttttcatggcctatttgcttggtccgggttttcgcagcctgagaatcagaacttactgtattctgctctacacgttttatcttctcgccttaaacagggggaacactctcagcccttggaagaactgttgagtcagagcgtccattacttgcaaaatttccaccagtccattcccagcttccagtgtgccctgtatctgattcggttgctgatggtgattctagaaaaatccacagcctcagcacagaataaagaaaaaattgcgtccctcgctcgtcagtttctatgtcgagtatggcccagtggcgacaaagaaaaatccaacatctcaaacgaccaactacatgctcttttatgtatatatctggaacatactgagtctatactgaaggcaatagaagagatagccggtgtgggcgtgcccgagctgataaattccccaaaagacgcgtcctcctcaactttccccacacttacaaggcatacattcgtggtgttttttcgtgtgatgatggctgagttggaaaagactgttaagaagattgagcccggtactgccgcagatagtcagcagattcacgaggaaaaattactttattggaacatggctgtgagggatttcagtattctaataaacctgattaaggtgttcgacagtcacccagtcctgcatgtgtgcttgaaatacgggaggctgttcgtggaggcgttcctgaaacagtgtatgcccctgctggatttttcctttcggaagcacagagaagacgtattgagtctgttagaaacttttcagttagatacccggctgctacaccatctgtgcggacattctaagattcaccaggacacccgcctgacacagcacgtgcccctgctcaagaaaacactggagttgctggtctgccgggtcaaagctatgctgactctgaataactgtagggaggctttctggctcggcaacctgaagaatcgtgatctgcagggtgaagagatcaaaagtcagaacagccaggaaagcacagcagatgagtctgaggacgacatgagctcccaggcttctaagtccaaggccaccgaggtttccctccagaaccctccagagtcaggaacggacggctgtatcctcctcatcgttctgtcttggtggagccgcaccttaccgacatacgtgtactgtcaaatgctcctttgcccgtttccgttccccccatag

SEQ ID NO: 222832 - DNA, 3750 bp, synthetic construct
  misc_feature 1..3750: note = Description of Artificial Sequence: Synthetic coding sequence
  source 1..3750: mol_type = other DNA
atggtgtctaagcgaaggctgtccaagagtgaggacaaggaaagtctgacagaagatgcttccaaaactaggaaacagccactgagtaaaaagactaagaaatcccatatcgccaacgaggttgaagaaaatgacagcattttcgtgaagttacttaagatatctgggattatccttaaaactggcgagagccagaaccagttagcggtagatcaaatcgcattccagaagaagctgttccagacacttcgtcgccacccatcatacccaaagatcatcgaggaatttgtctcgggtctggagtcttacatcgaggatgaagattcttttagaaactgcctcctgagctgtgagcgtttgcaggatgaggaagcctcaatgggtgcatcctattccaaatctctgatcaaactgctactggggatcgatatactccagcccgctataatcaagaccctgtttgagaaattgcccgaatacttcttcgagaacaagaactccgacgaaattaatataccaaggttaatcgtatctcagttgaaatggctggatcgcgtcgtagacggcaaagacctaaccaccaaaatcatgcagctgatcagcatagcgccagaaaacctccaacatgacattatcacttcgctgccagaaattctcggcgattctcagcacgccgatgttggcaaagaactctccgacttgctgatcgagaacacttccctgactgttcctattctggatgtgctgtctagcctcaggcttgacccaaatttcctcctcaaagtgcgccagctcgtgatggataaactttcctccatccgactggaggatctcccggtaataatcaagtttatactccatagcgtgactgccatggacactcttgaagtgatcagcgagctgcgggagaagttggacctgcagcactgcgtgttacccagcagactgcaagcgtcacaggtcaaattgaagagtaagggccgagcaagctctagcggaaaccaggaaagctcaggacagtcgtgcataatattgctcttcgacgttataaagtccgccattaggtatgaaaaaactatttcagaggcttggattaaggcaattgaaaacacggcaagcgtgagtgagcacaaggtcttcgacctggtgatgctgtttatcatatactcaacgaatactcagacaaaaaaatatatcgaccgagtgttaagaaacaaaatccgaagtgggtgcatacaagagcagttgttgcaatcaacattctcagtccattatctggtgctgaaggacatgtgttcaagcatcctaagtctggcccagagccttctgcattcgctcgaccagagcatcatttctttcggttcactgctatataaatacgcttttaagttttttgacacatattgccaacaggaagttgtgggagcgctggtgacccatatatgctctggtaacgaggccgaggtagataccgctctggacgttttgcttgaattggtggtgctgaatccaagcgctatgatgatgaacgcagtgttcgtgaaggggattctggattacctggataacatatccccccagcagattcgcaaactgttttatgtgctgagtacattagcattttctaaacaaaacgaagcgtcctctcacatccaggacgatatgcacctggtaattaggaaacagctgagtagcaccgtttttaagtataaacttatcggtataatcggagctgtcaccatggcgggaatcatggcggcagacaggagtgaatctccaagtttaacacaggagcgcgcaaacctgagcgacgagcagtgcacgcaggtcaccagtctactgcaattggtccacagctgttcagagcagagcccccaagcttctgccctgtactatgatgagttcgcaaacctaatccagcatgaaaagctggatccaaaggcactcgaatgggtgggccacaccatctgcaatgactttcaggacgccttcgtggtcgactcctgcgtggtgccagaaggcgatttcccatttcctgtcaaagcgttatatgggttggaggagtatgacacccaggatggtatagctatcaatctgttacctcttctgttctcgcaggacttcgctaaggacgggggtcctgtcacatcacaggagagtggccagaagttggtgagccctctgtgtcttgccccatacttcaggttgttgcgtctgtgcgtggagcggcagcacaacggtaatctagaggaaatagatgggctcctggactgtcccatctttctgacagacttagagcccggagagaagttagaaagcatgtccgctaaggagcgttccttcatgtgctctctgatttttctcaccttgaactggttccgggagatcgtgaacgcgttttgtcaggagaccagtcccgaaatgaaaggaaaagttctcacccgattgaagcacattgtcgaactgcagataattctcgagaagtacctcgccgtgactccagattatgttccccctctcggtaacttcgacgtggagactctggatattactccccataccgtgacggccattagcgctaagattaggaagaagggtaagatcgaacgtaaacagaagactgacgggagcaagacctcctcatccgacacactgtccgaggagaagaattcggaatgtgacccaacaccttcacatcgcggtcagctgaacaaggagtttacaggcaaggaagagaagacaagtctcctgctgcacaattcccacgctttcttcagagagctcgacatagaagtgttctccatcctgcattgtggattggtaactaagtttatactcgatacagagatgcacacagaggccacggaagtagtgcagctggggcctcctgaattgctttttttgctcgaggacctttcccagaaacttgagagcatgttgacaccaccgatcgcgcgacgagtcccatttcttaagaacaagggttctcgcaacatcgggtttagccacctccagcagcgcagcgcccaagaaatcgtccactgcgtgttccagctgctaaccccgatgtgtaaccatctggagaacatccacaattattttcagtgcctggctgctgaaaaccacggagtggtggatggcccaggggtaaaggttcaggaataccacattatgtcaagctgttaccagagactactgcagatctttcacggcttattcgcctggagcggattctcccagccagagaatcagaatctcctctactccgctttgcatgtgctgtccagtcggctgaaacagggagagcacagccagcccttggaggagctattaagtcagagtgtgcattatctgcagaactttcatcagagcataccctcattccaatgtgccttgtatctgattaggttattaatggtgattttagagaagtcgacagccagcgcccagaacaaagaaaagattgccagccttgctagacagttcctatgtcgcgtttggccctccggggataaagagaaatccaacatttccaatgaccaactgcatgccttgttgtgcatttatctggagcacactgagagcatcctgaaagccattgaggaaattgctggtgtgggcgtgcctgaactcatcaatagccccaaggatgcatcctcaagtacattccctacactgactagatttatgaagcgtaactcaagtacagggacctggctgttcgagacatccgtgtccagcagtacatag

SEQ ID NO: 222833 - DNA, 4356 bp, synthetic construct
  misc_feature 1..4356: note = Description of Artificial Sequence: Synthetic coding sequence
  source 1..4356: mol_type = other DNA
atggtgtctaagcggcgtctgagtaagagtgaagacaaagaaagcctaacagaagacgccagcaagacacggaagcaacccctctctaaaaagactaagaagtcgcatattgctaacgaggtcgaggagaatgactccattttcgtgaagctgttaaaaatttcagggatcattttgaagaccggggagagtcagaatcagttggctgtggatcaaatcgctttccagaaaaaactgtttcagacactgagacgtcatccgagttatcccaagatcattgaggagttcgtgtcaggactggagtcgtacatcgaagatgaagattctttcagaaactgtctgctaagctgcgagcgcctgcaggatgaagaggcatctatgggcgctagctactccaagagtctgattaagctcctgctgggtattgacattctgcagccagcgattatcaagaccctgttcgaaaaactgcccgaatactttttcgagaacaagaattccgacgaaattaatatcccccgtttgatagtgagtcagctgaagtggcttgaccgagtggtcgatggaaaagacctcactacaaagatcatgcagctgatttcaatcgcgcctgagaaccttcaacacgatataattacctccctcccagaaattttaggcgactctcagcatgcagatgtggggaaagagctgtctgatctactcattgagaacacttccctaaccgtgcctatcctggatgtgctctccagcctgcgactggaccctaattttctccttaaggtacgacagctggtgatggataaactcagctccatccgcctggaggatctgccggtcatcatcaaattcatcttacattctgttaccgcaatggacaccttggaagttatctctgagcttagggagaagttggacctgcagcactgtgttttgcccagtcggctccaggcgtcccaagttaaactcaaaagtaaagggagagcgtcatcttcaggtaaccaggagtcaagcgggcaaagctgcatcatactgctcttcgatgttatcaaaagcgctatccgctatgaaaaaaccatctcagaagcctggataaaggccattgaaaacacagcctccgtctctgagcacaaggtgttcgacttggttatgctgttcatcatttatagcaccaatacgcagacaaaaaagtatatcgacagggtgctgagaaacaagatccggtccggctgtattcaggagcagctccttcagagtactttctctgtccactacctggtcctgaaagacatgtgtagctctatcctgtctttggctcagtcactcctccacagcttggatcagtctatcatttcgttcgggtcactgctgtacaagtacgcgtttaaatttttcgacacatattgccaacaggaagtggtgggagcactggttacacacatctgttcagggaacgaagcggaggttgatactgctctggatgtgctcttggaattggtggtgcttaacccaagcgccatgatgatgaatgccgtctttgtgaagggaatcttagattacttggacaatatcagcccacagcaaattcgcaagttgttttatgtcctgtcaactttggccttctccaagcaaaacgaagctagctcacatatccaagacgacatgcacctggtgatacgcaagcagctgtcttcgacagtgtttaaatacaagctgattggtatcattggggcagtcacaatggcaggaatcatggctgctgatcgctccgaatctcctagcctaacacaagaacgagctaacctgtcagatgaacagtgcactcaggtcacctcactgcttcagttggtacacagctgttctgaacagtcgccacaggccagtgccttatattatgatgagttcgcaaatctgattcaacacgaaaagctggatcccaaagctctcgaatgggtcggccacacaatctgcaatgacttccaggacgctttcgtggtggactcttgtgtcgtacccgaaggggatttcccttttcccgtgaaggccctctacggcctagaagagtatgacactcaggatgggattgctatcaacttacttcccctgctgttttctcaggatttcgctaaggacgggggacccgttacctctcaggagtccggtcagaagctagtgtcacctctgtgtcttgccccatactttcgccttctgaggttgtgcgttgagaggcagcacaacggcaatctcgaggagatcgatggcctgctcgactgcccgatttttctcaccgacctggaaccaggcgagaagctggagagtatgtcagcgaaggaacggtcgttcatgtgctctttaattttccttactctgaactggtttagggagatcgtgaatgccttctgccaggaaacatcccccgagatgaagggtaaagtgttgactagattaaagcatatcgtggaactgcagattattctggaaaagtacctggctgtgacaccagattacgtcccccctctggggaacttcgatgtcgagacactcgatataacccctcacaccgtgacagccatctcagccaaaattcggaaaaagggcaagattgaaagaaaacagaagactgatggttccaagacatcctcttcagacacactcagcgaggagaaaaattctgaatgcgatccaaccccttctcaccgaggacagctgaataaagagtttacgggcaaagaggaaaaaacttccctgctgctgcacaatagccacgccttcttcagagaactggatatcgaggtgtttagcattctccactgtggactggtgaccaaatttattctcgataccgagatgcatactgaagctaccgaggttgtgcaactcggacccccagaactactgttcctcctcgaagatctgagccagaagttggagagtatgcttacccccccaatcgcgaggcgggtgccgttcctgaagaacaaggggagcaggaatatcgggttttctcatctccagcagcgctccgcacaagagattgttcactgcgtgttccaacttcttacccccatgtgcaaccacctggagaacatccacaactacttccagtgtctggcagcagagaatcacggggtcgttgatggccctggcgtcaaggtgcaggagtatcacattatgagctcctgctatcagaggctcctgcagattttccacggcttgtttgcctggtctgggttctcccaacccgagaatcagaacctgctgtattccgccctgcatgtcctgtcaagcaggctgaagcagggggaacattcacaacccctcgaagagctactctcacagtccgtgcactatctgcaaaatttccatcagtcaatccccagctttcaatgtgccctgtacctgatccgccttctgatggtgatcttggaaaagagtacagcatccgcgcagaataaagaaaagatcgctagccttgctagacagttcctgtgccgcgtctggccatcaggggataaggaaaaatcgaatatatcgaatgaccaactacacgccctgctgtgtatctatcttgagcacaccgaaagcatcctgaaggcgattgaggaaattgcaggagtcggcgtccctgagctcatcaatagccccaaagatgcaagctccagtactttccccacgctgactaggcacacattcgttgtctttttcagagtgatgatggctgagttagagaagaccgtgaagaagatcgagcctggcactgcggctgatagtcaacagattcatgaggagaagctgctttattggaacatggctgtgcgtgatttcagtatcctaatcaatctgattaaagtctttgactctcacccagtgctacacgtgtgcttgaagtacggtcgcctgttcgtcgaggcctttctgaaacagtgtatgcccttattggatttcagctttagaaagcatcgggaggacgtactgtcactgcttgaaacattccagctggacacaaggctccttcaccacttgtgtggacacagtaaaattcaccaggatacaaggctgacacagcacgtgcctctgttgaagaagacgttggagctgctcgtgtgcagagtcaaggcaatgctgactttgaacaactgccgggaagctttctggttaggaaacctgaagaacagggatctccagggagaggagataaagtcccagaactctcaggagagcacggcagatgagagtgaggacgatatgtcttctcaagctagtaagtccaaagcaaccgaagacggtgaagaggacgaagtgtccgccggagagaaagaacaggactcggatgagtcatacgatgactccgattag

SEQ ID NO: 222834 - DNA, 4356 bp, synthetic construct
  misc_feature 1..4356: note = Description of Artificial Sequence: Synthetic coding sequence
  source 1..4356: mol_type = other DNA
atggtatctaagaggaggctctctaagtcggaggataaggaatctctgaccgaagacgcgtcaaaaactaggaagcagcctctcagcaaaaagacaaagaaatcacacatcgccaacgaagtcgaggaaaatgacagtatatttgttaaactcctgaaaatatctggtattattctgaaaacaggagagtcccaaaaccagctagcggtagatcagatcgcttttcaaaagaagctatttcaaaccctgagacggcacccatcttacccaaagatcattgaggaattcgtttcaggtctggagagctacattgaagacgaggactcctttaggaattgtctgctgagctgtgagagactgcaggacgaggaggcatctatgggcgcatcctactcgaaaagcctgattaagctattactcggtatagatatcctccaaccagccattataaagactctgttcgagaagctccccgagtacttcttcgagaacaagaattcagatgagattaatattcccagacttattgtctcccagctgaagtggctcgatagggtggtggatgggaaagacttgactactaaaatcatgcagctaatcagtatagcgccagaaaacttgcaacacgatattatcacttccctgccagagatactgggcgactcccagcacgctgatgtggggaaggagctatccgacctcctgattgagaacacatccctgaccgttcccattctggatgtactgtcatccctgaggctggaccccaactttctgcttaaggttagacaattagtgatggacaagcttagctccattcgactggaagatctccctgtgatcataaagttcatcttgcactccgtcactgcgatggatactttggaggtgattagcgaactacgcgagaagttggacctccagcactgcgtgttaccttctagactccaggcatcccaggtcaaacttaagtccaaagggagagcctcaagctctgggaaccaagagtcctccggccagtcctgcataatattgctgtttgatgtgatcaaatcagcaatccggtacgagaaaacaatatccgaggcgtggatcaaggccattgagaataccgcctctgtgagcgagcataaggtctttgacctcgtcatgctcttcatcatctacagtacgaatacgcagacgaaaaaatacattgaccgcgtgctgcggaataaaattcggagcggttgtatccaggagcagctcttgcagtccaccttttccgtgcactacttggtcctgaaagacatgtgctcaagtatcctatccctggcccagagcctgctgcactcactcgatcagtcaatcatctcatttggctctctgctgtacaaatatgcattcaagttctttgatacatattgtcaacaggaagtggtcggcgcacttgtgacacatatctgcagtggaaatgaggcagaagtcgacaccgcgctcgacgtgctgttggagctagtggtgttaaacccaagtgcaatgatgatgaacgcggtgtttgttaagggcatcctagactatctggacaatatctctcctcagcagatccggaagctgttctacgtgttaagtacactcgccttctctaaacagaacgaagcttcaagccatattcaagatgacatgcacctggtgattagaaaacagttatcttcaaccgtgtttaaatataaattaattggaattatcggagctgttactatggccggtatcatggccgcagaccgcagcgaatcaccctccttgacccaggaacgggcaaacctgtcagacgaacagtgtacccaggtcaccagcctgctacagctagtgcattcttgttctgagcagtccccacaggcaagtgccttatactacgatgagttcgcaaaccttattcagcatgagaagctcgaccccaaggctttggaatgggtcgggcataccatttgtaatgatttccaagacgctttcgtcgttgatagctgtgtggtgcctgagggagacttcccattcccagtgaaggccctgtacgggctggaggaatacgacacccaggatggaattgccattaacttactcccccttctattttcccaagattttgctaaggatgggggacccgtgactagtcaggagtccgggcagaagctcgttagcccgttgtgcttggccccatacttcagacttctacgcttgtgcgttgaaagacagcataacggcaatctcgaagagatcgacgggctgctggattgtccgatcttcctgaccgacctcgagcccggagaaaaattggagtccatgtccgccaaggagaggtcctttatgtgtagtctcatcttcctgacgttgaattggttccgcgaaatcgtgaacgctttttgtcaggagacatcacccgagatgaagggaaaagtgttaaccagactgaaacatatcgtggaactgcagattatactcgaaaagtacctcgctgtgacacctgactacgtcccccctctgggtaacttcgatgtggagacattggacatcacaccgcatactgttacagctatcagcgctaaaatacgaaagaagggcaagattgaaaggaaacagaagactgatggttcaaaaacctctagcagcgacaccctaagcgaggagaagaactcagagtgcgaccccacaccgtctcatagaggacagcttaataaggaatttactggaaaagaggaaaagacatctctgctcctgcacaactcccacgcatttttccgggagctggatatcgaagtgttcagcatactgcattgcgggctcgtgacgaagtttattcttgacacagaaatgcacactgaggctaccgaagtggtgcagctaggacccccagagctgctttttctgctggaggacctgagccagaagcttgaaagtatgttgacccctcctattgccagacgcgtgccatttctcaaaaataagggcagcagaaacatcggcttttcccacctccaacaacgctccgcccaggaaattgtccactgcgttttccagctgctaacccccatgtgcaatcatctggagaatattcataattatttccaatgcctggctgccgagaaccatggcgttgtagacggcccaggggtcaaggtgcaagaataccacattatgtctagttgttaccagcgtttactgcagattttccacggcctatttgcctggagcggatttagccagccagaaaatcagaatctgctctacagcgcactgcatgtgctgtcgtcaagactcaaacagggtgaacatagtcagccactggaagagctgctttcacagagcgttcactatctgcaaaacttccaccaatctattccatcctttcagtgcgctctgtacctaatccggctgctcatggtgatattggagaagtccaccgccagtgctcagaacaaggagaaaatcgccagcttagctagacagtttctgtgtcgtgtgtggccgagtggcgacaaagagaagtccaacatatcaaacgatcagctacatgctctactgtgtatctacttagaacacacagagtccatactgaaagccattgaagaaattgctggtgtcggtgtgccggaactgattaatagtccaaaggatgccagttccagtacttttcccaccctcacgcgtcacacttttgtcgtattctttcgtgtgatgatggcagaactggagaagaccgtgaagaagatcgagccagggacagccgctgactcacagcaaattcacgaggagaagctcctgtactggaacatggccgtccgtgacttttccatacttattaatctgataaaagtcttcgacagtcaccctgtgttacatgtatgtctgaaatacggccgtctatttgttgaagcgtttctcaaacagtgtatgccgctactggatttcagttttagaaagcatagggaggatgtcctatcactgttggagacatttcagctggatacacggctcttgcaccacctctgtgggcattcaaagattcaccaagatactcgcctgactcagcatgtgccactattaaaaaagaccctggagttgctggtgtgtcgggtgaaagccatgctgacccttaacaattgccgggaggctttttggctaggaaacttgaagaatcgcgacctacaaggcgaagagatcaaatcccaaaactctcaggaaagcactgccgatgagtccgaggatgacatgtcatcccaagcatctaagtctaaagcaacagaggacggtgaggaggacgaagtttccgccggagaaaaggagcaggacagtgacgaaagttacgatgatagtgattag

SEQ ID NO: 222835 - DNA, 1341 bp, synthetic construct
  misc_feature 1..1341: note = Description of Artificial Sequence: Synthetic coding sequence
  source 1..1341: mol_type = other DNA
atggatagttctgccgctccaaccaacgcaagcaattgtacagacgccctggcgtattcctcctgcagtcctgctccaagtccaggaagttgggtcaacctgtcccatcttgatggcaacctgtcagacccttgtggcccaaaccgaactgatctggggggacgagattcactctgccccccaacgggcagcccctctatgatcactgccattactatcatggctctatacagcatcgtatgtgtggtagggttgttcggcaatttcctggtgatgtatgtgatagttcggtacaccaagatgaagaccgcgaccaatatctacatctttaatcttgctctggcggatgccctcgccactagcacgctcccattccagtctgtcaactatctgatgggtacctggcctttcgggacaattttgtgtaaaatcgtaataagcattgactattacaatatgtttacctcgatcttcaccctctgcaccatgagcgtggaccggtacattgccgtgtgtcatccagtgaaggctctggatttcaggacaccacgcaatgcaaaaatcatcaacgtctgtaactggattctcagtagcgccatcggcctacctgtgatgttcatggctactacgaagtatcgtcagggaagcatcgattgcacgctaacgtttagccatccaacatggtattgggagaacttgctgaaaatctgcgtgtttatttttgcctttatcatgcccgttctaatcatcacagtgtgctacggactaatgatactgcgcctgaaaagtgtgagaatgttgtcaggaagtaaagagaaagacagaaatttacgacgcatcactcggatggttctggtagttgttgccgtatttattgtctgctggaccccgattcatatttatgtgatcatcaaagcactagtgacaatacctgagacaacctttcaaaccgtgtcatggcacttttgtattgccttaggttataccaatagctgtttgaatccggtgctttatgcgttcctggacgagaactttaagaggtgcttccgcgagttttgtatacccacctcctctaatattgagcaacagaacagcacccgcatccgccagaacacgcgagaccatccatcaactgccaataccgtggacaggaccaaccaccaatgccttcccatcccaagtctatcatgttgggcgctggagcaaggatgtttagtggtgtatccaggaccactacagggaccactcgtgaggtacgacctgcctgccatattgcacagttcttgcttacgaggtaacactgcccctagcccgagtggtggcgcttttttgctgtcatag

SEQ ID NO: 222836 - DNA, 1125 bp, synthetic construct
  misc_feature 1..1125: note = Description of Artificial Sequence: Synthetic coding sequence
  source 1..1125: mol_type = other DNA
atggaaagccttctacagcacctcgaccgcttcagtgagttgttggccgtaagcagcaccacatacgtgtcgacttgggaccctgccactgtgagacgagccctgcaatgggctcgctacttaagacatatccacagacgctttggcaggcacggacctatccgcactgcgctggaaaggcgtctgcataaccaatggagacaggagggtggcttcggacgcggaccagtcccaggcctagcaaatttccaggcactggggcactgtgacgtgctgctgagcctccggttactcgagaatagagcactaggagacgctgctaggtatcacttggtgcagcagctatttccgggacccggagtacgggacgcagacgaagagaccctgcaggaatcacttgcacgccttgctcgcaggcggagcgcggtgcatatgcttagattcaatggctatcgagaaaaccctaatctgcaagaggactctctcatgaaaacccaggccgagctcctgctggagagactacaagaagtgggtaaggcggaggccgaaagaccggcacgctttctgtcctccctgtgggaacgactgccacagaacaatttcctgaaagtgatcgccgtagcgctgttacaaccccctctgtccaggcggccacaggaggagttggaacccggtattcataagagtcctggagagggatcccaggtgcttgtccattggctgctgggcaattccgaggtcttcgccgctttctgcagggctctgccggcaggattgctgacactggttacatcaagacacccagccctgagccccgtgtacttgggactgcttactgactggggacaacgcctccattacgatctccaaaagggaatttgggtcggaaccgaaagccaggatgtaccatgggaagagctgcataataggtttcagtctctgtgtcaggcaccaccccctcttaaagataaggtactaacggcactggagacatgcaaggctcaggatggggacttcgaggtgccaggactgagcatctggaccgacctgctcctcgcattacgcagtggcgctttcaggaagaggcaggtgctgggcctgagcgccggactgtcttccgtttag

SEQ ID NO: 222837 - DNA, 3807 bp, synthetic construct
  misc_feature 1..3807: note = Description of Artificial Sequence: Synthetic coding sequence
  source 1..3807: mol_type = other DNA
atggatcaaaagatattatccttggctgcggagaaaacggccgacaagcttcaggaattcctgcaaactctccgggagggggacctgacaaatttactgcagaaccaggccgtgaaggggaaagttgccggtgctctcctgcgcgcaatcttcaagggctccccctgcagtgaggaggcagggactctacgtaggagaaaaatctacacctgttgcatccaactggtcgagtccggggatctccagaaggagattgcaagcgagatcattggcctgctcatgctggaggcacatcacttcccaggtccactactggttgaactggctaacgagttcatcagcgccgtcagagaaggctcgttagtgaatgggaaaagcctagaacttttgcccataattctgacggccctggcaacaaagaaggaaaatttggcgtacggaaagggagttctctctggtgaagagtgtaaaaagcaactcatcaacacactgtgctccggacgatgggaccagcagtatgttatccagctaacatctatgttcaaagatgtacctctgaccgccgaagaagtggagttcgtggtagaaaaagctctttccatgttttcaaagatgaatctgcaggagattcctcctctggtataccagctgctggtgttatcgtcgaagggttcacgcaaaagcgtgctggagggaattatcgcctttttctccgctttagataaacaacataatgaggagcagtccggggatgagcttttggacgtagttacagttccaagcggcgaactacggcacgtggagggcaccattatactccacatcgttttcgcgatcaagctcgactacgaattagggagagagctcgttaagcatctgaaagtgggccagcagggcgacagcaataataacttatcccccttcagcatcgccctcctcctgtcggtaacgaggattcagagattccaggatcaggtacttgatttattaaaaacctctgtagtgaagtcattcaaagatctgcagttactgcaggggtccaaatttctccagaatctggtgccccaccgttcctacgtgagcacaatgattctcgaggttgtaaaaaatagtgtacactcctgggaccatgtgacacagggactagtggagctcggatttatactgatggactcctacggccctaagaaagtcctggacggcaagaccatcgagaccagtccatccctgtcacgcatgcccaaccagcacgcgtgtaagctgggcgctaatatcctgctggaaacatttaagattcacgaaatgatccggcaagagatcctggagcaggtgctgaatagagtcgtcactcgagcatcttctcctatcagccatttcttagatttgctcagcaacattgttatgtatgcgcctctggtcctgcaaagctgcagcagcaaggtcacagaggccttcgactacctttcttttctccctctgcaaaccgtccaaaggctcctgaaggcggtccagccattgctcaaagtatccatgtcaatgcgtgactgcctcatcctagtcttaagaaaggccatgtttgctaatcagctggatgccagaaagtccgccgttgcgggattcctgctacttctgaagaatttcaaggttctcgggagccttagcagctcccagtgctcccagagcctgtccgtgtctcaagtccatgtggacgtgcactctcactacaatagtgtcgctaacgaaaccttttgcctggaaatcatggattctcttagacgctgtctcagccagcaggccgacgtgcggctgatgctgtatgaaggcttttatgatgtgctgcggagaaacagccaactcgctaatagcgtgatgcagactctacttagccagcttaaacagttctacgaacctaaacctgatctcctgcctcctctgaaattggaagcatgcattctcacccagggggacaaaattagcctccaggaacccctcgactacttgctatgctgcattcagcattgtctggcctggtataagaacaccgtgattccactgcagcaaggtgaggaggaggaagaagaggaggaggctttctacgaagatctagacgatatcctggaatcaatcacaaatcgtatgatcaaatccgagctggaagattttgagcttgacaagtcggctgacttcagccagtccacttccataggcatcaaaaataatatttgcgcgttcttagtcatgggggtctgcgaggttcttatagaatacaatttctccatctctagcttcagtaaaaacaggtttgaagacattttaagtctctttatgtgctataaaaaactttccgacatcttgaatgagaaggcgggaaaggccaaaaccaagatggccaacaaaacatcagatagtctgttgtccatgaagttcgtgagctcgttgctgactgcattgttccgcgtcttgctgtggaggtacacttcgatacccactagcgtggaagaaagcggaaaaaaggaaaagggcaagtccatctcattactgtgcctggagggcctccaaaagatattctctgccgtgcagcagttctaccagccgaagatacagcagttcctgagggcccttgacgtcacagacaaggaaggtgaagagcgggaggatgcagatgtgtccgtgacccagcgtaccgcatttcagataaggcagttccaaaggtctctgctgaatctcttgagctcacaagaggaggacttcaattctaaggaggctctgttactcgttacagtacttacgtctctcagcaagttactggaaccctccagccctcagttcgtccagatgttatcatggacatcgaaaatctgtaaggaaaactctcgcgaagatgccctattctgtaagagcctgatgaatctgttgtttagcctccacgtgtcctataaatcccccgttatccttctcagggacctttcacaggacatccacggtcaccttggcgatattgaccaggacgttgaggtggagaaaactaaccactttgccattgtcaatcttcggacagccgcacccaccgtgtgcttacttgttctgtcgcaggcagaaaaggtgttggaagaagtggattggttgattaccaagttgaagggccaggtgtcccaagagaccctgtccgaggaggcttcatcacaagctacccttccgaatcagcccgtggagaaggccattattatgcagctgggcacgttactaaccttttttcatgagctggttcagacggccctgccttccggaagctgcgttgacaccctgctcaaagacctatgcaaaatgtatacaacactcaccgctctggtaagatattacctgcaagtgtgccaaagtagcgggggtatccctaaaaatatggaaaagctggtcaagctgagcgggagtcatctcacaccgttatgttacagctttattagctacgtgcagaacaagtccaagtctctgaattacaccggggaaaaaaaagagaaacctgccgcagttgccaccgccatggcacgggtgttgagagagaccaagccgatacccaacttaatctttgcaatagaacagtacgagaaatttctgatccacctttccaaaaagagtaaagtcaacctcatgcaacatatgaaactgagcacaagtagagactttaagatcaagggtaatattttagatatggtgttaagagaagatggtgaggatgaaaacgaagagggcactgcttctgagcacgggggacagaacaaggagcccgctaaaaaaaagagaaagaagtag

SEQ ID NO: 222838 - DNA, 3987 bp, synthetic construct
  misc_feature 1..3987: note = Description of Artificial Sequence: Synthetic coding sequence
  source 1..3987: mol_type = other DNA
atggatcagaagatcttgtcactggctgcagagaagactgccgataaactgcaggagttcctgcaaacgctgagagagggcgatctgaccaatcttctgcagaatcaggccgtgaaaggaaaggttgctggcgctctgctgagggccatttttaaggggtcaccgtgctcagaagaagctggcacattacgaaggcgcaaaatttacacatgttgtattcagttggtggagtctggtgatctgcaaaaagagatcgctagcgagattatcggcctcctgatgttagaagcacaccacttccccggacctcttttagtggaactggccaatgaattcatttctgccgttagggagggcagcctagtcaacgggaaatctctagagctgctgcctatcattctcacggccctcgccactaagaaggagaacctagcctatgggaaaggcgtgctgagcggggaagaatgcaaaaagcaactgatcaacaccctctgttccgggagatgggatcagcagtacgtcattcagctcacctccatgttcaaggacgtgcctctgaccgcagaggaggtcgagttcgtggttgaaaaagcgctgtcaatgttttccaaaatgaatttgcaggaaatcccccctctcgtgtaccaattgcttgttctgtcatcaaaaggcagcaggaagagtgtgttggaaggaatcatcgccttcttcagtgcgttggataagcagcataacgaggagcagtctggagatgagcttctggatgtggtaactgtgccctcaggagaactcagacatgtggaagggaccattattctacacattgtgttcgccataaagctggactatgagctgggcagggaattggttaagcacttaaaagtagggcagcagggagattcaaataataatctgagtcccttctctatagccctccttctgtctgtgacaaggatccagaggtttcaggaccaagtgctcgacctcctaaagacgagcgtagtgaagtcgtttaaggatcttcaactcttacaagggagtaagtttctgcagaacctggtacctcaccgcagttacgtaagtacgatgattcttgaggtggtgaaaaatagtgtgcactcttgggatcacgttacgcagggcctggtggaactaggatttatcctcatggattcctacggcccaaaaaaggtgctcgacgggaaaacaattgagacttccccctcactgtctagaatgccaaatcagcatgcctgcaaactcggcgcaaatatcctacttgagacattcaagatccatgagatgatccggcaggagatcctggagcaagtgctgaaccgggtcgtgacaagggcaagctccccaatctcccatttcctggatctcctgagtaacatcgtgatgtatgctccattggtcctccagagctgctcatcgaaggtgactgaggcttttgattatctttcctttttgccattgcagaccgtgcagcggctgctcaaagctgtgcagcctcttttgaaggtgtcaatgagcatgagggattgcctgatactggttctgaggaaggccatgtttgccaatcagcttgacgctaggaagtccgccgtggctggatttctccttttgttgaagaatttcaaggtgttgggcagcctttcctcaagccaatgttcccagtctcttagcgtgagtcaagtacacgtcgacgttcacagccattataattccgttgccaatgagacgttctgcttggaaatcatggactctctaagacggtgcctgtcccagcaagctgatgttagattgatgctttatgagggattttatgatgtgctacgaagaaatagtcagctcgccaactcggtcatgcagacactcctctcccagctgaaacagttctacgaaccaaaacctgatctgttgcctcccctcaagctggaggcctgcatcttgacacaaggggataagattagtctgcaagagcctctcgattatctgctgtgctgcattcaacattgtctcgcttggtataaaaacacagttatcccgctgcaacaaggggaggaagaagaggaagaggaagaagccttttatgaagacctggatgatatcttggaaagcattaccaacaggatgatcaaaagtgagctagaagactttgagttagataaaagcgcggatttctcccagtccacctccattggcattaaaaataacatttgcgccttcctcgtgatgggcgtatgcgaggtcctgatcgaatacaatttttctatcagttcgttctccaaaaataggtttgaagatattcttagcttgttcatgtgctacaagaagctgtcagatatcctgaacgaaaaagccggaaaggccaaaactaagatggctaacaagaccagcgactccctgctgagcatgaagtttgtgagctccttattaaccgcactatttcgtgatagcatccagagccatcaggagtccctctccgtcttacgaagctctaatgagttcatgcggtatgcggtgaacgtggctcttcagaaggtgcagcagctcaaagagactggacatgtgtcaggtcccgacggccagaatccagaaaaaatttttcagaatctgtgcgacatcacgcgggtccttctctggcgatacacaagtatccccacatcagtggaggagagcggaaaaaaagaaaagggcaagtcgatcagtctactgtgcctagagggccttcagaaaatatttagcgcagttcaacagttctatcagccgaagatccagcagtttctgagggcactggatgtcaccgacaaagaaggtgaggagagagaggacgcagacgtgtctgtgacacagaggactgctttccagatccgacagtttcagagatcacttctcaatctgttgagttcacaagaggaagactttaactcgaaggaggcccttctcttagtgaccgtgctgacaagcctttccaagctgctcgaaccttcttcaccccagttcgtccagatgctaagttggacttctaaaatttgcaaggagaacagccgcgaggatgccctgttttgcaaaagccttatgaacctgctattttccctccatgttagttacaaatcaccagtgatcttgctgagggacttatcacaggacatccatggtcacttaggggatattgaccaggacgtggaagtggagaagaccaatcatttcgcaatcgtaaatttgcgcactgcggcaccaaccgtttgtctgctggtgctgagtcaagccgaaaaggtgctcgaagaagttgattggttaatcacaaaactgaaaggccaagtgtcgcaggagactttgagcgaagaagcttccagccaggccacactgcctaaccagcccgttgagaaggccattatcatgcagctggggacccttctcacattctttcatgagctggtccagacggcattgccgagcgggtcgtgcgttgacaccctgcttaaggatctgtgcaaaatgtatactaccttaacagccctggtgagatactatctccaggtgtgtcaatcttctgggggaatccccaagaacatggagaagctggtcaagttgagcggatcccacctcacacctctgtgctactcatttatctcatacgtccagaacaagtccaagagccttaactacaccggcgaaaagaaggagaagcccgctgccgttgcgacggcaatggcacgagtgctgagggagaccaaacccatacccaaccttatcttcgccatagaacagtatgagaagtttctgattcacctaagcaagaaatccaaggttaacctcatgcagcacatgaaactgagcacttccagagacttcaagataaaagggaacatcctggatatggtgcttagggaggacggtgaggatgaaaacgaggagggaacggcctccgagcacggtggtcagaacaaagagcctgcgaagaagaagaggaaaaaatag

SEQ ID NO: 222839 - DNA, 3288 bp, synthetic construct
  misc_feature 1..3288: note = Description of Artificial Sequence: Synthetic coding sequence
  source 1..3288: mol_type = other DNA
atggaccagaagatattgagcttagcagccgagaagactgcagataagctccaagaattcttacagacccttagggagggcgacctgaccaacctgctgcaaaaccaggcagtcaagggaaaagtcgctggggcactgttgagagctatctttaaggggtccccctgctctgaggaggctggtacactgaggcggcgaaaaatttacacctgttgcatccagctcgttgaaagcggggacctgcagaaggaaatcgcatccgaaatcattggtctcctaatgttggaagctcatcacttcccaggcccactcctggttgagctggcaaacgagttcatttccgcagttagggagggatccttagtaaatggaaagagcctggaactgcttccgatcatcttaacagctttggctacaaaaaaagagaatctggcatacggaaagggcgtcctctcgggagaggaatgtaaaaagcaactgattaacactctgtgcagcggacgatgggatcaacaatatgtcattcagctaacttccatgtttaaggacgtcccgctgactgccgaggaagtcgaattcgtcgtcgagaaagctctgtccatgttctctaagatgaatctgcaggaaatcccacctctcgtttaccagctcctggtgctgtccagtaaagggtctaggaagagtgtgcttgaagggattatcgcctttttctctgccttagacaaacagcacaacgaagagcagtctggggatgagctgcttgacgttgttacagtaccatctggagaactgcggcacgtcgaaggtaccattatattgcatatcgtgtttgccatcaaattggactacgagttgggtagagagctggtgaagcacttgaaggtgggacagcagggggactcgaataacaacctgagcccttttagcattgcattgctcctcagcgtgactcgcatccagagatttcaggaccaggtactcgacctgctcaagacaagcgtggtaaagtctttcaaggatctgcagttactgcagggttccaaattcctgcagaatctggtgcctcaccggtcctacgtttcaacaatgatcttggaggtggttaaaaacagcgtgcactcctgggaccacgtcacgcagggccttgtagaattggggttcatattaatggattcatacggcccaaaaaaagtcctcgatggtaaaacaattgagacaagtccttccctcagccggatgcctaatcaacatgcgtgtaaacttggcgcaaacattctactcgagacatttaaaatccatgaaatgattcgccaggaaatcctggagcaggtgctgaaccgagttgtgacccgggcatcttccccaatatcacacttccttgatctcctctcaaatatagttatgtacgccccattggttctgcagtcctgtagctccaaagtgacagaagctttcgactacttgtcctttctccctctccagaccgtgcagcgcctcctcaaggccgttcagcccctgcttaaagtatccatgtccatgagggactgcctgatactggttctgcgaaaggccatgttcgctaatcagctggacgccagaaagagcgctgtagccggattccttctcctgttgaagaatttcaaggtcctcggcagcctgtcctccagccagtgcagccagtccttgtctgtgagtcaggttcatgttgacgttcactcacactataacagcgttgccaatgagactttttgcctggaaataatggattctcttcgcagatgcctctcccagcaggctgatgtaaggttgatgttgtacgaaggcttctacgacgttctacgcagaaactcccagctcgcaaattctgtcatgcaaactttattaagccaactaaagcaattttacgagccgaagcctgacttactgccgcctctgaagttggaagcatgtatcctgacgcagggagacaaaatctcactgcaggagcctctggattatctgctttgttgtattcaacattgcctagcttggtataagaacactgtgatccccctccagcaaggcgaggaagaggaagaagaagaagaagccttctacgaggatttggatgacatcctggagagtatcacgaaccgaatgattaagtctgagttggaagactttgaacttgacaagagtgctgacttcagtcagagcacctctattggcattaagaacaatatttgtgcatttttggtaatgggggtctgcgaggtgctgattgagtataacttttctattagctcattcagtaagaaccgctttgaggacatcctcagtctgttcatgtgttataaaaaactgagcgacatactgaacgaaaaggctggtaaggcaaaaacaaaaatggctaataagacctccgattcactgttgtcgatgaaatttgtgagcagcctgttaaccgctctgtttcgcgttctactatggcggtatacgtccatccctacctccgtcgaggagtcggggaagaaggagaagggcaagtccatcagcttactgtgcctggagggactgcagaaaatcttctccgccgtgcagcagttctaccagccgaagatccagcaatttctgcgcgctttggatgtgacggacaaagagggagaggaacgtgaggatgccgatgtgagcgtcacacaaagaaccgcctttcaaatcaggcaatttcagcgatccctgctgaatttactttccagccaggaagaagactttaattctaaggaggcactattgctcgtcactgtgctgacatcactgtccaagttgctggaacccagctcaccacagttcgtgcagatgttgagttggacctctaagatctgtaaagagaactcaagagaggatgccctgttttgcaagagtctgatgaacctcctctttagtcttcatgtgtcctataaatcccctgttatcttattaagagatctctctcaggacatccacggccacctcggggatatagaccaggatgttgaggtcgaaaaaacaaaccatttcgcgatcgttaatctgcgcactgctgcccctaccgtgtgtctactagtcctaagtcaggccgagaaggtcctcgaagaggtggattggcttattactaaactcaaaggacaggtgtcacaagagactctgtcagtgtctcccggtgtgtccgaactgcgcagaaactcgaagaagtatgggaaggctggagaagcagtgtggttcagctccgatccccctgtgctgttcttccacttccttcgtactgaatag

SEQ ID NO: 222840 - DNA, 222 bp, synthetic construct
  misc_feature 1..222: note = Description of Artificial Sequence: Synthetic coding sequence
  source 1..222: mol_type = other DNA
atgtttaaggatgttccgctgaccgcagaagaggtggagtttgtggtcgagaaagccttgtcaatgttctctaagatgaatcttcaggaaatccccccactggtatatcagctgttagtgctgagttctaaaggctcccgcaagtcagtgctagaggggatcatcgcattctttagcgccttggacaagcagcacaacgaagaacagtctggcgacgagtag

SEQ ID NO: 222841 - DNA, 501 bp, synthetic construct
  misc_feature 1..501: note = Description of Artificial Sequence: Synthetic coding sequence
  source 1..501: mol_type = other DNA
atggcccaaacttcttcttatttcatgctaataagttgcctgatgttcctgtctcagtcgcagggacaggaagctcagactgaactgccccaggcacggatcagctgccctgaggggacgaatgcctacagatcctattgctattacttcaatgaagatcgtgagacatgggtggatgctgatctttactgccaaaatatgaactcagggaatctcgtgtctgtgctgacacaggcggaaggtgcatttgtcgcctccctgattaaagagtccggtactgacgactttaatgtctggatcgggctgcatgaccctaagaagaaccggaggtggcactggagcagtggatcactggtgtcttacaagtcctggggaatcggcgcacctagttccgtgaatcctggttattgtgtttcgctgacgagcagcactggcttccagaagtggaaagacgtgccatgtgaagataagttctccttcgtctgtaagttcaagaactag

SEQ ID NO: 222842 - DNA, 384 bp, synthetic construct
  misc_feature 1..384: note = Description of Artificial Sequence: Synthetic coding sequence
  source 1..384: mol_type = other DNA
atggcggtaacagaggctagcctattaaggcagtgccctctgctgctaccacagaaccgcagcaagaccgtgtacgaggggttcatctcagcacagggcagagacttccacctgaggatcgtactccctgaggatcttcagctgaaaaacgcccgactcctatgcagttggcagctccggacaatcctgtcagggtaccatcggatcgtccaacagcgcatgcagcactcccctgatctgatgagctttatgatggaactcaagatgttgttagaggtggcactgaaaaatagacaggagctatacgcacttccccctccccctcagttctactcctccctaattgaggaaatcggtacactcggctgggacaaggcaccctag

SEQ ID NO: 222843 - DNA, 6146 bp, synthetic construct
  misc_feature 1..6146: note = Description of Artificial Sequence: Synthetic coding sequence
  source 1..6146: mol_type = other DNA
atgtctggtcgacagcgaacactctttcaaacttggggaagttcaatcagcagatcttcggggacacctggctgtagtagcggcaccgagagaccccaatccccaggtagttcaaaagccccactgccggcagccgctgaggcacaactcgaaagtgacgacgatgtcttgctggttgcagcttatgaggccgaacgccagctgtgtttagaaaacgggggattctgcaccagcgctggagcattgtggatctacccaaccaattgtcctgtgagggattatcaattacatatatcccgcgcagcgctgttctgtaacacattggtgtgcttgcccaccggcctaggcaagacctttatagccgcagtggtaatgtacaatttttatcggtggttccccagcggaaaggtcgtcttcatggctccgactaaacccctggttacccagcaaatcgaggcatgctaccaagtcatgggtattccccagagccatatggctgagatgacagggagcacccaggcgtcgacgagaaaagagatttggtgcagcaagagagtcctgttcctgacaccccaggtcatggtgaatgacctttccagaggggcatgccctgctgccgagattaaatgtttagtgattgacgaggcgcataaggctcttggcaattatgcttactgccaggtggtgagagagttagtcaaatacactaatcacttccgtatacttgccctctcagccacacctgggagcgatattaaggccgtgcagcaggtcatcaccaatttgcttatcggacaaatagaactgagaagcgaggactcacctgacattctcacgtactctcatgagcgtaaggtggagaaactgatcgtgccactaggcgaggaactcgcagctatccagaagacctacatccagattctagagtctttcgcacgctccctgatccaacggaacgtccttatgcggcgagatattccaaacctcacaaaatatcaaatcattctggcccgagaccagtttagaaaaaatccttcacctaacatcgtgggcatccagcaagggatcatcgagggggaattcgcaatttgcatctcgctgtaccatgggtacgagctgctgcagcaaatggggatgcggtctctctactttttcctatgcgggatcatggatggaacgaagggcatgacacgctcaaagaacgagttaggccgaaatgaggattttatgaaactgtataatcacctggaatgtatgttcgccagaacgcggagtaccagcgccaacggtatttctgccatccagcagggtgacaagaacaaaaaatttgtgtactctcaccccaagctgaaaaagttagaagaggtggtcattgagcatttcaaaagttggaacgcggagaataccacagagaaaaagcgcgacgaaacaagggtgatgattttttcctcatttcgcgatagcgtccaggaaatcgcagaaatgctgtctcagcatcagccaattattagagtaatgacgttcgtgggtcacgccagtgggaagtcaacaaagggttttacacagaaagaacagctcgaggtggtcaaacaatttagagatggcggatataacaccttggtctcaacttgtgtgggtgaagagggcctagacattggcgaagtcgatctgattatttgttttgattctcagaagagcccaattcgcctggtgcaacgcatgggtcggactgggcgaaagagacaaggacgcattgtcattattctgagtgagggacgtgaggagcgaatttacaatcagagccagagtaataaacggagcatctacaaggcaatttccagtaatagacaggtgctccacttctatcagcgctccccacgcatggtgcccgacggcataaatcccaaattgcacaaaatgtttataacccatggcgtttatgagcctgagaagccgagcagaaaccttcagcgtaaatcaagcatcttctcttatcgggacgggatgcgtcagtcaagtcttaagaaggactggtttttgagcgaggaggaatttaagctttggaataggctgtatcggttaagagactccgatgagatcaaggaaattaccctgccacaggtgcagttttctagcctccaaaatgaggaaaataaacccgctcaggaaagtacgactggtatccaccagctgtccctgtccgaatggagactgtggcaggaccatcccctccccactcaccaggtagatcactccgacagatgtcgccactttattgggctgatgcagatgattgagggaatgcgccacgaggaaggagagtgctcttacgagctcgaggtggagtcttatctgcagatggaggacgtgacatcaacattcatcgccccaagaaacgaaagtaacaacctggcttccgacacttttattacccataagaagagcagtttcatcaaaaacattaaccagggctcatcgtcctcggtaatcgaatctgatgaggagtgcgcagaaatcgtgaaacaaacacacattaagcctaccaagattgtcagcttaaaaaagaaggtcagcaaagagatcaagaaagaccaactcaagaaggagaacaatcatggcatcattgatagcgtggataacgaccggaactccacagtggagaatatttttcaggaggacctacctaacgacaaacgaacttccgatactgacgaaatagccgcaacttgtaccattaatgaaaatgtgattaaggagccttgtgtattactgaccgaatgccagttcaccaataaatccacatccagcttggccggtaatgtgcttgactccggctacaacagctttaacgacgagaaatcagtgtcatctaatctctttcttcctttcgaggaggaactctatattgtaagaaccgacgatcagttttacaactgtcactctctgaccaaggaagtgttggctaatgtggagagattcttatcttactcccctccaccacttagcggactttcggatctggagtatgagattgcgaagggcactgcgcttgaaaacttactttttctcccctgcgctgagcatctcagatccgacaagtgtacctgtctattgtcccactcggccgtcaattcccagcaaaatctggaattgaattccttgaaatgtataaattatccgagcgagaaatcgtgtttgtacgacattccaaatgacaacattagcgacgagccctcactctgtgactgcgacgttcataagcacaatcagaatgaaaacctagttcctaacaaccgggtacagatccaccgatcccctgcgcagaacctggtgggcgaaaacaatcacgacgttgataactctgacctccctgtcctgtccactgaccaggacgaaagcctactgctgtttgaagacgtcaacactgaatttgacgatgtttccctttctccattgaactcaaaatccgaaagtctgccggtgagcgataagacagcaatcagtgaaactcccctggtgtcacagttcctcattagtgatgaactgctcttagataacaacagcgagctgcaggatcaaataacaagggacgctaattcctttaaatcaagagaccagcggggagttcaagaggaaaaggtaaagaaccatgaagacattttcgactgctctcgcgacctgttttccgtgactttcgacctggggttctgtagcccagacagtgatgatgaaattctggagcatacaagcgatagcaaccggcctttggatgacctgtacggaagatacctggaaattaaggaaatttctgacgcaaactacgtgtccaaccaggctttgatcccacgcgaccactctaagaatttcacctcgggcaccgtgatcatcccttccaatgaagatatgcagaatcccaattacgtccacctgcccctaagcgctgctaagaatgaagagctgctcagtccagggtactcccagttctccttacccgtgcagaaaaaggtcatgagcacccccttgtcaaagtccaatactttgaatagtttcagtaagatcagaaaggaaatcctcaaaacccccgatagctccaaggaaaaagtcaacttgcagagattcaaggaagccctcaacagcaccttcgactattccgaattcagcctggaaaagtcaaaatcttccggcccaatgtacttacacaagtcttgtcattcagtagaagacggccaactgctcaccagtaacgaaagtgaagacgacgaaatattcaggcgcaaggtgaaaagagctaagggcaacgtgctgaacagccccgaggaccaaaaaaattccgaagtcgattccccactgcatgccgtgaaaaagcgacggtttcccataaataggagtgagctgagcagcagcgacgagtctgagaatttcccgaaaccatgcagccagctggaggattttaaggtgtgtaacggtaacgcccgacgtggaatcaaggtccctaaacgccaaagtcatctcaagcacgtggcaaggaaatttttggatgatgaggccgaactgtcagaggaagacgccgaatatgttagttcagacgaaaacgacgaatcagagaatgagcaagatagttcgctgctggacttcctcaacgatgaaacacaactctctcaggccattaacgattccgagatgagagcaatttatatgaagtctctccggagtcccatgatgaataacaaatacaagatgatccataaaacccataagaacattaacatcttttcccagattcccgagcaagacgagacctacctggaagacagtttctgtgtggatgaggaagaatcctgcaagggtcagtcctctgaggaggaggtttgcgttgacttcaatcttattacagacgactgctttgccaattctaagaagtataagacccgccgtgccgtcatgttaaaggagatgatggaacaaaattgtgcacactcaaaaaagaagttgtcacgcataatactgccggacgattcctctgaagaggagaacaatgtgaatgataaaagagaaagcaatatcgccgtgaacccttcgaccgttaagaagaataagcagcaggatcattgtcttaacagtgtcccctctgggtcttccgcacagtccaaggttcgctcaacccccagagttaacccacttgcaaagcagagcaaacagacctccctgaacctcaaagacacaatttctgaagtctctgattttaagcctcaaaatcataatgaagtacagtctacgaccccgcctttcaccacagttgactctcagaaggattgcagaaagttccccgttccccaaaaggatggatccgcactggaggattcctccacgtcaggcgcaagctgcagcaagtccaggccacacctggctggaactcatacttccttgagactacctcaagagggaaagggcacctgcatcctggtcgggggacacgagatcacgtctggactggaagtgataagctctctcagggctatacatggactgcaggttgaagtctgccccctgaatggctgtgactatattgtttctaatcgaatggttgtggagagacggagccaaagcgaaatgctgaacagcgtgaacaagaataaattcatcgagcagattcagcatctgcagtccatgtttgagcgcatctgcgtgatcgtagaaaaagaccgggaaaagactggagacacgagcaggatgttccgcaggaccaaaagctacgattcacttctgaccaccttaatcggtgcaggaatcaggatcctgttcagcagctgccaggaggaaacagcagacttgttgaaggagctgagcctcgtcgagcagcgtaaaaacgtggggatacatgtacctactgtggtaaattcaaacaagagtgaggctctacaattctatctctccatccctaatatatcttacatcactgctctcaatatgtgccaccagtttagttccgtcaagaggatggccaattcgagcctccaggaaatttctatgtacgcccaggttacgcatcagaaagctgaagagatctacaggtatattcactatgtctttgatatccagatgctccctaatgacctgaaccaggaccgtttgaaaagcgacatata

SEQ ID NO: 222844 - DNA, 2010 bp, synthetic construct
  misc_feature 1..2010: note = Description of Artificial Sequence: Synthetic coding sequence
  source 1..2010: mol_type = other DNA
atgtcaggacgtcaacgaacactctttcagacctggggttcatcaatttcccggagctccgggacaccaggctgctccagtggcaccgagcgcccacagagcccagggtcgtcaaaggccccactgcctgctgccgcagaggcacagctcgagagcgacgatgatgtactccttgtcgcagcttacgaagctgaaagacaactctgtttagaaaatggaggcttttgcacaagcgccggagccctgtggatttacccaactaattgccccgtgcgagattaccagctgcacatctcccgggcagcgctgttctgcaataccctggtgtgtctccccactggtctcggcaagacattcattgccgcagttgtgatgtataacttctatagatggttcccatctgggaaagtggttttcatggccccaactaagcccctcgtcacgcagcaaatcgaggcttgctaccaggtgatgggcatcccacagagccacatggctgagatgacaggctccacacaggcttctacaaggaaggagatttggtgcagtaagagggtcctgttcctcaccccgcaagtgatggtgaacgacttgtcgaggggtgcctgccccgctgcagagatcaaatgcctggtcattgatgaggcacacaaggcactggggaactacgcttattgccaggtggtccgggaactggtcaagtacacaaaccactttagaatcctggcactcagcgccaccccaggcagcgatataaaggccgtacagcaggttattacaaacctgctgattggccagattgagctgagaagcgaagactcccctgatatcttaacctacagccacgagcgaaaggtggaaaagctgattgtgccactcggagaagagctggcggctatccaaaaaacctatatccagatcttggagtcttttgcccgtagccttattcagcggaacgtgctaatgcgccgagatattcccaacctgaccaagtaccaaattattctggcccgtgaccagttccggaaaaatccttcccccaacatcgtgggaatccagcagggcatcatagagggggaatttgccatctgcatttccctgtatcacggctacgaactccttcagcagatgggaatgcggtcgctgtatttcttcttgtgtggcatcatggatgggacaaagggcatgactaggtcgaagaatgagctgggtcgaaacgaggactttatgaagctgtataatcacttagagtgcatgttcgctagaactagatccacgtcagccaatggtattagtgctattcagcaaggtgacaaaaacaaaaaattcgtctacagccaccccaagctaaagaaacttgaagaagtggtcattgaacatttcaagagctggaatgcagaaaatacaacagagaaaaaacgtgatgaaactagagtgatgattttctcttcatttagagacagcgtgcaggagattgccgagatgctcagccagcaccaacccattattagagtgatgacattcgtgggccatgcttcaggtaagtctacgaaggggtttactcagaaggagcaactcgaggtggttaagcaattccgcgatggcggatataacactttggtaagtacctgtgtcggcgaagaaggcctagatattggtgaggtggaccttatcatttgctttgactcccaaaaatcccctatacggttggtgcagagaatgggtagaacaggtcgcaaacgacagggacgcatcgtaataatcttatccgagggcagagaggagcgcatctacaaccagagccagagcaacaagagatcgatctataaggccatcagtagcaaccgccaagtcctccatttttatcagagatctcctaggatggtgcccgatgggatcaatcctaaactacacaagatgttcatcacccacggggtgtacgaacccgaaaaaccgagtcgcaatctgcagcggaagtcttcgattttctcctaccgggatggcaagtag

SEQ ID NO: 222845 - DNA, 1968 bp, synthetic construct
  misc_feature 1..1968: note = Description of Artificial Sequence: Synthetic coding sequence
  source 1..1968: mol_type = other DNA
atggccgactacagcactgtccccccacctagcagtggatctgctggaggcggtggagggggtggaggaggcggtggagtgaacgacgcctttaaagatgccttgcagagggctagacagatcgccgcaaaaattggtggagacgccggtacaagcctcaactccaatgactacggatacggcggtcaaaagcgtcctctcgaagatggtgatcaacccgacgctaagaaggtagcgccacagaacgacagctttggcacacaattgccaccaatgcaccaacagcagtcacgctccgttatgacggaggaatacaaggtgccggacgggatggtaggatttattatcggcaggggcggagagcagatttcaagaattcagcaggaatctgggtgcaagattcagatagcacctgattctggtggcctgcccgaacggtcctgtatgttgacaggcactcccgagtctgttcagtccgccaagcggctcctggatcagatcgtggaaaagggtcgacctgccccaggcttccaccatggagacggtcccggaaacgctgtgcaggaaattatgatacctgcttccaaggcaggattggtcattggcaaaggtggagaaactatcaagcagcttcaggaaagagctggggtcaaaatggttatgatacaggatggacctcagaatactggcgctgataagcccttgaggatcaccggagatccatacaaggtacagcaggccaaggagatggttctggagctgattagagatcagggcggatttagagaggtaaggaacgagtatggtagcaggatcggcggtaatgaaggcatcgacgtacccatcccaagatttgctgttggtatagtgattggacggaatggggaaatgatcaaaaagattcaaaacgacgccggagtccgcattcaattcaaacctgatgatggaaccacccctgaacgcatcgctcagatcactggcccacccgacagatgtcaacatgcagccgagatcattacagatctgctccgctccgttcaggctggcaaccccggaggaccaggcccaggaggcagaggcagagggagagggcagggtaattggaacatgggcccacccggaggcctgcaggaattcaattttattgtgccaaccggcaagaccggacttatcatcgggaagggcggagaaactatcaagtcaattagccagcagagcggagccagaattgaactccagcgtaatccccctccgaatgccgatcctaatatgaagcttttcaccatccggggtactccccagcagatcgactacgcacggcaactgattgaagaaaaaatagggggtcctgtgaaccccttgggccctccggtgcctcatgggcctcacggagtgccaggccctcatggacctcccggaccaccgggaccaggtactcctatgggcccatacaaccccgctccatacaatcctggaccaccagggcctgctccacacgggcctcctgcgccttatgcccctcagggttggggcaacgcatatcctcattggcagcagcaggcccctccggatcccgctaaggctggcaccgatccaaattccgctgcctgggccgcttactatgcccactactatcagcagcaggcccagccaccccctgccgctccagctggtgctcctaccacgacccagacaaacgggcagggcgaccagcaaaatcccgcacccgctggccaggtagactacacaaaggcctgggaagaatactataagaaaatgggtcaggcggttccagcaccaaccggggcacccccaggtggacagcccgattactcagctgcttgggcagaatactatcgccagcaagccgcatattacgctcagacatcgccccagggcatgccccaacacccccctgctccccaaggctttgcaaaccatgctcgctcccaccatcatttgtactag

SEQ ID NO: 222846 - DNA, 1935 bp, synthetic construct
  misc_feature 1..1935: note = Description of Artificial Sequence: Synthetic coding sequence
  source 1..1935: mol_type = other DNA
atggcggactatagtactgtgccacccccaagctcaggatcagcgggtgggggtggcggaggaggcggagggggtggcgtgaatgatgcattcaaggacgctctgcagcgggcacgtcagattgctgccaagattggcggagacgctggaacttcactcaactcaaacgattacgggtacggcggacaaaaacgcccactcgaagacggcgatcagcccgacgctaaaaaggtcgctccgcaaaatgactcatttgggactcagttgccaccgatgcaccagcaacagtccaggagtgtcatgaccgaggaatacaaagtacccgatggaatggtaggcttcattatcggccgtggtggggagcagattagtagaattcagcaggagtctggctgtaagattcagatagcccctgacagcggagggctgcctgagagatcatgcatgttaacagggactcccgaatctgtgcaaagcgcaaaaagactgctcgaccagatcgttgaaaagggtcgccctgcccctggctttcatcacggggacggcccagggaatgccgttcaagaaataatgattccagccagcaaagcagggctggtgattggtaaaggcggtgagactatcaaacagctgcaagagcgggctggggttaagatggtcatgatccaggacggtccccaaaacactggggcagacaaacctctgcgcattactggcgacccttataaagtacagcaagctaaggaaatggttctagagttgatacgcgatcaagggggattccgtgaggtccggaatgagtatggctcacggataggcggaaacgaaggaatcgacgtgcctatcccccgtttcgctgtaggtatcgtaatcggtcggaatggggagatgattaaaaagatccagaatgatgccggtgttcgcatccagttcaagcccgacgacggcactacacccgagcggatcgcgcaaattactgggcctcctgacaggtgccagcatgctgccgagattataaccgatctccttaggtcagtccaggccggaaacccaggaggtccaggcccaggaggccgaggcagaggcagggggcaggggaactggaatatgggaccacctggtggactacaggagttcaacttcatagtgcccaccggtaagacaggcctgattatcggaaagggcggtgagaccatcaagtcgattagccagcagtccggagcccgaatcgagcttcagaggaaccctcctcctaacgctgatcccaacatgaagctttttactattcgagggactccacaacagatcgactatgcgaggcaactgattgaggagaaaatcggcggtccagtgaacccgcttggtcctcctgtgccgcacggccctcacggtgtacctggcccacatggaccacccggaccccctgggcctggcacccccatgggaccctacaaccccgctccctacaacccaggccctcctggccctgcccctcacgggcctcctgccccatacgctccacaaggttggggaaatgcgtacccgcactggcaacaacaggcaccacctgaccccgcaaaagcgggaacagacccaaactcagccgcatgggcggcttattatgcccactactatcagcagcaagcacagccccctcccgcagcaccggcaggggctccaacaaccacccagacaaacgggcagggggaccagcagaaccccgctcctgcaggccaggtcgactacacaaaggcatgggaggaatattacaaaaagatgggccaggctgtccccgcacccaccggagccccacctggaggtcagcccgactatagtgccgcatgggccgagtattatcggcagcaggcggcttactacgcacagaccagcccccagggaatgccgcaacacccccctgcgcctcagggtcaatag

SEQ ID NO: 222847 - DNA, 1965 bp, synthetic construct
  misc_feature 1..1965: note = Description of Artificial Sequence: Synthetic coding sequence
  source 1..1965: mol_type = other DNA
atggctgactacagcaccgtgccaccaccttcctcaggcagtgcaggcggagggggaggcggtggcggaggaggtggggtaaacgacgccttcaaagacgcactacagcgggctagacagattgcggctaaaataggtggggacgcaggaaccagccttaatagcaacgattatgggtatggcggacagaaaagaccgctggaggacggcgaccagcccgatgcaaagaaagtggcccctcagaatgacagcttcggtactcagttaccccctatgcatcagcaacaaagatccgttatgacggaggaatataaggtgcccgacggcatggtgggtttcattatcggcagaggaggagagcaaatatccaggattcagcaggagagcggttgtaaaattcagatcgcccctgattctggaggcctaccggagaggtcctgcatgctcactggaacgcccgaatcggtacagtccgctaaacggctgttagaccagattgttgaaaagggacgccctgcacctggatttcatcacggcgacgggccagggaacgccgtccaggagatcatgattccggcatcaaaagccggtctcgtgatagggaagggcggtgaaacaattaaacagctgcaagaacgggcaggggttaaaatggtgatgatccaagatgggccacagaacacaggtgccgacaaaccgctgcggatcaccggtgatccctataaagttcaacaggctaaggaaatggtgttagaattgatcagggatcagggagggttccgcgaggtgcgaaatgaatatggcagtcgaatcggaggaaatgaaggaattgacgtgcccatcccgcgatttgcagtgggaatcgtcattggccgtaatggagagatgatcaaaaagattcagaatgacgctggcgtgcgtatccagttcaaacctgacgacgggaccacccctgagagaatagcccagataaccggacctccggaccgatgtcaacacgcggctgaaataattaccgatttactgagatccgttcaggctggtaacccagggggtcccggtcctggcggacgcggaagaggacgtgggcagggaaattggaatatgggtcccccaggcggactccaagaattcaatttcattgttccgaccggaaaaaccggcctaatcattggtaagggcggagaaaccatcaaatcaatctcccagcagtctggagccaggattgagctccagagaaatccaccccctaacgcagaccccaacatgaaactgtttacaattcgtggcacaccacaacaaattgattacgctcgccaactgattgaggagaagatcgggggaccggtgaacccactgggtccccctgtcccccacggaccccacggggtccctggccctcacggtcccccaggaccgccagggccaggaaccccaatgggaccctataacccagccccttacaaccctggacccccaggcccagcccctcacggtccgcctgctccctatgcacctcaaggttggggtaacgcctatcctcattggcaacagcaagcacccccagaccctgccaaagctggaacagaccctaactctgccgcatgggctgcatactacgcccattattatcagcagcaagcgcagccgcctccagctgctccagcaggggctcccacaacgacccagacgaacgggcaagaaggcgaccagcagaatcccgcacctgctggacaagtcgactatactaaggcttgggaggagtactacaagaagatggggcaggctgtgccagctcccacgggtgctccaccgggagggcagcctgactactccgctgcctgggcagagtactatagacagcaggccgcatactatgcacagacgagcccccagggaatgccacaacaccctcccgcaccccagtgccgtttcgaccccgcttccatagagctggcgctgtag

SEQ ID NO: 222848 - DNA, 1890 bp, synthetic construct
  misc_feature 1..1890: note = Description of Artificial Sequence: Synthetic coding sequence
  source 1..1890: mol_type = other DNA
atggccgattacagcaccgttccccctccatcctccgggtccgccggagggggaggcggaggcggtggaggaggtggcgtcaatgacgcgttcaaggacgctctgcagagggccagacagattgcggctaagataggcggagacgcaggaacttccctgaatagtaacgactatgggtacggaggtcagaagagacctctcgaggatggcgaccagcctgacgctaagaaagtggcccctcaaaacgactctttcggtacccagctcccaccaatgcatcaacagcagcggtcggttatgaccgaagaatacaaagtgcctgacggcatggtcggctttataatcgggagaggaggagagcaaattagcaggattcagcaggaaagcggatgtaagatacagatcgccccagactccggaggtttgccagagaggtcatgtatgttaacgggcaccccagagtctgtacagagtgccaagagattgctggaccaaatcgtagagaaaggcagacctgctcccggatttcaccacggtgatgggcctgggaacgccgtccaggaaatcatgataccggcatccaaagcgggtctggtgattggcaaagggggagagactattaagcagctacaggagagggcaggtgtgaagatggtaatgatccaggacggcccacagaatacgggcgctgataaacctctccgtattaccggggacccctataaagtccagcaggccaaggagatggtcctggagctgattcgtgatcagggtggattcagagaggttagaaacgagtatgggagccgcattggcggtaacgagggaattgacgtcccgatacctcgctttgccgtaggtatcgtgatcgggaggaatggcgagatgattaagaaaattcagaatgacgctggggtgagaatacagtttaaacctgatgatgggaccaccccagaacgcattgcccagatcaccggacctccggaccgttgccagcacgctgcagagattataactgacctgctgcgctccgtgcaggccggtaacccaggcggaccaggcccaggcggaaggggacgtggcagggggcaggggaactggaacatggggccacctggcggattacaggagttcaactttattgtgccaactggaaagacaggcctgatcattggcaaaggcggtgaaactataaagtccatttcacagcagtctggggctcgaattgaacttcaaaggaacccgccacccaatgccgacccaaacatgaaattgtttaccattcggggaacacctcagcagattgactacgccagacagctgattgaagagaagattggtggaccagtgaatccgcttggtccacctgttccacatggcccaccaggcactccgatgggcccatataatcccgctccctataacccagggcctccgggtccagccccacatgggcctcccgctccatatgctccacagggctggggcaatgcttacccacactggcaacagcaagctcctcccgaccccgctaaggctggcacagacccaaattctgctgcatgggcggcatattatgcccattactaccagcagcaagcccaaccccctcctgctgctcccgctggcgcaccaactacaacacagaccaacggacagggtgaccagcagaatcccgctcccgctgggcaggtcgactacactaaagcttgggaggaatattataagaaaatgggccaggcggtcccagcacctaccggcgcaccacctggtgggcaaccggactactcagcagcctgggcagagtattatagacagcaagcagcttactacgcccaaaccagtccacagggcatgccacagcacccaccggcaccacagggacaatag

SEQ ID NO: 222849 - DNA, 699 bp, synthetic construct
  misc_feature 1..699: note = Description of Artificial Sequence: Synthetic coding sequence
  source 1..699: mol_type = other DNA
atggcagattatagtacagtccccccacctagcagtgggtccgcaggaggcggaggcggaggaggtggtggaggtggtgtaaacgatgcatttaaggatgccttacagcgggcaagacaaattgcagccaagatagggggagatgctggaacgagcctcaattccaatgattacggttatggtggccagaaacgaccattagaagatggcgacggcagctggacgagccccagtagcactactcactgggaaggcatgccatccccattcaaagatcagcctgatgccaaaaaagtggccccacaaaacgacagctttggaacacagctccccccaatgcaccagcagcagaggagtgtgatgaccgaagaatacaaggtgcccgatggaatggtaggattcattatcggacggggtggggagcagatcagccgcatccaacaggagagtggatgtaaaatccagattgcacctgacagcggaggcctgcccgaacgctcttgcatgctgacgggaaccccagagtctgtgcagtccgcaaaacgcctgttggaccaaatcgtcgaaaagggtagaccagctcctgggtttcaccatggagatggccctggcaacgcggtgcaagagatcatgattccagccagcaaagcaggcctggtgattggtaaggggggtgagaccatcaaacagctacagtag

SEQ ID NO: 222850 - DNA, 1998 bp, synthetic construct
  misc_feature 1..1998: note = Description of Artificial Sequence: Synthetic coding sequence
  source 1..1998: mol_type = other DNA
atggctgactacagcacagtgcctccccctagctctggatctgcgggaggagggggaggaggcggtgggggtggtggcgtgaatgacgcttttaaggacgctcttcagcgggctaggcagattgctgccaaaatcggtggtgatgccggtacgagtttgaactcaaacgattacggctatggaggtcagaaaagacccttggaggatggtgatggatcttggacgagcccctcctccactacccactgggagggcatgccgtcaccttttaaggatcagccagatgcaaagaaggtcgcacctcagaatgactccttcgggacacagctgcccccaatgcatcaacagcagtccagatctgtgatgactgaggaatataaagtgccggatggaatggttggctttatcatcggaagaggcggagagcagatctcccggatccagcaagagagtggctgcaagattcaaattgccccagatagtggtggcctacctgagcggagctgcatgctcaccgggactcccgagtcagtgcagtcggcaaagcggctgcttgatcagatcgtggaaaaagggcgtccggctccgggttttcatcacggcgacgggccaggaaatgccgtgcaggagatcatgattcccgctagcaaggccggtcttgtcattgggaaaggaggcgaaaccatcaaacagctgcaagagagagccggagtgaaaatggtgatgatccaggacggccctcagaatactggagccgacaagccactgaggataacgggcgatccgtacaaggtccagcaggccaaggagatggtgttagagctgatacgcgatcaggggggatttcgcgaggtcagaaacgagtatggcagccggattggagggaacgaaggcattgatgtgcccattcctagattcgcagtgggaattgtgatcggtagaaacggagaaatgatcaaaaaaatccaaaacgacgcaggcgttaggatccagtttaagccagacgatggtacaacacctgagcgaatcgcccagatcaccggaccacctgatcgatgtcagcatgcggcagagatcatcactgaccttctccgatccgtgcaggctggcaaccccggaggtcccggacctggcggaagggggagaggcaggggtcagggcaactggaacatgggcccaccaggaggactgcaggagtttaactttatcgtgcccacaggaaagacgggcttaattataggaaaggggggtgagactatcaagtccatttcccagcaatctggcgcacgtatcgaactgcagagaaacccacccccaaatgcagacccaaacatgaagttattcacaatccggggtactcctcagcagattgattacgcccgacagctgatagaggagaagatagggggacctgtgaaccccctggggcctcccgtaccgcacggaccccacggtgtgcccggaccccacggccctccgggaccgcctggaccaggcacaccaatgggaccatacaacccagccccttacaatccaggacctccaggaccggctccccatggaccgccagccccatatgcaccccaggggtggggcaatgcctatccccattggcagcagcaggctcctccagatccagccaaagctggaaccgaccccaatagcgccgcatgggctgcttattacgcgcactactaccagcagcaggcccaaccacctccagccgcacccgcaggagctcctacaactacacagaccaacggacagggcgaccagcagaatcccgcacccgcagggcaggttgattacactaaagcttgggaagagtattacaaaaaaatgggtcaggccgtgcccgctcccacgggcgcacccccaggaggacagccggactactccgccgcttgggctgagtactatcgtcagcaagccgcttactacgcgcagacctccccacagggcatgccacagcacccaccagcaccccagggccagtag

SEQ ID NO: 222851 - DNA, 1260 bp, synthetic construct
  misc_feature 1..1260: note = Description of Artificial Sequence: Synthetic coding sequence
  source 1..1260: mol_type = other DNA
atgcctttgtctagatggcttagatcagttggagtattcctgctgcctgcgccttactgggctccgagagagaggtggctgggcagtctgcgaaggcccagtctagtccacggctatccggtgctggcatggcactccgccaggtgttggtgtcaggcctggacagaggagcctcgcgctctctgcagttctctgcggatgaacggagatcagaatagcgatgtctacgcccaggaaaaacaggacttcgtccaacacttcagtcagatagttcgagtgctgaccgaagacgaaatgggccatccagagataggagacgctatagcaagactgaaggaagtactggaatacaacgccattgggggtaagtataatagggggctgaccgtagtcgtcgctttcagagagctagtagagcccagaaagcaggacgccgactccttgcagcgggcttggaccgtgggttggtgcgtggagctgcttcaggctttttttttggttgccgatgatatcatggattcctcactgaccaggaggggtcagatctgttggtatcagaagcccggagtggggcttgatgctatcaacgatgctaacctgctggaagcctgcatctatcggctgctgaagctctattgtcgcgagcagccttactacctgaatctcatcgaattatttctgcagagttcttaccagacagagattggccagacgctcgacttgctaacagccccacagggcaacgtggacctggtgcggttcactgagaagcgctataaatctatagtgaagtacaaaacagctttctacagtttttatttacctattgccgcagcgatgtacatggcgggtattgacggggagaaggagcatgccaatgcaaaaaaaatactgctggagatgggtgagttcttccaaatccaggatgattaccttgacctgtttggcgatccttctgtgaccggcaagatagggactgacattcaggacaataaatgcagttggctggtcgttcagtgtcttcagcgagccaccccggagcagtaccagatcctaaaggagaactacgggcagaaggaggccgagaaggtggctagagtaaaggccctgtatgaggagttggatctgccagccgtttttctgcagtacgaagaagatagttattctcacatcatggcattaattgagcagtatgcggctcccctgcctcccgcagttttcctcggactggcgagaaagatctataaaaggcggaagtag

SEQ ID NO: 222852 - DNA, 1260 bp, synthetic construct
  misc_feature 1..1260: note = Description of Artificial Sequence: Synthetic coding sequence
  source 1..1260: mol_type = other DNA
atgcctttgagtagatggctccgatcggtaggggtgttcttgttacccgcaccatactgggcacccagagaacgatggttggggtctctaagacgcccatcactggttcatggctatcccgttcttgcttggcattctgcgaggtgttggtgccaagcatggactgaggaaccgagagcactgtgctcctcgctgcgtatgaatggggatcagaattctgatgtgtatgcccaggaaaagcaggatttcgttcagcatttcagtcagattgtgagagtattgacggaggatgaaatggggcaccccgaaatcggtgatgcgatcgccagacttaaagaagttctagaatacaatgctatcgggggaaagtacaaccggggactgaccgttgtcgtagcattccgcgaactggtggaacctcgtaaacaggacgccgactctctgcagcgtgcatggacagtgggttggtgcgtagaactgctgcaagcctttttcttagtcgccgatgacattatggatagttccttaactaggcgcggacagatctgttggtatcagaagcctggcgtcggcctcgacgccattaacgacgctaatctcctggaggcctgcatttatcgtctgctgaagctctactgtcgagagcagccttactatctcaacttgattgaattatttttgcagtcttcttatcaaaccgaaattggacagacactggacctgttgactgccccacaggggaacgtggacctcgtccgctttacagaaaaacggtataaaagtattgtgaagtataagactgccttctatagcttctacctacctatagcagctgccatgtacatggctggaatcgatggcgagaaggaacatgcaaacgctaagaaaatcctcttagagatgggggagtttttccagatccaggacgactacttggacctgttcggtgacccctcggtgaccgggaagattgggacagatatccaggataacaaatgtagctggctcgtagtgcagtgtctgcagagagctacacctgaacagtaccagattctcaaagaaaactacggccaaaaggaggctgagaaggtggcacgcgtaaaggctctctatgaagagctagatctcccagccgtgtttttacagtatgaagaggactcctacagtcacattatggcactcatcgagcaatatgccgctccacttccccctgcagtgttcctcggcctggcccgtaagatctataagagaagaaagtag

SEQ ID NO: 222853 - DNA, 1062 bp, synthetic construct
  misc_feature 1..1062: note = Description of Artificial Sequence: Synthetic coding sequence
  source 1..1062: mol_type = other DNA
atgaacggtgaccagaattccgacgtatatgcacaggaaaagcaggactttgtgcaacactttagtcaaatcgtgagagtgctcactgaagacgagatggggcacccggagattggcgacgcaatcgccagactcaaagaggttctggaatacaatgcgataggtgggaagtacaatcgcggattaaccgtcgtcgttgcattcagggaactagtcgagcctcggaagcaagatgccgacagcctgcagagagcttggaccgtggggtggtgtgtggagctgctgcaggcctttttcctcgttgccgacgacatcatggactctagtctcacccggagggggcagatctgctggtatcagaagcctggggttggccttgacgcaataaacgacgctaacctgctcgaagcttgcatctatcggcttctcaagttatattgtagagaacagccatactacctgaacctgatcgaactgttcttacaaagcagttatcagaccgaaattggtcaaactcttgatctcttaaccgctccccaaggaaatgttgatctggtgcggtttaccgagaagcgatataagtcaatcgtcaaatataagacggcattttactccttctatctgccaattgctgccgcaatgtatatggcgggaatagatggcgagaaagaacacgctaatgccaaaaagatcttactggagatgggagagttctttcagattcaggacgattacctggatctgttcggtgacccatcagtgacaggcaagatcggcacagacatccaggacaataagtgcagctggctcgtcgtgcaatgtctgcagcgcgctacaccagagcaatatcaaatcctcaaggagaactatggacaaaaagaggccgagaaggtggccagggtcaaagctctctatgaagagctagatctacccgctgtctttttgcaatatgaggaagattcatactcacatatcatggctctgatcgagcagtatgcggcacccctgccacccgctgtatttctcggcctggctagaaagatttataagagaagaaaatag

SEQ ID NO: 222854 - DNA, 2760 bp, synthetic construct
  misc_feature 1..2760: note = Description of Artificial Sequence: Synthetic coding sequence
  source 1..2760: mol_type = other DNA
atgactggatacacaatgctgcggaacggcggagctgggaacgggggacaaacttgcatgctgagatggtctaataggatccgattaacctggttgagcttcactttgtttgttattttggtgtttttccccctgatcgcgcactactacctcaccaccctcgacgaagccgatgaggccggaaagaggatttttggtcctagagtgggcaacgaattatgtgaagtgaagcacgtgctggacctttgccgtattcgggagtcagtgagcgaggaacttctccagctagaagcaaaaaggcaagaactcaacagcgaaattgcgaagctgaacctcaagatagaggcctgcaaaaagtctatcgagaatgccaagcaggaccttctgcaactgaagaacgtcatttctcagacagaacattcttataaagaactgatggcacaaaaccagccgaagcttagccttcctatcagacttctccctgagaaggatgacgccggactgccccctccaaaggcaactaggggttgtagactgcataattgtttcgactactctcgctgcccactgacatctggcttcccggtgtacgtttacgatagtgaccagttcgtattcggttcctacctggatcctttggtgaagcaggcttttcaagccacagccagagccaatgtttacgtgacagagaacgctgatatcgcctgcttgtacgtcatccttgttggtgagatgcaagaaccagttgtactgaggccagcggaactggaaaaacagctgtatagtctgccacattggagaactgatggtcacaaccacgtgattatcaacttgagtcggaagagcgatactcagaatcttctctataatgtgagcaccgggagagcaatggtggcccagagtaccttttacacagtgcagtataggccaggcttcgacttagtcgtttcaccacttgtgcatgctatgtccgagccgaatttcatggaaattcctccacaggtgccagtgaagcgaaaatatctctttacattccaaggcgagaaaatcgagtctctccgaagcagtttgcaggaggctagatctttcgaggaggagatggaaggcgaccccccagcggattacgatgaccggattatcgctaccctcaaggccgttcaagactcaaagctggaccaggtgctcgtcgaattcacctgtaagaaccagcctaagccttctttgccgaccgaatgggcactgtgtggggagcgcgaggaccggcttgaattactgaagctgagcacatttgcgctgatcattactccgggtgatccaaggcttgttatctcaagtggctgtgctaccaggctcttcgaggctctggaagtgggagccgtcccagtggtgttaggcgagcaggtgcagctaccttatcaggatatgctgcagtggaacgaggcggcactggttgtgccaaagccacgggtgaccgaggtgcattttttgctgcgatccctatctgacagtgatctgctcgctatgcggaggcaaggccgttttctctgggaaacatattttagtacagctgactccatatttaacactgtgctggccatgattaggacgagaatccaaatccctgccgcacccatacgggaagaggccgcagccgaaataccccatcgttcaggtaaggccgcagggacagatcctaatatggcggataacggggatctggacctcgggcctgtcgagaccgagcccccttatgcaagtcctcgctacctgcggaactttactctaacagttacagacttctataggagttggaactgcgcgccaggccctttccatttgtttccgcacacaccttttgatcccgtcctccctagtgaagctaaattcctaggcagtgggacaggttttagacctattggaggaggcgcaggcggatccggcaaagaattccaggcggcactggggggtaatgtgccccgtgagcagtttactgtggtgatgttgacctatgaaagagaggaggtcttgatgaactctctggaaaggctcaacgggctgccatacctgaacaaagtggtggtggtctggaatagcccgaaactgccctcagaagatctgctgtggcccgatatcggagtgccaatcatggtcgttaggaccgagaaaaacagcctgaacaaccgattcctgccctggaatgagattgagactgaagccatcctctccatcgatgacgatgcccacttacgccatgacgaaattatgtttggatttcgcgtatggcgtgaagcccgtgacaggatcgtggggttcccaggtagataccatgcatgggatatcccacaccagtcgtggctctacaattccaactattcatgtgaactatccatggtacttactggcgctgcctttttccacaagtattacgcatatctgtactcctacgttatgccgcaggcaatccgggacatggtcgacgagtacatcaactgtgaggatatcgccatgaacttcctcgtgagtcatatcacccggaagccccctatcaaagtcacaagcaggtggacattccgatgtcccggttgcccgcaggccctgtcccatgacgactcccacttccacgaaaggcataaatgcatcaattttttcgtaaaagtgtatggctatatgcctctcctttacactcagtttcgagttgatagtgtgctgtttaagaccagactacctcatgacaaaacaaaatgtttcaagttcatctag
